United States Patent Application Publication US 2013/0332133 A1 - sequence listing, part 43

SEQ ID NO: 282891 - DNA, 730 bp, Unknown
  Bacterial polypeptide expressing nucleotide sequence isolated from the Sargasso Sea
atgaaatctatcgatacatttggaacattaaatcatctaaaaattgctaataataaatattttttttacgatttgaatattttagcaaaaaaattacaactaaatttaaattctttgccatttagtcttaaaattcttcttgagaatttaattagaaatgaagatggcaaatatattacttcagaaaaaattttaaatttttgtaaagtttttaacgaaaatttagaaaataatgagatatatttttatcccacaagagttttgatgcaagattttacaggagttcctgcaattgctgatttagctgcaatgcgatcagttttagataagatgaaaattgatccaaataaaataaatccattatcaagagttgatttagtaattgaccattctttaatggttgatgattataaaaataaaaattcattgagtataaatgttgaaaaagaattttttcgaaacaaagaaaggtacgaatttttaaaatggggacaggcttcatttaataatttttatttagtccctccaggcgcaggaatctgtcatcaagttaatttagaaaatatagctaaaactgtttggctagataaaaataaaaatttagctttcccagattctgttgttggaactgatagccacactacaatgattaatagtttgtctgtgcttggatggggagttggaggaatagaggctgaagcagcaatgcttggccaacctatttcgttaa

SEQ ID NO: 282892 - DNA, 831 bp, Unknown
  Bacterial polypeptide expressing nucleotide sequence isolated from the Sargasso Sea
agttggctacggttgcactacttgcattggaaattctggttccttaagtcgtgatataacaaatttaatagaaacaaatgatttattaataacctcagttttatcaggtaatagaaattttgaagggagaataagtccccatattaaggcaaattacttagcttctcctcctcttgttgttgcgtatgcaatagttggttcagttttgataaatctggatatagatcctctaggatatgatgagaagaataatcctatatatctgaaagatatttggccttcaaataaagaagttactgatgttatttctgccgtcattactccagaaatgtatagggagcaatactcttcagtttttgatggtggcaaagattgggaaaatattcaatcagtagataacttaacttataactgggacagtacttctacttatgttcaaaatcctccatattttgaaaatatgaaaaatgaacctgaaaaaatcaaagatatagtaggcgctagggctttagctattttaggggattctattactactgaccacattagtccagcaggttctattcttaaacaagctcctgcaggtaaatatttatcagacagacaagttcgagaagatgagtataattcttatggttcgagaagaggtaatcatgaagttatgatgagaggcacgtttgctaacaatagacttactaatgccatggtgcaaggagtaaaaggaggtattacaaaacaccaaccgtctcaaaatgaaatgagtatttatgatgcagctatgctttattccaaaaatgaaactccattgatagtttttggaggaaaagaata

SEQ ID NO: 282893 - DNA, 886 bp, Unknown
  Bacterial polypeptide expressing nucleotide sequence isolated from the Sargasso Sea
tgaaattgcatacaggcctgctagagttttattacaggattatacaggtatacctgctgttgcagatttagcggcaatgcgtgaagctataaaagataaaaacaaagaccctaatactgttaatcctttatcagccgtagatcttgttattgatcattctgttcaagtagatcaatctgcaaaacctgattcatttgataaaaacgttgaaattgaatttaatagaaatggtgaaagatattcttttttaaaatggggccagcaagcctttaataattttagaatagttcctccaggaacaggaatttgtcatcaggtaaacttagagtatttatcaaaagttgtttggagtgaagagtttcaaggtgaaaaatatctttttccagataccttagttggaacagatagtcatacgacaatggttaatggtctatctgttttaggatggggagttggaggtattgaagcagaagctggcatgttaggacaacccatttctatgttaattccagaagttattggatttaaaataaaaaataaaatgccagaaggaactacagctactgatttagttttaacagttgtaaaaatgttaagagacaaaggtgtagttggaaaatttgttgagttttatggggaaggaataaaaaatttgactttagctgatagagcaacaattgctaatatggccccagagtatggtgctacttgtggttttttcccaattgatgatgaaactttgaaatatttgaaattttctggacgagataatttaacagttaagatcgtagaggaatatgcaaaagcacagggcttatgggcaagtgaagaaattgaatttacagatacaataagtttagatatgtcaacaattgtcccaacaata

SEQ ID NO: 282894 - DNA, 775 bp, Unknown
  Bacterial polypeptide expressing nucleotide sequence isolated from the Sargasso Sea
gaaaaatacgcaaaagaacaaaacttgtgggcgagtgaagacattgttttcactgataaattgtctctagatatgtctacagtggttccaacaatttctggaccaaaaagaccacaagacaaagttcttttaacagatgcatcaaaaaattttataaaagtttttgaagatgtatgtaaaaaaactgagccaacagtagcaaaagttaaagatacagattttgagataaaagatggagatatattaatcgcagctattacatcatgtacgaatacctccaatccaaatgtattaattggtgcaggattgttggccaaaaatgcaattgaaaaaggtttaacagtaaaaccctgggttaaaacatcattagcacctggatcacaagttgttactgactatttagataaagctggtttaagtaaatacttagacgaattaggttttaatttagttggttatggttgcaccacatgtattggtaactctggacctttgccagataatattactgatgctgttaaagaaaataatttatatgcagtttcagttttgtctggaaatagaaactttgaaggaaggatttctccattagtaaaagcaaactatttagcttcacctcctcttgtagtagcttatgcaattgcagggtctatgagagtggatttgtataaagatccattaggaaaagataacaaaggtcaagatgtttacttaaaagatatttggccaaccaataaagagatagaggacactcttaaacaatctctaaacccag

SEQ ID NO: 282895 - DNA, 832 bp, Unknown
  Bacterial polypeptide expressing nucleotide sequence isolated from the Sargasso Sea
aaatctcttaaagtattacttgaaaatttattaagatatgaagatgaattaagtgttaataaaatccaaatagaagctgttaaagattggttaaaaacaaaaaagtctaaaactgaaattgcctatagaccagcaagagttctattgcaggattatactggtatcccagctgttgcagatcttgcagcaatgagggaagctgtaaaagataaaaataaagatccaaactcaataaaccccctgtcatcagttgatcttgtgattgatcattctgtgcaagttgatcaatctgctaaacaagattcatttgaaaaaaatgtagatattgaatttgaaagaaatggagagagatattcttttttgaaatggggacaacaagcttttaataattttagaatagttcctccaggtactggtatttgtcaccaggtaaatttagaatatttatcaaaagtagtttggtcagaaaaatttgaggatgatacatatctttttccagatactttagttggaaccgatagccatacaaccatggttaatggattgtcagttttgggatggggagtaggtggtattgaagctgaagctggtatgttgggccaaccaatttcaatgttaattccagaggtgataggttttgaggtaaaaaacaaaatgccagaaggtactacagcaacagacttagttttaactgtagttaaaatgctgagggacaaaggagtggtgggtaaatttgttgagttttatggtgaaggattaaaaaatttaacacttgctgacagagctacaattgcaaacatggcgcccgaatatggagcaacatgtggttttt

SEQ ID NO: 282896 - DNA, 745 bp, Unknown
  Bacterial polypeptide expressing nucleotide sequence isolated from the Sargasso Sea
attgtagaggcaatcgaaaaagaagatttatatgccgtatctgttttatctgggaacagaaactttgagggccgaatatccccacatataaaagcaaattatctcgcttcaccaccacttgttgtcgcttatgcattagctggtcatatggaggtagatttatataaagatcctctaggaaaagataaaaatggtaatgatatttatttaaaagacatttggccatcaaatcaggaaatagaaaaaactttaagagaagcgttaaatcctgaaatgtttgtcaaaagatattcaaatgtttcggaaggaccttctcaatggcaacaaattaaaacagaaaaaagtagtatttataattgggatcaaggttctacttatgtaaaaaaaccgcctttttttgaaaatttaccagacgaaccagagggttttaaaaaaataaatgatgcaagaccgttattaattcttggagatatggttacaactgatcatatttctcctgctggatctattcaaaaagaaagtccaacaggtgaatactttatggaacatcaaattttaccaaaagattataattcatatggatctagaagaggaaaccatgaagtaatgatgagaggaacttttgcaaatataagaataagaaacgagatagcgccaggtactgaaggcggttttacaaaattattcccagaaggaaaagtgatgcctgtctatgatgcagtagtagaatataaaaaaagaggaa

SEQ ID NO: 282897 - DNA, 815 bp, Unknown
  Bacterial polypeptide expressing nucleotide sequence isolated from the Sargasso Sea
agatccaaataccataaaccctttatcttctgtacatcttgtaatagatcactcagttcaagttgataaatttgcaagtgcaaattctttaaaagaaaatgtagatattgaattcaatagaaattctgagagatattcttttttaaagtggggacaacaagcatttaacaattttagaatagttcctccaggaacaggaatttgtcaccaggtaaacttagaatatttatcaaaagttgtttggtcagaaaaatacaaagatgaagattatatttttccagatactctagttggaacagacagtcatactacaatggtcaatggcttgtcagttttaggatggggagtaggaggaattgaagcagaagcgggcatgttaggtcagccaatatcaatgcttattccagaagtaattggttttgaattaactaataaacttccagaaggaactactgcaacagatttagttttaacagttgttaaaatgctaagagataaaggcgttgttggtaagtttgttgaattttatggggaaggtttaaaaaatctaactcttgcagatcgtgcaacaattgcaaacatggcgcctgaatatggtgcaacttgtggatttttcccaattgatgatgaaactttaaaatatttaaacttttcaggaagagataaacaaacagtagatattgttgaagcttatgcaaaagaacagggattatgggcaagtgatggaattgaatttactgatactgtttctttagatatgtcaaaagtggtcccaactatatctggacctaagagaccgcaagataaagttttat

SEQ ID NO: 282898 - DNA, 890 bp, Unknown
  Bacterial polypeptide expressing nucleotide sequence isolated from the Sargasso Sea
aggggagaatacatcctttggtaaaacataattttcttgcatcaccaccattggttgttgcatatgccattgcaggctcaacaatgctcgacttgaccaacgaacccttgggtaatgtcgaaggcaaagatatcttccttaaagatatttggccgagtcaaaatgaaatagaaaaaatcatcgaggaaactatagatccagttatgttcagtaaggcctatgaagattcaatacaaggagatgatgcatggaagaatctagaaacacctcaaggtgaaatctatgaatggcaagagaactcgacttatataaaaaaaccgccctactttgaatcaatgagcatggatattccaggaataaaaaccatacaaaatgcaagagcccttgcattacttggtgattctgtcaccactgatcacatttcaccggcgggtaatattgatccagaatcacctgcgggtagatatctaaaagataacggtgtagaaagaaaagatttcaattcatatggttccagaagaggcaatcatgaagtcatgatgagagggacatttgcgaatatccgtttgagaaataaactcgcgccaggaactgaaggtggctggacaaaactatcagaaaatgaagagccaatctcaatctttgaggcagctgaagaattcagatcaagcgatactgacttaatagtgctcgcaggcaaagaatatggtacgggctcctctagagattgggccgcaaaaggagtctctcttttgggtgtaaaagctgtgatcgctgaatcttatgaaagaatccatcgctcaaacctcataggcatgggtgtactgccattggagttcaataatggtgagtctgctgaatcgattggtcttaatggcttgagagtttga

SEQ ID NO: 282899 - DNA, 799 bp, Unknown
  Bacterial polypeptide expressing nucleotide sequence isolated from the Sargasso Sea
ttaaggttttcaggaagagatgaacatacagttattactgtagaaaaatacgctaaagagcaaggcctatggtcaagtaacaatattgaatttaccgatactgtttcattagacatgtctacacttgttccaactatctcgggacccaaaagacctcaagataaagttttattaaccgatgcagcatcaaattttgaaaaaatattttttgaaaatacaaaaagaaaaaaatttaatttagtagatgttcctaatgaggatttagttataagggatggaaatatattaatagcagcaattacttcatgtaccaacacatctaatcctaatgttttaattgccgcaggactgcttgcaaaaaaagcttgcgaatttaatatgattagtcaaccctgggttaaaacttcattcgcaccaggttctcaagttgttaccgattatttaaaaaaagcaggtcttgatatttatctagataaattaggttttaatttagttggttatggttgtacaacttgtataggaaattcaggacctcttaacaagaatatttctgaagcagtattaaaaaataatatttatggtgtttcggtcttatccggaaatagaaactttgaaggtagaatatcccctcttgtaaaggccaattatctagcgtctccacccttagttattgcatatgcattagctggttctatggatattgatttatacaaagattctttacaacatcttgctgatggaagagaaatatttcttaaagatatatggccaactaataaagaaatagaagatgtttgaa

SEQ ID NO: 282900 - DNA, 834 bp, Unknown
  Bacterial polypeptide expressing nucleotide sequence isolated from the Sargasso Sea
gctgactaaatatcttgatgagataggttttaatttagttggctatggttgcacaacttgtataggtaactccggacctttagaagcatgggtttctaatgaaataaaaagtaaaaaactaacagtttgttcaatactttctggaaatagaaattttgaaggtagagtacatcaagaagttaaagctaattttctagcatcaccaccattagtagtagcttttgctttactaggaaatattaatattgatattctaaatgactcttttggaatagataaaaatggaaatgagatctatttaaaagacttatggccaacatcagctgaaataaataatgttgtaaatcaatccttgtcacccgaaatgtttaaaaaaagatataatgaaatttatcaaggtgatcaaaactggcaatcgatacaaagctcaaaagatacaacgtattcatggaatctatccagtacttatataaaacaccctccttttttcgaaataaaggaagaccagtctattgaaaatataaatgaagctaggatcttagcattattaggcgatagtgtaactactgaccatatttctcctgctggtaatatcaaactcgaaagtcctgcagggacttatcttagtgatcgacaaattatttataaagattttaattcatatggttctcgaagaggtaatcatgaagtaatggttagaggaacttttgcaaatataagaattaaaaatgaaatactacctgatactgagggaggtgtaacaaaatcatttatatcaaataaaaaaatgtcaatttatgatgcagcaaaagaatatgccgataataatataaa

SEQ ID NO: 282901 - DNA, 671 bp, Unknown
  Bacterial polypeptide expressing nucleotide sequence isolated from the Sargasso Sea
ctggacctttgcagataatattactgaggctattaaagaaaataatttatatgcagtatcagtcttgtctggaaatagaaactttgaaggaaggatttctccattagtaaaagcaaactatttagcttcacctcctcttgtagtagcctatgcaattgctgggtctatgagagtggatttgtataaagatccattaggaaaagataacaaaggccaagatgtttacttaaaagatatttggccaaccaataaagagatagaggacactcttaaacaatctctgaacccagaaatgtttgtaaacagatattcaaatgtctctgaaggaccagagcaatggcaaaaaataaaagtagataaaggaagtatttataactgggaagaaaattctacttatgtaaaaaaaccaccattctttgaaaatttaccagatgagccagagggatttaaagaaataaaagatgcaagaccattattaattttaggagatatggtaacaacagaccatatatctccagctggaactatacaaaaagaaagtccaacaggtaattattttatgaaacatcaaattttaccgaaggattataactcctatggagcaagaagaggaaatcatgaagtaatgatgagaggaacgttcgctaatattagaattaaaaatgaaatgg

SEQ ID NO: 282902 - DNA, 598 bp, Unknown
  Bacterial polypeptide expressing nucleotide sequence isolated from the Sargasso Sea
tatggagcatcagattttacctaaggattataattcttatggagcaagaagaggtaatcatgaagttatgatgagaggaacatttggaaatataagaattaaaaatgaaatgttaactggaatcgagggtggatttacaaaattgtatcctgaagaaaaaataatgtcagtctatgatgcatccttggaatataaaaaaagaggtacagatttagtagttatagccggtaaagaatatggcactggatcttctagagattgggctgcaaaaggaacaaaactactaggtattaaagttgtaatagcggaaagttttgaaagaattcacaggtcaaatttagtcggaatgggcattcttccacttcaatttatagaaaaaactgatagaaaaaatttaaaattaattggatctgaattaataagtgttctagatatagaaagaggaattaacccaggagataaattgacagttgaaataaaatattcttcaggtgatattaaaaaaataaaaactttatgtagaatagacaccaaaaatgaacttgagtattatataaatggtggaattcttcagtatgttttaagaaatatgatttaa

SEQ ID NO: 282903 - DNA, 1167 bp, Unknown
  Bacterial polypeptide expressing nucleotide sequence isolated from the Sargasso Sea
attgaatacaggcgatattgtaattgctgcaattactagttgtacaaatacatctaatcctaatgtaatgatagcagccggtttggttgctaaaaaagcaattgatctgggtttagaagttaagtcatgggtaaaaacaagtttagctcctggtagcaaagttgtcagtgactatcttgataaatcaggcttaacacaatatctcgataaattaggttttaatacagttggttatggatgcactacttgcattggcaattcaggccctttagatgaatgggtatctgatgaaattaaatctaataatttaactgtttgttcagttttatctggaaatagaaattttgaaggaagagtgcaccaggaagttaaagcaaattttcttgcttcacccccacttgttgttgcatacgctattgcaggcaatataaatatcaatcttacaactgactccttgggtaaatctaaatctggagaagagatatttttaaaagatttatggccaacaaatacagagataaatcaaactttaagctcatgcttaacaccggagatgttcatagaaagatataaagaaatttataaaggtgataataattggaaatcaataaacagctctacaaatacaacatttgattggaatgatagtagtacttatatcaaacatccacccttctttgattcacaaaataaatttgagttaaatgatattaaagatgcaaaaatattagctttattaggtgatagtgtaacaaccgaccatatttcacctgcgggaagtatcaaagaagatagtccagcaggtatatatttaacagacagacaaattaattctaaaaattttaattcttatggatcaagacgtggtaatcatgaaattatgatgagaggaacatttgcaaatataagaatcaaaaatgagattttaaataatgttgagggtggtttcactaaatcttttctctcaaataaacaattgtcaatttatgatgcagctcaagaatatataaataataatattgacacagtaataatagctggcaaagaatacggaacaggctcctctagggactgggcggctaaaggtacaaggcttttaggtattaaagcagtaattgctgaaagttttgagagaattcatagatcaaatttaattggtatgggagt

SEQ ID NO: 282904 - DNA, 1264 bp, Unknown
  Bacterial polypeptide expressing nucleotide sequence isolated from the Sargasso Sea
agagcaactatagccaatatggctcctgaatatggtgctacttgtggtttttttccaattgatgaagaaacattaaaatatctaaaattttctggaagagacgatgaatctgttaatgtagttgaaacatacgcaaaagaacaagggctatggactagtgatgatattatttttacagacactttatcactagatatgtcactagtagttccaacaatttctggtcctaaaagaccccaggataaagtattattaacaaatgctgcagaaaattttaaaaatgtatttgaaaatgaaacaaacagaaaaaaaccaataatttccaaagttgaaggtgaaaattttaaaattaaagatggggatgttttaattgctgcaataacatcttgtacaaatacatctaatccaaatgttttaattggtgcgggtttgttagcaaaaaaagcagttgaaaaaggattaaaaacaaaaccttgggtaaaaacttctttagctcctggatctcaagttgttacagattatctagaaaaagctggattaaattcatacctagataaaatgggatttaatcttgttggatatggttgtacaacctgcattggtaattctggccctttgcctgaaactattactgaagcagtaaaaaaagacaatatttatgctgtttcagttctatctggaaatagaaattttgaaggaagaatttctccattagtaaaagcaaattatttagcttcacctccgttagttgtagcttatgcaattgctggatcaatgaatttagatttatataaagattctttaggtaaagatgaagacggaaacgatatttttcttaaagatatatggccaagcaaccaggaaattgaagaagttttaaaaaattctttaaatcctgaaatgtttattaatagatattcaaatatttcggatggtccagaacaatggcaaaaaataaaaactgaagcaagtagtatttataattgggatgataattctacttatgtaaaaaaaccacctttctttgaaaacttatctgacgagccggaaggttttaaagaaataaaagatgcaagaccattgcttattctaggagacatggtaaccacagatcatatttctcccgcaggtacaattcaaaaagaaaatcctacaggagaatattttatgcatcaccaaattttacctaaagattacaattcatatggagcaagaagagggaatcacgaagtaatgactagaggaacatttggaaatgcataaa

SEQ ID NO: 282905 - DNA, 2080 bp, Unknown
  Bacterial polypeptide expressing nucleotide sequence isolated from the Sargasso Sea
tatgccaattatcgtgggacagaatagtgtcgggtcaaggaaaacgttagatataaatgggaagtccatagcctattactcaattcccgaggctcaagaaaaaggccttggggatttctctcgtattcctgctgcattaaaggttgtacttgagaatatgctgcgttttgaggatggcaatacagttacggtggatgacatcaaagccttcgccgactgggctcagcaaggcggaaaaaacccgagagagatcgcgtatcggcctgctcgcgtactgatgcaggattttactggagttccagctgtcgtggatttggcggctatgcgtgatgggatagtgggcctaggaggagatgcgcaaaaaataaatcctttaaaccccgttgatttggtgattgaccattcggtaatgattgatgagtttggaaaccctcaagctttccagatgaacgttgatcgagaatacgaaaggaacatggagcgctacaccttcctcaagtggggtcaaagcgcattcgataattttcgtgtagtacctccaggaacaggtatctgtcatcaggtgaatctggagtatctcgcgcagaccgtttggagcgatgttgatcaggacggagagcaggtggcctatccagatactctggtaggcactgacagtcatacgaccatggtgaacgggatggccgtgctcggttggggagtgggaggtattgaggcagaagcagctatgcttggtcaacccgtgtcgatgttgatcccggaagtggttggctttgagttaactggagcgatgtcggagggaacaaccggaaccgatctcgtgttaaaggtcgttgagatgctcagagaaaagggggtggttgggaagtttgttgagttttatggttccggcttggattctcttcctttggctgatcgggcaacaattgcgaatatggcgcccgaatacggggccacttgtggtttcttcccgatagacgatgaaacacttcgatatcttcgaaatacaggacgagatgaagatcgcgttgccttggtggaagcttatgcgaaggagaacggattctggaggtcgaaagattatttgcccgtctacacagatacccttcacctcaatatggattctattgttccggcgatctccgggcctaaaaggcctcaagattatgtcgcgttgaatgaggcgcaaggtgccttcagagctgaaatgaaagataccttcgatcgaccgttgggaaagaaggtccccgtagaaaatgaagagtataaaatggagtcaggcaaggtagtcatagcgtcaattacctcttgcactaacacgtcgaatccttacgtgatgatttcggctggcctagtcgccagaaaggcagcagcgctaggtcttcaaagacagccatgggttaagacttcgcttgctccgggatctcaagtggtgagtgcgtatctcgaagcatctggtctccaggaagatctggataaagttgggtttaatttagtcggatatgggtgtactacctgtatcgggaactcgggaccgatacaaagtgaaatcagtcaagcgattgcagacggtgaccttgtggcaaccgcggttttgtctggtaacagaaattttgagggaagaatctctcccgatgttcgggcgaactacctggcttcgccgccgcttgtagtggcctacgcgctggctggaacgatggatatcgatttgattaatgaaccgatagggtcagacagttcaggttctccagtttttctgaaagacatttggccaagctcaaaggaggttgctgaattggtggaaagcactgtgacgacagaagcgtttaattccaagtatgcggatgtttttaaaggagatgaaaagtggcaatcggtggagactacagcgagtcaaacttatgattggcctatttcttccacctatgtccagaaccctccgtatttccaaaacatgggaaaagagcccggtgtaattaataatattgaaaatgccagggtgcttgcggtgctgggcgacatgattacaactgatcacatcagccctgcgggttcctttcaatcaaccactcctgccggg

SEQ ID NO: 282906 - DNA, 911 bp, Unknown
  Bacterial polypeptide expressing nucleotide sequence isolated from the Sargasso Sea
aaataaagagatagaagatactttaagagaagcattaaatgcaaaaatgtttgttgaaagatactccaatgtttctgaaggaccagctcaatggcaaaaaattaaaaccgaaaaaagtagtatttataaatgggacgaaggatcaacatatgtaaaaagaccacctttttttgataatatgccagatgagccagagggatttaaaaaaattaaagatgctaggccattattaattttgggtgatatggtaactacagatcatatttctccagcaggttctattcaaaaagaaagtccaaccggtcaatattttatggaacatcaaattttaccaaaagattataattcttacggatcaagaaggggaaatcacgaggttatgatgagaggtacatttgctaatataagaattagaaatgagatagcgccaggtaccgaaggcggttttacaaagttatttccagaaggaaaggtcatgacagtttatgatgcggtagtagagtacaaaaaaagaggaaccgatttagttgtaataggtggaaaagaatatggaactggttcatctagagattgggctgcaaaaggtactaaattattaggtattaaaacagttatagctgaaagttttgaaagaattcatcggtctaatcttattggaatgggaatattgcctttgcaattcgtggatggaatgaatagatcaaatttaaatatcaaaggatctgagttaatcagtgtattaaatatagaaaaaggtctatctccttcggataaagtagaattagaaataaaatacatatctggcgatataaagaaaattaaaacattgtgcagaatagatactaaaaatgagttagaatactataaaaatggtgggattctacaatatgttttaagaaacatgatttaat

SEQ ID NO: 282907 - DNA, 963 bp, Unknown
  Bacterial polypeptide expressing nucleotide sequence isolated from the Sargasso Sea
tatggaatctttaaattcgttcaattcttgtcagaatataactattgataataaaaactatagatattttgatttaaacatacttgctaattcgtatggatttgatttatctaaaattcctaattccattaagattatccttgaaaacttaattagaagtgaggacggaaagtctgttactaaagaaatgatctctaacttatgtgagaagattaatgatactaaacataatttcgaaattgcattttctccaacacgagttcttatgcaagattttacaggtgttccagcagttgctgatctagctgcaatgcgggatgcattaaaggataaaggcattgatcctaataaaattaatccattatcaagggtagatcttgtaatagatcactctgtaatggtagaccattttggaaacgacaaagcttatgaagaaaatgtaaaaaaagaatttgaaaggaacaaagaaagatatgaatttttaaaatggggtcaacacgcttttgataatttttatttagtacctccaggtggtggaatatgtcatcaggtaaacctcgaaaatattgcaaccacaatttggtcaagtactattaatgagtataattatctttttcctgattcagttgttggaactgatagtcatactacaatggtaaacgctctttcagttctaggttggggggttggtggtatagaggctgaagccgcaatgttaggtcaacctatatctatgaatattccaaaagttgtaggcttcaagttagaaggtcaattgcaagaggggattactgcaacagatttagttttaaatataactgaaatattaagaaaacatggggtagtgggaaaatttgtagagttttatggtaagggtttaaataatttatctctttctgataggtcaacaatttcaaatatggctccagagtacggtgccacatgtggttttttttcaacaga

SEQ ID NO: 282908 - DNA, 1284 bp, Unknown
  Bacterial polypeptide expressing nucleotide sequence isolated from the Sargasso Sea
catgaaaaatataaattcttttaatactgaaaatataattgaaataaataatcaaaattttaaatattttgatttgaataaattagcggaatactttgatattgatcttaataaaattccaatatcaattaaaataataattgaaaatcttcttaggaatgaagatggagagaatattagcaaagagatgatttctaatttgatcccttacttaaaagaaaaaaataaaaaagatgaaaaaattgaaatagcttttttcccaacacgtgttttaatgcaggactttacaggtgtcccagctgtagctgatcttgcagcaatgcgaaatgcattaaaattaaaaggaattgagccaaaaaaaataaacccactttctagagtagacctagttatagaccattccgttatggttgataattataaagacaaaaatgccttgaaagaaaatgtaaaaaaagaatttgatagaaataaagaaagatatgaattcctaaaatggggacaaagttcatttgataatttctatcttgtgcctccaggagcaggaatctgtcatcaagtaaatttagaaaatatagctaaaactatatggctgaagaaaattaataatcaaaattatttattcccagactctgttgtaggaactgatagtcacacaacaatggttaactctctttcagttttaggatggggggtaggaggaatagaagccgaggcagctatgctaggtcaggcaatttcaatgaatattccagatgtcattggttttgagctaaggggatcgcttagggaaggaattacagcaactgatttagttttatcaattaccaaaattcttagagacaaaggtgttgtcggaaagtttgtagaattttatggaaaaggtttaaagaatttatcattagctgacagagcaacaatttctaatatggcacctgaatatggtgcaacttgcggattttttccaacagatgatgaaactattaattatcttaaactaactggcaaagaaagtggacatctaaatatcgtagaaaaatattcaaaaaaacaaaaactttggtcagatgaaagttatgcccctaatttttctgacaaaatattattagacttagatactgttgagcctactcttgctggtccaaaaagacctcaagataaaatacttttaaaagaagtcccaaatgaatttagtaagatagataacaaaaaaattctaaacaaaaataaattaaatacaggtgatattgttattgcagctattactagttgtacaaatacatc

SEQ ID NO: 282909 - DNA, 1153 bp, Unknown
  Bacterial polypeptide expressing nucleotide sequence isolated from the Sargasso Sea
caacgaagacggccagaccgtgcagccgcaggatctgcaagccatggtcgactggctcgaccagcgcgcctccgaccgcgagatccagtaccgcccggcgcgcgtgctgatgcaggacttcaccggcgttccggcggtggtcgacttggctgccatgcgcgacgccatggccaaggccggcggcgacccgcagcggatcaacccgctgtcgccggtggacctggtcatcgaccactcggtgatggtcgaccgctacgcctcgtccagcgccttccacgacaacgtcgagctggaaatgcagcgcaacggcgagcgctacgcctttctgcgttggggccagcacgccttcgacaacttcagcgtggtgccgccgggcaccggcatctgccaccaggtcaacctcgagtacctggcgcgcaccgtgtggaccaaggaggaagacggcgtcaccctcgcctaccccgacaccctggtcggcaccgactcgcacaccaccatgatcaacggcctcggcgtgctcggctggggcgtcggcggcatcgaggcggaagcggccatgctcggccagccggtgtcgatgctgattcccgaagtgatcggcttcaagctcagcggcaaactgaaagaaggcatcaccgccaccgacctggtgctcaccgtcacccagatgctgcgcaagaagggcgtggtgggcaaattcgtcgagttctacggcgacggcctggccgacctgccgctggccgatcgcgccaccatcgccaacatggcccccgagtatggcgccacctgcggcttcttcccggtggacgagatcaccctcggctacttgcgtctgtccggccgtccggatgccaccgtgcagctggtcgaggcctacagcaagacccaggggctatggcgcgagccaggcgccgagccgctgttcaccgacagcctgagcctggatctgggcagcgtcgaagccagcctggccgggcccaagcgcccgcaggaccgcgtctccctgggccaggtcagccaggccttcgacgacttcgtcggcctgcagctcaagcccaccgccaaggaagagggtcgcctgctcagcgaaggcggcggcggtacggccgtcggcggcgacaagcagagcggtgaagtcgactatgaggacgac

SEQ ID NO: 282910 - DNA, 1161 bp, Unknown
  Bacterial polypeptide expressing nucleotide sequence isolated from the Sargasso Sea
ctgggcctttagataaagaaatttctgagacgatacataaagaaaatctttatgcggtttcagtattgtcaggcaacagaaacttcgaaggtagaattaatccagatgttaaagcaaattatttagcatcaccacctctagtagttgcttatgctttagcaggtaatatgcatcatgatctttataaaaatccattaggtaaagatgaaaatggaaaagatgtatttttaaaagatatttggccttcaaataaagaaattgaagagttgatgctaaaatctattaatgccgatatgtttgttaaaagatactcgaacgtttctgaaggaccaaaagaatggagttctattaaaacagatcaaagtagtatttataactgggaggaaagctccacttacgtaaaaagaccgcctttttttgataacttacctgacaagccagaaggatttaagaaaatcaatgatgcaagaccacttttaatattaggtgatactgtaactaccgatcatatttccccagctggatctattaaaaaagatagcccaactggcgattactttatgaaacatcaggttcagcaaaaagattttaattcttacggggctagaagaggcaatcatgaagttatgttgagaggaacatttggaaatattaggattagaaatgaaatggctgcaggtaccgaaggcggttttacaatattacaaccagatggaaaacagatgagcgtgtatgaagctgcaatggaatataaaaaaagagggacaaatttagttgtagtggctggtaaagaatacggaacaggctcttcaagggattgggctgcaaaaggaacaaaattattaggaataaaagctgtaatcgctgagagttttgagaggatacatagatcaaatctagtaggaatgggaattttaccacttcaatttaaagagggtttcgatagaaaaaaactcaacattaaaggcactgagttatttactattgttgatattgaaaaaggaataaatcctggagcagaagtaaattgtgaaattaaatatgcagatggttcaagcaaaacaattaaactcctatcaagaatagatacagaaaatgaaattgagtattataaaaacggtggaattctccaatacgttttaagaaatatgcttaattaaa

SEQ ID NO: 282911 - DNA, 1005 bp, Unknown
  Bacterial polypeptide expressing nucleotide sequence isolated from the Sargasso Sea
tttgcttgagggtaaaaagaaatattacgatataaaatctttagctagtgcaaataaagtagatttaaataagatcccgttttcaataagaatattgattgaaaatgttttaagatcttatgataaaaatatatctaacgaaactcaattagaacaagttcttaagtggaataaggatactgttcctgataaagaatttccatatatgcccggcagagttgtattacaagattttacaggtgttcctgttgtagttgatttagctgcgatgagagatgctgtatctgatcttgatattgaaccttcaataattaatcctatagttagatctgacttggtcattgatcattctgttcaggttgattcttttgcgcaaaatgattccttaaatatgaatatttcgagagaatttgaaagaaatcaagaaagatataaattattaaagtgggctcaaaacgccttttctaactttttagttgttcctccaggtactggaattgtgcatcaggttaatttagaaaatcttgctgaagttatattagcatcaaatgatgatgataatatttttcctgatacatgtgtaggaactgattctcatacaactatgataaatgctgtaggtgttttaggatggggagttggaggaattgaagccgaagctgtgatgttagggcaaccttattatatgcaagtgccagaagttgtgggagttaaattatttggggatattaatgaaggaactactgctacagatattgttttagctatagtagaaaaattgagagaagttggagttgtagaaaaatttgtggaattttttggtcctggcttaagtcaattatcattaaccgatagagctacaatttctaatatggccccagagtatggagctacctgtggatttttcccagtagatgatagaactattgattatctaatgatgacaggaagagatgaaaaaattattgatcaagtagtaaattacactcaatcaaatggattatt

SEQ ID NO: 282912 - DNA, 1302 bp, Unknown
  Bacterial polypeptide expressing nucleotide sequence isolated from the Sargasso Sea
tatgttgtcagtagatagttttaatactctagatcaattttcaaataatggaaaacaatacaatttttttaatttatcaaaattagaagatagttttcccaaaataaaaaatctacctaaatccaaaaaaatacttattgaaaacttgttgagattagaagatggaaaagatgttaataaagatcttatcgaaaatgtattagaaaatcctgaaaaaaaacacgaaatattttttcttccatcaagagtattaatgcaagacttcactggagttcctgcagttgcagatttagcagctatgcgtgatgctgtttcaaaaaatggaggagatccatcaaaagttaatcctatgtcgcaagttgatttagttatagatcattctgtaatggttgattattttgcaagcccaaatgctttccaaaaaaatgtagacatggaatttggaagaaatgcagagaggtatgaatttctgaaatggggacaacaagcttttaaaaattttagagttattcctcctggcacgggaatatgtcatcaagttaatttagaatatttggcacaagtggtgtggagcagagaaattaatgaaaaaaatttcttataccctgacactttagttggaactgatagccatacaacaatggtaaatgctctaggagttctaggttggggagtaggagggattgaagctgaagctgcaatgcttggtcaatctatttctatgctgcttcctgaggttattggttttgaagtatcaggaaaaatgaaagaaggtgttacagcaacagatttagttttaacaattgttcaaatgctacgagaaaaaggagttgttggaaaatttatagaattttatggcgatggcttaaaaaatttatcactcgctgacagagcaactattgccaatatggcaccagaatatggagcaacttgtggtttttttgcagttgatgaagagactatcaagtacttgaagttgacatctagggactccgatctgataaatactgttgaaaaatataatagaattcaaggtttgtgggccgatgacacatgtaattataatgataccgttcatttaaaactagaaaatgttcaagcatcattagcagggccaaaaagacctcaagatagaattaatttagaaaaagtgaatttaaactttaaagaattttcaaaaaataaacccgttgaaaaagaaattaaaaatcacaattataaaatgcaagatggtaacgtagtaatagctgctattacttcatgtactaatacctctaaatcagatgttttagttgcagcaag

SEQ ID NO: 282913 - DNA, 718 bp, Unknown
  Bacterial polypeptide expressing nucleotide sequence isolated from the Sargasso Sea
aatggtgaatgcacttggtgttctaggttggggagtaggaggaatcgaagctgaggctgctatgcttggccaatctgtatcaatgcttttaccagaagttgttggttttgaagtatcggggataatgaaagagggtgttacagcaacagatctagttttaacaattgtagaaatgcttcgaaaaaaaggagttgttggaaaatttgttgaattctacggtgatggtttaaagaatttatcactcgctgacagagcaactattgccaacatggctccagaatatggagcaacttgtggattttttgcagttgataatgaaactatcaagtatttgaagttgacatctagaggctccgatctgataaatactgttgaaaaatataacagaattcaaggtttatgggccgatgacacatgtaattataatgataccgttcatttaaaactagaaaatgttcaagcatcattagcagggcctaaaagacctcaagatagaattaatcttgaaagcgtgaatttaaattttaaagaattttcaaaaaacaaacctgttgaaaaagaaattaaaaatcacaattataaaatgcaagacggtaacgttgtaattgctgctattacttcatgcactaatacctctaatccagatgttttagttgcagcaggcttagtagcaaaaaaggcttgtgaattaggtctacaagtaaaaccttggggttaa

SEQ ID NO: 282914 - DNA, 1225 bp, Unknown
  Bacterial polypeptide expressing nucleotide sequence isolated from the Sargasso Sea
tttgaataaatatttagaccaacttggttttcatctagttggttatggatgcactacgtgtataggaaactcagggccacttgataaagatattgctgagtgtatctcaaaaaatgatttaacagttgcttctgttctttcaggtaatagaaattttgaaggcagagttaatccacacgtaaaagctaattatcttgcctcaccacctttagttgtagcatatgctatagcagggtctgttcgtataaatttaataagtgatccaataggtattgacacagatggtaatgaagtatttttaaaagacatttggcctaacaatagcgaaatccgaaatgttgttgaaaaaaatgtatcacctgaaatgtttaaaaaacaatactctaatgctttagatgggccaaaagaatggcaaaaaataaatacttctacgggagacctgtataattggaattcttcatcaacttacgtacaaaaacctccgttttttgataatgaatcaaatgatgataaagagatcaagccaattaagaatgcaagacctttattacttctaggcaatagtgttacaacagatcacatttcgcctgcaggggctattaaagttgatagccctgctggcaactacttcatggaacggcaaatacgtcaaaatgattttaattcatatggtgctagaaggggcaatcatgaagtaatggtaaggggtacttttgccaatataagaattaaaaaccaactgttatcaaacgttgagggcggatactcaattttagaacctgataagaaaaaaatgagtgtttatgatgttgctatggagtatgcaaaaaggtctgaaaatgttgtggtttttgcaggagaagaatacggaactggatcatcacgtgattgggctgcaaaaggtacgaagttattaggtattaaggcagttattgctgaaagttttgaaagaatacaccgatcaaatttggttggaatgggagttctgcctatacaacttaaaagtcacacaataaatgatttaaatattcaatcgtctgatttaataaatataaaacttactgaagacctgaagcctttacaagaattagaagtcattattcaaagcaatgtgagaaatataaaaatagattgtattttaagaattgatactatcaatgagctacaatattataaagcagacggcatattaaattttgttttaaaaaatattctaaaaaattaa

SEQ ID NO: 282915 - DNA, 709 bp, Unknown
  Bacterial polypeptide expressing nucleotide sequence isolated from the Sargasso Sea
atgaaaccaggatcaaaaaatagttttaactcactagctaaaatttcaataaacgatatagactataaatattattcattaaaagaagcagaaaaaaatggattagatggaatatcaaaacttccgaaatcaataaaagttttattagaaaatctattaagatatgaagatgatttaagtgttaataaatctcaaattaaagcaatcaaagattggttaataaataaaaaatcaaaaactgaaatagcctataggccggctagagttttgctgcaggattatacgggaataccagctgtagcagatttggcagcaatgagagaagcggttaaggaaaaaaataaggatccaaaaaccataaaccctttatcaacagttgatttggtaatagatcattctgtacaagtagataaatttgctaataaaaattctctgaaagaaaatgttgatatagaattcgaaaggaattccgaaagatattcattcttaaaatggggacagcaagcatttgataattttagaattgttcctcctggaactggaatatgtcatcaagtaaatttagaatatttagccaaagtagtttggacagaaaaatatgaaaatgaaaattatatttttccagatacacttgttgggacagatagtcatacaacaatgattaatgcattatctgttttgggatggggcgttggaggtatagaggctg

SEQ ID NO: 282916 - DNA, 1207 bp, Unknown
  Bacterial polypeptide expressing nucleotide sequence isolated from the Sargasso Sea
atgttgtcagtagatagttttcaaactctagatcaattttcccaaaatggaaaaaaattcattttctataatttatctaagttggaggataattttcccaaaattaaaaatctacctaaatcaaaaaaaatacttatagaaaatttactaagattagaagatggaaaagatgtcaataaagatcttatcgaaaatgtattagaaaatcctgaaaaaaaacatgaaatattttttcttccatcaagagtattaatgcaagattttactggtgtgcctgctgttgcagatttagcagcaatgcgtgatgctgtctcaaaaaaaggtggcgatccatcaaaagttaatcctatgtcccaggttgatttagtaattgatcattctgtaatggttgattattttgcaagcccaaatgctttccaaaaaaatgtagatatggaatttggaagaaatgcagagagatatgagtttttaaaatggggtcaacaagcttttaaaaattttagagttattcctcctggtacaggaatatgccatcaagttaatttagagtatttagctcaagtagtctggagcaaaaaaattgatgaaaaagatttattataccctgacacattagttgggacagacagtcatacgacaatggtaaatgctctaggtgttctcggttggggagtaggaggaattgaagctgaggctgctatgcttggtcaatctgtttctatgcttttacctgaggttgttggttttgaagtatcggggaaaatgaaagaaggtgttacagcaacagatctagttttaacaattgttcaaatgcttcgagaaaaaggagtagtaggaaaatttgttgaattttacggtgatggcttgaagaatttatcacttgctgacagagcaactattgccaatatggctccagaatatggagcaacttgtggtttttttgcagttgatgaagaaactatcaagtatttgaagttgacatctagaggctccgatctgataaatactgttgaaaaatataacaaaattcaaggtttgtgggctgatgacatatgtaattataatgataccgttcatttaaaactagaaaatgttcaagcatcattagcaggaccaaaaagacctcaagataggattaatttagagaaagtgaatttaaactttaaagagttttcaaaaaacaaacccgttgaaaaagaaattaaaa

SEQ ID NO: 282917 - DNA, 1235 bp, Unknown
  Bacterial polypeptide expressing nucleotide sequence isolated from the Sargasso Sea
tctttgtcaaaagctgagtctagtggtttagaaggtatttcaaaattgccaaaatcacttaaagttctacttgaaaatcttctaaggtatgaggatgatatatcagttaccaaaaatcaaatcgaagcaataaaagattggcttaaaagtaagaaatctaaaacagaaatagcatataggcctgctagagttttacttcaagattatacaggaataccagcggttgctgatttagctgcaatgagagatgcagttaaggaaaaaaataaagatccaaatacaattaatcctctttcaacggtagaccttgttattgatcactcagttcaagtagatcaatctgcgaattcagactcatttgataaaaatgtagaaattgaatttgataggaatggagaaaggtattcttttttaaagtggggtcaacaagcatttaataatttcagaattgtcccacctggtacgggaatttgtcatcaagtaaatttagaatatttatcaaaagtagtatggagtgaggaatataaaggggataaatacctctttccagatacattagtaggtactgatagtcatacaactatggtaaatggtctatcagttttgggctggggtgttggcggtattgaagctgaagctggtatgctaggtcaacctatctcaatgttgatcccagaagttatagggtttgaagtaaaaaataaaatgcctgaaggaactacagcgaccgatttagtcttgaccattgttaaaatgttaagagataaaggggtagttggcaaatttgttgaattttatggagatggattaaaaaatttaactttagcagatcgtgccacgattgctaacatggctcccgagtatggtgctacttgtggtttttttccaatagatgatgaaactttaaaatatttaagattttcaggaagagatcaatttactattaaaattgttgagaaatatgcaaaagttcaaggcttatgggcaagcaacgatattgagtttactgatacgttaaccttagatatgtcatctattgttccaacaatttctgggcctaaaagaccacaagataaagtattattaactgatgcttcttcaagctttaaaaaaagttttttagaaattacaaaaagaaatgattttttatcttctaaagtatcagaaacagaatatgaaattaaagatggatcaattttaattgcagctataacttcctgtactaatacatctaa

SEQ ID NO: 282918 - DNA, 1244 bp, Unknown
  Bacterial polypeptide expressing nucleotide sequence isolated from the Sargasso Sea
cctcgtgtacaatacatctaatccaaatgttttaataggagcaggtttgttggcaaaaaaagctgtcgagcttgggttaaaaacaaaaccttgggtaaaaacctcattagcgccaggatcgcaagtagtaactgattatttggaaaaagcaggtcttaataaatacctagatgaattaggatttaatttagttggctatggatgtacaacgtgcattggaaattcaggtccattacctgataatattgtagaagcaattgaaaaagaaaatatatatgctgtatcagttttatctggcaatagaaattttgagggacgtatatctccgcatataaaagcaaattatttggcatcaccacctcttgttgttgcttacgctttagctggccatatggaagtagatttatataaagatcctttaggaaaagataaaaatgataaagatatttttttaaaagatatttggccttcaaataaagaaatagaagatactttaacagattcattaaatgcaaatatgtttgttgaaagatactccaatgtttctgaaggaccaattcaatggcaaaaaattaaaactgaaaaaagtagtatttataattgggatgagggatcaacttatgtaaaaagacctcctttttttgataatatgtccgatgaacctgagggatttaaggagattaaagatgccagaccattattaattttgggtgatatggtaacgacagaccatatttccccagcaggatctattcaaaaagaaagtccaaccggcgaatattttatggaacatcaaattttaccaaaagattataattcttatgggtcaagaagaggaaatcacgaagttatgatgagaggtacgtttgccaatataagaattagaaatgagattgcaccaggtaccgaaggtggttttacaaagttgtttccagaaggaaaagtaatgtcggtttataatgctgtggtagagtataaaaaaaggggaactgatttagttgtaataggtggaaaagaatatggaacaggctcatctagagattgggcagctaaaggtaccaaattattaggaattaaaacagttatagccgaaagttttgaaagaattcatagatctaatcttattggaatgggaattttacctttacaattcataggtggaatgaatagatcaaatttaaatttaaaaggatctgaattatttagcgtattaaatatagaaaaaagggctatctccatcagat

SEQ ID NO: 282919 - DNA, 1174 bp, Unknown
  Bacterial polypeptide expressing nucleotide sequence isolated from the Sargasso Sea
tatgtacgacagctttaagacaaaaaaaacactaaaaataggaaaaaaaacctatacctatttcagttttaaagcagccgaaaaaaatggtcttaaaaacatatcctcgcttcctttctcaataaaaattcttctagaaaatttgatcagaaatgaggacggttcaacagtagaattaggcgatataaaagaatttgaaaaatggaagtctgataaaaaagtaagtaaagaaataaattttagacctgcacgtgttctgatgcaagattttacaggcgttccagcagtggttgatcttgcatcaatgagggcagcaataaaaaatgaaaatggagatcctaaaaaaattaatcctctatcaccggttgatcttgtaatagaccactctgttatggttgataagtatggctcagcaactgcccacaaagcaaatgttgatcttgaatacaaaagaaatattgaaagatatgaatttttgagatggggacaaaaatctttcaataattttagagtggttccacctggtacaggcatctgtcatcaagtaaacctagaataccttgctaaaactgtttggtttgaaaagagaaaaataaaaaataaaaatatgaccttagcttatcctgatactgttgttggaaccgatagtcataccacaatgattaacggcttatctgttcttggatggggagttggtggaatcgaggcagaggcagcaatgttaggtcagccgatctctatggttgttcctgaagttataggatttgaaataaaaggtaaaattaaagaaggtatcacagctactgatctggtattaacaattactgaacagttaagaaaaaaaggcgtagttggaaaatttgtagagttctatggtaaaggacttaaagagatgtctgttcccgatagagctactatatcaaatatggcaccagaatatggtgcaacatgcggtttctttccaattgaccaagaaacaataaattttttaaaagttagtggacgacctttggatgagatcaaacttgtcgaaaaatactctaaagctcagggactttgggaggattataagaaaaataaaagagtttattctgaaacaatggaattagacttatctagtatagaaccaagtttagctgggccaaaaagaccccaagataaaatcttatttatc

SEQ ID NO: 282920 - DNA, 1677 bp, Unknown
  Bacterial polypeptide expressing nucleotide sequence isolated from the Sargasso Sea
tttcaggaagagatcaacatacagtcaacattgttgaaaaatatgctaaagaacaaggattatgggcaagtaatgaaatagaatttactgacattatatctttagatatgtccacagttgtaccaactatttcaggacctaaaagacctcaagacaaagttcttttaacagatgctcccagttcgtttcaaaaagtattgcaggaagctacaaataaaaatgaaaagtcaatttcgaaagtatcaaatacagattatgaaattaaagatggctcaatattaattgcggcaataacctcttgtacgaacacttctaatccaaatgtcttaattggagctgggctattagctaaaaaagctattgaaaaaggtttggaggttaaaccttgggtaaaaacttctttagcacctggatctcaagtagttacagactatttggcaaaagctggattaaacacttatttagatcagcttggctttaatttagttggttatggctgcacgacttgcattggaaattcaggaccacttccagaaaatattgtagaagcaatccaaaaagaaaatatttatgctgtttcagttttatctggaaataggaattttgaaggaagaatttctccgcatataaaagctaactatctagcttcacccccactagttgttgcatatgcattagcaggacatatggaagttgatttatacaaagatccattaggaaaagataaagaaggaaaggatatatttttaaaagatatttggccttcaaataaagagatagaagatactttaaaagattcacttaatgccgagatgtttataaaaagatactcaaatgtttctgagggtccaactcaatggcaaaaaattaaaactgataaaagcagcatctataattgggatgagggatcgacatatgtaaaaaaacctccgttttttgactcgttgccagataaaccagaaggatttaaagaaattaaggacgcaagaccattattaattttaggtgatatgattactactgaccatatatcgccagctggcagtattcaaaaagatagtccaactggtgaatatttcatggaacatcaaattttacctaaagattataattcatatggctcaagaagaggtaaccatgaagttatgatgcgaggaacatttgcaaatataaggattagaaatgaaatggctccaggtacagaaggtggttttacaaagttatatccagaagaaaaagttcttcctatctatgatgcagttgttgaatataaaaaaagaggaacagatttagttgtaattggtggaaaagagtatggaactggatcgtctagagattgggcagctaaaggaacaaaattacttgggataaaagcagtaatcgcagagagttttgaaagaattcaccgatctaatttgattggaatgggaatattaccgttacaatttatccaagatgtaaatagaaaaaatctaaaattaattggttctgaattaattagtgttctaaatatagaaaagggcgttaaaccctcagatgaagtgacagtcgaaattaaatatgtttctggcgaaataaagaaaattaaaactttatgcagaattgatacaaaaaatgaattagagtattataaaaatggaggtattctgcagtacgttttaaggaatatgatttaat

SEQ ID NO: 282921 - DNA, 967 bp, Unknown
  Bacterial polypeptide expressing nucleotide sequence isolated from the Sargasso Sea
tatgaaaccaggaacaaaaaattcttataactcgctatctgaaataaagattgatgataaaaattataaaattttttctcttaatcaagcggaaaataatggcttaagtggtatttcgaaattgccaaaatcacttaaggttcttttggaaaatcttttaagatacgaagatgatttatcagttactaaaagtcaaattgaagcaataaaagtttggcttcaagaaaaaaaatctaaaacagaaatagcatacagaccagctagggttttactgcaagattatacaggaatacccgcagttgctgatttagcagcaatgcgtgaagctgtaaaagaaaaaaataaagatccaaatactatcaacccactttctgcagttgatcttgtaattgatcactcagttcaagtagatcaatctgcgaaaccagattcttttgataagaatgttgaaatcgaattcaatagaaatggtgagagatattcttttttaaaatggggacaacaagcttttaataattttagaattgttccacctggtacaggaatatgtcatcaggtaaatctagagtatctttccaaagtagtttggtcagcaagatatgatgatgaggattatttattcccagacacacttgtaggcacagatagtcataccactatggtaaacggtttatcagtattgggctggggtgtaggtggcatagaagcggaagctggaatgctgggtcaaccgatatcaatgttaattccagaagtaattggttttgaggtaaaaaataaaatgcctgaaggcacaacagctactgacttggttttaacagttgttaaaatgttgagggataaaggtgtagtaggcaaatttgtagaattttatggagaaggattaaaaaatttaactttagctgatcgagcaacaattgcaaatatggcgcctgaatatggagccacttgtggtttttttccaata

SEQ ID NO: 282922 - DNA, 859 bp, Unknown
  Bacterial polypeptide expressing nucleotide sequence isolated from the Sargasso Sea
atgaattttaaaagtaaaaattcctttcaatcattagataaactagaggtttcgggcaaatcataccatttttataatttatcaaaggccgaaaaaaatggtttaaaagatattaataaattaccaaaatccataaaggtaattttagaaaacctattgcgttttgaagacgatgtcacagtagacagaaaacaaatagaaagcattgcagattggctaaaaacaagaagttctaaaatggaaatagcatatagacctgcgagaattttattgcaagattacacaggaattccagcagttgctgacttagcagccatgagagatgcagtaaattctaaaaataaagaccccaaaaaaataaatcctttgtctgctgtagatttagtaatagatcactcagtgcaggtagataattatgcaaataaagattctttcgcaaaaaatgttaaaaaagaatttgatcgaaatggagaaagatattcttttttaaagtggggccaaaatgctttcaataattttagagtcgttcctccaggtacaggaatttgtcatcaagtcaatttagaatatttatctaaagtagtttggtcttcagaatttgagggaaaaacttttgcttacccagatactttggtaggaacagatagtcatactacaatggtgaacggtctctcagtattaggctggggcgttggaggaattgaggctgaagctgcaatgcttggacagccaatttcaatgttaataccagaagttattggttttgaaattaagggaaaacttagcgaaggaactactgcaagcgatttagttttaaccattgttcagatattaagaaaaaaaggtgttggtaggtaaa

SEQ ID NO: 282923 - DNA, 1638 bp, Unknown
  Bacterial polypeptide expressing nucleotide sequence isolated from the Sargasso Sea
tatggggggtgacaatccattcggtgccaagtcagagttcgagaagtccgatggcacgatggccagattcatggacctgcattcccttgaggaaaggggattgtgcaaattggatgatatcccattctccatcaggatacttcttgagtccgctctgagaaaatgcgatggattcctagtgaatgaggaagatgtcagtagaatagcctcctggtcaccagaaatgaagccagaggagattcctttcagtcccagtagggtcattctacaggacttcactggagtccctgcaatagtggatattgcagcactcagagatgcaatgaaggatctcgggggcgatccggcgaaggtgaaccctcaagttcctgtagacctagttatcgatcactccgtccaagtggatgtatcgggactatttccggatgccagagagcgtaacttggagatagaatatgagaggaactcagagaggtacaagttcctaaaatgggggcaattgagccttgacaacttcagagcagtcccgcctggaaggggaatagtgcaccaggtgaatctcgaatggattgctagcgtagccagggaggaagatggaacttggattccagactcccttgtgggaaccgactcccatactaccatgatcaacggattgggggttcttggttggggtgtcggtggaatagaggcagaagccgtgatgctaggacagccgatctacatgctgcttccagaggttgtaggtttcgaactaagcggagaactacaaccaggagttacagcgactgatatgactctgagaatagttgagatgctcagggagcatggctgcgtaggaaaattcgtagagttccatggccaaggactctctagcctgagtctaccagatagggccactattgcaaatatggcacctgagtatggggcaacatgcggcttcttccccgtcgaccagaccactcttgactacatgatactctcaggaagagacactgatcacgtggaggacgtgaagcgattcatgtcggctcagggactattctatgaacaatcatcgactacccccaaattcacatcgaatctcgaattggacctgggaactgtagaaccatcactttccggaccaaagaggcctcaggacagagtctcactgtcagaaatgaagtctcactggagagccagcctgaatgctgagacgggccatcagggccatgggattgaccccagtagaaactcagactcgtcaccgatagagggaagaggatgtgatttgaatcacggagacgtagttatcgcagccataactagctgcaccaataccagcaatccaagtgtgatgatcgcagcaggattgatggctaggaacgccagatcaagaggattgcagatcaagccttgggttaagcccagcctagcccctggcagcagagtcgttaccgagtactacgatgcatcgggtctttccgatgacctggactctctgggattcagcgtagttggctacggatgcaccacttgcataggaaactccggacctctggatactgagatagaggcagcaatagatgatggggatttggtcgtgggaagcgtcctctccgggaatcgtaatttcgaaggtaggatacatcaaaa

SEQ ID NO: 282924 - DNA, 923 bp, Unknown
  Bacterial polypeptide expressing nucleotide sequence isolated from the Sargasso Sea
catgaaaaatacaaattcttttaattcagaagatataattgaaattaatgataaaaagttcaaatattttaacttaaataaagcagctcaatattttgatatcgatttaagtaaaacgccaatttctataaaaataataattgaaaatctacttagaaacgaggacggtgagaatattaacaaagatatgatctccaaagttttcaattctttaaaacagattaataacaagagtgaaaaaattgaaatagctttttttccaacgagagttttaatgcaggattttactggagtaccagcagttgccgaccttgctgctatgcgaaatgcattaaaatcaagaggaattgaaccaaaaaaaataaatccattatctagggtagatctagttattgatcactctgttatggtagataactacaaagataataatgcactaaaagaaaacgttagaaaagaatttgatagaaataaagaaagatacgaatttcttaaatggggacaaagctcatttgataatttttatcttgtaccaccaggagcaggaatttgtcatcaagtaaacttagaaaacatagcaaagactatatggatgaaagaaattaataatcaaaactatttattcccagattctgttgtaggaacagacagccatacaacaatggtaaactcactttctgttttaggatggggagttgggggaatagaggctgaagctgcgatgttaggtcaagcaatttccatgaatattccggacgtcattggttttgaacttaaaggacacttgaaggagggtataacagctactgatctagttttatctattactaaaatgcttagagacaaaggtgttgttggaaagtttgtggaattttatggaaatggattaaacaatttgtcattagctgacagagcaacaattc

SEQ ID NO: 282925 - DNA, 1866 bp, Unknown
  Bacterial polypeptide expressing nucleotide sequence isolated from the Sargasso Sea
acttagttttaacagttgttaaaatgttaagagacaaaggtgtagttggtaaatttgtagaattttatggagatggattaaaaaatttaacgcttgctgatagagcaacgatagcaaatatggcaccagagtacggagctacatgtggtttttttccagttgatgatgaaactctaaagtatctaaaattttcaggaagagacgaaataacactaaaaattgtagagagctatgcaaaagagcaaggtttatggtcatctaatgatatcgaattttctgacacaatttcgcttgatatgtcctcaattgttccaactatttcaggacctaagagaccgcaagataaagttctattaagtgaagctagtaagaattttacaaaagtttttaatgatactactaaaagaaaacagaaaaaatattcaaaagttagaaatactgattatgaaatttctgatggatcaatattgattgcagctataacatcttgcacaaatacatctaatccaaatgtattaataggagcaggattattagcaaaaaaggcgatagacttaggtttgaaaactaagccttgggttaagacatctttagcacctggctcacaagttgttactgattatttgaataaagcgggtttaagtaaatatttagatgaattaggatttaatttagtaggatatggttgtacaacttgtattggtaattcaggtccactttccgatgaaatagttgacgcgattgaaaaagataatctctacacagtatcagtattgtcaggaaacagaaattttgagggaagaatatcacctcacattaaagctaactttttagcctcacctccattagtagtcgcgtatgcaatagccggccatatggaggtagatatttacaaagatgcaattggtaaaggtaaaaatggccaagaaatatttctaaaagatatttggcctagtaataaggaaatagagaaaattttacaaagttctttgagtgcagacatgtttgtaaatagatattcaaatgttttggagggaccatctcaatggcaaaaaattaaaacagaaccttcaagtatttataaatgggatgaaagttctacttatgtaaaaaaaccacctttttttgacaacttacctgacaaaccggagggttttaaatcaattaaagatgctagaccacttctaatcttaggtgacatggtaacgacagatcatatttctcccgcaggatctatacaaaaagaaagtccaactggagaatattttatgaagaatcaaatattaccaaaagattataattcttatgggtcaagaagaggaaaccatgaagttatgatgagaggaacgtttgcaaatattcgaattagaaatgagatggctcctggtactgagggaggatttacaaaactttatccagaaaacaaagtcatgccagtttatgatgcggtggtagaatataaaaaaagaggcacagatttagttgtaataggaggcaaagaatatgggactggttcctcaagagattgggcagcaaaaggcactaaattattgggaattaaagttgttatagcagaaagttttgaaaggatacatagatctaatcttataggtatgggaattttaccattacaatttactgatagatttaatagaaataacttaagtttaataggttctgagttgataactattttggactttgaaaaaggagttaatccaacagataaagttaaggtagaatttaagtatgctaccggagatacgaaaattatagaaacaatttgcagaatagatacaaagaacgagcttgaatattataaaaatggaggaatactccaatatgttcttagaaacatgatatgaa

SEQ ID NO: 282926 - DNA, 1935 bp, Unknown
  Bacterial polypeptide expressing nucleotide sequence isolated from the Sargasso Sea
ctctagcgtagccagggaggaagatggaacttggattccagactcccttgtggggaccgactcccacactaccatgatcaacggattgggggttcttggttggggtgtcggtggaatagaggcagaagccgtgatgctaggacagccgatctacatgctgcttccagaggttgtaggtttcgaactaagcggagaactacaaccaggagttacagcgactgatatgactctgagaatagttgagatgctcagggagcatggctgcgttggaaaattcgtagagttccatggtcaaggactctctagcctgagcctaccagatagggccactattgcaaacatggcacctgagtatggggcaacatgcggcttcttccccgtcgaccagaccactcttgactacatgatactctcaggaagagacactgatcacgtggaggatgtgaagcgattcatgtcggctcagggactattctatgaacaatcatctactacccccaaattcacatcgaatctcgaattggacctgggaactgtagaaccctcactttccggaccaaagaggcctcaggacagagtctcactgtcagaaatgaagtctcactggagagccagcctgaatgctgagacgggccatcagggccatgggattgaccccagtaggaactcagactcgtcaccgatagagggaaggggatgtgatttgaatcacggagacgtagttatcgcagccataaccagctgcaccaacaccagcaatccaagtgtgatgatcgcagcaggattgatggctaggaacgccagatcaagaggattgcagatcaagccttgggttaagcccagcctagctcctggcagcagagtcgttaccgagtactacgatgcatcgggtctttccgatgacctggactctctgggattcagcgtagttggctacggatgcaccacttgcataggaaactccggacctcttgatcctgagatagaggcagcaatagacgatggggatttggttgtgggaagcgtcctctccgggaatcgtaatttcgaaggaaggatacatcagaagatcaaggcgaactacctagctagcccaccattggtagtggcctacgctctggcaggaacattggacatagacttcagcaaggaaccccttggcctggatggtgccggagagcctgtgatgctgtcagacatctggcctagtgatgatgagattcgcagaaccgtagaagctgccattggtccggagatgttcatcaggcgatactcagatgttctaagtgagcccagatgggactcgattcctagtgaagcaagcgaacttttcccgtgggacgaggattccacgtacgtgcgactaccctctttcttccagggcatcgaacccgaaccatctcccgtggaaccgatagaggatgcgagggtcctggtgaaggtcggcgactcggttactacggatcacatcagtcctgcgggggccttccccagcagcggcccagcgggtaagtatctgatgagcaagggagtcgaaccccgagacttcaactcctttgggagccgtcgaggcaatcatgaggtaatgatcagggggacattcgccaacatcaggatgaggaaccagactgcacccggaaccgagggcggactcacaacacactttccaaccaacgaggtagtttccatacacgaagccagtgagaggtaccaatcagaatccacgcaactagtggtattagcagggtctcagtatggctccggtagcagcagggactgggctgcaaaaggcaccttccttcttggcgtcagggccgttatagccaagtcatacgagcggatccataggtctaacctggtgggaatgggagttctcccactagcattctctgatggggtcgatgcagaatcattgggtctcgatggcaccgagct

SEQ ID NO: 282927 - DNA, 2596 bp, Unknown
  Bacterial polypeptide expressing nucleotide sequence isolated from the Sargasso Sea
tatggattacaagagcgatatagattacaaaaatcaagatttcacgatatacaatatctcaaaatcacaaatcgcacacctaccttattcattaagagtattatttgaaaattatgttagaaataactcgtccaaaatttctcagagcgtaattgataattttatttcttggagtggagatattacttcaccaatagaactatcattttatcctagcagagttattatgcaggatttcaccggtgttccagctgttgttgatcttgcatctatgagagatgctgtaaaaaaatctaatggcaatccatcattaataaatccacagtgccaaacagacttggtgattgatcactctattatggttgatcatcatggaagtgaaaaatctatggaacttaacacaaaactagaatattccagaaactctgagaggtatcgtctgcttaaatggggacaaaaggcattcaaaaactttagaatcgtgccacccagtaacggcatcatacatcaaataaatattgaattcatatcacaagttgtctttgaaaaaaatcggaacctttatcctgatactgtagttggcacagactcacataccacgatggtgaatggacttggtgtgttaggctggggtgtaggaggcattgaggctgaagcagctatgcttggacagcctattcctatgcttttaccagaagttattggatttagactagatggacagctagctaaaacatctacagctaccgatttagtgttaacaattgtagagaaattgagacaagctaatgttgttgggaaatttgtagaattttatggtgacgctttggacaccttatctatatatgatagatgcacaatagcgaatatggcgcccgagtatggagcaacatgtggtttttttcctgtcgatcaactcacattagattatttaaaaactactgggaaatctgcggagcatgttgatatggtagaaaactattgtaaagaagtgggtttatttagagatccaaataatgatattaaattttcccaggaattacacttaaatttatctgatgtacttccttgtatatctggaccaaaacgaccagaagacaaaattcttttaagtgatgttaaaaaggtcatttctaatgagatatcgaagatatccaaaaacaaagatagtaaaaaaactgcactagaagatggttcgatagtaatagcggctattacaagttgtactaatacttctaatccgagcgttattataggagcaggacttctagctaaaaatgctatagagaaagggctcaacaaaaagacttgggttaaaacgtcactagcgcctggatcaaaagttgtcgaaaattatttaaggaaagccgacctgcttaaatactttaatgagttaggattcaatattataggttatggatgtacaacatgtattggtaattcaggacctatcgatgagaaatatgtaaaagaaattaacgacaacgatatagtcgctagttctgttttatcaggaaatagaaattttgaaggtcgtattcatccagaagtcaaaatgaactttttaatgtctccaatgttagtgatagcgtactctcttattggcaatataaattttgatattactcgtgaaagtttgggtaaggataaaaataacaatgatgttttcttatcagatatctggccatcatcagatgatataaattcagttattcaaaaaaatattgatagcaatatgtttgtaaattcttataaagatttatttgagggagatgataattggaaaaatatatcaactagtcagtctgaattttttaattgggaagattcatcaacttatattcaaccatctcccttttttactactcaaaatgattctgaaaacaaactagaggaaattactgatgcttacccattactagtcttaggcgatagcgtaactaccgatcatatttcacctgccggttcttttaaagaatctacacctgctggtacatatctagttaatcaaggaactagcgtattagactttaattcatatgggtcaagacgcggtaattttaaaattatgcaaagaggaacatttgcaaatattcgaatagccaataaacttgttcccgataaaacaggtggatacacaaaacacatacctactaataaaattgtcagcgtttatgaagcttctgaattatataaaaatgaagatagggagcttattgttattgctgggaaaaattatggttgtggttcttcaagagattgggctgcaaaaggaactaagttattaggagttaaagcagttatagcagagagttttgagcgcattcatcgatcaaatttagtagggatgggtgttcttcctttagaatttataaaaggtgaaaattatgaatctctaggaattgataataattcaacattcacgattgctgcgttaaagcgaaatgatacaaatgtaaatattaattctactaaaaacggacaaccatacacgtttaaagctaaagtaagaatagacaccgataaagaatgggattattttttaaacgatgggatattaaactatgtattaaagaatatatctaattcaacttag

SEQ ID NO: 282928 - DNA, 2284 bp, Unknown
  Bacterial polypeptide expressing nucleotide sequence isolated from the Sargasso Sea
attgtccaaaatagcaatagaaactacaccagaatttgtaaaaaaagtatatgaaaaatctgaaaaaaacatttcaaaattccgtaacacactaaaaagacctcttacccttactgaaaaaattcttgcagggcatcttgaagatgaatttttagataaactgttagatgaaaaaaagaattatgtatttcttagacctgaccgtgttgctctacaagatgtcactggccaaatggttatgttacagtttatgcaagcaggcttgaaatctgtcaccttacctacaactgttcactgtgatcatctaatacaagcaagaactgaaggaaaatctgatacaaaattagcaatgtatgaaaataatgaagtttacaaatttcttgaaactgcatctagcaagtacggtgctggattctggaatccaggtgcaggaattattcatcaagtagttttagaaaattatgcatttcctggtggtctgatgattggaactgattctcatactccaaatgcaggtggattaggaatgatagctgtaggtgttggtggtcttgatgcagctgaaacaatggctggtatgccatgggaattactttacccaaaaagaattggtgttcatcttaaaggaaaaatgagcggatggactgcacctaaagatgttatactatacgttgcaggaaaactttcagtatctggaggaacaaactctattatcgaatattttggtcctggtgtagaatcaattagttgtactggtaaagcaacaattaccaatatgggtgctgaaattggtgcaacatgttcaatatttccttatgacaaaagaatggaaacatatctgaattcaacagatagaaaagaaattgcatctcttgcaaatgatcacacaagtttacttcaagctgatccagaagtagaacaaaatcctgaaaaattctttgataagattatcgaaattgatctttcaactcttgaacctcatgtagttggacctcatacacctgatcttgcaagaccaatttcagaattatctgatgaaatagactcaaatgattatatcgataaaatttctgttgcactaattggaagttgtacaaactcatcttatgaggacatgtctagatcatctagtgttgcaaaacaggctgaaacacatggaattaaggcaaaaatcccattattagtcactcctggttctgaacaaattcgatctaccattgaaagagatggacaaattgatactttgagatcaattggtgcaactgttcttgctaatgcatgtggtccttgtattggtcaatggcaaagaccagaattaaaagatggagaaaaaaattccattgttacatcgtttaatcgaaatttccctggacgtaatgatggaaaacgtgatactatgaactttatagcaagtcctgaaattgtaactgcacttgcactaggaggaagtttatcattcaatcctcttgaagattcacttgagggaaaagatggtaaaaaaattaaactatctcctcctgaaattgctcctgaagttcctgcaaacggatttgtaaatgccgaaggaatctatctttctccgtctgaaaatcctgaaaatgttgaagttttgatagatcctaatagtgagagattacaaaaacttgaaccattttcctcttgggatgggaatgattttgttggattaaatttaattcttaaagcaaagggaaaatgtactactgatcatatttctccggcaggtccttggcttagacttcgtggccatctggataatcttagtgacaatttactcttgggcgctgtaaatgcattcaataatgaagtgggtaaggcaaaaaatattcttacaaatagtattgaaaattgttcgcagattgcaagaaactacaaagaaaaaaatatgcattgggtaatagttggagataataattatggtgaaggcagtagtcgtgaacatgcagcaatgactcctagatttttgggttgtgctgttgttattgcaaaatcttttgcaagaatacatgaaacaaatctcaaaaaacaaggtatacttgcattaacctttgaaaactctgatgattatgaaaagatcaaagaagatgataaaattagtatttcagggctaagtgattttgctcctgacaaatcttttgaatgtcaattagaacactctgatggtagtactgaaaaaattatgttaaatcactcttacaatttatctcaaattgagtggttcaaggctggttctgctttgaatgttttaaaaaataaaacatcgtaa

SEQ ID NO: 282929 - DNA, 1216 bp, Unknown
  Bacterial polypeptide expressing nucleotide sequence isolated from the Sargasso Sea
cttggatgaccttggatttaatttagtcgggtatgggtgtacaacttgcataggtaactcaggaccattgcctgaaaatataagtaaatcagtaaaaaatgataatatatatgcagtttctgttttgtcaggtaacagaaattttgagggaaggatatccccattagttaaggcaaattatttagcatcaccaccccttgttgttgcttatgcacttgctgggtcaatgtttgtgaatttgtataaggatcccctggggaaagatataaaaggaaaagatatttttctaaaagatatttggccatctaataaagaaatagaggagactttaaaagagtctttaaatcctgaaatgtttataaaaagatattcaaatgttttgactggccctgatcaatggagaagaattaaaaccgaggaaagcagtatatataaatggaacgaaagttctacttatgttaaaaagcctccgttttttgaaaatatgacagatgagccagagggatttcaatcaataaaagatgctcgaccattattgattttaggagatatgattacaacagaccacatatctccagcaggatctatacaaaaagacagccctaccggagaatattttatgaaacatcaaattttacctcaagattataattcatatggttctagaagaggaaatcatgaagtaatgatgagaggaacatttgcaaatattagaattaaaaatgagatggcaccaggtacagagggtggttttacaaaattatatccagaaaataaagttatgccagtatatgaagcagtaatggagtataaaaaaagaggaacagatctaattgtaattggtggaaaagaatatggaacgggctcctcaagagattgggcggccaaaggaactaaattattaggtgtcaaggctgtaatagctgaaagtttcgaaagaatacatagatcaaatttagttggcatgggaatacttccactacaatttgtaaacggtgctgatagaaataagcttaatttgaagggatcagaattgataagtatattaaatttagaaaagggcattgaacctggtgataatttaactgttgatataaaatatgcatcaggagaaattaaaaaaattaaattactctgtaggatagatacaaaaaatgaattagaatattacaaaaatggtggaatattacaatatgtactaagaaatatgttttaa

SEQ ID NO: 282930 - DNA, 1206 bp, Unknown
  Bacterial polypeptide expressing nucleotide sequence isolated from the Sargasso Sea
tttttaatctgtttggatacggttgtactacatgtatggaaaattccggacctttagataaagaaatttctgatgcaattcacaaagataacttatatgcagtttctgtcttatcaggaaatagaaattttgagggcagaattaatcctgatgttaaagcaaattacttagcatctccgcctttagttgtggcctacgctttagctggtaatatgcatcaagatttatacaagaactctttaggtaaagataaaaatggagaagacgtatttttaaaagatatttggccgtcaaatagggaaatagaagatttgatattaaaatctataagtgcggacatgtttattcaaagatattcaaatgtttcacaaggacctaaagaatggagctcaattaaaacagaggaaagcagtatttataattgggaggaaaaatccacttatgtaaaaaaaccaccattttttgataatctaccagataaaccagagggatttaaaaaaattaaagatgctaggccgcttctaattctaggtgataccgtaacaacagaccatatttcgccagcaggatctattaaaaaagatagtccgactggagattattttatgaaaaatcaggttcagcaaaaagattttaattcttatggcgctagaagagggaaccatgaagtcatgttaagaggaactttcggaaacataagaattagaaatgaaatggcgccaggaacagaaggtggttttacagtattacaacctgacggaaagcaaatgagtgtttatgacgctgcaatggaatataaaaaaagaggaaatagtttggtcgtaattgctggcaaagagtatggaacaggttcatcaagagattgggctgctaaaggaacaaaattattaggaatcaaagctgttatcgcagagagttttgaaaggatccacagatctaacctagtaggaatgggggtattgcctcttcaattcaaagaaggttttaataagaaaaaattaaacatcaaaggtactgaattatttacaattattgatatagagaaaggaattaacccaagagctgatgtgagttgcgaaattaaatacccagatggttcaagcaaaactattaaacttctatctagaatagatactgaaaatgaaattgaatactataaaaacgggggaatccttcagtatgttttaagaaatatgctgtcttaaa

SEQ ID NO: 282931 - DNA, 1180 bp, Unknown
  Bacterial polypeptide expressing nucleotide sequence isolated from the Sargasso Sea
atggattttaaaagtaaaaattcttttcaatcattagataaattagatgttttgggaaatacttaccatttttatagtttatctaaagcagagaaaaaaggacttaaaggtattgaaaaattacctaaatctttaaaagttcttttggaaaatttattacgctatgaagatggagtcacagttaccaaaaaacaaattaatagtttagtagattggcttaaaactaaaagttccaaaatggaaattgcttacagaccagcaagaattttactgcaggactatactggaatacctgctgtagcagatctagcagcaatgagagatgctgttaaatcaaaaaacaaagatccaaataaaataaaccctctatcaacggttgatctagtaatagatcattcagttatggttgataattatgcaaaaaaagattcttttaaaaaaaatgtagaaagagaatttaatcgaaatggcgaaagatattcttttttgaaatggggacaaagtgcctttaataattttagagttgttcctcctggaactgggatttgtcatcaggtaaatttagaatatttatcaaaagtagtttggtcgtcaaaaatgggaaaagagacttatgcttaccctgacactttagttggaacagatagtcatactacaatggttaacggtttgtcagtgctaggatggggtgttggaggaattgaggcagaagcagcaatgctaggacaacctatttcaatgttaataccagaagtaattggatttgaaataaaaggtaaacttagcgaaggtactactgctagcgatttagttttgacaattgtagagatgctaagaaaaaaaggtgttgttggaaaatttgttgagttttatggagatggtttaaagaatttatctctagctgacagagctacaatagcaaatatggctccagagtatggcgcaacctgcggattctttccaattgacgaggaaacgattaaatatttaaaattttctggacgggatgaaattacgatttccttggttgaaaaatattctaagcaacaaggtttgtgggcaagtgaacaaatggaatttactgatactatttctttaaatttggactctgttgtaccaagtatttcaggaccaaaaagaccccaagacaaagtattacttactgatgccgcaaaaagct

SEQ ID NO: 282932 - DNA, 1270 bp, Unknown
  Bacterial polypeptide expressing nucleotide sequence isolated from the Sargasso Sea
ccctaatgtgatggtagctgctggaattttagctaaaaaagcaattgagttgggctgtgaaacaaaaaaatgggttaaaacctctctcgctccaggttcattagtggtaaatgagtacttaaaaaaatctaatcttatgtcctacctagagggcttaggatttcataatgtaggatatggttgtactacttgcataggtaactctggaccgctaaaaaatgaaatctcaatggctatccaagacaacgatttaactgtggcatcaatattgtctggtaatagaaattttgagggaagagtgcatgctgatgtaaaacttaattatttagcgtcacctcctttagtagtatcttacgcaatagctggtactatgaatattgaccttaccaaagatccaatctccacagtaaatggaaaaaatatttaccttaaggatatttggccaacaaaagaagaaattgattcagtgattaaaaattcaatttctaaagacctttttgaaaaatcatattcaaacatctatgacgggcaagatgaatggaaagaaataaatattgaaaatacagataaatataagtggactgattcctcatatattgcaaacccacctttttttaataacattacttctaaagaaagtgttataaacgaaattactaatgctaaagttttagcatatcttggtgattctgtaactactgatcatatatctcctgcaggaaatattaagtcagatagccctgcgggaaaatatttacttagtaaaaatgtaaaggaaagtgagtttaattcgtatggatcaagaagaggtaaccatgaagtaatgaaacgcggaacttttgcaaatattaggctaaagaataaattagttcctggtgttgaaggtggtttcactatgcacccagattcttcagaaatgactacaatttttgaagcgtctgaaaagtatataagcaagagcattcctacaattattttagcaggaaaggaatatggttgtggatcatctagagattgggctgccaaaggtccaaagcttcttggtgtaaaagcagtaatagccgaaagttttgaaagaatccataggtcaaatttagttggaatgggtatattacctcttaagtttaaagatggtgaaaacgctcaatcaattggtcttacagggtttgagaaatataaaatatcaaatatagataatggtaatgctaaatctgtaaatattgcagctattaactctaaaggagagtctatagaatttgaggctgaagtt

SEQ ID NO: 282933 - DNA, 2719 bp, Unknown
  Bacterial polypeptide expressing nucleotide sequence isolated from the Sargasso Sea
atggcccacaacctccacaaaacgctcaaggaattcgacagcggttccggcaaaggcaagttctactccctgccgcaactcggcaaggcactgaacatcaagatcgaccgcctgccggtttcgatccgtatcgtgctggaatcggtgctgcgtaactacgacggcaagaagatcgccgaagaacacatcgagcaactcgcgaactggaagccgacggcagcacgcgtcgacgaaatcccgttcgtcgtgtcgcgcgtcgtgctgcaagactttaccggtgtgccgctgctcgccgacatcgcagcaatgcgcggcgtcgcgaagcacatgggcaaggatccgaagtcgatcgaaccgctggtcccggtcgatctggtcgtcgatcactcggtgcagatcgatcacttccgcgaaaagaacgcgctcgacctgaacatgaaactggaattccagcgcaacaacgagcgctaccagttcatgaagtggggcatgcaggcgttcgacacgttcaaggtcgtgccgccgggcgtcggtatcgttcaccaggtgaacctcgaatacctcgcacgcggcgtgcacaagaaggccgaaggcgcggacaccgtgtactacccggattcgctggtcggcacggacagccacacgaccatgatcaacggtatcggcgtggtgggctggggcgtgggcggtatcgaagctgaagccggcatgctcggccagccggtgtacttcctgacgccggacgtggtcggcgtcgaactgaagggcaagctgcgcgaaggcctgacggcgaccgacctggtcctgaccgtcaccgaactgctgcgtaaggaaaaggttgtcggcaagttcgtcgagttcttcggcgaaggcacgaagtcgctgtcgctgccggaccgtgcgacgatcggcaacatggcgccggaatacggcgcaaccatgggcttcttcccggtcgacgaaaaaaccatcgactacttcaagggcacgggccgcaccgacgcggaaatctccgccttcgaaaactacttcaaggcgcaagggctgttcggtatcccgaaggctggccagatcgactacaccaaggtcgtcacgctggatctcggcacggtcacgccgtcgctggcgggtccgaagcgcccgcaagaccgcatcgaaatcggtcacgtgaagtcgaccttcagcgacctgttctcgaagcccgtggcggaaaacggctttgcgaagaagtcggaagacctcgacgcgcaatacacgacgagcaacggcgtcgacgtgaagaacggcgacatcctgatcgctgcgatcacgtcgtgcacgaacacgtcgaacccgagcgtgctgctggctgctggtttgctggcaaagaaggctgtggaagccggcctgacggtcgctccgcacatcaagacgtcgctggcgccgggatcgcgtatcgtcacggaatacctgacgaagaccgacttgatgaagtacctcgacaagctcggcttcacgctcgccgcttacggttgcacgacctgtatcggtaacgcgggcgatctgacgccggaactgaacgaagcgatcacgaagaacgacatcgtcgcggctgcggtgctgtcgggcaaccgtaacttcgaagcgcgtattcacccgaacatccgcgcgaacttcctggcctcgccgccgctggtggtggcttacgcgatcgccggcaacatcacgcgcgacctgatgaccgaaccggtaggcaagggcaagggcggccgcgacatctacctgggcgacatctggccgaccagcgaagaagtcgatgcgctgctcaagttcgcgctggacgccgatgcgttccgcaagaactactcgtcgctgaccaagaagggcgacctgtggagcaagatcgaaggcgaagaaggtcaagtctacgactggccgaagtcgacctacatcgctgagccgccgttcttcggcaaggacttctcgatgacgccggccgacagcatcgctgcggtcaagaacgcacgcgcactgggcatcttcggtgactcggtcacgaccgaccacatcagcccggctggctcgatcaaggaagactcgccggcaggcaagtggctgaaggaaaacggcgtacagaaggccgatttcaacagctacggctcgcgtcgcggcaaccacgacgtgatgatgcgcggcacgttcgccaacgtccggatcaagaacctgatgatcccggcgaaggcagacggttcgcgcgttgaaggcggcctgacgattcaccagccgagcggcgaacaactgtcgatctatgacgcagcgatgaagtacatcgacgccggcacgccgaccatcgtgttcgcgggcgaagagtacggcacgggctcgtcgcgtgactgggctgcgaagggcacgcaactgctgggcgtgaaggctgtggtcgcacgcagcttcgagcggatccaccgctcgaacctggtcggcatgggcgttctgccgctgcagttcaagggctcggatagcgtgcaatcgcttggtattaccggtgaagaaacgtacgacatcgaaggcctgggcgctgacttcaagccgcaacaggaagtgacgctggtgattcgtggcaaggacggcaaggaaaagcgtgtgccggtgctgctgcgtatcgacacgccgatcgaagtcgattactacaagcacggcgggattctgccgttcgtgctgcgttcgttgctggctgcttaag

SEQ ID NO: 282934 - DNA, 2263 bp, Unknown
  Bacterial polypeptide expressing nucleotide sequence isolated from the Sargasso Sea
tatgttcgatcttaaaatgatcaaaaaatattaccaatcaatgcctgatagaattcattctatcaaaaaaaaacttggtcgcccactaaccttatcagaaaaaattttatattgccatcttaattctgatttatcttcaaaggattaccttaggggagtatcttatgttgattttaatcctgatagggtagcaatgcaggatgctactgcccaaatggctcttttgcaatttatgatggcaggaaaagacagggtagcggttcctagcacagttcattgtgaccatttgattcaagctaaaaatgatgcacaaaatgatttaagtagcgcattagataccaatcatgaggtttatagatttcttgaatctgtttcaaataaatacggaataggtttctggaagccgggcgcaggtatcattcaccaagttatactagagaattatgcctttcctgggggaatgatgataggcacggatagtcacactgtaaatgctggtggcttaggaatgattgcgattggtgttggcggtgcagatgcagttgatgtaatggctggcatgccatgggaactaaaatttcccaaattaattggagtaaaacttactggagagctatcaggatggacatctgcgaaggatgtgatattaaaattagctggaattttaaccgtcaagggtggaactggatctattattgaatattttggggaaggaacaaaaaccttatcctgcactggaaaaggaacaatttgtaacatgggggcggaaattggggcaaccacatcaatttttggctatgatgaaaaaatggaagaatatcttaaagccactggaagagaagaaatagttgggtatacaaataatatagcggagcatctagtttctgataaagcggttacagataatccaaaagatttttatgatcaagtaattgaaattaacctttctgatctagagccacacctaaacggaccttttacacctgatagggcaacacccatttcaaaaatgagagatgaagctaaaaaaaatgattggcctactgatgtaaaggtaggtctcattgggtcttgtacaaattcctcctatgaagacatatctcgcgctgtatcaattgccaaacaagctaacaaattaggcctatcaactaacgctgaatttaccattacacccggatcagaacaggtaaggcaaactattgagagggatggtttcattgaagaatttaatgcgctaggtgcaaaagtattcgcaaatgcttgcggtccttgtattgggcaatggtcaagagacggggcagaaaaagaagataagaatacaattgtccattcatttaatagaaattttgcaaaaagagcagatggaaaccctaatacacatgcttttgttgggtctcccgagcttgtgacggccattgcgatatctggagatttaactttcaatcctttagcggattatataacaaataaaaatggagaaaaaatcttcttagatcctcctaggggatttgagctaccaggcgatggttttaccgttgataatttaggctatttaccaccagcagataatggtaaaagcttagaagttaaaattgaccctgaatctgaaagattgcagcttttaaaacccttttcccccttaaaagaaatgaattatcataatgtaagtttattgatcaagaccaagggtaaatgtaccaccgatcacatatctatggctgggccatggttaaagtatagaggccatttagataatatttcaaataatatgctaactggagcagttaattttttcaatggaaaagttaattcagtaaaaaatcaacttaatggaaaatatgatgctgttcctaatgttcagcgagactataagtttaataatgttttatctattgttattggagatgaaaattatggagaggggtcatcaagagagcatgcagcaatggaaccccgttttcttggggtcatggctgttttagttcgttcttttgctagaatccatgaaacaaatctcaaaaaacagggaatgcttgcattgacattcaagaataaaagcgattatgatttaattcaagaagatgatgtttttgattttattgatttggatcaatttgaagaaggaaaacctttgacaattgcaattaagcacaatgacaaaacctctgatcaaattctttgcaatcatacatataatcagtctcagatagaatggtttaacgctggatctgcgctaaatttgattcgctcgcaagagtcataa

SEQ ID NO: 282935 - DNA, 1048 bp, Unknown
  Bacterial polypeptide expressing nucleotide sequence isolated from the Sargasso Sea
atgcaatctttaaactcttttaatactcaaaaaaaaatcatcattgacaaaacagaatataagtattttgatttaaaaactctctcaaaaatttataattttgaattagaaagaattcctaattcaataaaaataataatagaaaatcttctaagaaatgaagacggtgaagcagtaacaagagaaatgatagacaatttatgcaaaaaaattactgaaccattagaaaattttgaaatatcatttacacccacacgtgttcttatgcaggattttacaggagtccctgctgtggctgatttagctgctatgagagacgcattgagaaagagagatataaatcctaataatataaatcctttatcaagagttgatttggttatagatcactccgtgatggtagattattttggaaatgatagcgctcttgaagacaacgtaaaaaaagaattcgatcgtaataaagaaagatatgaatttttaaaatggggtcaaaaaacttttgataatttttatttagtgccaccaggtggtggaatttgtcatcaagtaaacctagagaatattgctaaaacaatatggtcaaaaaaaataaaaaatgaaaattatctttatccagactctgttgtaggtactgatagccataccacaatggttaatgcactttcagttctagggtggggtgtcggcggtatagaggcagaggctgcaatgttaggacaaccgatttctatgaatattccaaaggtagttggttttaaattaacaggcgaacttaaagaaggaataacagcaaccgatttagttttaacaattactgaaatattaagaaaaaaaggagtagttggtaaatttgttgaattttttggaaatggtcttaaaaatttatctcttgctgatagatccacaatatccaatatggccccagaatatggtgccacctgtggttttttctcaaccgacaatgaaacattaaattatttaaaattatctggaaaagatgaacatcaattaactattgtaaaagaatataccatgtgcaaaatct

SEQ ID NO: 282936 - DNA, 1053 bp, Unknown
  Bacterial polypeptide expressing nucleotide sequence isolated from the Sargasso Sea
tatgaccccaggaaagaaaaattcttataattcacttaaaaaaatcacagttaatgacaaggagtataattattactcattaaatgaatcagaaaaaaatggacttgaaggaataaataaacttccaaaatctcttaaagttttactagaaaatttattaagatatgaagacgatttaagtgtaacgaaatctcaaatagaagcgattaaaaactggctaaagacaaaaaaatctaaaactgaaattgcatatagaccagcaagagttttgcttcaagattatacaggaatacctgcagttgcagatttagccgcaatgagagaagcagtcaaagaaaaaaataaagatccaaatacaatcaatccattatctgcagttgatcttgtaattgatcactctgtacaagttgaccaatctgcaaaagcagattctttcgaaaaaaatgtcgatatagaatttgaaagaaatggtgagagatattcttttttaaaatggggacaacaggcatttgataattttagaatagttccaccaggaacaggaatttgtcaccaagtaaatctagagtatttatcaaaagttgtttggtcagaagaattcaaaggggaaaaatatctttttccagatactttagttggaacagacagtcatacaacaatggtaaatggcttatctgttttaggatggggtgttggaggaattgaagctgaagcaggaatgttaggtcaaccaatttccatgttaataccagaagttatcggttttgaaatgaagaacaaaatgccagaaggaactactgcgactgatttagtgttaactgttgttaaaatgttaagagataaaggagtggttggtaagtttgttgagttttatggagagggtttaaaaaatttaacactagcggatagagcaacaattgcaaatatggcaccagaatatggtgctacttgtggtttttttcctatcgatgaagaaacattaaagtatttgaaattttctggaagagatcaacaaactgttgatatcgtagaaaattatgccaaggaacaagg

SEQ ID NO: 282937 - DNA, 1248 bp, Unknown
  Bacterial polypeptide expressing nucleotide sequence isolated from the Sargasso Sea
agatcctaataccatcaaccctctttcttctgtggatcttgtgatcgatcattcggttcaagttgataagtttgcaacaaagagttcattaaaagaaaatgttgatattgaatttgatagaaactttgagagatattcttttttaaaatggggacagcaagcctttaataattttagaattgttcctccaggtacaggtatttgccatcaggtaaatttagaatatttatcaaaagtagtttggaacgaaaagtttgaagataaagagtatttatttccagatacactagttggaaccgatagtcataccacaatggttaatgggttatcagtattaggttggggtgttggaggaattgaagcagaagcaggtatgctgggacaacctatatcaatgttgataccagaagtgattgggtttgaaatgaaaaataaactacccgaaggtacaactgctaccgatttagttttaacagtagtgaaaatgttaagagacaaaggtgttgtaggcaaatttgtagaattttatggagaaggtctaaaaaatctaacacttgctgatagagcaactattgccaatatggcacctgagtacggtgctacctgtggattttttccaattgatgatgaaactttaaaatatttagaattttcaggaagatcaaaagaaaatattcaaatcgtagaaaaatatgcaaaagaacaaaatttgtgggcaagtgaagatgttgtttttactgatactttatctttagatatgtctacagttgttccaacaatctctggaccaaaaagaccacaggataaagttcttttaacagaagcatcaaaaaattttataaaagtttttgaagatatatgtaaaaaaactgatccaacaatagcaaaagttaaagacacagattttgagataaaagatggagacatattaatagcagctattacgtcatgtacaaatacttccaatccaaatgtattaattggtgcaggattgttagcaaaaaatgcaatcgaaaaaggtttaacagtcaaaccttgggttaaaacttcattagcgcctggatcacaagttgttactgactatttagataaagctggtttaagtaaatatttagatgaattaggttttaatttagttggttatggttgcactacttgtattggcaactctggacctttaccagataatattactgatgctgttaaagaaaataatttatatgcagtttcagttttgtctggaaatag

SEQ ID NO: 282938 - DNA, 2248 bp, Unknown
  Bacterial polypeptide expressing nucleotide sequence isolated from the Sargasso Sea
tatgtcagatcatacaaattcattctcaatcgatgaaaaaacatataagtattttgatttaaagtcgctggatactgacaaagtagatcgtcttccatttacacataaaattctccttgaaaatgcacttcgatattcagaggacgacaatgaaggtcctaaagatgtggagacaattctcaattgggattcaaaatccgatcgatcaacagaaatatccttcacgcccagtcgtgtcattctccaagatttcacgggggtgccggctgtagttgatcttgccacaatgagagatgcagtggtatcaatgcaaggtaacccaaatgacatcaatccactttctcctgcggagttggtgattgatcattccgttcaagtggatcattttggaagtctggatgcactagagaagaacaataaagttgaatttcaaaggaatcaggagagatatagatttctgagatgggggcaggatgcattttccaattttgaagtagttcctccaaatactggaattgttcaccaagtcaatcttgaatatctgggtcgtgttgtattctcgaaagatgattcattggcttatcccgataccctggttggaaccgattctcacacgacgatgatcaatggaattggatgcctaggatggggggtaggtggaattgaggcagaggccgcgatgttgggtcagcccatcacaatgcttctaccagaagtcattggagtctctgtgaagggcgcgttaaaggaaggtgtaaccgcaactgatttggtgcttacgctgacggaaatactcagaaattatggagttgttggaaagtttgtggaattttttggcgacggcctggatcatcttcccgtctctgatcgggcaactttgagcaatatggctcctgaatttggaagcacttgtgccatttttccaatagacgaagcaacaatcaggtacttaaaactctcagggcgaagcgaacaccaggtcgaattggttgaaacatactccaagattcaaggtttatggagagaaaccgattctaatattgactatacagacgtgatcgagttagatctttcaaaagttgagccatgcttgtctggccccaaaagaccacaagacagaatcattctcaaagatgtagcggaggttgtgaagtctgagattgacaataaacccataactaccgatcgtctttctgatggttctgttctgattgctgcgataacgagttgcaccaacacatccaacccaaccgtaatggttgcagcaggattggttgccaaaaaagccaatgcgcttggattaaaatcaaaagaatgggtaaaaacaagcttggcccccggttcaaaagtcgtcaccaagtacctggaagaatcaggactcttacctgaattggaacaaatgggattcaatattgttggatatggttgcaccacttgtattggcaattcgggcccactcaatccagaagtttcacgagcagttcaagagcaaaatttaactgcctcatcagtgctgtctggcaacagaaattttgagggaagaattcatcctctggtcaagcataattttcttgcatcgccacctttggtggtggcatacgccattgctggctcaacattgcttgatctgaccaaagaaccattgggacggatcgatggaaaagacattttcttaaaagacatatggccgagccaaaacgagattgaggaaatcattgagaacacaatagatccggtcatgttcagtaaagcttacgaagactccatccaaggtgatgatgcttggaaaaacctcgaaacacctcagggtgaaatctatcaatggcaagaaagctcaacttacattaaaaagccgccctactttgaatcaatgaccatggatctacccggcattcaaacgatcaaggacgcgagggtcctcgcacttttgggagactccgttacaaccgatcatatctcaccagcaggcaatatagatcccgaatcaccagcaggcatttatctaaaagacaaaggcgtggaaagaaaggatttcaattcctatggctctagacgaggaaatcatgaagtaatgatgagaggaacatttgccaacattcgattaagaaataagcttgcaccgggcactgaaggcggatggacaaaattagcacaaaatgaaaaacctgtttcaatttttgaggctgcagaggaatttcgatcaaaaaatactgacctgatagtccttgcaggaaaagaatacggaacc

SEQ ID NO: 282939 - DNA, 1549 bp, Unknown
  Bacterial polypeptide expressing nucleotide sequence isolated from the Sargasso Sea
tatgtacgacagctttaagacaaaaaaaacactaaaaataggaaaaaaaacctacacctatttcagcttcaaagccgctgaaaaaaatggtcttaaaaacatctcctcattgccattttcaataaaagtactcttggagaatctcataagaaacgaggatggcactactgtcagtgtggatgacatcaaagattttgataactggaaaactaataaaaaaatcaatagagaaatcaattttagacctgcaagagtcttaatgcaagattttacaggtgtaccagctgttgttgaccttgcatctatgaggtctgcaattatgagtgagaaaggagaccctaaaaaagtaaatcctttatcgccagttgatctagtaatagatcactccgtgatggttgataagtacggctcagcaacttcctacaaagcaaatgtagatttagaatataaaagaaacattgaaagatatgaattcttgagatgggggcaaaaatcttttaacaactttcgtgttgtaccacctggtacaggtatttgccatcaggtaaatctggaatatcttgccaagactgtttggtctgagaagaaaaaaattaaaaatagaaatttgaatttagcttatccagacactgtggttggaacagacagccacacgactatgataaatggtttatctgtgcttggatggggagtaggcggaatagaggctgaggctgcgatgttaggccagccaatttcaatggtcgttccagaagttataggatttgagataaaaggaaaaataaaggaaggtattacagccacagatctggttttaacaatcactgaacaattaagacaaaaaggggttgtaggaaagtttgtagaattttatggtgctggccttaaagagttatcagttcctgatagggcaacaatttcaaatatggctcctgaatatggagcgacttgtggtttttttccgatcgatgaagaaacaattaaatttctaaaagtaagcggtagatcctccgaagaaattaaacttgttgaaaaatatgcgaaggctcaagatttatgggaagactacaaaaaaagcaaaagagtttacacagaaactatgcaattagatttatctagtatcgagccaagtttagctggtccaaagcgaccacaagataaaatattattatcaaatgtatctgatacatttataaaatcttttgaaaaagagtttggtcaaaagcatattgacaaccccatacatgttaaagatgaaaaatttcaaattgacaatgggcatgtcgctattgcagctattacaagttgcaccaatacctctaatcctagtgtaatgattggggctggaattcttgcgcaaaaagcgattaagatggggcttaaaagcaagccttgggtaaaaacatctttagccccgggatcaaaagtagtaactgattacttaatgaaatcaggactacaagaatatcttgataaacttggttttaatttggttggctttggttgtacaacatgtataggaaattctggcccactcgatgagaatatt

SEQ ID NO: 282940 - DNA, 1039 bp, Unknown
  Bacterial polypeptide expressing nucleotide sequence isolated from the Sargasso Sea
aatgaactttttagcttctcctcctttggttgttgcctacgcaattgcaggtagaacagacatagatgtttataacgagccccttgcacaagatgaaaacggtaacgatatttaccttaaaaacatttggccaagtgtgaaagaggttagcgacttagtaaaagaaacggttaccaaagagatgtttgcaacaagctacgccaatgtttatgaaggcgatagccgctggcaacaaattcaaatacctgatggtaagttgtatgattggaacgacgaatctacctatattaaaaaagcaccattttttgatggcatgaccgtagagccaccgggtattcctactattgaaggggctcgctgtttagccaagctaggagactcagtaacaaccgatcacatctctcctgctggcgcgattaaagcggatgcacctgctggtctttatctacaagagcacaatgtagaaaaagcacagtttaattcttacggctctcgccgaggtaaccatgaagtaatgatgcgtggcacctttgctaacgtgcgactaaaaaacttgttagcgccgggcacagaaggcggtgtaacacgcacgcaaccagataatagcttagaaagtatttatgatgcagctatggcatatcaaaaaaatgatacaccgcttattattttagccggaaaagaatatggtactggctcgtcacgcgattgggctgcaaaaggttcgttgttgctaggtgtgaaagctgtttttgcacaaagctatgaacgtattcaccgctctaacttaattgggatgggtgtactgccattacaatttaaagagggtgaaagctatgagtcgcatggtttaactggccaagaagagtttgatattcaaggtctgtacgataaaaccgacgaggttacactgatagcaaccaatgccgaaggcaaaaaaacaagcgtaaaagccgatgtacgtattgatactcctaaagagtgggattactacaagcatggcggtattttacaatatgtactgcgtaacatgcttaactaa

SEQ ID NO: 282941 - DNA, 916 bp, Unknown
  Bacterial polypeptide expressing nucleotide sequence isolated from the Sargasso Sea
tatgaaaccaggaaataaaaattcttacaaatcattatctgacctagaggttaacggtaaaaattataaatattattcattaaaaaaagctgaattaaacggtttagaaggtgtttcaaaattaccaaagtcattaaaagttttattggaaaatttacttaggtatgaggacgatatatcagttaataaaaaacaaatagaagcagtgaaaaactggcttgatacaaaaaaatcgaaaactgaaatagcttacagaccagccagggttttacttcaggattatacaggaataccagcagtagccgatttagctgctatgagagaagctgtaaaagaaaaaaataaagatccaaatacaattaaccctttatctgcagtagatttagttattgatcactctgttcaagttgatcaatcagccaaaaaagattcatttgaaaagaatgtagatattgaatttaaaagaaatggcgaaagatattcttttttaaagtggggtcagagcgcttttaacaattttagaattgttcctccaggaactggtatttgtcaccaggttaatttagagtatttatcaaaagtagtttggtcagaagaatacaaaggagaaaaatatttattccctgatactcttgttggaacagacagtcatacaaccatggtcaatggtttatcagttttaggatggggtgttggtggaattgaagctgaggctggtatgttgggacaacctatttcaatgttaatccctgaagtcattggatttgaagtaacaaaaaaaatgccagagggcacaactgctacagacttagttttaacggttgttaaaatgcttagagacaaaggagtagttgggaaatttgttgaattctacggtgagggattaaaaaatttaactttagcagatagagcaaca

SEQ ID NO: 282942 - DNA, 910 bp, Unknown
  Bacterial polypeptide expressing nucleotide sequence isolated from the Sargasso Sea
agagattgaggacactcttaaacaatctttaaacccagaaatgtttatgaacagatattcaaatgtctctgagggaccagaacaatggcaaaaaattaaagtggataaaggaagtatttataattgggaagaaaactctacttatgtaaaaaaaccaccattttttgataatttaccagatgaaccagagggttttaaggaaataaaagatgcaaggccgttattaattttaggggatatggtaacaacagaccatatatctccagcaggaagtattcaaaaagaaagcccgacaggaaattattttatgaagcatcaaattttgccaaaggattataattcctatggtgcaagaagaggaaatcatgaagtaatgatgagaggtacatttgctaatattagaattaaaaatgaaatggccccaggtacggagggaggtttcactaaactacatcctgagaaaaaagtaatgcctatttatgatgctgttgttgaatacaaaaaaagaggaactgatttagtagtatttggtggaaaagaatatggaactggttcttcaagagattgggcagcaaagggaacaaaactattaggtgtaaaagctgtaattgcagaaagctttgaaagaatacacagatctaatcttataggcatgggagttttacccttgcagtttgtagaaaatatgaacagacagaatttaaacctaaaagggtcagaattaatttcagtattaggtcttgagaaaggaattaatcctggtgatcatttagaagttgaaattaaatatgcaacaggggacattaaaaaaattaaattgttatgcagaatagacactaaaaatgaattagaatactacaagaacggtggtattctacaatatgttctaaggaatatgattaatggatga

SEQ ID NO: 282943 - DNA, 1858 bp, Unknown
  Bacterial polypeptide expressing nucleotide sequence isolated from the Sargasso Sea
tttaacagtagttaaaatgttaagagacaaaggtgtagtaggaaaatttgtagaattttacggagaaggcttaaaaaatttaactttagcagatagagcaactattgcgaatatggctccagaatatggagcaacttgtggcttctttcccgtagatgatgaaaccttaaaatatttaaaattttctggaagagacaatcatactgtcgatattgtagaaagttatgctaaggaacaaggtttatgggcaagtgatgatattgtttttactgataaattaactctagatatgtcatctgtggtacctacaatttcaggtccaaaaagacctcaggacaaagtattgttaaatgaagcatctaaaaattttaaaaaagtttttgaagaggttgctaaaaaatcaaaaatatccacttcaaaagttgaaaatgaagaatttgaaattaaagatggcgatatagtcatagcagctataacttcctgtacaaacacatctaaccctaatgttttgattggtgcaggattacttgcaaaaaaagctgttgaaaaaggtttaaaaacaaaaccttgggtaaaaacttctttagcacctggatctcaagttgttactgattatttagaaaaagcaggattaaataattatttagatcaattaggttttaacctagtaggatatggctgcacaacatgcattggtaattcaggccctttaaaagaaaatatttcagatgctataaaaaaagaaaatatttatgcagtatctgttttatcaggcaatagaaattttgaaggaagaatttcaccattagttaaagctaactatctagcatctcctcctcttgtagttgcctatgcattagctggaagtatgagtatagatctttacaaagatcctttaggcaaagatagagaaggtaatgatgtttttttaaaagatatttggccaagcaataaagaaattgatgatactcttaaaaattctttaaatccagatatgttcgtaaaaagatattcaaatatctctgaaggacctaaacaatggcaaaaaattaaaactgaacctactagcatttataattgggaagaaagctcaacatatgtaaaaaaacctcctttttttgaaaatttacctgataagccagaagatattaaaaatattaatgatgctagacctttattaattttaggagatatggttacaaccgatcacatttccccagctgggacaattcaaaaagaaagtcctacaggtgaatatttcatgaaacaccaaatattaaccaaagattataattcctatggtgcaagaagaggaaatcatgaagttatgatgcgaggaacatttgccaatataagaattagaaatgaaatagcccctgaaacagaaggtggttttacaaaattatacccagaagaaaaagtgatgcccgtatatgatgcggttgtagaatataaaaaaagaggaacaaatttagttgttataggcggaaaggaatatggaaccggttcatctagagattgggcagccaaaggaacaaagctattgggtataaaagcggttttagctgagagtttcgagagaatccatagatcaaacctaatagggatgggggtcttgcctttacaatttattgatggaatgaacagaaaaaatttagatttaaaagggtctgaattaattagtattaatgatattgaaaatggattaagcccaagcgatcatgtagaagttgaaattaaatataaatcaggtgagtcaaaaaaaattaaaatgttatgtcgaatagatacaaaaaatgaattagaatattataaaaatggaggtatcttacaatacgtattaaggaaaatgatataa

SEQ ID NO: 282944 - DNA, 1954 bp, Unknown
  Bacterial polypeptide expressing nucleotide sequence isolated from the Sargasso Sea
tatggcttttgatattgatgttataaagagtgtttattcaaaaatgtcctcaaagattgataatgcaaggaaaattgttggtagaccactaacatatgctgaaaaaatcttatactctcatctatgggatgaatcatcaaagacagtttttaaaagaggtgaagactatgttgactttggtcctgaccgtgttacatgtcaggatgctacagctcagatggctctccttcagtttatgcaagctggaaaagataaagtagctattccaacaacagttcattgtgaccacttaattttagctcagtctggtgcgcagaaagatttaaagaatgctaataaggtaagttcagaagtattcaactttttagagtctgtatcaagaaaatatggtataggtttttggaaaccaggtgcaggaataattcatcaagtcattcttgaaaattatgctttcccaggcggtatgatgattggaacagattcacacacagtaaatgctggaggacttggaatggttgctataggtgttggtggagcagatgcagttgatgtaatggcaggaatgccatgggagttaaaatttccaaaattaatcggtatcaaattaacaggtgagcttaatggttgggcatctgccaaggatgtaattctaaaagttgcaggaatattgactgtaaaaggtggtacagggtacattttagaatattttggagatggagctgaatcactttcatgtacaggaaaaggtacaatttgtaatatgggtgctgaggttggagcgacaacatcaatatttgcatatgatgaatcaatggaaagatatttaaagtctactgagagagaagatgtagttaaagccgcatcagatattaaagatgatttgagagctgatcaagaagtttatgacaatcctgaaaaatattttgatgaaattattgaaattgatttggatactttaacacctcacattaatggaccatttactccagatcttgctacgccggtaagtgaaatgaaaaataaagctaaatcagagggttggcctactgatattaagtggggtcttataggatcatgcacaaattcatcctatgaggatctttctagagcagcatcaatagctaggcaagctttagataagaatattaaaataaaatctaaacttggaataaatcctggttctgaacaagtaagatatacagcagaaagagatggtcttattgatctgtttgaaagacttgaatcaaaaattttcactaatgcttgtggaccatgtatagggcaatggaatagagaaggagaggacaacactgagaaaaattcaattatacattcattcaatagaaattttgctaaaagagcagatggtaatcctaatactcatgcttttgtaacttcacctgaaatggtaatggctgttgccttatcaggtaatcttgattttaaccccattactgataacctaatttctgaagatggtcatgaagtattactagatcctccaattggtgatgagctgccttcaaatggatttgattgcgaagataatggatatgttgaacctccattagacggttcaaatattgaaataaatattaatccagattctaaaagacttcaagtacttgaagcttttagcccatgggatggagaaaatataaaagaagcaaaactcttaattaaggcacatggtaaatgtactactgatcatatttcaatggctggtccctggctaagatttagaggacatctagataatatatcagataattgcttaattggtgcagttaatcattttaatatgaaaactaattctgttaaaaatcaagttactggagaatatggtcctgttcctgagactcaaagattttataaaaaaaataaaattgatactatagttgttggggatcacaattatggagagggttcatcaagggagcatgctgctatggaa

SEQ ID NO: 282945 - DNA, 2374 bp, Unknown
  Bacterial polypeptide expressing nucleotide sequence isolated from the Sargasso Sea
tgttgctgacttagccgcaatgagagaagcggtaaaagataaaaataaagatccaaatacaatcaacccattatcagcagtcgatttagtcatagatcattcggtacaagttgataaatcagctaattcagattcttttgaaaaaaatgtagatattgaatttgagagaaatggtgaaagatattcgtttttaaaatggggacaacatgcctttaataattttagaatagttcctcctggcacaggaatttgtcaccaagtaaatttagaatatctttcaaaagtagtttggtctgaagaatttgaaggagaaaaatatttattcccagatacattagtcggcaccgacagtcatacaacaatggtcaacggtttgtcagtattaggttggggtgttggtggaatcgaagcagaagcaggaatgttgggccaacctatatcaatgttaattccagaagttattggttttgaagtaagaaataaaatgccagaaggaacaacagctacagatctagttttgacagttgtaaaaatgttaagagataaaggtgtggttggtaaatttgttgaattttatggagagggattaaaaaatctaacattagctgatcgagctacaattgcaaatatggcgcctgagtatggagcaacatgtggattttttccaatagatgacgaaactttaaagtatttaaaattctcaggaagagatcaacatacagtagatattgttgaaaaatatgcaaaagaacagggcttatgggcaagcaatgaaatagaatttacagatactatatctttagatatgtctacagttgttcctacaatttcaggtcctaaaagaccacaagacaaagttttattaacagaggcagcaacttcatttaaaaaagtttttgaagaagcaacaagtagaaaaaatcaatctatctcaaaagtttcagatacagattatgaaattaaagatggatcaattttaatagcagcgattacttcctgcactaatacatctaaccctaacgtattaattggtgctggattgcttgcaaaaaaagctgttgaattaggattagaagtaaagccctgggtaaagacttcattagcaccgggctctcaagtagtaacagattacctagcaaaagctggattaaacacttaccttgataaacttggttttaatttagtaggttatggttgcacaacatgcattggtaattcaggtccactacctgaaaatattgttaatgccattcaaaaagaaaatatatatgcagtatcagttttatcaggaaatagaaattttgagggacgaatttctcctcatattaaagctaattatctagcttcgcctccattagtagttgcttatgctttagcaggtcatatggaatttgatctatataaagatgctctgggtaaagacaaagatggaaataatatttatttaaaagatatttggccaactaatgaagaaatagaagatactttgaaagtatctttaaatgctgaaatgtttattaaaagatattcaaatgtttctgaaggacctagtcagtggcaaaaaattaagactgaaaaaagtagtatttataattgggatgaaggatcaacttatgtaaaaaaaccaccattctttgataaactttcggatcaaccagagggatttaaaccaattaaagacgcaagacctttattaattttaggagatatggttactacagatcacatatcaccagcaggaaatatccaaaaggatagtcctacaggagaatattttatggagcaccagattctaccaaaggattataactcatacggatcaagaagaggaaatcatgaagtaatgatgagaggaacatttgcaaatattagaattagaaatgaaatggctccaggaaccgaaggtggatttacaaaattatatcctgaagaaaaagtgctacctgtatatgatgctgttgtggaatataaaaaaagaggaactgatttagtcgttattggtggaaaagaatatggaacaggatcctctagggattgggccgctaaaggaactaaattattgggtgttaaagcagtaatagctgagagctttgagcgaattcataggtctaacttaattggaatgggaattttaccattacaatttaaagataacattaatagaaaaaatttaaatttagttggatctgaattaattagtgttattggtttagaaaaaggtgttaaaccgtctgatgaggtaagtttagaaatcaaatatgcatctggtgatattaaaaaaattaaaactttatgcagaattgatactaaaaatgaattagaatactataaaaatggaggcatacttcaatacgtattaaggaatatgatttaa

SEQ ID NO: 282946 - DNA, 2671 bp, Unknown
  Bacterial polypeptide expressing nucleotide sequence isolated from the Sargasso Sea
tatgaaaccaggaaataaaaattcttacaaatcattatctgacctggaggttaatgggaaaaactttaaatattactcattaaaaaaagctgaattaaatggtttacaaggtatttcaaaattacctaagtcgttaaaagttttattagaaaatctacttagatatgaggatgatgtatcagttaataaaaatcaaatagaagcaatcaaaaaatggcttgatacaaaaaaatcaaaaatggaaatagcttacagaccagccagggttttactccaagattatacaggaataccggcagtggcagatttagctgcaatgagagaggctgtaaaagaaaaaaataaagatccaaatacaattaatcctttgtcagcagttgatttagttattgatcactctgttcaagttgatcaatctgctaaaaaagattcttttgaaaagaatgtagatattgaatttaaaagaaatggtgaaagatattcttttttaaagtggggtcagagtgcttttaacaactttagaattgttcctccaggaacaggaatctgtcaccaggttaatttagaatatttgtcaaaagtagtttggtcggaggaatataaaggggaaaaatatttattccctgatactcttgttgggactgatagtcatactacaatggtaaatggtttatcagttttaggatggggtgttggcggaattgaagcagaggcaggtatgcttggacagcctatttcaatgttgattcctgaagttgttggatttgaagttacaaaaaaaatgccagagggcacaactgctacagacttagttttaacagttgttaaaatgcttagagacaaaggtgtggttggaaaatttgttgaattttatggtgaaggattaaaaaatttaactttagcagatagagcaacaattgctaacatggctccagagtatggagctacatgtggcttctttccaatagacgaagaaactctaaaatatttagaattttcaggaagagataaagaaacagttgcaattgtcgaaaagtatgcaaaggaacaaggtttgtggtcaagtgacgaaattgagtttactgataaaatctctttagatatgtccactgtagtgcctactatttcaggtcctaaaagaccacaagataaagtccttttaactgatgcatcaagtaattttaaaaaagtgtttaaagaagctacagataaaaaggattataaaatttctaaggtaaaagatacggattatgaaattaaagatggttcaatattaattgcagcaattacatcatgtacaaacacttctaatccaaacgttcttattggagctggactacttgcaaaaaaggctgtcgagtttggattgaatgttaaaccatgggttaaaacatctttagctcctggctcacaagtagtaactgattatttagagaaagcaggtttaaatacttacttagatcaattaggatttaatttagtcggttatggttgtacaacttgtattggtaattcaggtccattagcagaaaatatagttgacgctattcaaaaagaaaatttatatgctgtctctgttttgtcaggcaacagaaactttgaaggaagaatttcaccacatattaaggcaaattatctagcctctcctccacttgttgtagcttatgctcttgcaggtcacatggaatttgacttgattaaagattcatttggaaaagataaaaatggtaaagatgtatttttaaaagatatctggccttcaaataaagaaatagagaatactttaaagaattctctcaatgcagatatgtttgttaaacgatattcaaatgtttcagaaggaccaaaacaatggcaagaaatcaaaacagagaagagcagtatttataattgggatgaaaattctacttatgtaaaaaaaccaccattttttgaaaatcttagtgatgagccagagggttttaaagagattaaaaatgcaagacctttattgatattgggagacatggttacaaccgatcatatttctccagctggtaatattcaaaaagatagtccaacaggagagtattttatgaattaccaaattcttccaaaggactataactcatatggctctagacgtggaaatcacgaggtaatgatgagaggtacttttgcgaatataagaattaaaaatgaaatggctccaggaactgaaggtggtttcacaacattatatcctgaaaaaaaagttatgtcagtttatgatgcagtagtggaatataaaaaaagaggaactgatttagttgtagttggcggtaaagaatatggaacaggctcttctcgtgattgggctgcaaaaggaactaaattgcttggagttaaggtagttatcgcagagagttttgagagaatacatagatctaatttaatagggatggggatattgccactacaatttacagaaaatatgaatagaaaaaatctgaacttattaggttctgagttaataagtgtaatagatattgaaaaaggaattaatccatctgataaagtaaaagttgaaatcaaatatgcatcaggtgatgttaaaataatagataccctatgcagaattgatacaaaaaatgaattggagtattataaaaatggtgggatacttcagtatgttttaagaaatatgatttag

SEQ ID NO: 282947 - DNA, 1267 bp, Unknown
  Bacterial polypeptide expressing nucleotide sequence isolated from the Sargasso Sea
ttaacaatagtggaaatgttaagaaaaaaaggtgttgttggaaaatttgtagaattttatggagaaggactaaaaaatttaactttagctgatagagcaactattgctaacatggctcctgaatatggagcgacgtgtggtttctttcctgttgatgatgagtcacttaaatatttaaaattatctgggcgagatagtgcaacaatagctttggtagaaaaatattctaaggaacaagggctatgggcaagtaatgatgtagagtttactgatacagtatctttagatgtaagcacagttgtaacaagtatctctggacctaaaagacctcaagataaagttttactaactgaggcagcaagttcgttcgctaaagtttataaagaaaacgctaaaagatctaaagttgtagagtctgatgttgcaggagcagattttaaattaaaagacggggatattgttattgcagcaattacctcatgtactaatacatcaaatccaagtgttttaattggagctggacttcttgctaaaaaagcttatgaaaaaggattaaaagtaaaaccctgggtcaaaacctctttagcgccaggatcacaagttgttacagactacttagaaaaagctggcttaaataaatatttagatgaattaggttttaatcttgtaggatacggatgcactacatgtatcggaaattcaggaccattaaataaaaatatatcagatgcaatcaatgaaaaagatttatatgcggtttcagttttatctggaaacagaaactttgaaggtagaataaatcctgatgtaaaagcgaattatctagcttctcctcctttagttgttgcttatgctttagctgggaatatgaattttgatttgtacaaaacttctctagggaaagataagtctggtaaagatgtttacttaaaagatatttggccgagcaataaagaaattgagaaaattatgcttacctctttaaatgctgatatgtttaaaaaaagatattctaatgtttcagaaggaccaaaagaatggagagagataaatacagttgatagtgatatttataactgggaacaaaactcaacatatgtaaaaagaccacctttttttgacaatcttcctgataaacctgagggttttaaggcaattaatgatgccagaatacttctgttattaggagacacagtaaccacagatcatatttcaccagcaggaagtatcaagaaagatagtccctcaggagattatttcatggagc

SEQ ID NO: 282948 - DNA, 1642 bp, Unknown
  Bacterial polypeptide expressing nucleotide sequence isolated from the Sargasso Sea
agaaaaatatgctaaagaacaaggtctatgggcaagtaataatattgaatttactgatactgtatcactcgatatgtcttcacttgtgcctacaatatctggtccaaaaagacctcaagataaagtgttattaaatgaagcatcatctgaatttaaaaaagtgtttgaaaatactacatctagaaataagaaaaagatttctaaggtggagggaacagattatgaaataaaagatggttccatattaattgcagcaataacatcctgtacaaacacatctaaccctaatgttttaattggcgcaggactccttgcaaaaaaagcagttgagttgggtttaaaagcaaaaccatgggtaaaaacttcattggctccagggtcacaagtagttactgattacttagaaaaatctggacttaataaatatctagatgaacttggttttaacttagttggttatggatgcacaacatgcattggaaattccgggcctttacctgaaaaaattgtagaggcaattgaaaaagaagatttatatgccgtatctgttttatctgggaacagaaactttgagggccgaatatccccacatataaaagcaaattatctcgcttcacccccacttgttgtcgcttatgcattagctggtcatatggaggtagatttatacaaggatcctttaggaaaagataaaaatgataatgatatttatttaaaggacatttggccatcaaatcaagaaatagaaaaaactttaagagaagcattaaatcctgaaatgtttgtcaaaagatactcaaatgtttctgaaggaccttctcaatggcaacaaattaaaacagaaaaaagtagcatttacaattgggatcaaggttcaacttatgtaaaaaaaccacctttttttgaaaacttaccagacgaaccagagggttttaaacaaataaaagatgcaagaccattattaatccttggagatatggttacaactgatcatatttctcctgctggatctattcaaaaagaaagtccaacgggtgaatactttatggaacatcaaattttaccaaaagattataattcatatggatctagaagaggaaaccatgaagtaatgatgaggggaacttttgcaaatataagaataagaaacgagatagcgccaggtacagaaggcggttttacaaaattattcccagaaggaaaagtgatgcctgtctatgatgcagttgtagagtataaaaaaagaggaacagacttattagtcataggtggcaaagagtacggaacaggatcatcaagagattgggcggcgaaaggaacaaaactattaggtattaaagcggtaatagccgaaagttttgagaggatacacagatctaatttaataggaatgggaatattgcctctacagtttattgaaaatatcaatagaaaaaatttaaacctgaaaggttctgagttgattagtgttgttaatttagaaaaaggaattaatccatcagataaagtagaacttgagataaaatatataactggagaaattaaaaaaattaaaactctttgcagaattgatacaaaaaatgaattggagtattataaaaacggtggaatactacagtatgttttaagaaatatgatttaa

SEQ ID NO: 282949 - DNA, 1555 bp, Unknown
  Bacterial polypeptide expressing nucleotide sequence isolated from the Sargasso Sea
catgaaatttaatagtaaagattcctttaaatcattagataacatttcatcatctggaaaagagtataaaattttcaatttaaaaaaggctgaaaacaacggattagaaggggtctcgaaactaccaaaatctcttaaagttttattagaaaacttactaagatatgaagataataaaactgtagataagaagcagatcttggcgattaaagattggttaaaaagtaaaaaatctaacaccgaaatagcttacagaccagcgcgaactttattacaagattatacaggtattcctgcgattgctgacttagcagcaatgagagatgcagtgaaagataaaaataaaaatccagataaaataaatccactatctacagttgatttagttattgatcattctgtaatggttgatgaatatgcatcggaaaaatcatttaatcaaaatgttgaaagagaattctcaagaaatagtgagcgttactcatttttgaagtggggacagaaagcatttgataattttagagttgtgcctccaggtacaggaatttgtcatcaagtaaatttagaatatttatccaaagttgtatggtcatcaaaaagcggaaatgatttatacgcttacccagatactttagttggaactgatagccatactactatggtaaatggtttatctgttttaggttggggtgttggcggaatagaagcagaggctgcaatgttaggtcagcctatttcaatgttaattccagaggttattggagttgaacttaagggaaaattaaaagaaggaacaactgcaacagacttagttttaatcattgttgaaatgctcagaaaaaaaggtgtggttggaaaatttgtagaattttatggcgaaggtttaaaaaatttaactttagctgacagagcaacaatagcaaacatggctcctgaatatggagctacatgtggtttcttcccagtagatgatgaaactcttaaatatttaaaattatctggaagagatcaagaaacaatatctttagtcgagaaatattcaaaagaacaagggctttgggcaagcaatgatgtagtatttacagatactctttcattagatgttagcagtgtagtaacaagcatctctgggcctaaacgaccccaggataaagttttacttacagaggcttcagccgcttttgcaaaagtttataaagaaaatgcaaaaagagataaggccatcgaagctaaagttgaaggtaccgactttaatattaaagacggtgatatagtaattgctgcaataacatcttgcacaaatacttcaaatccaagcgtaatgattggtgcaggtcttttagctaagaaagctcacgaaaaaggactaaaagttaaaccatgggtaaaaacttctttagctcctggttcgcaagttgttactgattatttggaaaaagcaggtttaaatcaatatttagatgaacttggttttaatttagttggatatggctgcacaacttgtattggtaactctggacctttaaatcaaaatatatcagatgcaaataaataa

SEQ ID NO: 282950 - DNA, 1033 bp, Unknown
  Bacterial polypeptide expressing nucleotide sequence isolated from the Sargasso Sea
tcaccacccctagtagttgcttatgctttagcaggtaatatgtatcatgatctttataaaaatccattaggcaaagatgaaaatggaaaagatgtatttttaaaagatatttggccatcaaataaagaaattgaagagttgatgctaaaatctattaatgccgatatgtttgttaagaggtactcgaatgtttctgaaggaccaaaagaatggagttctattaaaactgaccaaagtagtatttataattgggaggaaaattccacttatgtaaaaaggccacctttttttgataatttaccagacaagccagaaggatttaagaaaattaaagatgcaagaccacttctaatattaggtgatactgtaacaaccgatcacatttccccggctggatctattaaaaaagatagcccaactggtgattactttatgaaacatcaggttcagcaaaaagattttaattcatatggcgctagaagaggtaatcatgaagttatgttgagaggaacatttggaaatattaggattagaaacgaaatggcttcagggacagaaggcggttttacgatattacaaccagatggaaaacaaatgagcgtatatgaagctgcaatggaatacaaaaagagaggaaccagtttagttgttgtggctggtaaagaatacggaacaggctcttcaagagattgggctgcaaaaggaacaaaattattaggaataaaagctgtaattgctgagagtttcgagaggatacatagatcaaatctagttggaatgggaattttaccacttcaatttaaagaagatttcgatagaaaaaaactcaatattaaaggcactgaattgtttactattattgatattgaaaagggaattaatcctggagcagaagtaaattgtgaaattaaatatgcagatggttcgagcaaaactattaaactcttatcaagaatagatacagaaaacgaaattgagtattataaaaacggtggaattctccaatacgttttaagaaatatgcttaattaaa

SEQ ID NO: 282951 - DNA, 2671 bp, Unknown
  Bacterial polypeptide expressing nucleotide sequence isolated from the Sargasso Sea
catgacaccaggaaacaaaaattcgtataattcacttaaacaaatttcagtaaataataaagattacaaatattactctctaattgaagctgaaaaaaatggactaaatggcatatctaagttgccgaaatctttaaaggttcttttagaaaatttattaagatatgaagatgatctatcagtaaataaaaaccaaatagactctattaaaaattggctagaaacaaaaaactcaaatacggaaattgcctatagacccgcaagagttttacttcaggattacactggtattccagctgtagcagacttagctgcaatgagagaagcagtcaaagataaaaataaagatccaaatacaattaatccactatcttccgttgatcttgtgatagatcactcagtgcaagttgatcaatctgcaaaagcagattcttttgaaaaaaatgttgatatcgaatttgaacgaaacgctgagcgttattcttttttaaaatggggacaacaagcttttaataactttagaatagtaccccctggcacaggtatttgccatcaagtaaatttagaatatttatctaaagtagtttggtcagagaaatttaaaggtgataattatctttttcctgatactttagttggaacagatagtcatacaactatggttaatggattatcagttttgggttggggtgttggtggtattgaagcagaagctggaatgctaggccaacctatttcaatgttaattcctgaagttataggttttgaagttaaaaataaaatgcctgaaggaactactgcaacagatttagtcttaacagttgtgaagatgctcagagataaaggagttgttggaaaatttgttgaattttatggtgaaggattaaaaaatttaactcttgctgatagagcaactattgcaaatatggctcctgaatatggagcaacatgtggtttttttccaatagatgatgaaactttaaaatatttaaaattctcaggaagagatcaacatacagttgatatagttgagaagtatgcaaaagagcaaggactatgggcaagcaatgatattgtttttacagacacacttacattagatatgtcttcaattgtacctactatatcaggtcctaagaggccacaagataaagttttattaacagatgctccaacgtcttttaaaaaagtattagaggaagcaactaacacaaaagaaaagtcgattgcaaaagtttcgaattctgattttgaaataaaagacggttcaatacttattgcagcaataacttcgtgtacaaatacttcaaatccaaatgttttaattggcgctggtttgttagctaaaaaagcagtcgagcttgggttagaagttaaaccttgggtaaaaacctcattagcaccaggatctcaggttgtaacagattatttggctaaagcaggattgaacacttatttagataaattaggctttaatttagtaggttatggatgcacaacttgcattggtaactctggaccattagcagataatattgttgaggctattcaaaaagaaaacatttatgcagtctcagttttatcgggaaatagaaactttgaaggaagaatctctcctcatattaaagctaattatttagcatcaccacctttagttgtcgcttatgccctagcaggtcatatggaatttgatttatataaagattcattaggaaaagataagaatggcaacgatgtctttttaaaagacatatggccttcaaatgatgaaattgaaaatactttaaaacaatctttaaatgctgaaatgtttattaatagatactcaaatgtttctgaaggaccaagtcaatggcaaaaaattaaaactgatcatactagtatttataattgggacaaaggttcaacgtatgtaaaaaaaccgccattttttgactctttgccagatgaaccagaaggatttaaagaaataaaagatgcaagacctttgcttatattaggagatatggttacaacggatcacatttccccagcaggaagtattcaaaaagatagtccaacaggggagtattttatggagcatcagattttaccaaaagattataactcatatggatcaagaagaggaaaccatgaagtaatgatgagaggaacttttgctaatattagaataagaaatgaaatggcccctggaacagaaggtggatttacaaaattatatccagaagaaaaggttttatcagtttatgatgcggtagtagaatataaaaagagaggtactgatttagtagtaataggtggcaaagaatatggaactggttcctcaagggattgggccgctaaaggaacaaaattattgggtattaaagcagtattagctgaaagttttgagagaattcataggtccaatttgattggaatgggggttttacctttacaatttataaatgaagttaatcggaaaaatttaaatttaattggctcagaattaatcagtattattgatattgaaaaaggaattaatccatctgatgaagtgatggtagagataaaatatgcatctggcgaaatgaagaaagtaaaaactttgtgtagaatagataccaaaaatgagctggagtattataaaaatggtgggatattacagtatgtgttaaggaacatgatttaa

SEQ ID NO: 282952 - DNA, 2098 bp, Unknown
  Bacterial polypeptide expressing nucleotide sequence isolated from the Sargasso Sea
atgaaacctggaaataaaaattcttttaaagctttaaattctataaatataaatggaaaaaattataaatattactctctagcagaagctgaaaaaaatggactaaatgatatttcaaaattgccaaaatccctaaaggtacttttggaaaatttactcagatatgaggatgatgtatctgtaactaaagatcaaatagaagctataagaaactggattaagaaaaaaaaatctaatacagaaattgcatatagaccagcaagagttttattgcaagactatacaggtataccagcagtcgcagacttggcagcaatgcgagaggctgtaaaagaaaaaaataaagatccaaatactataaacccactctcatctgttgatttagttatagatcattcggttcaagtagatcaatctgccaaatctgattcatttgaaaaaaatgtagatattgaatttaaaagaaacggtgaaagatattcttttttaaagtggggacaacaagcttttaataattttcgaatagttcctccgggcacaggtatttgtcatcaagttaacttagagtacctatcaaaagtagtttggtcagaaaaatataaagaagatgaatatttgtttccagatactttagttggaactgatagtcatacgacaatggttaatggtttatcagttcttggttggggtgttggtggaattgaggccgaagcgggaatgcttggacaacctatttctatgttaattccagaagtaattggtttcgagcttaaaaataaaatgcccgaaggaactacagctactgatttagttttaacagttgtaaaaattttaagagacaaaggtgttgttggaaaattcgttgagttttatggagatggtttaaaaaatctaacacttgctgatagagctactattgcaaatatggcaccagagtatggagctacctgtggtttttttccaattgatgatgagactttaaaatatttaaggttttcaggaagagacgaacatacagtcaatattgtagagaaatatgctaaagaacaaggattatggataagtgataatattgaatttactgatactgtttcgttagatatgtcttcacttgttccaacaatatctggaccaaaaagacctcaagataaagtattattaaatgaagcatcatctggatttaaaaaagtatttgtagatacaacatcaaggaaagaaaaacatgtttcaaaggttaatggaactgattttgaaattaaagatggctctatattaattgcagcaataacatcatgcacaaatacatctaaccctaatgttttaattggagcaggtttgttagcaaaaaaagctgttgaattaggtttaaaaacaaaaccttgggtaaaaacttcattagcgccagggtctcaggtcgttactgattatttagaaaaatcaggtcttaacaaatacttagatgaattaggttttaatttagttggctatggatgtacaacatgtattggaaattctggacctttgccagataatatagtggaagcaattgaaaaagaagatatatacggtgtatctgttttgtctggtaacagaaattttgagggtcgtatttctccacatataaaagcaaactatcttgcatcacctccacttgttgttgcgtatggtttagctggtcatatggaggtagatttatataaagatcctttaggtaaagataaaaacaacaaagatatttttttaaaagatatttggccttcgaataaacaaatagaagaaactttaagagaagcactaaatgctgaaatgtttgttaaaagatattcaaatgtttccaagggaccaattcaatggcaaaaaattaaaactgaaaaaagtagtatttataattgggatcaaggatcaacttatgtaaaaaaaccacctttttttgacaatcttccagacgaaccagaggggtttaaaaaaataaaagatgcaagaccattattaattttgggagatatggttactacagaccatatatctccagcaggatctataccaaaagaaagtccaactggaaaatatttcatggaacatcaaattttaccaaaag

SEQ ID NO: 282953 - DNA, 814 bp, Unknown
  Bacterial polypeptide expressing nucleotide sequence isolated from the Sargasso Sea
gaaatcaaaacagaaaaaagcagtatttataactgggacgaaggctccacatatgtaaaaaaacctcccttttttgataatttacctgacaagccagaaggatttaaatcaatcaaagatgcaagaccacttttaatattaggagatatggttaccacagatcacatatctccagctggaaatattcaaaaaaatagtccaacaggggattattttatgaaaaatcaaattcagcagaaagattttaattcttatggatctaggagaggaaatcacgaggtcatgatgagaggaacattcgctaatattagaattagaaatgaaatggcacctggtacagaaggtggatataccaaattatatcctgaaggaaaagtgatgacagtttatgatgctgttgttgaatataaaaaaagaggaacagatttgattgtggttggtggtaaagaatatggaactggctcctcgagagattgggcagcaaagggaacaaaattattaggtgtaaaagttgttttggcagaaagctttgagaggatacacagatctaatttaataggaatgggaattttgcctttacaatttttaggagatatgaataggaaaaatttagatttaagcggctctgaattattaagtgttattgatatagaaaaaggaataaatccttcagataaagtaaagttggaaattaaatatttatcaggcgatataaaaataatagaaactttatgcagaatagatacaaaaaatgaattagagtattataagaacgggggcatattacaatatgtgcttagaaatatgatctaaa

SEQ ID NO: 282954 - DNA, 814 bp, Unknown
  Bacterial polypeptide expressing nucleotide sequence isolated from the Sargasso Sea
aataaaaactggaaaaaagtagtatttataatttgggaacaaggatcaacttatgtaaagaaaccacctttttttgacaatctttcagatgaaccagatggttttaaacaaataaaagatgcaagacctttattaattttaggagatatggttactacagaccatatttcacctgcaggatctatacaaaaagaaagcccaactggcgattattttatgaaacatcaaattttgcctaaagattataattcttatgggtcaagaagaggtaatcatgaggttatgatgagaggaacttttgccaatataagaattagaaacgaaatagtccctggcactgaaggaggatttactaagttatttcccgaaggaaaagttatgccaatttatgatgctgttgtagaatataaaaaaagaggtacggatttagttgttgtaggtggaaaagagtatggcactggttcctcaagagactgggctgcaaaaggtacaaaattactaggtgttaaagccgttatagcagaaagttttgagagaatacatagatctaatttaattggaatgggcatattacccttagagtttattaataaaatgaatagaaaaaatttaagactgattggatctgaactcatcaatatattaaatattgaaaaaggaataagcccatcagataaagttgaggtggaaattaaatatatatcaggtgatgttaaaaaaattcaaacattatgtagaattgatacaaataacgaattggagtattataaaaatggaggaatacttcaatatgttttgagaaaaatgatttaaa

SEQ ID NO: 282955 - DNA, 1223 bp, Unknown
  Bacterial polypeptide expressing nucleotide sequence isolated from the Sargasso Sea
actcttacctgaattggaacaaatgggattcaatattgttggatatggttgcacgacttgtattggcaattcgggcccactcaatccagaagtttcacgagcagttcaagagcaaaatttaactgcctcatcagttctgtctggtaacagaaattttgagggaagaattcatcctctggtcaagcataattttcttgcatcgccacctttggtggtggcatacgccattgctggctcaacattgcttgatctgaccaaagaaccattgggacggatcgatggaaaagacatattcttaaaagacatatggccgagccaaaacgagattgaggaaatcatagagaacacaatagatccggtcatgttcagtaaagcttacaaagactccatccaaggtgatgatgcgtggaaaaaccttgaaacacctcagggtgaaatctatcaatggcaagaaagctcaacttacattaaaaagccgccctactttgaatcaatgaccatggatctacccggcattcaaacgatcaaggacgcgagggtcctcgcacttttgggagactccgttacaaccgatcatatctcaccagcaggcaatatagatcccgaatcaccagcaggcatttatctaaaagacaaaggcgtggaaagaaaggatttcaattcctatggctctagacgaggaaatcatgaagtaatgatgagaggaacatttgccaacattcgattaagaaataagcttgcaccgggtactgaaggcgggtggacaaaattggcacaaaatgaaaaacctgtttcaatttttgaggctgcagaggaatttcgatcaaaaaatactgacctgatagtccttgcaggaaaagaatacggaaccggctcctctagagattgggcagcaaaaggtgtttcacttttgggtgttaaagcagtcattgcagaatcatatgaaagaattcatcgctcaaaccttattggaatgggcgtgcttccattggaatttagttcaggagattgtgcggagtcaattgggctcgatggctttgaatcttttgattttgactcaatcacaaaacaatcgaaatcggtgtctgtaaaagcaacatcggcagatggcaatgagaaatcatttgaagctaaaatcagaatcgacactccaaaagaatgggaatactttgagcacggaggaattctccattacgtcattagacgccttgtcgcaaaataat

SEQ ID NO: 282956 - DNA, 795 bp, Unknown
  Bacterial polypeptide expressing nucleotide sequence isolated from the Sargasso Sea
tatgtacgatagctttaaaacaaaaaaaacactaaaaatcggtaaaaaggcctatacatattatagtcttaaatatgctgaaaaaaatggattaaagaatgtatcagctttaccctattcaattaagatacttcttgagaacctgattaggcatgaagataaaaaaactgtcttaaaaagcgatatacttgagttccaaaagtggaaaaagcaaaaaaaaatagctaaagaaattaattttagaccagctagagttcttatgcaggatttcactggggtacccgcggtggtagatcttgcctcgatgcgatctgctattaaagacaaaaaaggggaccctaagaaaattaatcctttgtctcctgtagatctagttatagatcactcagtaatggtcgacaaatttggctcaacctcagcacataaaacaaatgttgatttggagtataaaagaaatattgaacgatatgaatttctcaggtgggggcaaaagtcatttgataattttcgagttgttccaccaggaacaggaatatgtcatcaagtaaatttagaatttcttgctaaaacgatatggtcgtcaaccgggttagttaataataagaaaattgaactagcatatcctgatacagtagtcggaaccgatagccatactaccatgataaacggcctatcagtgctgggttggggagttggaggccttgaagctgaagctgcaatgcttggccagccaatatcaatggtagttcctgaggtagtaggttttgaaattaaaggcaaaataaaagagggaat

SEQ ID NO: 282957 - DNA, 1152 bp, Unknown
  Bacterial polypeptide expressing nucleotide sequence isolated from the Sargasso Sea
tatgaaaccaggaaaaaaaaattcttacaattgtatgaaatctttagatataggaggaaagaattataaatatttttcattaaaagaggctgaaaaaaatggcttagatggaatatctaagcttccaaagtctttattggttttgttagaaaatcttttaagatttgaagacgatatatcagttaataaaagtcaaattgatgctattaaaaactggctcagaaccaaaaaatctaaaacagaaattgcctatagaccgacaagagtgctattacaagattatacaggaatacctgcagttgctgatcttgctgcaatgagagaggcagtaaaagaaaaaaacaaagatccagaaaaaataaatccactatccccagtagatttagtcattgatcattctgttcaagttgatgattttgcgaacaaactatcattaaaaaaaaatgttgatatagaatttaagagaaatggagagaggtattcatttttaaaatggggacagcaagcttttgataattttagaattgttcctccaggaactggtatttgccatcaagtaaatttagaatatttatcaaaagttgtttggagcgctaagtcaggaaatgacgagtttatttttccagactctcttgtaggaactgatagtcacacaactatggtaaatggtttatcggttttaggttggggtgtaggaggaatagaagctgaagcaggcatgttgggacagcctatttcaatgttaatacctgaagttattggatttgaattagcaaataaattaccagaaggaacaactgcaacagatttagttttaacagttgttaaaatattaagagacaaaggagtagtaggaaaatttgtagaattttacggttctgggctcaaaaatttaagtttggctgatagagctactatcgcgaatatggccccagaatatggtgctacttgtggtttttttccaattgatgatgaaacactaaaatatttaaaattttcaggaagagataatcagacaattaaaatagttgaaagatattcaaaagaacaagggctatgggctagtgaagatgttgagttttctgatgttgtaagattagatatgtcaactgtagttccaacaatatcaggtccaaaaaggcctcaagataa

SEQ ID NO: 282958 - DNA, 895 bp, Unknown
  Bacterial polypeptide expressing nucleotide sequence isolated from the Sargasso Sea
aatgaaacctggacataaaaattcttttaattcactaaaaaaaataaatattaatggtaaggattattattattattcattaatagaagcagaaaaaaatggcttaacgggaatatcaaaacttcctaaatcaattaaggttttattagaaaatttattaagatatgaagacgatgttactgtctcaaaaaaacaaatagaggatattaagaattggcttaaagaaaaaaaatccgatactgaaattgcttacaggcctgctagagttcttctgcaagattatacaggtattcctgctgttgctgatttagcagcaatgagagaggctgttaaagaaaagaataaaaatccagaaaaaataaatccactatctcaagttgatttagtaattgatcactcagttcaagttgataattatgcaaataaaaaatccttggatgaaaatgttgacatagaatttaagagaaatggcgaaagatattcgtttttaaaatgggggcaagaagcatttaataattttagaattgttccgccaggaactggtatttgtcatcaagttaacttagagtatttatcaaaagtggtatggtctgaaaaatttgaaaataaagattatttatttcctgacactttagttggtacagatagtcatactacgatggtgaatgggttatctgtactgggttggggtgttgggggaatagaggctgaagcaggtatgcttggacaacctatatcaatgttaatacccgaagtaattggatttgaggtaaaaaacaaaatgccagagggaactactgctactgatctagtattaactgtagtaaaaatgttgagagataaaggagttgttggtaaatttgtagagttttatggagatggtttaaaatattta

SEQ ID NO: 282959 - DNA, 1588 bp, Unknown
  Bacterial polypeptide expressing nucleotide sequence isolated from the Sargasso Sea
tatgaaacctggaaataaaaattcttacaaatcattaaaatctataaatataaatggaaaaaattataagtactattctttagtagaagcagaaaaaaatgggcttcacaatatttcaaaattaccaaaatctttaaaagttcttttagaaaatttactcagatacgaggatgatttatctgtaacaaaagctcaaatagaagcaattaaaaactggatgcagaaaaaaaaatcttctacagaaattgcatataggccggcaagagttttgttacaagattatactggtatacctgctgtagccgatctagcagcaatgcgtgaagctgtaaaagaaaaaaataaggacccaaatactattaaccccttatcttcagttgatttagttatagaccattccgttcaagttgatcagtcggcaaaatcagattcatttgaaaaaaatgtagatatagaatttaaaagaaatggtgaaagatattcttttttaaaatggggccaacaagcttttaataatttccggatcgttcctccgggaacaggtatttgccatcaagttaatttggaatatttgtcaaaagtagtgtggacagaaaaatataaagaggatgaatatttatttcccgatactttagttggaaccgatagccacacaactatggttaatggactatcagttcttggttggggggttggagggatagaagcagaggcaggaatgttaggacaaccaatttctatgttaattcctgaggtcattggttttgagttaaaaaataaaatgcccgagggaacgactgcaacagatttagttttaacagttgttaaaattttaagagacaaaggtgttgttggaaaatttgtcgagttttatggagacggattaaaaaatcttactcttgctgacagagcaactattgcaaatatggcgcctgaatatggtgctacatgtggtttttttccaatagatgatgaaactttaaaatatttaagattttcaggtagagacgaacatacagttattaccgtagaaaaatacgcaaaagaacaaggtttttgggccagtgatcaaattgaatttacagatacagtttcacttgatatgtcctctattgttccaactatttctggaccaaaaagaccccaagataaagtattattaaatgaagcatcggcagaatttaaaaaagtatttgaaagtactacaacaagaaaagaaaaatatacttcaaaggttagtggtgctgattttgaaattaaagatggttccatattaattgccgcaataacatcttgcactaatacatctaacccaaatgttttaattggagcaggattattagcaaaaaaagcagttgaattaggattaaaaacaaaaccttgggtaaagacttcattggctcctggatcacaagttgtaactgattacttagaaaaagctggactaaataaatatttggataatttaggttttaatttagtaggatatggatgcacgacttgtataggaaattccggtccactacctgaaaatattattgaagcaatagaaaaaaaaaatatatacgcagtctcagttttatctgga

SEQ ID NO: 282960 - DNA, 1474 bp, Unknown
  Bacterial polypeptide expressing nucleotide sequence isolated from the Sargasso Sea
atgaaacctggaaataaaaattcatttaattgtttaaaagaactatcagttaatggaaaaaattattttttttattcattagatgaagctgaaaaaaacggcttagatggaattaatagactgccaaaatcagtaaaagttttacttgaaaatttactaagatatgaagatgggtctacagttaacaaaaagcaaatattatcaattaaagagtggttaaattcaaaaaaatctaaaactgaaatagcatatagacccgcaagagttcttctgcaggactatacaggtatacctgctgtagctgatcttgcagcaatgagagatacagttaaagaaaaaaataaagatccaaaaaaaataaatcctctttcatctgtagatctagtcatcgatcattcagttcaagtagacaagtttgcaaccaaaaattctttaaaagaaaatgttgatattgaatttgatagaaactttgaaaggtattcttttttaaaatggggacaacaagcatttgataactttagaattgttcctcctgggactggaatttgccatcaagtaaatttagaatacttatcgaaagtagtatggaatgaaaaatttgaagacaaagaatatttatttccagatactcttgttggaaccgatagtcatacaacaatggtaaatggtttatcagttcttggctggggtgtaggagggattgaggcagaggctggcatgttaggtcaaccaatatcaatgttaatacccgaggtaatcggatttgaaatgaaaaataaattacctgagggcacaactgctacagatctggttttaacagtggttaaaatgctaagagacaagggagttgttggtaaatttgtagaattttatggagaaggtcttaaaaatttgacacttgcagatagagcgactattgcaaacatggctcctgaatatggagctacatgtggtttctttccaatagacaaagaaactttaaaatacttagagttttcaggcagatcaaaagagaacattaatatcgttgaaaaatatgcaaaggaacaaaatttgtgggctagtaatgatattgtattcacagacaccttgactttagatatgtcaactgtggttccaacaatatctgggcctaaaagaccgcaagataaagtccttttatcagatgcttccaaaaattttattaaagtttatgaagatgtttgtaaaaaaacaaacccaaccatcgcaaaaattcaaggtgaagattttgagattaaagatggagatatattaatagcagctatcacatcatgtacaaatacttcaaatccaaatgttttgattggcgcgggattattagctaaaaatgctatagaaaaaggattaaatgttaaaccttgggttaaaacatctttagcacctgggtctcaagtagtaacagactatttagacaaagctggtttaagtaaatacttagatcgattaggtttta

SEQ ID NO: 282961 - DNA, 2453 bp, Unknown
  Bacterial polypeptide expressing nucleotide sequence isolated from the Sargasso Sea
aataaatttcagccctgcacgagttttgatgcaagatttcacaggtgttcctgctgtagtagaccttgcatcaatgagatctgctatccataaactcaacggtaacccaaataagattaatccacttactcctgttgatctagtaattgatcattcggtaatggtcgataaatttgggaataagtcagcataccaaaaaaatgttgatctcgaatatgaaagaaatatagaaagatatgagtttttaaaatggggtcaaaaatcatttaataattttagagttgttcccccaggaacagggatatgtcaccaagtaaatctagaatatttagcgcaatcaatctggtcagaaagaaagagtgatgatggaaaaaaaataaacttagcttatcctgatacagttgtaggcactgatagccatacaacgatgattaatggactctcagttcttggttggggggttggaggtattgaagcagaagccgcaatgttaggtcagccaatatcaatggtagttcctgaggtggttggttttgaaattagtggaaggttaaaagagggaacaactgcaactgatctagttcttacaataacagaaatacttagaaaaaaaggggttgttggaaaatttgttgaattttttggaaatggtttaaaagaactttccattccagatagagcaaccattgcaaatatggctccggagtatggtgctacttgtggtttttttcctattgataatgaaacactcagatttttaaaagttagtggtaggacaaaaagtaatattgaccttgtaaaaaaatattcaaaagagcaaggaatttgggaggattataaaaaaaataaaagagtttttaccacaaaaattaaattaaatttatcatcaattgtacctagtttggctggcccaaaaagacctcaagataaaattcatctttcaaaagtatcatcttcttttgaaaaaagcctcaagttagattttaatcaagaaaagatagacaataaagtaaaattagacagtttttctttggaccatggacacgtagcaatagctgcaattacaagctgcactaatacgtctaatccatctgtaatggttggggcgggaattttggcaaagaaagcgattcggttaggattgcaaacaaagccttgggttaagtcatctcttgcccctggatcaaaggtggtaactgattatttatcaaaagcaggattacaaacttatttggataaacttggattccagcttgttggatttggatgtactacttgtattgggaattctggtcctcttgatagtaagatagctaatgctgttgagaaaaataatttaattttaagtggtgtattatcaggaaatagaaattttgagggcagaattaatcctcatgttaaagctaattacttagcttctccacctcttgttgttgcttacgcaatcgctggaacaacgaaaataaatctaacaaaagaaccaataggaaaaaacaaaaaaggaaagaatatttatttaaaagatatatggccaagttcaaatgaaattaaaaaagtaattgactcaacaatcaattctaaactttacagagctaggtataaaaatgtttttaaaggagatgggaaatggaaagctgtaaaatctctgaaaggacttacatatcaatggaataaaaaatccacttatgttcaacatcctcctttctttcaaaatcttaaacctaattcgagtaacattaaaaatattaagattgccaatatattggggatatttggggactcagttaccaccgatcatattagtcctgcagggtccattaaaattgatggtcctgcaggaaattatttaaagaaaaataatgtaaaagtatctgactttaattcctttggttcacgcaggggtaatcatgaagttatgatgagaggcacattttctaatattagaattaagaatgaaatggtaaaaggaattgaaggcgggtacacaatatcttatccctctaaaaaacaaaaatctatttatgatgcttcaatagattatcaaaaatcagggacacctcttgtaatttttgcaggaaaagattatggaatgggatcttctagagactgggcagctaaaggaacaagtttattaggtgttaaggctgtaatagctgagagttttgaacgcatccataggtctaacttaattggaatgggagttttaccttgtcagtttatagataatgaaaatagacaaagtctcaaactttcagggtctgaaaaaatatctattcttggtttagaaaaagatatttctccaggtaaaaaattggatttaaaaattcagtactcaaacggtaagaatgtcagtactaaaataaaacttttagtaaatacatcgaccgagattacctatctcgaaaatggaggaatactccaatacgttatgaaaaacttagttaattcttaaa

SEQ ID NO: 282962 - DNA, 2170 bp, Unknown
  Bacterial polypeptide expressing nucleotide sequence isolated from the Sargasso Sea
atgaaatttaatagtaaaaattcgtttaactctttagaaactatcaattcatcaggtaaaaattataaaattttcaatttaaaaactgcagaaaaaaatggtttagaaggaatatcaaaacttcctaaatctttaaaagttttattagaaaatcttctaagatatgaagatggcttaacggtagacaagaagcagattttagcaatcaaagagtggcttaaaaataagaaatctaatacagaaatagcttatagacccacaagaactttactacaagattacacaggcattccagctattgctgaccttgcagcaatgagggatgcagtcaaagaaaaaaataaagatcccaatcaaattaatccactatctacagtagatttagtaatagaccattctgtcatggttgatgagtatgcatctggtaaatcctttaatcaaaatgttgaaaaagaattttctagaaacggagagaggtatgcatttcttaagtggggtcaaaaagcttttgataattttagggttgttccaccaggaacgggtatttgtcatcaagtaaatttagaatatctggctaaagtagtatggtcatctaaaagcggtaatgatctttatgcttacccagacactttagttggaacagacagtcatacgacaatggttaacggattatcagttttgggctggggagtaggtggaatagaagcagaggctgccatgttaggccaacctatttcaatgttaattcccgaagttgttggagtagaaattaaaggaaaactacttgagggattaacagctacagacctagtattagcaattgttgagatgcttagaaaaaaaggtgtggtaggaaaatttgttgagttttatggcgaaggtttaaaaaatcttacattagctgatagagctacgatagcaaacatggcacccgagtatggagcaacatgcgggttctttccagtagatgaggaaacattaaaatatttaaaactctctggaagagataatgaaacgatcgaacttgtagaaaaatattcaaaagaacaaggtctgtgggcgagtgaaggtatggaattcaccgacactttgtctttggatataagtaccgtagttccaagtatatctggtcctaaacgaccacaagacaaagttttattaacaaattctgccaagagctttgccaaagcttataaagaaaatactaagagagaaaaaccctctgaagcaaatgttgatggtgctgattttaaaatcaaagacggagatatagttatagcagccattacgtcttgcactaacacttcaaatccaagtgtaatgattggtgcaggattactagcaaaaaaagctatagaaagaggtttaaagattaagccgtgggtaaaaacatctttggctccaggatctaaagtagttaccgactatttagaaaaagcaggtttaaataaatatttagatgaacttggatttaatttagttggttacggttgtacaacatgtattggaaattctggcccactaaacaagaatatttccgacgcaatacataaagaaaatttatatgcagtttctgttttatctggaaacagaaattttgaaggaagaataagtccagacgttaaagctaattatcttgcttcgccacctctcgtagttgcttttgctttagctggtaacatgaattttgatatatataaaagctcccttggtattgataaagaaggtaaagaagtatttttaaaagatatttggccaagcaataaagaaattgaaaacataatgctaaaatcaattaatgctaagatgtttatcgatcgctattcaaatatttctgaaggacctaaagaatggagatctattaaaactgtcgatagcagtatttataattgggaagataattctacatatgtgaaaaaacctcctttttttgatgatttaccagatcagccagagggatttaagccaattaaagatgcaagattattactattactagctgacacggttactactgaccatatctctcctgctggtaatataaaaaaagatagccctacaggcgattattttatgaaaaaccaagtacaacaaaaagacttcaattcatatggagcaagaagaggtaaccatgaagtaatgatgagaggcacattcggaaatattaaaa

SEQ ID NO: 282963 - DNA, 1807 bp, Unknown
  Bacterial polypeptide expressing nucleotide sequence isolated from the Sargasso Sea
tatgacaccaggaaaaaaaaattcttacaattctctaaaaaaaatcacaatcaataacaaagagtataattattattcattaagcgaagcagaaaaaaatggacttgagggaattagtaaacttcctaaatctttaaaagttttattagaaaacttattgagatatgaagatgacttaagtgttacaaagtcccaaatagaagcaattaaaaattggttagaaacaaaaaaatctaaaaccgaaatcgcatatagacctgcgagagttttacttcaagattatacaggaatccctgcagtagcagatctagctgctatgagagaagctgtagaagaaaagaataaagatccaaacacaattaacccattgtcagcagtcgatcttgtaattgatcactctgtgcaagttgatcaatctgcaaaagcagattcatttgaaaaaaatgtagatatagaattcaatagaaatggtgaaagatattcatttttaaaatggggacagcaagcttttgataattttagaattgttccgccaggaacaggaatatgtcatcaggtaaatttagaatatttatccaaagtagtttggtctgaagaatttaaaggagagaaatatatatttccagatacccttgtcggtacagatagtcatacaacgatggttaacggactttcagttttaggctggggagtaggtggcattgaagcagaggcgggaatgttaggtcagcctatttctatgttgatacccgaagtgataggtttcgaggttaaaaataaaatgcccgaaggtacaacagcaacagatcttgttttaacagtggtaaaaatgctaagagataaaggtgttgttggaaaatttgtagaattttatggagatggattaaaaaacctaactcttgcagatagagcaactatcgcaaatatggctccagaatacggcgcaacttgtggtttttttccaatagatgacgaaactttaaaatatttaaaattttcaggaagagatcagcatacagttgagatagttgagaaatatgcgaaggaacaaggtttatgggcaagtaatgatttagaatttaccgatgtaatttcattagacatgtctacagttgtgccaactatttctggcccaaaaagacctcaagacaaggttttgttaactgatgcaccaacttcatttaaaaaagttttatctgaagcaaccaataaagatcaaaaatcaatctctaaagtctctaacactgattatgaaattcaagatggttcaattttaattgctgccataacttcatgtaccaatacttcaaatccaaatgttttaattggagcaggtttgcttgcaaaaaaagctgttgagtacggactagaagttaaaccatgggtcaaaacatcattagcacccggatctcaagttgtaactgactatttagaaaaagctggtttgaatacttatttagatcaattaggttttaatttagttggatatggatgcactacttgtattggaaactcaggaccattgcctgaaaatatagtagaggcaattcaaaaagaaaatattcatgcagtttctgtactatcaggaaatagaaattttgaaggaagaatttctcctcatatcaaatcaaactatttagcttctccaccattagtggttgcttacgcaatagcaggacacatggagttcgatttatacaaagatcctttaggaaaaagtaaagatggaaaagatatatttttaaaagatatttggccatcaaatcaagaaatagaggatactcttaaaacaatctttgaatgctga

SEQ ID NO: 282964 - DNA, 2176 bp, Unknown
  Bacterial polypeptide expressing nucleotide sequence isolated from the Sargasso Sea
atgaaaccaggtaaaaaaaattcttataagtctctttcagaaattagaattgatgataaaaaatttaagttttattccttaaaaaaagctgaggagaatggattaagtggtatttcaaaattaccaaaatctcttaaggtacttttagagaacctactaagatatgaagatgaaataactgtaacaaaaaatcagattgaatctttaaagcaatggttaatagataaaagatctaagacagaaattgcatacagaccagctagagttttattacaagattatactggtattccagcagttgctgatctggctgcaatgcgtgaggctgtaaaagataagaataaagatccagaaaaaataaacccattatcagcagtggatttagtaatagatcactcagttcaggtagatcaatctgcaaaatcagactcatttgataaaaacgtagaaattgaatttaaaagaaatggagaaagatattcttttttaaaatggggacaacaagcatttaataatttaagaattgttccaccgggaacaggaatttgccaccaggtaaatttagaatatttatcaaaagttgtatggaaggaaagatttgatggtgatgaatatatatttcccgatactttagttgggacagatagtcatacaactatggtcaatggattatcagttctaggttggggggttggaggaattgaagctgaggctggtatgttaggacaaccaatatcaatgttaattccagaagttattggttttgaaattaaaaataaaatgccagagggaactaccgcgacagatctagtattaacagttgtaaaaatgttaagagataaaggtgtggtaggaaagtttgttgaattttatggtgagggattaaagaatttatctcttgctgatcgtgcaactattgcaaacatggctcctgaatatggagcaacttgtggattttttccggttgatgatgagacattaagatatttaaaattctcaggaagagatcagtcaactgtaaagattgttgaggaatatgctaagacgcaaggcttatgggctagtaatgacatagagttcacagatactttaatattagatatgtctacaatagttcctacaatttctggtccaaagagaccacaagacaaagttttattatcaaatgcatccaacagctttagaaaaaattttaatgaggctatgaataaaaaaaacttttcatcatcaaaagttaatgggactgaatttgaaattaaagatggttcaattttgattgcagcaataacttcatgtacaaatacatcaaaccctaatgtactaataggtgcagggttggttgcaaaaaaagcagttgaacttggtttagaggttaaaccttgggtaaaaacctctttagctccaggatctcaagtagtaacagattatcttcagaaagcaggtttaaatatctatttagacaaacttggctttaatcttgtgggttatggttgcacaacttgtattggaaattctggcccattagcagataatattgttgaggcaatacaaagagaaaatatttatgctgtttcagttttatctggtaacagaaattttgaaggaagaatttcccctcatattaaagcaaattatttagcatctccaccacttgttgttgcttatgctttagctggaagaatggattttgatttatataaagagccattaggaaaagataaaaatggtaaagagatttttatgaaagatatttggccatcaaataaagaaattgaggaagttttaaaggactcattaagtgcggatatgtttattaaaagatattctaatgtttctgaggggccaaaacaatggcaagaaattaaaactgaaaaaagtagtatctatgattgggaggaaaattctacctatgtaaaaaaaccccctttttttgaaaatcttccagacaaacctgagggatttaaagaaattaaagatgccagacctcttttaattttaggagatatggttactactgatcatatttctcctgcgggcaacatacaaaaagagagtccaacaggtgagtattttatgaaacatcaaattttacctaaagattataactcttatggatcgcgacgaggtaatcacgaagtaatgatgagaggtactttcgcaaaatataagaattaaa

SEQ ID NO: 282965 - DNA, 1003 bp, Unknown
  Bacterial polypeptide expressing nucleotide sequence isolated from the Sargasso Sea
agttggaaaatttgtagaattctacggaaagggactgaaagagctatccgttcctgatcgagcaacaatttcaaatatggctccagagtatggtgcgacttgtggattttttccaacagacgaggagactgtaaaatttttaaaagttagcggaagagcagctgatgaaattaaacttgtagagagatattcaaaggcacaagggttatgggaagattataaaaaaaataaaagagtttacactgatacgatggaattagatttatcaagcattgaacctagcttggctggaccaaaaagacctcaagacaaaatactactgtcaaatgtagctgatcaatttatgacctcatttgaagacgaatttggccaaaagaaaacatcaaatcctatttctgtaaataatgaatttgaaattgatcatgggcatgttgccattgcggcaattacgagttgtaccaacacttcaaatcctagtgtaatgattggagcgggattgcttgcccagaaggcaaataagctaggtttaaaaactaaaccctgggttaaaacctctttagctccaggatctaaagttgttacggactacttggaaaaatctggactccaagagcaattagacaaactcggttttaatcttgtgggttttggttgtacgacttgtataggaaactctgggcctcttgataaaaatatttccgatgcagtttctaaaaatgacttaattgttagcggtgttctatcaggaaatagaaattttgaaggtagaataaatccatttgttaaagcaaattaccttgcctcgccacctcttgttgtagcttatgctttagcgggctcgacaaagatagatttatcaaatgaaccaattggtattggacacaataataagaaaatttatctaaaagacatctggcctaagactaaagaaataaaagttgtgataaataaaataataaactcaaatttgtataagcaacggtataaaaatgtttttaaaggt

SEQ ID NO: 282966 - DNA, 970 bp, Unknown
  Bacterial polypeptide expressing nucleotide sequence isolated from the Sargasso Sea
atgaaaccaggaacaaaagattcatttaaatctttaaaagatattaaaataaataattcaaactttaaatatttctcattaaatgaagctgaaaaaaatggattatatggcatatcaaaacttccaaagtctataaaagtacttttggaaaatttgttgagatatgaagatggttcgtcagttaataaagatcaaattctagctataaaaaattggcttaaaaataaaaaatctgaaaccgagatagcctacagacctgcaagagttttattacaagattatactggtattcctgcagttgctgatcttgcagcaatgagagaagctgtcaaagaaaaaaataaagatccaaatactataaatcctatttcttcagttgatttagttatcgatcactctgtccaagtagacaaatttgcaagtaaaaattcattaaaagaaaatgttgatatcgaatttgatagaaatgctgaaagatattcttttcttaaatggggccaacaagcatttaacaattttagaatagttcctccaggaacaggaatttgtcaccaagtgaatttagaatatttatccaaagtagtatggactgaaaaatacaaagatcaaaattatatttttcctgatactttagttggaacagatagtcatacaacgatggtgaatggattatcggtattaggatggggagttgggggaatagaagcggaagcagggatgttaggacaacctatttcaatgttaattcctgaagtaattggttttgagatgaaaaataaattaccagagggaactactgcaacagatctagttttaacagttgtgaagatgttaagagataaaggtgtagtgggtaaatttgtagaattttatggagaaggtctcaaaaatttaactttagcggatcgtgcgactatagctaatatggctcctgaatatggagctacatgtggcttcttccccaattgat

SEQ ID NO: 282967 - DNA, 1409 bp, Unknown
  Bacterial polypeptide expressing nucleotide sequence isolated from the Sargasso Sea
aatggtaaactcgctttctgttttaggatggggagttggaggaatagaagctgaggctgcgatgttaggacaagcaatttccatgaatattccagaggtcattggtttagaacttaaaggatcattgaaggaaggtataacagctaccgatttagttttatctattactaaaatgcttagagacaaaggtgttgtcggaaagtttgtagaattttatggtaaaggtttaaacaatttatcattagctgaccgagcaacaatatctaatatggctccagagtacggcgcaacttgtggatttttcccaacagatgaagaaacaattaattatcttaaattaactggtaaacaaagtgagcacctaaatatcgttgaagaatattcaaaaaaacaaacgctttgggcagacgaaaattattcaccaaatttttctgacaaaatattattagatttagaaacagtcgaacctactctcgcaggccctaaaagaccccaagacaaaattcttttaaaagaagtaccaaatgaatttagtaagatggacaacaaaaaaattacaaataaaaaaagattaaatacaggtgatgttgtaatcgcggccattactagttgtacaaatacatctaaccctaatgttatgatcgcagcaggtttagttgctaaaaaggcaattgatttgggtttagaagtaaagccttgggttaagacaagtttagcaccaggtagtaaagttgttagtgactatcttgataaagctggattaacagagtatcttgatcttttaggttttaatactgttggctatggatgtacaacctgtattggtaattctggccccttaaatgaatgggtgtcaaatgaaatcaaaaaaaataatttaactgtttgttcagttttatctggaaatagaaactttgagggtagagttcatcaagaagttaaagcaaactttcttgcctcgcctccacttgttgttgcttatgctattgcaggaaatattaatgttaaccttacaaccgactctataggtaaatctaaatctggaaaaaaaatatatctaaaagacttatggccatcaaataaagaaattaatcaaacacttagtttgtgtttaactccaatgatgtttaaagaaagatataaagaaatttacaaaggagatgataactggaaatcaattaacaattctaaaaacacaacgtatgactggaacgatactagtacttatataaaacaccctcctttttttgatataaaaaataaatttgaactaagagatataaataatgcaagaatattagcattacttggtgatagcgttacaactgaccatatttcacctgcaggaaatattaaagtagatagtcctgcaggcctctatttaacagatagacagattaactctagaa

SEQ ID NO: 282968 - DNA, 1003 bp, Unknown
  Bacterial polypeptide expressing nucleotide sequence isolated from the Sargasso Sea
ttagctggtcatatggaagtagatttatataaagatcctttaggaaaagataaaaatgataaagatatttttttaaaagatatttggccttcaaataaagaaatagaagaaacattaacagatgcattaaatgcaaaaatgtttgttgaaagatactcaaatgtttctgaagggccagttcaatggcaaaaaattaaaactgaaaaaagcagtatttataattgggatgaaggatcaacttatgtaaaaagaccacctttttttgataatatgtcggatgaaccagagggatttaaacagattaaagatgctagaccattattgattttaggagacatggtaactacagaccatatttctccagcaggatctattcaaaaagaaagcccaactggtgaatattttatggaacatcaaattttaccaaaagattataattcttatggatcaagaagaggaaatcacgaagttatgatgagaggaacatttgctaatataagaattagaaacgagatagcaccaggtactgagggtggttttacaaagttattcccagaaggtaaagtaatgtcagtttacaatgctgtagtagagtacaaaaaaagaggaactgatttagtcgtaataggcggaaaagaatatggaaccggttcatctagagactgggcagcaaaaggtactaaattattgggaattaaaacagttatagccgaaagttttgaaagaattcatagatccaatcttattggaatgggaattttgcctttacaattcatagatggaatgaatagatcaaatttaaatctaaaaggacctgagttaattagtgtaataaatatcgaaaaagggctatctccatcagatcaagtagaattagaaataaaatatatatctggagatattaaaaaaattaaaacattgtgcagaatagatacaaaaaatgagttagaatattataaaaacggtggaattttacaatacgttttaagaaacatgatttagt

SEQ ID NO: 282969 - DNA, 730 bp, Unknown
  Bacterial polypeptide expressing nucleotide sequence isolated from the Sargasso Sea
catggaatttaaaagtaaaaattcattccaatcactagacaaactgacagtatcagggaaaaaatataatttttttaacctagtaaaagctgaaaagaatggtttaaaaaatattaataaattacctaaatccattaaagttttattagaaaatttgctaagatttgaagacgatataactgttaacaaaaaacaaattgaagcaattgccgattggttaaaaaccaaaagctcaaaacaagaaatagcttacagaccagcaagaattttattacaagattacacaggtattccagctgtagcagatttagcagcaatgagagatgctgttaaatctaaaaataaagatccaaagaaaattaatccgctatcaacagtcgacttggttattgatcattctgtaatggtagacaactatgcaaaaaaagactcattttcaaaaaatgttcaaagagaatttgacagaaatggtgaacgatattcttttttaaaatggggacaaagtgcatttaataatttcagagtggtcccacctggaacaggtatttgtcatcaggttaatttagagtatttgtctaaagttgtttggtcttcagagactaacggagaattgtttgcttatccagataccttagttggaacagacagccacaccacgatggtaaatggtttgtcagttcttggttggggagttggtggtatagaagccgaagcagctatgttgggccaa

SEQ ID NO: 282970 - DNA, 1195 bp, Unknown
  Bacterial polypeptide expressing nucleotide sequence isolated from the Sargasso Sea
catgaaaccaggaaacaaaaattcttataattcacttaaaaaaatctcaatagatggtaaggattttaaatattactctttacctgaagcagaaaagaatggcctggatggaataagtaaacttcctaaatccctaaaggttttgcttgaaaatttattaagatacgaagatgacttgagtgttactaaatctcaaatagaagctattaagaattggcttaatacaaaaaaatctaaaattgaaattgcttacagacctgcaagagtacttcttcaggattatactggtatcccagctgtagccgatcttgctgcaatgagagaagcagtaaaagatagaaataaggatcctaatactatcaacccattatctgctgttgatctagttatcgatcactcagtacaggtagatcagtcagctaaagcagattcttttgaaaaaaatgttgatatagaatttgagagaaatggagaaagatactcatttttaaagtggggacagcaagcatttaataattttagaatagtgccacctggaacaggaatttgtcatcaagttaatttagagtatttatcgaaagttgtttggtcagaagagtttgaaggagataaatacctattcccagatactttagttggaacagatagtcatacaacaatggttaatggtttatcagttttaggctggggtgttggtggaattgaggctgaagcaggtatgttaggtcagccaatatcaatgttaatacctgaggttattggttttgagatgaaaaataaaatgccagaaggaactacagcaactgatttggttttaactgttgtaaaaatgttaagagataaaggagtggtaggtaagtttgttgagttttatggagaaggtttaaaaaatttgacacttgccgatagagctaccattgcaaatatggccccagaatatggtgctacatgtggtttttttcctatagatgaagaaacattaaagtatttaaaattttcaggaagagatcagcatacagtcaatgttgttgaaaattatgctaaagaacaaggattatgggcaagtaacgatatagaattctctgatatcatatccttagatatgtcctctgtggtcccaactatttcaggaccaaaaagacctcaagataaagtattattaactgatgcacctagttcttttaaaaagtattaa

SEQ ID NO: 282971 - DNA, 1135 bp, Unknown
  Bacterial polypeptide expressing nucleotide sequence isolated from the Sargasso Sea
aatgaaaaatagtttcgatacccaacatgagctcacaattaatggtgagcaatataatattcattctctgaaaggacttggcgacaaagcaaaacgactccccttctccttaaaagtcttgctagaaaatttactgcgcaacgaagacggcgaaaacatcaaagaacaagacattaatgcgctattaaattgggacccaaaagcaaaaccatcatctgaagttgcatttacccctgcacgagtagtaatgcaagattttactggcgtacctgccattgtcgatttagctgcaatgcgagatgcaatggaaaagctcggcggagatcctgcaaaaataaacccactgtcaccggccgaactcgtaatagaccattcagtacaagttgacggctatggaaatgatggtgcctttgatttaaatgcgaaacttgaatacgaccgcaacaaagaacgatacgaatttttacgttggggccaaacggcatttgataacttaaaagtggtaccacccgcaaccggcattgttcaccaagttaatttagaatacctggctcgcgttatttttaacgaagatagcaatggtaaaaagtttgcctaccccgatactctggttggcactgactcgcacacaaccatgattaatggcttaggcgtacttggctggggtgtaggcggcattgaggctgaagctgcaatgcttggccagccaattagcttactgattccacaggtagttggcatgaaacttaatggccgattaccagaaggcacaacagcaactgatttagtgctcacggtaactgaaattttgcgtaaccacggcgtggtgggtaaatttgtagaattttatggcgacggccttgcagatcttccccttgcagatagagcaaccattgctaacatggcacctgaatatggtgctacatgtggtatttttccaattgatgacgaaacgattaattatttacgtcttaccaaccgtgatgaagaccaactaaagcttattgaagattatgcaaaacaccaaggcttgtggcgtaacgatggcgacgaagctcgctataccgacacactagaactgaagctcgatgatgttgtaccaagcccttgcaggcccaaaacgcccacaagatag

SEQ ID NO: 282972 - DNA, 1381 bp, Unknown
  Bacterial polypeptide expressing nucleotide sequence isolated from the Sargasso Sea
atggtagacaaatataaaactcataatgctttggaactaaatgtaaaaaaagagttggaaagaaataaagaaagatacgaatttttaaaatgggggcaagagtcattcaataacttttacttagttccaccaggtgcaggaatatgtcaccaagtaaatttagaaaacatagctaaaacaatatggattaaagaaattaataaccaaaaatatttgtttccagattccgtagttggaacagatagccatacaactatggtcaattctctttcagttttaggttggggtgtaggtggtatagaagcagaagcagcaatgcttggacaacctatttctatgaacataccagaagttgtaggttttgaattaattggctcacttaaagatggtattactgcaaccgatttagttcttacaataacacaaattttaagaaaaagtggagtagtaggtaaatttgtagaattttatgggaatggtcttcataatttatctcttgctgatagagcaacaatttcaaacatggctccagaatatggagccacgtgcggtttttttccaactgataatgagacactaaactatttaaaattgacaggaaaaaataatcatcatttaaaaatagtcgaagaatatgcaaagaaacaatatatttgggcagatgaaagttataatccaatctatagaaaaaaaatagttttagatttaagtagcatcgaaccatctttagcaggacctaagcgtccacaagacaagatactcttaaagaatgttcctgatgaatttaaaaaaatagaaaaaaaatatgaatataattctaatcaaaaaattaataatggagatatagtgattgctgcaattacaagttgtacaaatacttccaaccccaacgttatggtagcagctggtttagttgcaaaaaaagcaatacaatataatttaaaagttaaaccatgggttaaaactagtttagctccaggcagtaaagttgtaagtgattatttagataaagcaggtttaactccttacttagataaaataggtttcaagacagtaggttatggttgcacgacctgcataggaaattcgggccccttagatagttgggtatcagatgaaattaaatcaaaagatcttacagtttgttcaatattatctggtaatagaaattttgaaggaagggttcaccaatctgttaaggccaattttcttgcatctccaccattagttgttgcatacgctttggcaggaaacattaatataaatcttgctagtgaaccaattggcaagtcaaaagatggtaaagaatattttttaaaagatctttggcctacaaatgaggaaattaataatctattaaattctttcataaccccctgaa

SEQ ID NO: 282973 - DNA, 1528 bp, Unknown
  Bacterial polypeptide expressing nucleotide sequence isolated from the Sargasso Sea
atgaagataaatagcaaagattcttttaaatctttaaaaaaattaaaagtagatagtaaaatttataatatatttagtctaaaagaagctgaaaaaaatggattagaaggtatttctaaattacctaaatcaataaaagttttactagaaaatttattaagatttgaagatgaaaaatcagttaaaaaggaacaaattttatctatcaaatcttggctaaataaaaaaaattcaaaaacagaaattgcttttagacccgccagagtcctcatgcaagattatactggtataccagcagtagctgatcttgcagctatgcgtgatgctgtaaaattaaaaaaaaaggatccaaaaaaaataaatccttcttcaacagttgatttagttattgaccattctgtaatggtagatgcttacgcttctaaagattcttttaaaaaaaatgtcgaaaaagaatttttgagaaatggagaacgttattcttttctaaaatgggggcagcaagcttttaataactttagagtggttccaccagggactgggatttgtcatcaagttaatttagaatatttatcaaaggttgtttggtcatctgataattttgcctatccagatacacttgtaggaaccgatagtcacacaactatggttaatggtctttcggttcttggttggggagtaggcggcattgaagccgaagctgcgatgctaggtcaaccaatatcaatgttaattccagacgttgttggctttaaaattaaaaataaacttacagaaggaactactgctactgatttagttttaacaatagttcaaatattaagacaggaaggagtggtcggaaaatttgttgagttttatggcgatggtttaaaaaatctttcattagcagatagagctactattgcaaatatggcacctgaatatggagcaacttgtggtttttttcctatcgatgaagaaactttaaaatatttaaaattttctggcagagatcaacatacaatttcacttgtagaaaaatattctaaagaacaaggactttgggcagacgataatatttcttttactaaagttttagatttagatttatctaaagttgtccctagtatttcgggccctaaacgtcctcaagataaggttttactctctgaatcgtcaaaatcgtttatgacttcttttaaaaaaaatatgaatagagaaaacgcaaaagaagaaatagtttcaggtgaaaattttaaattaaaagatggaaatattgttatagcagcgattacatcatgcaccaatacgtcaaatccaagtgtacttattggagcaggtttgcttgccaaaaaagctgttgaaaaaggattaaaagtaaaaccttgggtaaaaacttctttggcgccaggttctcaagttgtaacagattatcttgaaaaagcaggtttgaataaatatttggatcagcttggttttcatttagttgggtatggatgcacaacttgtataggtaattctggacctttaaaagaaaatatttcac

SEQ ID NO: 282974 - DNA, 1287 bp, Unknown
  Bacterial polypeptide expressing nucleotide sequence isolated from the Sargasso Sea
tcaaaacatctctagcgccaggatctcaagtagttactgactatttggaaaaagctggcttgaatgtccatttagataaattagggtttaatttagttggatatggatgcacaacctgcattggtaactcaggaccgttaccagataaaatttcagatgctataaaaaataataacatttatgcagtttcagttctgtctggaaatagaaactttgagggtagaatatctcctcttgttaaagcaaattacctagcatctccacctttagttgttgcatatgcaatcgcaggttcaatgaatgtagatctttataaggaccctcttggaaaaagtaaaaacggtgaaaatatatattttaaagacatttggccaacaaataaagaaatagaagaaacactaaaaaattctcttaatgcagaaatgtttactaaaagatattcagatgtaaccaaaggaccaattcaatggcaaaatattaaaactaaaaaaagtagtgtttataattgggaagataattctacatatgttaagaagccacctttctttgataatctatccgacgaaccagaaggctttaagaagatcaaagacgcaagaccattattaattttaggtgatagtgttaccactgatcatatttcaccagcgggaacaattcagaaagagagccctacaggtgaatattttatgaagcaccaaattttaccaaaggactataattcttatggttctagaagaggaaaccatgaagtaatgatgagaggaacatttgcaaatattaggattaaaaatgaaatggcgcctggaactgaaggtggatataccaaactatatcctgaaggaaaagttatgccagtatttgaagcagttgaggagtataaaaaaagaggaactgatctagtagtatttggaggaaaagaatatggcacaggttcgtcaagagactgggcagccaaaggaacaaaattgcttggtataaaagtagttatagctgaaagctttgagagaattcataggtctaatttaataggtatgggaattttaccattacagtttaacgatggaacagatagattaaatttaaaacttaaaggatctgaattgattagcattaacaatatagagaaaggcttctttcctcaagatcaagtagagttggaaattaaatacttatctggagaaattaaaaaaataaagactctatgcagaatagataccaataatgaactggaatattataaaaatggtggaatattgcagtatgttttaagaaaaatgatttaaa

SEQ ID NO: 282975 - DNA, 2389 bp, Unknown
  Bacterial polypeptide expressing nucleotide sequence isolated from the Sargasso Sea
atgaaaccaggaaatcaaaattcatttaaatgtttaaaagaaatatcagtaaatggaaaaaattattcatattattcactaaaagaagcagaggaaaatggtttggaaggcataaataaattaccaaaatcaataaaagtcttacttgaaaatcttctaagatatgaagataacgtgactgttaataaagatcagattctagcgataaaagagtggttaaattcaaaaaaatccaaaacagaaattgcatatagacctgcaagagtgcttttgcaagattatacaggtataccagctgtagctgatcttgctgcaatgagggatacagttaaggaaaagaataaagatccaaataccattaaccctctttcttcggttgatctagtgatcgaccattcagttcaagtggataagtttgcaacaaagaattcattaaaagagaatgttgatattgagtttgatagaaactttgagagatattcttttttaaagtggggacagcaagcctttaataattttagaattgttccaccgggtactggaatttgccatcaggtaaatttagaatatttatcaaaagtagtttggaacgaaaagtttgaagataaagagtatttatttccagatacgctagttggaactgatagccataccacaatggttaatgggttatcagtactaggttggggtgtgggaggaattgaagcagaagcaggtatgctgggacaacctatatcaatgttgataccagaagtgattgggtttgaaatgaaaaataaattacccgagggtacaactgctacagacttggttttaacagtagttaaaatgttaagagataaaggtgtagttggtaaatttgtagaattttatggagaaggtctaaaaaatctaacacttgctgatagagcaactattgccaatatggcgcccgagtatggagctacctgtggattttttccaattgatgaagaaacattaaaatacctagaattttcaggaagatcaaaagagaacattcaaatcgtagaaaaatatgcaaaagaacaaaatttgtgggcaagtgaagacgttgttttcactgatactttatctttagatatgtccacagtagttcctacaatttctggaccaaaaagacctcaagataaagttcttttaacagaagcatcaaaaaattttattaaagtttttgaagaagtatgtaaaaaaactgatccaacagtagcaaaagttaaagacacagattttgagataaaagatggagatatattaatagccgctattacatcatgtacgaatacctccaatccaaatgtattaattggtgcaggactgttagccaaaaatgcaattgaaaaaggcctaaatgttaaaccttgggttaaaacttcattagcacctggatcacaagttgttactgactacttagataaagcgggtttaagtaaatatttagatgagttaggttttaatttagttggttatggttgcactacttgtattggtaactctggacctttgccagataatattactgatgctgtcaaagaaaataatttatacgcagtttcagttttgtctggaaatagaaactttgaaggaagaatttctccattagtaaaagctaactatttagcatcacctccgcttgtagtagcttacgcaatagcaggatctatgagaatggatttgtataaagatccgttaggaaaagatagtaaaggacaagatgtttacttaaaagatatttggccctctaataaagagattgaagatactcttaaacaatctttaaaccctgaaatgtttgttaatagatattcaaatgtttcagaagggccagaacaatggcaaaaaattaaagtggacaaaggaagtatttataattgggaagaaaattctacctacgtaaaaaaaccaccattctttgaaaatttaccagatgaaccggagggctttaaggaaataaaagatgcaagaccattattaattttaggagatatggtaacaacggaccatatatctccagctggaagtattcaaaaagaaagcccaacaggaaattattttatgaagcatcaaattttgcccaaggattataattcttatggcgcaagaagagggaatcatgaagtaatgatgagaggaacatttgctaatattagaattaaaaatgaaatggctccaggcacagagggaggtttcactaaattatatcccgaggaaaaagtaatgcctatttatgatgctgttgttgaatataaaaaaagaggaacagatttagttgtatttgggggaaaagaatatggcactggttcttcaagagattgggcagcaaaaggaacaaaattattaggcataaaagctgtaaggcagaaagtttgaa

SEQ ID NO: 282976 - DNA, 1294 bp, Unknown
  Bacterial polypeptide expressing nucleotide sequence isolated from the Sargasso Sea
tatgaagataaatagcaaagattcatttaagtctttaaaaaaactaaaagtagataataaaaattataatatatttagtcttaaagaagctgaaaaaaatggactagaaggtatttcaagattacccaaatcaataaaagtgttactagaaaatttattaagatttgaagatagtaaatcagttaaaaaagagcaaattttatctattcaatcttggttagagaaaaaaaattcaaaaactgaaattgcttttagaccagctcgagttcttatgcaagattataccggtattccagcaatagctgatcttgcggctatgagagatgctgtaaaattaaaaaaaaaagatccaaaaaaaataaatcctttatcgacagttgatttggttatcgatcattctgtgatggtggatacttatgcttctaaagattcttttaaaaagaatgttgaaaaagaatttataagaaatggagaacgttattcttttttaaaatggggacagcaagcttttaacaactttagagttgttccaccaggaactggcatttgtcatcaagttaatttggaatatttatcaaaggtagtttggtcatctgataattttgcttatccagatacacttgtaggaactgatagtcatacaaccatggttaatggcctttccgttcttggttggggggtaggaggaattgaagctgaagctgcgatgttgggacagccaatatcaatgttaattcctgaagttgttggatttaaagttcaaaataaacttacagaaggaactactgctactgatttagttttgacaatagttcaaatactaagacaggaaggggtggttggaaaatttgttgaattttatggtgatggactaaaaaatctttcattagcagatagagctactattgcaaatatggcacctgaatacggagcaacttgtggtttttttcccatagatgaagaaactttaaaatatttgaaatttactggtagagaccaacataccatttcacttgtagaaaaatattctaaagaacaaggactttgggctgatgaaaatatttcttttactaaagttttaaatttggatttatccaaagttgttccaagcatttcaggtcctaaacgcccacaggataaggttttgttatccgaatcttccaaatcatttatgaagtcatttaaaaaagatatgaatagggaaaatataaaagaagaaatagtatcaggtgaaaattttaaattgaaggatggaaatattgttatagcagcaaattacatcaatgtaccaaca

SEQ ID NO: 282977 - DNA, 1723 bp, Unknown
  Bacterial polypeptide expressing nucleotide sequence isolated from the Sargasso Sea
atgaaaccaggtaacaaaaattcttttaaatctttaacgacaacaaaaatcaataataatgaatactattactattctttaaaattagccgaaaaaaatggattagatgggatatctaaattacctaaatctttaaaggtattgttagaaaatttattaagatacgaagacgatgagacagtaacaaaatctcaaattctagcactacaatcatggttaaaaaataaaaaatcagatactgaaatagcctataggcctgcaagagttttactacaagactatactggtataccagctgtagctgacttagctgccatgagagaagcagttaaagagaaaaataaggatccaaataaaataaatccattatcatcagtagatcttgtaatagatcattcagttcaggtcgataaatattcaactttgaattctcttaaagaaaatgttgaaattgaattccagagaaacgctgaaaggtattcttttttaaaatggggtcaacaagcatttaataattttagaattgttcctccaggaacaggtatttgtcatcaagtaaatttagaatatttgtcaaaagttgtttggatggaaaaatttaatagtaaaaattatatattccctgatactcttgttggaactgatagtcacacaacaatggtaaatggattatcagttttaggatggggagttggcggcatagaggcagaagcaggtatgcttggacaacctatttctatgttaataccagaggtagttggatttgaggtaaaaaacaaacttccggaaggcactacagcaacagatttagttctcacagttgtaaaaatgttaagagacaagggagtagttggtaaatttgttgagttttatggagaaggtttaaaaaatttaactttagcagatagagcaactatagctaatatggcacctgagtatggggcaacttgtggatttttcccaattgatgaagaaactttaaaatatttagaattctcaggaagagataaaaatcaagtagaaatagtaaagaaatatgcaattgaacaaggtctatgggcaagtagcaatatagaatttagtgacactttatctttagatatgtcaactgtagttccaactatatcaggacctaaaagaccacaggacaaagttttgttgacagatgcagcacaaaattttgaagaaaattttcagaaaaatactaatagaaaagatttcttaaaggtaaaagttaacaacgcagattttgagatacaagatggttcaatattaattgcagcaattacctcctgtacaaatacttcaaatccaaatgtactgattggtgcaggtcttttggcaaaaaaagcttgtgaacttggtttaaattctaagccttgggtcaaaacttctcttgcgcctggatctcaagtagtaactgattatttagagagagcaggtttaaatacatatttagataagttaggttttaatttagttggatacggatgtacgacctgcattggaaactccggacctcttgcagaaaatatttctgagtctgtgagcaaaaataatttatatgcagtttcagttctttcaggaaatagaaattttgaaggtaggatatctccattagttaaagcgaactatttagcatcacctcccttagtagtagcgtatgcaattgcgggaaatatgcaaatagacttgtataaagatcctttaggaaaaactccag

SEQ ID NO: 282978 - DNA, 2081 bp, Unknown
  Bacterial polypeptide expressing nucleotide sequence isolated from the Sargasso Sea
tgaaaaagttgaaaaaaataattatatttttcctgatacgctagttggaactgatagtcatacaacaatggttaatggattatctgtactaggttggggtgtcggaggaatagaagcagaggcaggaatgcttggtcagcctatatctatgttaatcccggaagtaattggatttgaaatgataaatagattacctgaaggaactacagcaactgacttagttttaactgttgttaaaatgttaagagacaaaggagttgtagggaaatttgttgaattttatggtgatggtttaaaaaatttaactttagctgatcgagctactatagcaaatatggcacctgaatatggtgctacttgtggattttttcctgtagatgaagaaacattaaaatatttaaaattttcgggaagagataagcacacagttgatatcgttgaaaattatgcaaaagaccagggattatgggcaagtaatgatattatttttactgataaattatctttagatatgttaactgtagtaccaacaatttctggcccaaaaagaccacaagataaagttttgttaactgatgcttctcaaaactttaaaaatgtttttaaacaaattacaaaaaaaacaaaaatatcttcctctaaagttgaaaatgaagaatttgaaattaaagatggggatattttaattgctgcaattacttcttgtacaaatacatctaatccaaatgttttaattggtgcagggttaattgcaaagaaagcagttgaaaaaggattaaaaacacaaccatgggtaaaaacttctttagcacccggatctcaagttgttactgattatttagaaaaagcaggattaaataagtacttagatgatttaggttttaatttagttggttatggttgtaccacttgtattgggaattctggacctctaaaagaaaatatttcagaagcaataaaaaaagaaaatatttatgcagtttcagtgctttcaggtaacagaaattttgaaggaagaatttcgccattagtaaaagccaactatcttgcatcaccacctttagttgttgcttatgcattagctggaacaatgagtattgatttatacaaagatcctttaggtaaagataatgatggtaaagatgtttatttaaaagatatttggcctagtaataaagaaattggagacattttaaaaaattcattaaatgcagacatgtttataaaaagatattcaaatatatctgaaggccctgaacaatggcaaaaaattaaaacagagccaactagtatttataattgggaagaaacctcaacatatgtaaaaaaacctccattttttgaaaatttacctgatatacctgaagatattaaagatattaatgaagcaagacctttattaattctaggagatatgatcacaaccgatcatatttccccagcaggaacaatccaaaaagaaagtccaacaggtgaatattttatgcaacatcaagtattgacaaaagattataattcatatggagcaagaagaggaaatcacgaagtaatgaaaaggggaacatttgccaatattagaattagaaatgaaattactccagaaacagaggggggatttactaaattatacccagaagaaaaagttatgcctgtatatgatgctgtagttgaatataaaaaaagaggaactgatttaatagttattgcagggaaagaatatggaacaggatcatctagagattgggcagctaaagggactaaattattaggaataaaagctgtactagctgaaagttttgagagaatacatagatcaaatttaataggaatgggagttttgcctttacaatttattgatggcatgaatagaaataatttaaatttaaaaggatctgagctaattagcattattaatattgaaaaaggattaaatccaagcgatcatgtggaagttcaaattaaatatcaattaggagaattaaaaaaaattaaaatgttatgtcgaatagataccaaaaatgaattagaatattataaaaatggtggaatcttacaatatgttttaaggaaaatgatataat

SEQ ID NO: 282979 - DNA, 1884 bp, Unknown
  Bacterial polypeptide expressing nucleotide sequence isolated from the Sargasso Sea
ccgcgagtgatttagttttgacaatagttcaaatgttaagaaaaaaaggtgttgtaggtaaatttgtagaattttttggaagtggattaaaaaatctttctttagcagatagagctactatcgcaaatatggcaccagagtatggagctacttgtggattttttcctacagatgatgaaacaataaaatatttaaaattttctggaagagatgaaaacacaatcgcacttgtagaaaaatattctaaagtgcagggtttgtgggctgatcaaaatgagaaaatagaattcaccgacactatatctttagacctaaattcagttgtaccaagtatttctggacctaagcggccacaagataaggttttattaactagtgcttctaaagattttgacaaagcatttaaagagaatacaaaacgaaaagttccgttagaagctaaagtaaaaaataaagattttaaaattaaagatggagatattgtaatcggtgctatcacttcatgcacaaatacttcaaacccgagcgtgatgatcggtgcaggattattagcaaaaaaagctgttgaaaaaggtttaaaagtaaaaccatgggttaaaacttcattagctccaggttcacaggttgttacagactatttagaaaaagctggactaaataaatttttagatcaattaggttttaacctagtaggttatggttgcacaacttgtattggaaattctggaccactagacaaagaaatctctgacactatacataaagaaaacttatatgcagtttcagttctatcgggaaatagaaattttgaaggcagaataaatccagacgtaaaagcaaattatttagcctcaccacctttggtagttgcttacgctttagcaggaaatatgcatcatgatctttataaagagccactaggtaaagacaaaagtggaaaagatgtatttctaaaagatatttggccgtcaaataaggaaatcgaggaactaatactcaaatctataaatgcagacatgtttgtaaagcgttactcaaatgtttcagagggaccaaaggaatggagctcaattaaaacaaaccaaagcagtatttataattgggaagataattctacctatgtaaaaagaccaccattttttgacaatttatcagataaacctgaaggatttaaaaaaattaaagatgcaagaccacttttattacttggtgacaccgtgaccacagaccatatctcacctgcaggatccattaaaaaagacagtccaacgggtgattattttatggaacatcaggtacaacaaaaagattttaattcttacggagctagaagaggaaaccacgaagtaatgttgagaggtacgtttgggaatataagaattagaaatgagatggcacctggtactgaaggtggttttacagttttacagccagatggaaaacagatgagtgtttatgatgctgctatggaatataaaaaaagaggtaacagcttagttgttattgcaggaaaagaatatggaacaggttcatcaagagactgggctgctaaaggaactaaattattaggagttaaggctgttatagctgaaagttttgagagaattcatagatctaatctggtgggaatgggaattctacctcttcaatttaaagaaggttttgatagaaaaaaattaaatattaaaggtactgagttgtttacaattattgacattgaaaaaggaataaacccaagagcagaggtaagttgtgaaattaaatatgctgatggatcaagcaaaactataaaactcttatctagaatagatactgaaaatgaaattgaatattacaaaaacggtggaattctccaatacgttttaagaaatatgctcaattaat

SEQ ID NO: 282980 - DNA, 1265 bp, Unknown
  Bacterial polypeptide expressing nucleotide sequence isolated from the Sargasso Sea
tatgaaacctggaaacaaaaattcatttaaatctctaaaatcaataaagataaataataaagattacaaatatttttctttagtagaggcagaaaaaaatggcttaaaaggaatttcaaatttaccaaaatcattaaaagttttattagaaaatttacttagatatgaagatgatttgtcagtttccaaagatcaaatagaagcagttcaaaaatggttaaaagaaaaaaaatcgaatactgaaatagcttacagacctgcaagagttttgttacaagattatactggaatacctgcggtagcagatttggcagcaatgcgagaagctgttaaggagaaaaataaagatccaaatactatcaatccactttctaccgttgatttagtcatagaccattcagtacaggttgatcagtctgcaaaacccgattcatttgaaaaaaatgttgatatagaatttaaaagaaatggtgaaagatattcctttttaaagtggggacagcaagcttttaataattttagaattgttccaccaggcactggtatctgtcatcaagtaaatttagagtatctatcaaaagttgtttggtcagaaaaatacaaagaagatgaatatttatttcctgatactttagttggaacagatagtcatactacaatggtaaacggattatctgtgcttggttggggagttggcggaatagaggccgaagcaggaatgcttggtcagccaatttcaatgttaattcctgaagttataggttttgaagtaaaaaataaaatgcccgaaggtactacagctactgatttagttttaacagttgtaaaaattttaagagacaaaggtgttgttggaaaatttgtagaattttatggagatggattaaaaaatctaacacttgctgatagagcaactatcgcaaatatggccccagaatatggagctacttgcggtttttttccaattgatgatgaaactttaaaatatttaagattttcaggaagaaatgaacatgcagtttctattgtagaaaaatatgcaaaagaacagggattgtgggtaagtcaaaacatagaatttactgataaggtttcactagatatgtctacaattgttccaacaatatctggaccaaaaagaccacaagacaaagttttattaaatgaagcatcatcagaatttaaaaaagtatttaaaaatactacagagcgaaagaaaaaacatatttcaaaagttaatagaactgattttgaaattaaagatg

SEQ ID NO: 282981 - DNA, 1537 bp, Unknown
  Bacterial polypeptide expressing nucleotide sequence isolated from the Sargasso Sea
catggaatttaaaagcaaaaattcatttcaatcattagatacgcttacagtttcaggcaagaaatataatttttttaatcttgtaaaagctgaaaagaatggtttgaaaaatataaaaaaacttccaaaatcaatcaaagtgcttctcgaaaacttattaagattcgaggatgacctaactgtaaataaaaaacaaattaaagctattgctgactggttgaacactaaaagctcaaaacaagaaatagcctatcggccagcaagaattttattacaagattacactggaataccagctgttgcagacctagctgcaatgcgggatgctgtaaaatcaaaaaataaagatccaaacaaaataaaccctctatcaactgtagacctagttattgatcattcagtgatggtcgataattatgcaaaaaaagattctttctcaaaaaatgtacaaagggaatttgatagaaatggtgaaagatattctttcttaaaatgggggcaaagtgcgtttaataatttcagagttgttccaccaggaacaggtatttgccatcaagttaatttggaatatttatctaaagttgtttggtcttcagaggccaacggccagttatttgcttatcctgatactttagttggaacagacagtcatactacgatggtaaatggtttatcagttcttggctggggagttgggggtattgaagcagaagcagctatgttaggtcaaccaatttcaatgttaatacctgaagtaattggttttgaaattaatgggaaactaactgagggaacaacagcaagtgatttagttttaacaattgtacaaatgttaagaaaaaagggtgttgttggaaaatttgtagaattttttggtgatgggctaaaaaacttatcattagctgatagagcaacaattgcaaatatggcgcctgagtacggagctacttgtggattttttcctattgatgatgaaactattaagtatttaaaattctctggaagagaccaaaatacaatttctcttgttgaaaaatattctaaagaacaaggactatggtcaaaccaaaatgatcaaatagaatttactgatacaatctcattagatttaaattctgtggttccaagtatttctggaccaaagagaccacaagataaagttttattaacaaatgctgcaaaagatttcgataaagcgtttaaagaaaatacaaaaagaaaggttcctttagaagctaaagttaataataaagaatttaaaattaaagatggcgatattgttattggcgcgattacttcttgtacaaatacatcaaacccaagtgttatgattggtgctggactagtagcaaaaaaggctgttgaaaaaggtttaaaggtaaaaccatgggtaaaaacatcattggcaccaggatctcaagtcgtaacagactatttagaaaaagctggattaaataagtatttagatcaattaggttttaatcttagttggctacggttgtactacttgtattggaaactctgggcccttagataa

SEQ ID NO: 282982 - DNA, 1537 bp, Unknown
  Bacterial polypeptide expressing nucleotide sequence isolated from the Sargasso Sea
ttatggcgatggattaaaaaatctaacacttgctgatagagcaactatcgcaaatatggccccagaatatggtgctacttgtggtttttttccaattgataatgaaactttaaagtatctaagattttcaggaagagaagaaaatgcagttcatattgttgaaaaatacgcaaaagaacaaggtttatgggaaagtgataatattcaatttacagataaggtttcgctagatatgtcttcaattgttccaacaatatctggacctaaaagacctcaagacaaagttttattaaatcaagcatcttcagaatttaaaaaagtatttgaaaatgttacagaaagaaaggaaaaacatatttcaaaagttaatggaactgattttgaaattaaagatggttctatactaatagctgcgataacatcttgtacaaatacctcaaatccaaatgttttaattggagctggtctgttagcaaaaaaagctgtggaattaggcttaaaaacaaaaccttgggtgaaaacctcattagcaccaggatcacaagttgtaactgattatttggaaaaagcaggtcttaataaatatctagatgaattgggattcaacttagttggttatggatgcacgacatgtattggaaattctggtcctttacctgataatattataaaagcaattgaaaaagaaaatatatacgctgtatcagttttatctggtaatagaaattttgaaggtcgtatatctcctcatataaaagcaaattatctagcatcacctcctcttgttgttgcttatgctttagccggtcatatggaattagatttatacaaagatcctttaggaaaagataaaaatgctaagaatatttttttaaaagatatttggccttcaaataaagagatagatgatactttaagtgaagcgttaaatgcaaaaatgtttgtcaaaagatactcaaatgtttcagaaggaccagttcaatggcaaaaaattaagacagaaaaaagtagtatttataattgggataaaggatcaacttatgtaaaaaggccacctttttttgataacctatcagatgagccagaaggatttaaacaaataaaagatgcaagaccattattaattttaggagatatggttacgactgatcatatttctcctgcaggctctattcaaaaagaaagtccaactggtgaatattttatgaaacatcaaattttaccaaaagattataactcttatggatcaagaaggggaaaccatgaagtaatgatgagaggaacatttgctaatataagaattagaaatgagatagcacctggcacagaaggaggatttacaaaactattcccagaagggaaagttatgccaatatatgatgcagtagtagaatataaaaaaagaggaacagatttagtagtcataggaggaaaagagtacggaacaggctcctctagagattgggcagcaaaaggtactaagttattaggaattaaagcagttattgcagaaagtttcgaaagattcatagatcaa

SEQ ID NO: 282983 - DNA, 1161 bp, Unknown
  Bacterial polypeptide expressing nucleotide sequence isolated from the Sargasso Sea
gctgtaaaagaaaaaaataaagatccaagtactatcaatccattatcatcagttgatttggtaattgatcactctgtacaagtagataaatttgcaaataaaaattcattaaaagaaaatgttgatattgaatttaatcggaatgctgaaagatattcttttcttaaatgggggcaacaagcattcaataattttagaatagttccaccgggaactggaatatgtcatcaagtcaacctggaatacctttcaaaagttgtttggaatgaaaaatataaaggtgaagaatatatatttccagatactttagttggaacagacagtcatacaactatggtaaatggcctatcggttttggggtggggcgtaggaggaattgaagcagaagctggaatgttaggtcaacctatttcgatgttaatacctgaagttattgggtttgaaatgaaatcaaaaatgccagaaggtacaacagcaactgatcttgttttaactgtagttaaaatgttaagagacaaaggagttgtgggaaagtttgtcgaattctatggtgaaggactaaaaaatctgactttagcagatagggctaccatagcaaatatggcacctgagtatggtgcaacttgtggttttttcccaatagatgacgagactttaaaatatttaaaattctcaggaagagatgatcaaaatgttgaaattgtaaaacagtatgctcaagaacaaggactttgggcaagtttagatgtagaatttacagacactctatctttagatatgtcaactatagtgccgactatttcaggaccaaaacgtccccaagataaagttttgctaactaatgcatcatcaaattttaaaaaagtgttttcagaagttactaaaaaagaagaaccaaatatttataatgttgaaaaagaagaatttaaaataactgatggtgatgttttaattgctgcaatcacttcttgcactaatacctctaatccaagtgtactaattggagcaggtttacttgcaaaaaatgcaattgaaaaaggtttaatgactaagccctgggtgaaaacgtctttagcacctggatctcaagtagttacagattatttagaaaaagctgggctgaatatttatttagataagttaggatttaatttagttggt

SEQ ID NO: 282984 - DNA, 1204 bp, Unknown
  Bacterial polypeptide expressing nucleotide sequence isolated from the Sargasso Sea
catgaattttaaaagtaaaaattcgtttcaatcattagacaaactagaagtttcaggcaagtcatactatttctacaacctttcaaaagcagaaaaaaatggtttaaaagatataaacaaactaccaaaatccataaaagttcttttagaaaacctattgcgtttcgaggataatgtcacggtagatagaaaacaaatagaaagtattgcaggctggttaaaaacaaaaagttctaaaatggaaatagcttacagacccgctagaattttattacaagattatacaggaattccggcagtagctgatctagccgctatgagagatgcggtaaaatcaaaaaacaaagaccccaaaaagataaatcctttatctgctgtagatttagtaatagatcactctgttcaagttgataattatgcaaacaaggattctttcacaaaaaatgttaaaaaagagttcgatcgtaatggagaaagatactcttttttgaagtggggacaaaatgctttcaataattttagagttgtacctcccggtacaggaatttgtcatcaagttaatttagaatatttatccaaagtcgtttggtccacagatattgacggaaaaactttcgcgtatcctgatactttggttggtactgatagccataccacaatggttaacggtctatcagttttaggttggggcgttggtggaatagaggcagaagcagcaatgcttggacaaccaatttcaatgttaatacctgaagttattggttttgagattaaaggaaaacttagcgagggaacaactgcgagcgatttagttttaacgatagttcagattttaagaaaaaaaggagtagttggaaaatttgttgaattttatggcgaaggtctaaaaaatctatctttagcagatcgagcaacaattgcgaacatggctcccgagtacggagcaacttgtggtttttttcccgttgatgaagaaacaataaaatatttaaaattttctgggagagatgaaaaaacaatttctttagttgaaacatattcaaaaaaacaaggtttgtggacaagtgatgaaatagagtttaccgacaaagtttcacttaaccttaattcagttgtaccaagcatatctggcccaaaaagacctcaggataaagttttacttacagaggccgcaaagaattttgataaagcttttaaagaaata

SEQ ID NO: 282985 - DNA, 1225 bp, Unknown
  Bacterial polypeptide expressing nucleotide sequence isolated from the Sargasso Sea
aaattttctggcagagatcaacacacaatttcacttgtagaaaaatattctaaagaacaaggactctgggttgatgaaaatatttcttttactaaagttttagatttagatttatctaaagttgttccaagtatttcaggtcccaaacgaccacaggataaggttttactatctgaatcatccaaatcatttatgacatctttcaaaaaaaatatgaatagagaaaatataaaagaagaaacagttccaggtgaaaattttcaattgaaggatggaaatattgttatagctgcgattacatcatgtactaatacttcaaacccaaacgtacttataggggcaggtttgcttgccaaaaaagctgtagaaaaagggttaaaagttaaaccatgggtaaaaacttcattagcaccaggctcccaagttgttacagattatcttgaaaaagcaggtttaaataaatatttagatgaactcggttttcatctagttggttatggatgtacaacttgcataggtaattcaggacctttaaaagaaaatatttctcaagctatacaaaaaggaaatttatatgcggtttcagttttatctggaaatagaaattttgagggaagaattaatcctgatgtaaaagcaaactatcttgcatcgccgcctttagttgttgcttacgcattagcaggatcaatgaattttgatttatataacgaccctttaggaaaagataaaaaaggaaaaaatatctttttaaaagatatatggccatcaaataaagagattgaagaattaattttaacttcaataaatgcagaaatgttttctagacgttactcaaaagtttcagaaggttcagaagattggaaaaaaattaaaactaccgaaagtagcatttataattggaatgacagttctacttacgtaaaaaaaccaccattttttgaaaaaatgtcggataatccggaaggttttaaaaaaattgctgatgcaagaccattggtaatattaggcgacatgataactactgatcatatttccccagccggttctataaaaaaagatagtcctacaggtgattattttatgaaacatcaagttcaacaaaaagattttaattcatacggagcaagaagaggcaatcatgaagttatggtacgtggagcatttggaaatataagaataagaaatgaaaaaaatccaggaactgaggggggttataccaaac

SEQ ID NO: 282986 - DNA, 993 bp, Unknown
  Bacterial polypeptide expressing nucleotide sequence isolated from the Sargasso Sea
ctggatctgtgtatacaaatctaacaaaggaccccttgggtattgacacaaatggtaatgaagttttcttgaaagatatatggccaagtaataaagaaattcgagatgcagttgaaaaaaatgtctcacctgaaatgtttaaaaaacaatactcaaacgctttagatggaccaaaagaatggcaagggattaatacatctacaggggacttatttaaatgggactcttcttcaacctatgtgcagcaaccccctttttttactggtcaatctgatgataaagaaattataccaattgaaaatgcaagacccttattgcttttggggaatagtgttactacagaccacatctcgcctgcaggtgctattaaagcagaaagtcctgcgggaggctattttatggagagacaaatacgacaaaatgattttaattcttatggcgccagaaggggtaatcatgaggtaatggttagaggcacttttgctaatataagaattaaaaatcagttactatcaaatgtagaaggggggtactcaattctagaacctgaaaaaaagaaaatgagtgtctatgaagttgccatggagtatgcaaaaagatctgaaaacgttgttgtttttgcaggacaagaatatggaactggttcctctagggattgggcagcaaaaggaacaaaactattaggcatcaaggccgttatagcagagagctttgaaagaatacatcgatcaaatttagttggaatgggggttcttccaatacaacttaatagccacaaactcgatgttctaaatataaaatcttctgaccttgtagatataaaactagataatgaaattaaacctctacaagatttggaagtatccattaaaagtgatgaaggtattaaagttttagaatgcactttaaggattgataccatcaacgaacttcaatactacaaagctgatggtatattaaattttgttttaaaaaatatattgaaaaattaaa

SEQ ID NO: 282987 - DNA, 1324 bp, Unknown
  Bacterial polypeptide expressing nucleotide sequence isolated from the Sargasso Sea
atagaagcggaggcaggaatgctaggtcaacctatctcaatgttaattcctgaagtaattgggtttgaattaaaaaataaattgccagaggggactactgcaacagatttagttttaactgtagtaaaaattttaagggataagggagttgttggaaaatttgtagaattttatggatctggtttaaaaaatctcagcttagcagatagagcaacaatcgctaacatggcgccagaatatggtgctacttgtggtttttttccaatagatgacgaaacacttaagtatttaaaattttctggaagagacaatcaaactgtcaaaattgtagaaagctatgcaaaagaacaaggattgtgggcaagtggaaacattgaatttacagatgttgtaaaattagacatgtcaacggtagttccaactatatcaggaccaaaaagaccacaagataaagtattattaacaaatgccaaagtctcgtttgaagaaaatttcaaagaaattacaaaaagatcaaccaagaaaatatctgaggtaaatggtgaagattttaaattaatggatggatctattgtaatagcggcaataacttcttgtacaaatacatctaatccaaatgttcttataggggcaggacttcttgcaaaaaaagcaattgacaaaggcttaaaggcaaaaccatgggttaaaacttctttagcacctgggtctcaagtagtcacagattatttaaataaatcaggactaaataaatatttagatgaactaggttttaatttagttggttacggatgtacgacatgcattggaaactctggcccattgcctgaaaatatttcaaactcaataaaggaaaatgatatttatgcagtatctgtattatctggaaatagaaattttgagggtagaatttctcctttagtaaaagcaaattatttagcttcacctccacttgttgtggcatattctttagtagggtatatgcattttgatctttacaatgatcctattggcaaagataaagagggaaaagaaatttttttaagagatatttggccgagcaacaaagaaattgaagaggttttattagcgtccttgaatcctacaatgtttagagaaagatattcaaatatttcaaaaggacctgagcagtggcagcaaataaaaaccaaagaaagtagtatttatgattgggatgataattccacttatgtaaaaaaaccacctttctttgaaaatctttctcaaaatcctgaaggatttaaacctataaaagatgcaagacctttattaatattaggagatagtgtaacaacagatcata

SEQ ID NO: 282988 - DNA, 1042 bp, Unknown
  Bacterial polypeptide expressing nucleotide sequence isolated from the Sargasso Sea
aaattatttagcttctcctccattagttgttgcatatgcacttgctggtcatatggaatttgatttatataaagactcttttggaaaagatcaaaatggaaaagatatttatttaaaagatatttggccatcaaataaggaaattgaagataccctaaagcaatcattaaatgcagaaatgtttattaaaaggtattcaaatgttgctgaaggtccaaagcaatggcaggatataaaaagtgaaaagagcagtatctataaatgggactcaggatcaacttatgtgaaaaaaccacctttctttgataatttaccagatgaacccgaagggtttaaacccattaaagaggcaagacctttgttgatacttggcgacatgattacaactgatcatatttcaccagctggaagtatccaaaaagatagtcccactggagattattttatggagcatcaaattttacctcaagattataactcttatggcgcgagaagaggaaatcatgaggttatgatgagaggtacatttgcaaatataagaattagaaacgaaatggcaccaggtactgaaggtggtttcaccaaactttatccagataacaaaatagttccagtttatgacgccgtagtggaatataaaaaaagaggaacagacttagttgtaattggaggtaaagaatacggtactgggtcctcaagagattgggctgcaaaaggaacaaaattacttgggattacacttgtgattgcagaaagttttgagagaattcatagatctaatttgattggtatgggagtgttacctcttcaatttatagatagtatggacagaaagagtctgcaactcactggatcagaattaataagtgttttaaatcttgaagaaggaataaatccttctgatcaagtggatgttgaaattaaatacatctcaggtgaaattaaaaaaattaaagcactttgtagaatagataccaaaaacgagcttgagtattacaaaaacggtggaatacttcaatatgttttacgtaatatgatttag

SEQ ID NO: 282989 - DNA, 1492 bp, Unknown
  Bacterial polypeptide expressing nucleotide sequence isolated from the Sargasso Sea
atttaaaaaagtattggaggaggcaacagataaaaaagaaaaatcagctgcaaaggttttaaattctgattttgaaataaaagatggatctatacttattgcagcaataacttcttgtacaaatacttcaaacccaaatgttttaattggagcaggtttgttagctaaaaaagcagttgagtttggattggaggttaagccatgggttaaaacttcattagcgccagggtcgcaggtcgttacagattacttggctaaatctggactaaatacttatcttgataaattaggctttaatttagtaggttatggatgcactacttgcattggtaactcaggtccattagcagataatattgttcaggctattcaaaaagaaaacatttatgcagtctcagttttgtcgggtaatagaaactttgagggaagaatttctccacatatcaaaggtaattatttagcctcacctcctttagttgttgcctatgccttagctggtcatatggaatttgatttatataaagattcgttaggaaaagataaagatggcaacgacatttatttaaaagacatctggccttcaaatgatgaaattgaaaatactttaaaacaatctttaaatgctgaaatgtttattaatagatattcaaatgtttctgaaggaccaagtcaatggcaaaaaattaaaactgatcacagcagtatttacaattgggacaaaggctcaacgtatgtaaaaaaaccaccattttttgactctttgccagatgagccagagggatttaaagaaataaaagatgcaagacctttgttgatattaggtgatatggttacaacggatcacatttctccagcggggagcattcaaaaagatagtccagcaggtgaatacttcatgaagcatcagattttaccaaaagattataattcatatggatcaagaagaggaaaccacgaagtaatgatgaggggaacttttgctaatatcagaataagaaatgaaatggctccagggactgaaggtggatttacaaaattatatcctgaaggaaaggttttatctgtttatgatgcggtagaggaatacaaaaaaagaggtactgatttaattgtaataggtggtaaagaatatggaactggttcttcaagagattgggctgccaaaggaacaaaattattaggagttaaagcagtattagctgaaagttttgaaagaattcatagatctaatttaattggaatgggtgttttacccttacaatttataaatgaagttaatagaaaaaatctaaatttgataggttcagaattaataagtattattgatattgaaaaaggaattaatccatctgatgaagtaatggtagaaatcaaatatgcatctggcgaaatgaagaaagttaaaacactgtgtagaatagatactaaaaatgaactggagtattataaaaatggtggaatattacaatatgtattaaggaatatgatttaa

SEQ ID NO: 282990 - DNA, 2370 bp, Unknown
  Bacterial polypeptide expressing nucleotide sequence isolated from the Sargasso Sea
aaagaaaaaacatataaatattatgatttaaagtcgctcgacagcgaaaaagtagatcgactccccttcactcataaaattcttctagaaaatgctcttcggcatgcagaaaatgatcatgaaggaccaaaagatgttgaaacaatattgaattggaatccaaaatctgatcaatcaactgaaatatcgtttactccaagtcgggtaattctccaagatttcactggcgtaccagctgttgttgatcttgcaacaatgagagatgcggttgtatccatgcagggtgatccaaaagacataaacccactttcgccagcagaactggtgatcgatcattcagtgcaagtagatcattttggaagtttggatgcgcttgaaaaaaataataaagttgaatttcaaagaaatcaagaaagatatcgatttcttaggtggggtcaggatgcattttccaattttgaagtggttcctccaaacactgggatcgtgcatcaggtcaatcttgaatacttgggtcgtgtagttttctctaaagatgattctttagcctatccggatacattggtgggaacagattcacataccacaatgatcaatggtataggttgcctgggatggggtgttggtggaattgaagctgaggctgctatgttggggcaacccatcacaatgcttctgccagaggtgattggggtttctgtaaagggttcactaaaagaaggtgtaaccgcaactgatctagtgcttacactgacagaaatattgagaaattatggcgtcgttggaaaatttgttgaattcttcggcgatggcttggatcatcttcctgtttctgatcgagcaacactgagtaacatggcgcctgaatttggaagcacttgtgcaatatttccaatagacgcagcaacaatcagatatttaaaactctcgggtcggcatgaagaacaagttgagctggttgaaacatactcaaaaatccaaggtttatggagagaatctgattcagaaattacctatacagatgtcattgaattggatctctctgaaatagagccatgcttgtctgggccaaagagacctcaagatagaataaagctcaaagatgttgcgagtgtcgttaagtctgaaattggagatgaacccagcagtcttgatcaaatctctagtggatcagtgctgatcgctgcaataaccagttgtaccaatacatcaaatccaacagttatggtcgcagcaggattggttgccaagaaagcgaatgcacttggattgaaatcaaaagaatgggttaaaaccagcttggcgccaggatcaaaggttgtcaccaagtaccttgaaaaatcgggactattacctgaattagaaacaatgggattcaatattgtcggatatggatgcacaacgtgcattggtaactctggtccacttgatcctgcagtcgccaaaatagttcaagaaaataatatatccgcctcatcagtgctatctggcaacagaaattttgaggggagaattcatccattggtaaaacataattttcttgcatcaccaccattggttgttgcatatgccattgcaggctcaacaatgctcgacttaaccaacgaacccttgggtaatgtcgaaggcaaagatatcttccttaaagatatttggccgagtcaaaatgaaatagaaaaaatcatcgaggaaactatagatccagttatgttcagtaaagcctatgaagattcaatacaaggtgatgatgcatggaagaatctagaaacacctcaaggtgaaatctatgaatggcaagagaactcgacttatataaaaaaaccgccctactttgaatcaatgacgatggatattccaggaataaaaaccataaaaaatgcaagagcccttgcattacttggagattctgtcaccactgatcacatttcaccggcgggcaatattgatccagaatcacctgcgggtagatatctaaaagataacggtgtagaaagaaaagatttcaattcatatggttccagaagaggcaatcatgaagtcatgatgagagggacatttgcgaatatccgtttgaggaataagcttgcgccaggaactgaaggtggctggacaaaactatcagaaaatgaagaatcaatctcaatttttgaggcagctgaagaatttagatcaaacgatactgacttaatagtactcgcaggcaaagaatatggtacaggctcctcgagagattgggccgcaaaaggagtctctcttttgggtgtaaaagctgtgatcgctgaatcttatgaaagaattcatcgctcaaacctcatagggatgggtgtactaccattggagttcaataatggtgagtctgctgaatcgatt

SEQ ID NO: 282991 - DNA, 1021 bp, Unknown
  Bacterial polypeptide expressing nucleotide sequence isolated from the Sargasso Sea
tatgaaaccaggaaataaaaattcttataaatctttaaaaacaataaatattagtgagaaaaattataaatattattctctagttgaagcggaaaaaaatggattaaaagatatttcaaaattaccaaaatcattaaaagttcttttagaaaatttgctcagatatgaagatgatttgtcagtaactaagaagcaaatagaggcagtaaaaaattggattaatgaaaaaaaatcaacaacagaaattgcttacagaccagcaagggttttactgcaagattatactggaatacctgcggttgcagatttagcagcaatgcgcgaagctgttaaagaaaaaaataaagacccaaatactattaatccactatcctcagtagatttagttatagatcattcagtgcaagtagatcaatctgctaagtccgattcatttgagaaaaatgtagatatagaatttaagagaaatggagaaagatattcttttttaaagtggggacagcaagcttttaataattttcgaatagttccaccgggcacaggaatttgtcatcaagtaaatttggagtatctatcaaaagtagtttggtcagaaaaatataagaacgatgagtatttatttccagatactttagttggtactgatagtcatacaacaatggttaatggactatcagttcttggatggggagttggtggaatagaggcggaagcaggaatgcttggccaacctatttcaatgttgattccagaagtaattggttttgagtttaaaaataaaatgcctgaaggcacaacagctactgatttagttttaacagtagtaaaaattttaagagacaaaggtgttgtaggaaaatttgttgaattctacggtgatggtttaaaaaatttaacacttgctgatagagctactattgcaaatatggcaccagagtatggagctacctgtggatttttcccaattgacgatgaaactttaaaatacttaagattttcaggacgagacgaacattcagtt

SEQ ID NO: 282992 - DNA, 2650 bp, Unknown
  Bacterial polypeptide expressing nucleotide sequence isolated from the Sargasso Sea
catgaaaccaggtacaaaaaattcatacaattcattaacagatataaagattaataataaagactttaaaattttttctttatctaaagctgagattaatggcctagatggtatatcaaagctacccaaatcccttaaggtattacttgaaaatcttttaagatatgaagatgacttgtcagttactaaaaatcaaattgaagcaataaaaaattggctaaaagaaaaaaaatctaaaactgaaatagcatatagaccagcaagagttttacttcaagactacactggaatacctgcagtagcagatcttgctgctatgcgagaagctgttaaggacaaaaataaagatccaaatacaattaaccctctttcagctgtagaccttgttattgatcactcggtacaagtagaccaatctgcaaaagcagactcttttgataaaaatgtcgaaattgaatttaatagaaatggagaacgatactcttttcttaaatggggacaacaggcatttaataactttagaatagttccaccaggaacggggatttgtcatcaagttaatcttgaatatctctcaaaagttgtttggtcagctgagcacgaaggtcaaaattatttatttcctgatacacttgttggtacagatagtcatacaacaatggttaatggcttgtctgttctaggatggggtgttggaggtatagaagcagaagcaggaatgttaggtcagccaatatctatgttaattccagaagttattggttttgaagtaaaaaataaaatgcctgaaggcactacagctactgacttagttttaacagttgttaagatgttaagagataagggtgttgttggaaaatttgtagagttttatggtgatggtttgaagaatttaactctagctgatcgagcaacaatagcaaatatggctccagagtatggtgcaacgtgtggattttttccaatagatgatgagactttaaaatatttaaaattttctggaagagatcagtccacagtaaaaatagtggaggagtatgcaaaagctcaaggattatgggcgagtgatgatattgaatttacagatactttaactctggatatgtctacaatagtgcctacaatttctggaccaaaaagacctcaagacaaagttttgctaactgatgcatcaacaagctttaaaaaaagttttaaagaaataactaataaaaaagatttctcaatagctaaagttcctaatactgattttgaaattaaagatggatctattctaattgcagcaattacatcttgcacaaatacttcaaatccaaatgttcttataggagcaggtttgctagcaaaaaaagcagtagagcttggtcttgatgtaaaaccttgggtaaaaacttcgttagctccagggtctcaagtggttacagattatttagccaaagctggcttaaacatttatttagacaaattaggttttaatttggttggttatggctgcactacatgcattggaaattctggtccattggcagataatatagttgaagctatccaaaaagaagatatttacggtgtttcagttttatctggaaatagaaattttgaaggaagaatttctcctcatattaaagcaaattatttagcatctcctcctttagtagttgcttatgctttagcgggacatatggaatttgatttgtacaaagactcttttggaaaagataaaaatggaaatgatatttttatgaaagatatttggccgactaataaagaaatagaagaaactcttaaatcatctttaaacgctgaaatgtttgttaaaagatactcaaatgtttctgaaggaccaaaacagtggcaagaaatcaaaacagaaaaaacaagcatttataattgggaagaaaattctacctatgtaaaaaaacctcctttttttgacaaccttccagatgaaccagagggttttcaagaaattaaagatgctagaccattactgatcttaggtgatatggtcacaacagatcacatttcacccgctggaaatattcagaaagaaagccctactggtgaatattttatgaaacatcaaatattacctaaagattataattcttatggttcaagaagaggtaatcatgaagttatgatgagaggaacttttgctaatataagaattaggaatgaaatggccccaggtacagaggggggttttaccaagctttaccctgaagataaagtaatgccaatttatgatgcagttgtggaatataaaaaaagaggaacagacctagttgttattggaggcaaagagtatggaacaggttcttctagagattgggctgctaaaggaacaaaactattaggagtaaaaactgtaattgctgaaagctttgaaagaattcatagatcaaatttgattggtatgggtattttaccattacaatttatagatgatatagatagaaaaaaacttaatttaattggatctgagttaataagtgtaatggaaattgaaaatggaattaacccctctgataagattaaggttgaaataaagtatgcctcaggagagatcaaaaagattcaaacattatgtaggatcgatactaaaaatgaattagagtattataaaaatggaggcatatttgcatat

SEQ ID NO: 282993 - DNA, 2359 bp, Unknown
  Bacterial polypeptide expressing nucleotide sequence isolated from the Sargasso Sea
tatgaaaccaggaaaacaaaattcatttaattgtcttaaagaactatcagtaaatggaaaaaattattcttatttttcactaaaagaagcagagaaaaatggtttagagggcataaataaattaccaaaatcaataaaagtcttacttgaaaatcttctaagatatgaagacaacgtgactgttaataaagaacagattctagcgattaaagagtggttaaattcaaaaaaatccaaaacagaaattgcatataggcctgcaagagtacttctgcaagattatactggaatacctgctgttgctgaccttgctgctatgagggatacagttaaggaaaagaataaagatcctaataccatcaatcctctttcttctgtagatcttgtgatcgatcattctgttcaagttgataagtttgcaacaaagaattcattaaaagagaatgttgatattgagtttgacagaaactttgagagatattcctttttaaaatggggacagcaagcctttaataattttagaattgttcctccaggtacaggaatttgtcaccaggtaaatttagaatacttatcaaaagtagtttggaatgaaaaatttgaggataaagagtacttatttccagatacgctagttggaactgatagccatactacaatggttaatggtttatcagtattaggttggggtgttggaggaattgaagcagaagctggtatgctgggacaacctatatcaatgttgataccagaagtgattgggtttgaaatgaaaaataaactacccgaaggtacaactgctaccgatctagttttaacagtagttaaaatgttaagagataaaggtgtagttggtaaatttgtagaattttatggagagggtctaaaaaatctaacacttgctgatagagcaaccattgcaaatatggcacccgagtacggtgctacctgtggattttttccaattgatgatgaaactttaaaatatttagaattttcaggaagatctaaagagaacattcaaatcgtagaaaaatatgcaaaagaacaaaatttgtgggcaagtgaagacgttgtttttacagatactttatctctagatatgtctacagtagttccaacaatttctggaccaaagagacctcaagacaaagttcttttaacagaagcatcaaaaaattttattaaagtttttgaagatatatgtaaaaaaactgatccaacagtagcaaaagttaaagacacagattttgagataaaagatggagatatattaatagcagctattacatcatgtacgaatacctccaatccaaatgtattaattggtgcaggactgttagccaaaaatgcaattgaaaaaggtttaacagttaaaccttgggttaaaacttcattagcgcctggatcacaagttgttactgactatttagataaagcaggtttaagtaaatatttagatgaattaggttttaatttagttggttatggttgcacaacttgtattggaaactctggacctttaccagaaaatattactgatgctgttaaagaaaataatttatatgcagtttcagttctgtctggaaatagaaactttgaaggaaggatttctcctttagttaaagcaaattatttagcttcacctcctcttgtagtagcttatgcaattgcaggatctatgagaatggatttgtataaagatccattaggaaaagataataaaggacaagatgtttacctaaaagatatttggccttctaataaagagattgaagatactcttaaacaatctttaaacccagaaatgtttgtgaacagatattcaaatgtctctgaaggaccagaacaatggcaaaaaattaaagtggacaaaggaagtatttataattgggaagaaaattctacctatgtaaaaaaaccaccattttttgaaaatttacctgatgaaccagaaggttttaaggaaataaaagatgcaagaccattattaattttaggggatatggtaacaacagaccatatatcgccagctggaagcattcaaaaagaaagcccaacaggaaattattttatgaagcatcaaattttgcccaaagattataattcttatggtgcaagaagaggaaatcatgaggtaatgatgagaggaacatttgccaatattagaattaaaaatgaaatggctccaggtacagagggaggtttcactaaattatatcctgaagaaaaagtaatgcctatttatgatgctgttgttgaatacaaaaaaagaggaacagatttagttgtatttggtggaaaagaatatggaactggttcctcaagagattgggctgcaaaggaacaaaattattag

SEQ ID NO: 282994 - DNA, 1647 bp, Unknown
  Bacterial polypeptide expressing nucleotide sequence isolated from the Sargasso Sea
ttgttgaaaagtatgcaaaggaacaagggttgtgggcaagtgatgaaattgaatttacagataaaatctctttagatatgtccactgtagttccaacaatttcaggccctaaaagaccacaagataaagttcttttaactgacgcatcaagcaattttaaaaaagtttttaaagaagctacagataaaaatgattataaaatttctaaggtaaaagatacggattatgaaattaaagatggttcaatactaattgcagcaattacatcatgtacgaacacttctaatccaaatgttctaattggagctggactacttgcaaaaaaagctgttgaattaggactgaatgtcaaaccatgggttaaaacatctttagctcctgggtctcaagttgtaactgattatttagaaaaggcaggtctaaatacatatttagatcaattaggattcaatttggttggttatggatgtacaacttgtattgggaattcaggacctttagcagaaaatatagttgatgctattcaaaaagaaaatttatatgcagtctctgttttatcaggtaatagaaactttgaaggtagaatttcacctcatattaaagcaaattatctagcatctccacctcttgttgtagcttatgctcttgctggtcatatggaatttgatttaatcaaagactcatttggaaaaggcaaaaatggtaaagatatttttttaaaagatatctggccttcaaacaaagaaatagaggatacactgaagatttctcttaacgcagatatgtttgttaaaagatattcaaacgtttctgagggaccaaaacaatggcaagaaatcaaaacagagaagagtagtatttataattgggatgaaaattctacttacgtaaaaaaacctcctttttttgaaaatcttagtgacgacccagaaggttttaaagagattaaaaatgctagaccattattgatattaggagacatggttactacagatcatatttctcccgctggtaacattcaaaaagatagcccaacaggtgaatattttatgaattatcaaattcttccaaaggattataattcttacggctcaagacgtggaaatcatgaggtaatgatgagaggtacatttgcaaacataagaattaaaaatgaaatggctcctggaactgagggtggttttacaaaattatacccagaggaagaagttatgtcagtttatgatgcagtagtagagtataaaaaaagaggaactgatttagttgtaattggtggtaaagaatatggtacaggctcctctcgtgattgggctgcaaaagggactaaattactaggtgttaaggtagtaattgcagagagttttgaaagaatacacagatcaaatttaattgggatgggaatattgccattacaatttacagaaaatatgaacagaaaaaatctgaatttattaggttctgaattaattagtgtggtagatattgaaaagggaattaatccatctgacaaagtaaaagttgagattaaatatgcatcaggagacgtaaaaataatagataccctatgtagaattgatactaaaaacgaattggaatactataaaaatggtggaatacttcaatatgttttaagaaatatgatttaga

SEQ ID NO: 282995 - DNA, 1030 bp, Unknown
  Bacterial polypeptide expressing nucleotide sequence isolated from the Sargasso Sea
cctggcatcaccaccactggttgttgcatacgcgttggctggaaacatgaatgtagatatcactaaagagccgttggggcaggcgagtgatggttctccggtatatctaaaagacatctggcctaccgaagacgaaattcagcaatatatagctgaaaacgtcaccggtgatttgtttaaagaaaagtatgcagatgtatttaaaggaagcggtgaatggaatgagctgcaggtgagtaaaacatcggtctacgactggccagaatcaacctacattaagcatccacctttctttgaagtaatgggtaaagagccagaggctctaactgcaattgaaaacgcacgatgcttggttaaggtgggcgattcgattactaccgaccatatttctccagccggcgccatcgcagaagatagcccagccggagagtacctgcaggcccaaggggttgagcctaaagactttaactcttatggatcgcgtcgtggtaaccacgaggttatgatgagaggtacgtttgctaacgtgcgtcttcaaaaccaattagcacccggcacaagaggcagtgctaccacacacttcccaagtggcgatagtatgtctattttccatgctgccatgcgttacaaagatgacggcgtaccagccattgtaattggtggaaaagagtacggtactggctcgagtcgagattgggcagctaaaggcccttctttgatgggggtgaaagcagtattagccgagagctacgagagaattcaccgctctaacctgattggaatggggattttgccacttcaatttaagtcaggtgatagcgcgagttctttggagcttaaaggcaatgagtctttttctattaacgctgttgaacgtgggcagactgaggttgaagttaaagccgtgtcggatgaaggaaaaacaacaacgtttatgatggatatcagaattgatacatcaaacgagttcacttactttgaaaacggcggcattctgcattacgtgataagagaatacttgaagaaatag

SEQ ID NO: 282996 - DNA, 1807 bp, Unknown
  Bacterial polypeptide expressing nucleotide sequence isolated from the Sargasso Sea
agtcctaatgccctcaaaaataatatggatattgagtttaaacgtaatcgtgaacgttatgaattccttaagtggggtaagcaagcattcgataattttaacgtatatcctccaggagtaggcatagtccaccaagtgaatctggaaactgtggcaagtgttgttcaatttagaaatggaatttttttcccagatacgcttgtaggcacagactctcacacaacaatgataaacggacttggtgtaatgggatggggagtaggcggaatagaggctgaatcggtaatgctaggacagccaatctatatgctgattcctgaagtaataggtttcagattacatggtcaacttagtgaaggtactacagctactgatctagtcctccacgttgtggaaatgctacgtcaaaaaggagtcgtggaaaaatttgtagaatttttcggacctggtataaataatctgaaattagctgaccgtgcaactctttcaaacatggccccggaatatggagcaaccatggggttttttcctgttgatgaggagactttaacttatttgcgtggtacaggtcgcccagaatcactggttcagagagtcgagcgatactgcaaaaaacagggactattccggacaaatgaaactcccgaccctgaattttctgacactttagagcttgatctttcaacaattgaaccttctcttgcgggcccaaaacgtcctcaggatcgcgtcaagctttcattgatgaagcctatgtggaaaaaagccctctgttctaataggagtgatggtggttttgaattgagtgcagataaactcaaaacagttattccattagagggagattcatcagaaaagttaacacatggatcagttgttattgctgccatcacgtcctgcactaacaccagtaatccttcagtgatgctagctgctggtcttttggcaaaaaaagcagttgaaaaaggattgaaaagaaaaccatgggtaaaaacttcacttggtcccggttctcgtgtagtctccgattacctaaaggcttcactcctggaggaatctcttgatgaacttggttttcacacagtaggctttgggtgcacaacatgtattggcaactcggggccacttccagagaaaattattgatgcgattaacgaaggagatctgatagttgcatctgtgttatcaggcaatagaaactttgagggaaggattaatcagcatgtaaaggcaaattatctggccagtccaccacttgtggtagcctatgcaatagcaggcaatgttaaccatgacttcaaaaatgatcctcttggaattggagaaaataaccaacaagtttttcttagagatatttggccaagtaatgaagagattaaggaagcagaaaaatttatttccagagaaatgtacctcaaagaatatgaaaatgcagaccaaagttccccaatgtggaatgcaatagaaactcctgctggagaagtttttcagtggaataaattttccacatatatacaaaatcccccttttttcaaaaatatggtattagatacaactccagtaaaggacatcactggtgcaagagttttagcaaaacttggtgactcagtgacaacagaccatatttcaccagcgggagcattttctccagatagtcctgctgggaaatatttacttgaaagagggactcaaacaaatgattttaattcttatggttctcgccgaggaaatgacagagtaatgactcgcggaacttgtgctaatattcgtttgcgaaatgagttggtaccagaaaatgagggaggat

SEQ ID NO: 282997 - DNA, 1297 bp, Unknown
  Bacterial polypeptide expressing nucleotide sequence isolated from the Sargasso Sea
aaaccttgggtaaaaacttctttagctcctggctctcaagtagtaactgactatttggaaaaagcaggattaaatatttatttagataaacttggttttaatttagtaggatacggatgcacaacatgtattggaaattctggaccattatctgaaaatattgtaagcgcaattgaaaaagaaaacatttatgctgtatcagttttatctggtaatagaaattttgaaggtcgtatttctccacaaataaaggctaattatttggcctctccaccattagtagttgcttatgctctagctggacatatggaatttgatttatacaaagatccgttgggaaaagacaaaaaaggaaaagaaatttatttaaaagatatttggccatctaataaagaaatagaagatgttttaaggaaagccttggatgctaaaatgtttataaaaaggtattcagatatttctaaaggaccaatacaatggcaaaaaattaaaactgaaaaaagtagtatttataattgggaccaaggatcaacatatgtaaaaaaacctccgttctttgataacatttcagatgaaccagaaggttttaaaaaaataaaagatgcaagaccattacttattttgggagatatggttacaacagatcatatatctccagcaggatctattcaaaaagaaagtcctgcaggtgaatattttatgaaacatcaaattttacccaaagattataattcatatggatcaagaagaggcaatcatgaagttatgatgagaggaacttttggaaatataagaataagaaatgaaatagcaccagggactgaaggaggatttactaaattatttcctgaaggaaaagttttgtcagtatatgatgctgttgtagaatataagaaaagaggaacagatttagttgtaataggaggaaaagaatatggcacaggatcctctagggactgggcagcaaaaggaactaaattacttggagtaaaagctgtaatagctgaaagttttgaaagaatccacagatcaaatttagtaggcatgggaatactaccactacagtttttagataaaatgaacagaataaatttaaaattaataggctcagaattaataagcataattaatttagagaaaggaatttcttattctgataaagtagatattgaaataaaatatgaatctggtgatattaaaaaaattaaaacattatgcagaatagatacaaaaaatgaattagaatattataaaaatggagggatactccaatatgttttaaggaatatggtataaa

SEQ ID NO: 282998 - DNA, 1464 bp, Unknown
  Bacterial polypeptide expressing nucleotide sequence isolated from the Sargasso Sea
gattttcaagaacaaacctttttgaaaaggaagtaaaaaatcataattacaaaatgcaagatggaaatgtagttattgctgctattacttcatgcaccaatacctcaaacccagatgttttagttgcagcaggactagttgctaaaaaagcttgtgaactaggattacaagtaaagccttgggtcaaaacctcattggcacctggttcaaaagttgttactgattatttggataaatctggcttaaataaatatttagatcaattgggttttcatttagtgggttatggatgcactacatgtattggaaattcaggtcctctagatgaagacattgcggagtgtattgcaaagaatgatttaacagtagcttctgtactttcagggaatagaaattttgagggaagagttaatccacatgttaaagcaaactatcttgcttcaccccctctagttgttgcctacgcattagctggatcagtgtatacaaatttaacaaaggaccccttgggtattgacacaaatggtaataaagttttcttgaaagatatatggccaagtaataatgaaattcgagatgcagttgaaaaaaatgtctcacctgaaatgttcaaaaatcaatactcaaacgctttagatggaccaaaagaatggcaagagattgatacatctacaggagacttatttaaatggaactcttcttcaacctatgtgcagcaaccccctttttttactggtcaatctgatgataaagaaattataccaattgaaaatgcgagacccttattgcttttggggaatagtgttactacagaccacatttcacctgcaggtgctattaaagaagaaagtcctgcgggaagctattttatggagagacaaatacgacaaaatgattttaattcgtatggcgccagaaggggtaatcatgaggtaatggttagaggcacttttgctaatataagaattaaaaataagttactgtcaaatgtagaagggggctactcaattctagaacctgaaaaaaagaaaatgagtgtctatgaagttgctatggaatatgcaaaaagatctgaaaacattgttgtttttgcaggacaagagtatggaactggctcctctagggattgggcagcaaaaggaacaaaactactaggcatcaaggccgttatagcagagagctttgaaagaatacatcgatcaaatttagttggaatgggggtgcttccaatacaacttaatagccacaaactcaatgatctaaatataaaatcttccgaccttgtagatgtaagactagataatgaaattaaacccctacaagatttggaagtgtccattaaaagtgacgagaatgttaaagttttagaatgcactttaaggattgatactgtcaacgaacttcaatactacaaagctgatggtatactaaattttgttttaaaaaatattctgaaaaattaaa

SEQ ID NO: 282999 - DNA, 1921 bp, Unknown
  Bacterial polypeptide expressing nucleotide sequence isolated from the Sargasso Sea
atcgtgcatcaggtcaatcttgaatacttgggtcgtgtagttttctctaaagatgattctctggcctatccggatacattggtgggaaccgattcacataccacaatgatcaatggtataggttgcctgggatggggtgttggtgggattgaagctgaggctgccatgttggggcaacccatcacaatgcttttgccagaagtcattggagtttccgtaaagggttcactaaaagaaggcgtaaccgcaactgatttagtacttacattgactgaaatactgagaaattatggtgtcgttggaaaatttgttgaattcttcggcgatggcttggatcatcttcctgtttctgatcgagcaacactgagtaacatggcacctgaatttggaagcacttgtgcaatatttccaatagatgcagcaacgatcagatatttaaaactctcgggtcgacatgaagaacaagttgaactggttgaaacatactcaaaaatccaaggtttatggagagaatctgattcaaaaattacctatacagatgtcattgaattggatctctctgaaatagagccatgcctatctggtccaaagaggcctcaagatagaataaagctcaaagatgttgcgagtgtcgttaagtctgaaattggagacgaatccagcagtcttgatgagatctctagtggatcagtgctgatcgctgcaataaccagttgtaccaatacatcaaatccaacagttatggtcgcagcaggattggttgccaagaaagcgaatgcgcttggactgaaatcaaaagaatgggttaaaaccagcttggcgccaggatcaaaggttgtcaccaagtaccttgaaaaatcaggactattacctgaattagaaacaatgggatttaatattgtcggatatggctgcacaacttgcattggtaactcgggtccacttgatcctgcagtcgccaaaagagttcaagaaaataatatatctgcctcatcagtgctatctggtaacagaaattttgaggggagaatacatcctttggtaaaacataattttcttgcatcaccaccattggttgttgcatatgccattgcaggctcaacaatgctcgacttgaccaacgaacccttgggtaatgtcgaaggcaaagatatcttccttaaagatatttggccgagtcaaaatgaaatagaaaaaatcatcgaggaaactatagatccagttatgttcagtaaggcctatgaagattcaatacaaggagatgatgcatggaagaatctagaaacacctcaaggtgaaatctatgaatggcaagagaactcgacttatataaaaaaaccgccctactttgaatcaatgagcatggatattccaggaataaaaaccatacaaaatgcaagagcccttgcattacttggtgattctgtcaccactgatcacatttcaccggcgggtaatattgatccagaatcacctgcgggtagatatctaaaagataacggtgtagaaagaaaagatttcaattcatacggttccagaagaggcaatcatgaagtcatgatgagagggacatttgcgaatatccgtttgagaaataaactcgcgccaggaactgaaggtggctggacaaaactatcagaaaatgaagagccaatctcaatctttgaggcagctgaagaattcagatcaagcgatactgacttaatagtactcgcaggcaaagaatatggtacgggctcctctagagattgggccgcaaaaggagtctctcttttgggtgtaaaagctgtgatcgctgaatcttatgaaagaatccatcgctcaaacctcataggcatgggtgtactgccattggagttcaataatggtgagtctgctgaatcgattggtcttaatggctttgagagttttgatattgact

SEQ ID NO: 283000 - DNA, 850 bp, Unknown
  Bacterial polypeptide expressing nucleotide sequence isolated from the Sargasso Sea
cttttatagaaagattattctaatatttttcagggagacaaacagtggggaaaaattaaatgtaaaaaaatcctctacttacgattggtctttgacttcaacatacataaaaaaaccaccatttttagattttgagaaaaatgagcttttgaaggacatcaaagctcgacctttgttgattcttggagattcaattacaacagatcatatatctccagcgggtgttattaaagaggatagttcggctgggaaatatttgagagatagacaaataaaggtagacgattttaattcttatggtgccagaaggggaaatcacgaggttatgactagaggaacatttgctaatattagaataaaaaataaaatggtttctaaatttggaggttacacaaagcattttaaaagcgataaagaaaatgaaatatatgaagtagcaaaaaaatatcagaaagaagatatccctttagtcgttttagctggtaaagaatacggcacaggctcatctcgcgactgggctgccaaaggaacaaagttacttggtgtaaaagttgtgatcgcggagagttttgaaagaattcacagatcaaacctagttggtatgggagttttaccactacaaattaatggttatcaccttaaaaaaaatcaatttcacggtaaggaaatttttaacattggaaaactcagagattatctcctgaaacctaacatagaaaaaaagttagaggtgaaaaagcataatggggaaaaattctatttggatgttatttctagaattgatacagaaaaggaaatcagatattttgaaagtaacggaattcttccatatgtgttaaacaacatttaa

SEQ ID NO: 283001 - DNA, 1027 bp, Unknown
  Bacterial polypeptide expressing nucleotide sequence isolated from the Sargasso Sea
gttgtgttatatgctctagctggaacagtaaatatagatttttcaaatgatcctatagggaatgataaagaaggcaaagcggtgtatcttgaagatctatggccttcatctaaagagatagaagatactattaataagtctctcacctcagaaatgtttattgatgaatatgaatctgtttttcaaggaccagaagagtgggtaaaactctcttcatctaaaggtaataaatttaattgggagaaacaatctacttatattcaaaaacctccgtattttgatgactttaatcttcaaccttcaaagaaaaatgaagtaaatcaagcaagatgtttagtaaaattatcaaattcagtaactactgatcatatttctcctgctggatctatcccacaatcagctccttcaggtcaaatgctgatttctagtgatgtcccaagatttgaatttaattcttatgggtcaagacgaggaaatcataatgttatggttagaggaacttttggaaatattagattaagaaatcaaatagtggaagaagaaggagattggactgtttattttcctacaggggaaaaaatgagaatattcgaagcttctgaaaaatatttacaatcagaaactcccttaatagttttagcaggtaaagaatatggtactggttcctcaagagattgggcagcaaaagggcctgctttacttggagtaaaggtagtgattgcagaaagctttgaaagaattcacagatctaatcttgttggtatgggtgttattccactccaatttcttgaaggagaaaattcagatagcttaaacttaaatggatctgaaatttatgactttgaaggattagaaaaaacaatagtcccaaactcaaaaattaaagtcaatgtcacaagagaaaatggtgaaaaatttagcttttatacaatgataagaattgatactgagatagaagcagaatattactataatggcggactgcttccttatgttttgagaaaaatggtgaaagaatctagctaat

SEQ ID NO: 283002 - DNA, 1224 bp, Unknown
  Bacterial polypeptide expressing nucleotide sequence isolated from the Sargasso Sea
aatatttagacgagctaggttttaatctagtaggttacggctgtaccacttgtattggaaattcgggacctctaaataaaaatatttctgacgcgatccacaaagaaaatttgtatgtagtttctgtactttcaggtaatagaaattttgaaggaagaattagtccagacgttaaagctaattacttagcttcacctccgcttgtagttgcatttgctttagcaggaaatatgaattttgatatatacaaagcttctctaggaaaagacaaagaaggtaaagaagtttttcttaaagatatttggccaagcaataaagaaattgaagatataatgttaaaatcaattaacgcgaatatgtttattgatcgttattcgaacgtttctaaaggtccaaaagaatggagtgatattaaaacagtagatagcagtatttataattgggaagacaattctacttacgtaaaaaaaccccctttctttaataatctatcagataagcctgagggatttaaaccaattaaagacgctagaatattacttttattagctgactcagtcactactgaccacatttctccagcaggaaatataaaaaaagatagtccaaccggcgattattttatgaaaaaacaggttcaacaaaaagattttaactcttatggggcacgaaggggaaaccatgaagtgatgatgagaggcacttttggaaacattaaaattagaaatgaaatggcgcccggtacagagggcggatttactacattacaaccagatggcaaagttatgagtgtatatgatgcggctattgaatacaaaaaaagaggaaatcatttagtggtaatggcaggaaaagaatatggcacggggtcctctagagactgggctgctaaaggaacgaaattgcttggaattaaagcagtaatagctgagagtttcgaaagaatacatagatcaaatttaattgggatgggtgttttaccccttcaatttaaaaagggttttgatagaaaaaaattgaagatttctggatccgaattaataacaataattgatatagataagggcattaaaccaagagatgaagtttcttgtgaaattaaatacaaagatggaacaattaaaattattaaattactttgtagaattgatactcaaaatgaagttgaatattataaaaacggaggaattcttcagtatgttctacgtaacatgcttaattaat

SEQ ID NO: 283003 - DNA, 837 bp, Unknown
  Bacterial polypeptide expressing nucleotide sequence isolated from the Sargasso Sea
tatgacatataagtctttttcgcagcttgaagtaaacggcaaaaacttcaaggcggttaattttgacggtataggcagtaaatatgcgctcgacaggcttccgttttgtatcaaaattcttttggaaaacctgattcgtcatgaagaccaagagtttgttaacagcaacgatattgagcaagtagcaaagtgggacacagataatcacgttgatcacgaagtgtcttttgttcccgcacgcgtcatcctccaagattttacgggagtgcctgctattgttgatttagcagccatgcgcgatgcggttaatcgtttaggtggcgacgctcaggcgattaacccactcaatccagtagagctggttattgaccattcagtaatggtagatcattttgctgaagacgatgcgcttgaaaagaataccgatatcgaaatccagcgaaatagagagcgttatcaatttctaaaatggggtcagtctagctttgacaatttcaaagtggttccccctggtcgcggtatcgtgcatcaggttaacctagagtatcttgctcgttgcgcgtttactaaggaacaggatggggaaaccttggtttacccagataccctagtaggaacagattcgcataccactatgattaatggccttggcgtacttggctggggtgtgggaggcattgaagcagaagcagcgatgctgggtcaaccagtaacaatgttattaccaaaagtggttggcttcaggctttcaggtaagttacctgctggcgtaactgccaccgacatggtgctaactatcacacaacaactacgtgaacatggtgttgttggaaagtt

SEQ ID NO: 283004 - DNA, 1066 bp, Unknown
  Bacterial polypeptide expressing nucleotide sequence isolated from the Sargasso Sea
agaatatcgccacatataaaagcaaattatttagcatcacctcctttagttgttgcgtatgctttagctgggcatatggaagttgatttatacaaagattctttagggaaaaataaagatggtaaagatatctatctgaaagatatttggccttcaaacaaagagatagaggagactcttaataaatctttaaatcctaatatgtttattaaaagatattcaaatgtatcattgggacctgcgcagtggcaaaaaattaaaacagataaaacgagtatttataattgggatgaaagctccacatatgttaaaagaccacctttcttcgatgctttatcagataaacctgagggttttaaagaaattaaagatgcgagaccattattaattttaggagatatggttacaactgatcacatttcaccagctggatctattcagaaaaacagtccaacaggtgaatattttatgaaacatcaagttttaccaaaagattacaactcatatggttcaagaaggggaaatcatgaggtaatgatgagggggactttcgcaaatataagaataaggaatgagatggctcctgggaccgaaggtggtttcacaaagctttaccctgagggtaaagtcatgcctatatatgatgctgtagtggaatataaaaaaagagaaacagatttaatagtaattggtggaaaagaatacggtacaggctcatcaagagactgggcagcaaaaggaacaaaacttttgggcattaaggccgtgattgccgaaagttttgaaagaatccatagatccaatctaattggtatgggtatacttcctttgcaatttatggaaggggttgatagaaaaaaactaaaactaactggttcagagttaatttctgttctaaaaattgaaaatggaataaatccatcagataaaattgaaatagaaatcaaatatcaatcaggcgatataaagaaaatcaaaacattatgtagaatagatacacagaacgaacttgagtattataaaaatggaggaattctacaatttgttttgagaaatatgatgtaaa

SEQ ID NO: 283005 - DNA, 1969 bp, Unknown
  Bacterial polypeptide expressing nucleotide sequence isolated from the Sargasso Sea
gaggccgcaatgttaggtcaacctatttcaatgttaattccagaagttattggcgtagagctcaaaggaaaattaaaagaaggtacaactgcaacagacttagttttaattattgttgaaatgctaagaaaaaaaggtgtggttggaaagtttgttgagttttatggagagggtttaaaaaatttaactttagctgatagagcaacaattgcaaatatggctcctgaatatggagctacatgtggtttctttccagttgatgatgaaactcttaaatatttaaaattatctggaagagatcaagaaacaatagctttagtcgaaaattactcaaaagcacaaggtctttgggcaagcaatgacgttgtatttacagatactctctcgttagatgtaagtagtgtcgtgacaagtatctctggaccaaaacgaccccaggataaagttttacttaccgaagcttcaactgcttttgcaaaagtttatagagaaaatgcaaaaagagataaggctatcgaagctaaagttgaaggtactgacttcaatataaaggatggtgatatagttattgctgcaataacatcttgtacaaatacttcaaatccaagcgtaatgctcggcgcaggtcttttagcgaagaaagcacatgaaaaaggattaaaagttaaaccttgggtaaaaacttcacttgcaccaggatcacaagttgtaactgactatttagaaaaagcaggtttaaataaatatttagatgaacttggttttaatctagttggttatggctgcacaacttgtattggtaactctggacctttaaatcaaaatatatcagatgcaataaataaaaatgatctttacgctgtttcagttttatctggaaataggaactttgaaggaagaattaatccagatgtaaaagcgaattatttagcttcacctccacttgtagttgcttatgctctagcaggtaatatgaatttcgatatgtacaaatcaccacttggcaaagataaaaatggcaaagatgttttcttaaaagatatttggccaagtaataaagaaattgaagatttaatgttaaattcattaaacgcagatatgtttaaaaaaagatattcaaatgtctcaaagggacctaaagaatggcaagctatcaatacaacagatagtgatatttataactgggaagctaattctacatatgtaaaaagaccgccattttttgatgatttacccgaccaaccagagggatttaaaccaattaatgacgcaagaattcttttattattagctgacacagtaaccacagatcatatttcaccagcaggaagtattaaaaaagaaagtccaactggcgattattttatgaagcatcaaatacaacaaaaagattttaactcttatggtgcaagaagaggaaatcatgaagtaatgatgagaggaacttttggaaatattaaaattagaaatgaaatggctcctggtaccgaaggtggatttacaacgttgcagccagatggaaaagtaatgagtgtctacgaagctgcaatggaatacaaaaaaagaaaaaatgatttagtagtaatagccggtaaagaatacggaacaggttcgtctagggactgggcagcaaaaggaactaaactcttaggaattaaagctgttttagcagaaagttttgagagaattcatagatcaaatttaattggaatgggagttttgcccttacagtttaaagatggtttcgatcgaaaaaaattgaacattacaggagctgagttagtttcagttgtagatattgacaaaggtgtaaagccaagacaagaggtgacttgtgaaattaaatatcaagacggaactagcaaaaaaattccaatgctttgtagaattgatactgctaatgaagtggagtattacaaaaacggaggaattttacagtatgttttaagaaatatgcttgctaattaaa

SEQ ID NO: 283006 - DNA, 1390 bp, Unknown
  Bacterial polypeptide expressing nucleotide sequence isolated from the Sargasso Sea
atgaaaccaggtaaaattaactctttcaaaactctttctgatatagaaataaataataaaaaatttaaattttattcattaaataaagcagaagaaaatggtttggagggtatttctaaattaccaaaatctcttaaagttttgttggaaaatttgttaagatatgaggatgatgtatcggttacaaaaaatcaaattgaggcaattaaaaattggttaaaagcaaaaaaatctgaaacagaaattgcttatcgacccgcgagagtgttactacaagattacactggaattcctgcagtggctgacttggcagctatgagagaagctgtgaaagaaaaaaataaagatcctaatacaattaatccactttctgcagtagatcttgttattgaccattcagttcaagttgatcagtctgctaaagcagattcgttcgacaaaaatgttgaaattgaatttaatagaaatggtgagagatattcttttttaaaatggggtcagcaagcattcaataactttagaatagttcctcctggaactggaatttgtcatcaagttaatttagaatacttatccaaagtagtatggaatgaagagtttgaaggacaaaattatctttttccagacacattagtaggaaccgatagtcatactaccatggttaatggactttcagttttaggatggggagtaggtggtattgaagctgaagcgggtatgttaggtcagcctatttcaatgcttattcctgaagtaataggttttgaagtaaaaaataaaatgccagaaggcactactgcaacagatttagttctaacagttgttaaaatgttaagagacaagggtgtggttggaaagtttgtagaattttatggtgatggtttaaagaatttaactttagctgatcgtgcaacaatagcaaatatggctccagagtatggagcaacttgtggattttttccgatagatgaagaaaccttaaagtatttaaaattttccggtagagatgaaatgacagtaaaaatagttgaggaatatgcgaaagctcagggtctgtggtctagtgaagatattgattttactgatactttaactttagatatgacaactattgttcctactatttcaggaccaaaaagaccacaagataaagttttattaactgatgcttcaactagttttaagaaaagtttttctgaagtaactggtaaaaaagatttttcagtttcaaaagttaaagacaaagaatattcaattaaagatggatctattttaattgcagcaattacatcttgtacaaatacttctaatccaaacgttttaatcggagcgggacttttagctaagaaagcagtggaattaggattagaggtaaaacccatgggttaaa

SEQ ID NO: 283007 - DNA, 1075 bp, Unknown
  Bacterial polypeptide expressing nucleotide sequence isolated from the Sargasso Sea
atgaaaccaggaaataaaaattcttataattctttaaaaaaaattttgatagataataaagattttaaatattactctttacctgaagcagaaaaaaatggcctggatggtataagtaaacttcctaaatctctaaaggttttgctggaaaatttattaagatacgaagatgacttgagtgttactaaatctcaaatagaagctattaagaattggcttaaaacaaaaaaatctaaaactgaaattgcttatagacctgcaagagtacttcttcaggattatactggtatcccggcagtagctgatcttgctgcaatgcgagaagcagtaaaagataaaaataaagatcctaatactattaacccattatctgctgttgatcttgttatcgatcattcggtacaggtagatcagtcagctaaagcagattcttttgaaaaaaatgttgatatagaatttgaaagaaatggtgaaagatattcttttttaaaatggggacagcaggcgtttgataattttagaatagttccaccaggaacaggaatttgtcaccaagtaaatctagaatatttgtcaaaagttgtttggtcagaagaatttaaaggggaaaaatatctttttccagacactttagttggaacagacagtcatacaacaatggtaaatggtttatctgttttaggatggggtgtaggaggaattgaagctgaagcaggaatgttaggtcaaccaatttctatgttaataccagaagttattggttttgaaatgaaaaataaaatgccagaaggtaccactgcaactgatttagtattaactgttgttaaaatgttaagagataaaggagtggtcggtaagtttgttgaattttatggagaaggtttaaaaaacttaacacttgcagatagagctacaattgcaaatatggcaccagaatatggtgctacttgtggtttttttcctatcgatgaagaaacattaaagtatttaaaattttctggtagagatcaacatacagtggctattgttgaaaatatgctagagaacaaggtctgtgggcaagtaatgatataga

SEQ ID NO: 283008 - DNA, 1099 bp, Unknown
  Bacterial polypeptide expressing nucleotide sequence isolated from the Sargasso Sea
tatgaccccaggaaataaaaattcttataaatcactaaaaaaaatcacaattaatgacaaggaatataattattactcattaaatgaagcagaaaaaaatggacttgaaggaataaataaacttccaaaatctcttaaagttttactagaaaatttattaagatacgaagacgacttaagtgtaacaaaatctcaaatagaagcgattaaaaactggctaaagacaaaaaaatctaaaactgaaattgcatatagaccagcaagagttttgcttcaagattatacaggaatacctgcagttgcagatttagctgcaatgagagaagcggtcaaagaaaaaaataaagacccaaatacaatcaatccattatctgcagttgatcttgtaattgatcactcagtacaagtcgaccagtctgcaaaagcagattcttttgaaaaaaatgtagatatagaatttgaaagaaatggtgagagatattcttttttaaaatggggacagcaggcatttgataattttagaatagttccaccaggaacaggaatttgtcatcaagtaaatctagaatatttgtcaaaagttgtttggtcagaggaatttaaaggtgaaaattatctttttccagatactttagttggaacagacagtcatacaacaatggttaatggtttatctgttttaggatggggtgttggaggaattgaagctgaagcaggaatgttaggtcaaccgatttctatgttgataccagaagttattggttttgaaatgaaaaataaaatgccagaaggaaccaccgcaactgatttagtattaactgttgttaaaatgttaagagataaaggagtggtcggtaagtttgttgagttttatggagagggtttaaaaaatttaactcttgcagatagagctacaattgcaaatatggcaccagaatatggtgctacctgtggtttttttcctatcgatgaagaaacattaaaatatttgaaattttctggaagagatcaacaaactgttgatatcgtagaaaattatgccaaggaacaaggtttatgggcgagtaatgaaatagaatttactgacattatatcttag

SEQ ID NO: 283009 - DNA, 1013 bp, Unknown
  Bacterial polypeptide expressing nucleotide sequence isolated from the Sargasso Sea
agcatatgcactagcaggtcatatgaaatttgatttttataaagacacattgggtaaatctaaagatggaaaggatattttcttaaaagatatttggccatcgaataaagaaattgaagatacgttaagcaattctctaaacgcagaaatgtttattaatagatattcgaatgtatcgaaaggaccatctcaatggcaaaatattaaaacaaaagaaagcagcatttatgaatgggatgataactcaacatatgtaaaaaaacctccattctttgacaatcttaaagatagtccagatggattcaaagatataattaacgcaagacctctattaattctaggagatatggttacgacagatcatatctcaccagctggctcaattcaaaaagagagtcccacgggtgactattttatgaaaaaccaagttctacaaaaagattttaattcttacgggtcgaggagaggcaatcacgaggtaatgatgagaggaacttttgcaaatattagaattagaaacgagatggcaccaggaactgagggaggttttactaaattatatcctcaagaaaaaataatgccagtttttgaagcagtagaggagtacaaaaaaagaaaaactgatttaatagtcattggcggtaaagaatatggaacgggctcttcaagagattgggcagctaaaggcacaaagcttttaggagtaaaatctgtatttgctgaaagttttgaaagaatacatagatcgaatttaattgggatgggaatattgccattacaattcatagatggcatggacagaaaaaaattaaaacttacaggttcagaaataattacagttaacggaatagaaaaaggactaaatcccggagataaattatctgttgaatttaaatatcaaaatggagaaataaaaaaaattaaaatgctgtgcagaatagatactaataatgagttagaatattataaacacggtgggattcttcaatacgttttaagaaatacaatttaac

SEQ ID NO: 283010 - DNA, 1594 bp, Unknown
  Bacterial polypeptide expressing nucleotide sequence isolated from the Sargasso Sea
tttactgatataatttctttagatatgtctactattgttccaactatttcgggtcctaaaagacctcaagacaaagttcttttaacagatgcacctaattcatttaaaaaagtattacaggactcagcaaataaaaatgataaatcattttcaaaagttgaaaacacagaatatgagataagtgatggttcaatcttaattgcagcaattacctcttgcacgaatacatcaaatccaaatgtcttaattggagcaggattacttgcaaaaaaagctgttgaattaggtttagacgtaaaaccttgggtaaaaacttctttagctccgggatctcaagtcgtaactgattatttagaaaaagctggattaaatgtatatttggataaattaggatttaatttagtaggttatggatgtaccacatgtataggtaattctggaccactcccagaaaatatcgttgatgctattcaaaaagaaaatatttatgcagtttcagttttatctggtaatagaaattttgagggaagaatctctccacatataaaagcaaactatctagcctcaccaccattagtagttgcatatgctattgcaggtcatatggaatttgatctatacaaagacgcattaggtgaagataaaaagggaaatgaaatatttttaaaagacatatggccatcaaataaagagatagagcaaactctaaaacaatcgcttaacccagaaatgtttgttgaaagatattctaatgtttcagaaggacctactcagtggcagaaaattaaaactgaaaaaagtagtatatataattgggatgaaggctcaacctatgtaaaaaaacctcctttctttgagtcactaccagatgaaccggagggatttaaagaaattaaagatgcaagaccattattaattttaggagacatggtgactacagatcatatatcgccagctggaagcattcaaaaagatagcccaacaggcgaatattttatgaaaaatcaaattttgcccaaagattataattcatatggatcaagaagaggaaatcatgaagttatgatgagaggaacatttgcaaatattagaataagaaacgaaatggctccaggtaccgaaggtggatttacgaaattgtacccagaggaaaaaattcttcctatatatgatgcggttgtagaatataaaaaaagaggaacagatttagttgtaattggaggaaaagagtatggaactggttcctcaagagattgggcagcaaaaggaacaaaattacttggaattaaagctgtaatagcagaaagttttgagagaatacatagatctaatttaatagggatgggcatcttgccgttgcaattcattaacgaagttaatagaaagaatttaaaattaataggatctgaattaattagtataattgatatagaaaagggaattaacccttcagaggaattaatggtggaaattaaatatgcttctggtgaaatgaaaaaaattaaaactttgtgcagaattgatacgaaaaatgaattagagtattataaaaatggaggaattctccaatatgtattaaggaatatgatttagt

SEQ ID NO: 283011 - DNA, 2167 bp, Unknown
  Bacterial polypeptide expressing nucleotide sequence isolated from the Sargasso Sea
catggaatttaaaagtaataattcatttgaatcattagataagttaatagtttcaggcaaaacgtatcatttttataatctaataaaggcagaaaaaaagggtttaaagaatattaaaaaattgccgaaatctttaaaagttctgcttgaaaacttattacgatttgaagacggagtaacagtcgacaaaaaacaaatagaggctattggtgaatggctaaaaacaaaaaaatctaaaactgaaatagcttataggcctgcaagaattttattgcaggattatactggaatacctgcggttgctgaccttgcggcaatgagagacgcagtaaaatctaaaaacaaagaccccaaaaaaatcaatccactgtccacagtagatttagtaattgatcattctgtaatggtagataattacgcaaaaaaagattctttcacaaaaaatgttgagaaagaatttgaccgaaatggtgagagatattcttttttgaaatggggtcaaaatgcttttaataatttcagggttgttccgccgggaacaggaatttgtcatcaagtaaatttagaatatttatctaaagtagtttggtcttccgagagcaaaggaaaaacttatgcctacccagatacattagtaggaacagacagtcatactacaatggttaatggactttcagttctgggttggggcgttggcggaatagaagcagaagcagctatgcttggacaaccaatatcaatgttaatacctgaagttattggttttgaaataaaaggaaaacttgctgaaggaacaaccgctagtgatttagttttaacaatagtacagatgttaagaaaaaaaggtgtagtaggtaaatttgtagaattttatggtgatggtttaaaaaatttatctctagcagatagagcaacaatagcaaatatggcaccagagtatggagctacttgtggtttttttcctattgatgaagaaacaataaaatatttaaaattttctggaagagataaaaaaactatatctttagttgaaaaatattccaaagaacaaggtttgtgggcaagtggagaaatagaatttactgatactatctctttagatttaaatacagttgtgccaagtatttcagggccaaaaagacctcaagataaagttttacttactgaagcaacaacaagttttgataaagctttcaaagaaaatacaaaaagaaaggttcctttagaagtcaaggtagataaaaaagattttaaaataaaagacggagatattgtaattggtgcaattacctcttgtacaaatacttcaaacccaagtgtaatgatcggagcaggattggtagccaaaaaggctgttgaaaaaggtttaaaagtaaaaccatgggttaaaacttctttagccccaggttctcaagtagtaactgactacttggaaaaagctggtttgaacaaatatttagatcaattaggttttaaccttgtaggttatggctgcacaacttgtataggaaattctggacctttagataaagaaatttcagatactatacacaaagaaaatttatatgcagtttctgttctatctggaaatagaaattttgaaggaagaatcaatccagatgtaaaagcaaattatttagcatctcctcctttagttgttgcctattctttagctggaaatatgcatcatgatttatacaaaaatcctttaggcaaagatcaaaatggaaaagatatatttttaaaagatatttggccaactaataaagaaatcgaagagctaatattaaaatctattaatgcagatatgtttgttaagcgttattcaaatgtttccgaaggcccaaaggaatggagttcaattaaaacagataaaagtagtatttataattgggaggaaagttcgacctatgtaaagagaccgcctttttttgataatttacctgacaaaccaaaaggatttgaaaaaataaaagatgcaagaccacttctaatacttggtgatactgtaactaccgatcatatctcaccagctggatccataaaaaaagatagtcccacaggtgattattttatgaaacatcaggtgcagcaaaaagattttaattcttacggagccagaagaggtaatcatgaagttatgttgagaggaacattggaaatataa

SEQ ID NO: 283012 - DNA, 1021 bp, Unknown
  Bacterial polypeptide expressing nucleotide sequence isolated from the Sargasso Sea
gtggttgcttacgctttagcaggaaatatgcatcatgatttatataaaaatcccttagggaaagatcagaaaggaaaagacgtatttttaaaagatatttggccaaccaataaagaaattgaagagttaatattaaaatctattaatgccaatatgtttgttaaacgttactcaaatatttctgaaggaccaaaagaatggagctcgattaagacagatcaaagtagtatttataattggcaggaaagctcaacgtatgtaaagagaccacctttttttgataatttaccagataaacctgaaggatttaaaaaaataaaagatgcaagaccgcttttaatacttggagatacagtaacaaccgatcatatatcaccagctggatcaattaaaaaagatagtccaacaggcgaatattttatgaaacatcaagttcaacaaaaagattttaattcttatggcgctagacgaggtaatcatgaagtaatgttgagaggaacattcggaaatattaggataagaaatgaaatggcgcctggtacggaaggtgggttcacaatattacaacctgatggaaaacagatgagcgtgtacgaggcagctgaagaatataaaaaaagaggtaatagtcttgttgtaattgcaggaaaagaatacgggacaggctcatctagagattgggctgccaaaggaactaaattattaggtatcaaagcagttattgctgaaagttttgagagaattcatagatccaatcttgttggaatgggtattttgcctcttgaattcaaagctggattcgacagaaaaaaattaaatatcaaaggcactgaattattcactatcattgatattgaaaaaggaattaatcctagagcagaagttagttgtgagattaaatatgctgatggttccagtaaaaccattaaacttttatcaagaatagatactgaaaatgagattgaatattataagaacggtggaattctacaatttgttctaaggaatatgatcaactaaa

SEQ ID NO: 283013 - DNA, 2596 bp, Unknown
  Bacterial polypeptide expressing nucleotide sequence isolated from the Sargasso Sea
catgaataccgccaaccgcaaacccctgcccggcacgtcgctggactatttcgacgcgcgtgccgcggtcgaagcgatcgcgcccggcgcctacgacacgctgccgtacacgtcgcgcgtgctcgccgaaaacctcgtgcgccgctgcgatccggcgatccttgccgattcgctgaagcagatcatcgagcgcaagcgcgaacgtgatttcccgtggttcccggcgcgcgtcgtgtgccacgacatcctcgggcagacggcgctcgtcgatctcgccggcctgcgcgacgcgatcgccgacggcggcggcgacccggccaaggtgaacccggtcgtgccggtgcagctgatcgtcgaccactcgctcgcggtcgagtgcggcggcttcgatccggacgcgttcgcgaagaaccgcgcgatcgaggatcgtcgcaacgaagatcgcttccacttcatcgagtggacgaagaaggcgttcgagaacgtcgacgtgatcccgccgggcaacggcatcatgcaccagatcaacctcgagaagatgtcgccggtgatccaggcgcaggatggcgtggcgttcccggatacctgcgtcggcaccgacagccacacgccgcacgtcgacgcgctcggcgtgatcgcgatcggcgtcggcgggctggaggcggagaacgtgatgctcggccgcgcgtcgtggatgcgcctgccggacatcgtcggcgtcgagctgaccggcaagcgccagcccggcatcaccgcgaccgacgtcgtgctcgcgctgaccgagttcctgcgcaaggagaaggtggtcggcgcatatctggagttccgcggcgaaggcgcggcgagcctcacgctcggcgatcgcgcgacgatctcgaacatggcacccgagtatggcgcgacggccgcgatgttcttcatcgacggccagacgaccgattacctgcgcctcaccggccgcagcgacgagcaggtgaagctggtcgagacctacgcgaaggtggcgggcctgtgggccgacacgctgaacaacgcgcaatacgaacgcacgctgacgttcgacctgtcgagcgtcgtgcgcaacatggccggcccgtcgaacccgcacaagcggctgccgacgtcggacctcgccgcacgcgggatcgccggcaagtgggaagagaagccgggcgagatgcccgacggcgcggtgatcatcgctgcgatcacgagctgcacgaacaccagcaacccgcgcaacgtgatcgccgcggccttgctcgcccgcaacgcgaacgcgcgcggcctcacgcgcaagccgtgggtgaagagctcgctcgcgcccggctcgaaggcggtcgagctgtatttggaagaagcgaacctgttgcccgaactcgagaagctcggcttcggcatcgtcgcgttcgcgtgcacgacctgcaacgggatgtcgggcgcgctcgacccgaagatccagcaggagatcgtcgatcgcgacctgtacgcgacggccgtgctgtccggcaaccgcaacttcgacggccgcatccacccgtatgcgaagcaggcgttcctcgcgtcgccgccgctggtcgtcgcgtatgcgatcgccggcacgatccgcttcgacatcgagaaggacgtgctcggccacgaccaggacggcaagcccgtcacgctgaaggacatctggccgaccgacgaggagatcgatgcgatcgtcgcggcgagcgtgaagcccgagcagttccgcaaggtctacgaaccgatgttcgcgcgtagcgcggaggcgggcgagcgcgcggcgccgctgtacgactggcgcgcgcagagcacgtacatccgccgtccgccgtactgggaaggcgcactggccggcgagcgcacgttgcaggggatgcgcccgctcgcggtgctcggcgacaacatcacgaccgaccacctgtcgccgtcgaacgcgatcctgctggacagcgcggccggcgaatacctcgcgaagatgggcctgccggaagaagacttcaactcgtacgcgacgcaccggggcgaccacctgaccgcgcagcgcgcgaccttcgcgaacccgacgctgatcaacgagatggcgatcgtcgacggcgcggtgaagaagggctcgctcgcgcgcgtcgagccggaaggcaaggtcatgcggatgtgggaagcgatcgagacgtacatgaatcgcaagcagccgctgatcgtcgtggcgggcgccgactacggccagggctcgtcgcgcgactgggccgcgaagggcgtgcggctcgcgggtgtcgaggcgatcgccgccgaaggcttcgagcggatccaccgcacgaacctgatcgggatgggcgtgctgccgctcgagttcaagcccggcacgaaccggacgacgctcggcatcgacggcaccgaaaccttcgacgtgatcggcgagcgcacgccgcgcgccgacctgacgctcgtgattcaccgcaggaacggcgagcgcgtcgaggtgccgatgacgtgccggctcgatacggccgaggaagtgtcgatttatgaggcgggcggcgtgctgcagcgcttcgcgcaggacttcctcgaatcgtctcaggcggcttga

SEQ ID NO: 283014 - DNA, 2719 bp, Unknown
  Bacterial polypeptide expressing nucleotide sequence isolated from the Sargasso Sea
catggcccacaatctccacaagaccctcaaggaattcgacagcggttccggcaaaggcaagttctactcgctgccgcagctcggcaaggaactgaagacgaagatcgaacgcctgccggtgtcgatccgtatcgtcctcgagtccgtgctgcgcaactacgacggcaagaagatcaccgaagagcacatccagcagctcgcgaactggaagccgaacgacaagcgcgtcgacgagattccgttcgtcgtgtcgcgcgtcgtgctgcaggacttcacgggcgtgccgctgctcgccgacatcgcggccatgcgcggcgtcgccgagcgcacgggcaagaacccgaagaagatcgagccgctggtcccggtcgatctcgtcgtcgaccactcggtgcagatcgactacttccgccaaaaggacgcgctcgacctgaacatgaaactggaattccagcgcaacaacgagcgctaccagttcatgaagtggggcatgcaggcgttcgacacgttcaaggtcgtgccgccgggcgtgggcatcgtccaccaggtgaacctggaatacctcgcgcgcggcgtccacaagaaggcggacggcggcgacaccgtgtactacccggacaccctcgtcggcacggacagccacacgacgatgatcaacggcatcggcgtggtcggctggggcgtgggcggcatcgaggctgaagccggcatgctcggtcagccggtgtacttcctgacgccggacgtcgtcggcgtcgagctgaagggcaagctgcgcgaaggcgtgacggccaccgacctggtgctgacgatcaccgaaatgctgcgcaaggagaaggtcgtcggcaagttcgtcgaattcttcggcgaaggcacgaagtctctgtcgctgccggaccgcgcgacgatcggcaacatggcgccggaatacggtgcgacgatgggcttcttcccggtcgacgaaaagacgatcgagtacttcgaaggcacgggccgcacgaaggccgaaatcgccgcgttcgaaaactacttcaaggcgcagaagctgttcggcatcccgaaggccggcgacatcgactacacgaaggtcgtcacgctcgatctgacgacggtcgcgccgtcgctggccggcccgaagcgcccgcaggaccgcatcgagatcggccacgtcaagtcgacgttcaccgacctgttctcgaagccggtcgcggaaaacggcttcgcgaagaaggcggaagacctcggcgcgcaatacacgacgagcaacggcgtcgacgtgaagaacggcgacatcctgatcgccgcgatcacgtcgtgcacgaacacgtcgaacccgagcgtgctgctggccgccggcctgctcgcgaagaaggcggtcgaggccggcctcacggtcgatccgaagatcaagacctcgctcgcgccgggatcgcgcatcgtcaccgagtacctgacgaagacgggcctgctgccctacctgtcgaagctcggtttcgaagtcgcggcctacggctgcacgacctgtatcggcaacgcgggcgacctgacgccggagctgaacgaagcgatcacgaagaacgacatcgtcgcggcggccgtgctgtcgggcaaccgtaacttcgaagcacgtatccacccgaacatccgcgcgaacttcctcgcgtcgccgccgctggtcgtcgcctacgcgatcgccggcaacatcacgcgcgacctgatgaccgagccggtcggcaagggcaagggcggccgcgacatctacctcggcgacatctggccgacgagcgaagaaatccacgcgctgctcaagttcgcgctcgacccgaagaagttcgaggacaactactcgaagctgaccaagaagggcgacctctggagcaagatcgagggcgaatcgggccaggtctacgactggccgaagtcgacgtacatcgccgagccgccgttcttcggcaacgacttctcgatggaaccggctgcatcgatcccgacggtcaagggcgcgcgcgcactgggtatcttcggtgactcggtcacgaccgaccacatcagcccggcaggctcgatcaaggaagactcgccggccggcaagtggctgaaggagaacggagtgcagaaggccgacttcaacagctacggctcgcgccgcggcaaccacgacgtgatgatgcgcggcacgttcgcgaacgtccggatcaagaacctgatgatcccggcgaaggcagacggcacgcgcgtcgaaggcggcctgacgatccaccagccgagcggcgaacagcagtcgatctacgacgcggcgatgcagtacgtcgcagccgacacgccgaccgtcgtgttcgcgggcgaagagtacggcacgggctcgtcgcgcgactgggccgcgaagggcacgcaactgctcggcgtgaaggccgtgatcgcacgcagcttcgagcgcatccaccgctcgaacctggtcggcatgggcgtgctgccgctgcagttcaagggctcggacagcgtccagtcgctcggcatcaccggtgaagaaacgtacgacatcgaaggcctcggcgacgacttcaagccgcagcaggacgtcacgctcgtgatccaccgcaagaacggcgaatcgcagcgcgtgcaggtgctgctgcgcatcgatacgccgatcgaagtcgactactacaagcacggcgggatcctgccgttcgtgctgcgctcgctgctcgcagcgtaa

SEQ ID NO: 283015 - DNA, 1218 bp, Unknown
  Bacterial polypeptide expressing nucleotide sequence isolated from the Sargasso Sea
ataagctaggatttaacttagttggatttggatgtacgacgtgtattggtaattctggtcctttagatgaaaatattgctgaggcaattacaaataatgatttaattgtaagcggcgttttatcaggtaacagaaactttgagggaagaattaatccatttgtaaaggcaaactatttggcatcgccaccacttgttgttgcatatgcattggcaggatcaacaaaaataaacctggcaaaggacccgattggtattgggaaaaacgataaagaaatttacttaaaggatgtatggccaaaatcaaaagagataaaatcaataattaataaaattattaattcaaatttgtataagaaaagatacaaaaatgtatttaagggcgataaaaaatggaattcagttaaatcaccaagtgggctaacttataaatggaataagaaatcaacctacgttcaacacccaccatattttgaaaatttagattttgagaagaataatataaatgatgtaaagaatgctcaaattttagcactctttggagactctgtaactacagaccatataagtcctgcgggttccataaaagaagatggaccagctggaatatatttaactaaaaacagaattaataaagcagattttaattcatttggtgctcgacgtgggaatcatgaagtcatgatgcggggtacattctcaaatattagaataaaaaacgaaatggtgaaaaatattgagggaggaattacgattcatcatccttctaataagcaaatgacgatttacgatgcctcagtaaaataccaaaaatctaatacgcctcttgtcatatttgcaggaaaagactatggaatgggttcctcaagagattgggcagcaaaaggaacgaaactactaggagtcaaagcagtaattgcagagtcgtttgagcggattcacagatcaaatcttattggcatgggggtacttccatttcagttcatggaaaaagaaaacagactatctctaggtcttaaaggtgatgaaagaataaccataaccggtttatcaaatgatatatcacctgggatggatgttaaaatgcttattatttattcaaatggaaaaaataagactcatcgcttaaggcttttagtaaacacctcaacagaaatagactatttaaaaacaggaggaatacttcagtatgtttacaaaaatatttccaatcaatagg

SEQ ID NO: 283016 - DNA, 1095 bp, Unknown
  Bacterial polypeptide expressing nucleotide sequence isolated from the Sargasso Sea
ggatcaaaagtagttacagattatttagaaaaagcaggattaaataagtacttagacgatctgggttttaacttggttggttatggatgcactacatgcattggtaattctggaccattacaacaaaatatttcagaagctgtaaaaaaagaaaatatttatgcagtatctgtactgtcaggtaatagaaactttgaaggaagaatttcaccattagtaaaagctaactaccttgcatcgcctcctttagtagttgcttatgcactagcaggaacaatgactattgatttttacaaagatcctttaggaaaagatattgatggtaaagatgtttatttaaaagatatttggcctagcaatcaagaaattgacaatactttaaaaagttcattgaatgcagatatgtttgtaaaaagatattcaaatatttcagaaggtcctgaacagtggcaaaagataaaaactgaaccaactagtatttataattgggaagaaacttcaacgtacgtaaaaaaacctcctttttttgaaaatttaccggacgaacctgaagatattaaaaatattaatgaggcaagacctttattaatactaggagatatggttaccacagatcatatatcacccgctggatctatccaaaaagaaagtcctactggagaatatttcatgaaacatcaaatattaacaaaagattataattcatatggagcaagaaggggaaatcatgaagtaatgatgagaggaacatttgcaaatattaggattagaaatgaaattgttcctgaaacagaaggaggatttacaaaattatatcctgaagaaaaagttatgcctgtatatgacgcagttgttgaatataaaaaaagaggaatagatttggttgttattggaggaaaagaatatggaacaggatcttcaagagactgggcagctaaaggaacaaaactcttaggaattaaagctgtattagctgaaagttttgagagaatacatagatcaaatttaattggtatgggggttttaccgctacaatttattaatggaatgaatagaaaaaatttaaatttaaaaggtcctgaattaattagtatt

SEQ ID NO: 283017 - DNA, 1135 bp, Unknown
  Bacterial polypeptide expressing nucleotide sequence isolated from the Sargasso Sea
gttgaagcagtccaaaataatagactttatggagtatctgtattgtctggaaatcgaaattttgagggaaggatttcacctcatgtaaaagcaaattacttagcttcccctccactagttgttgcttacgcacttgctggacatatggaatttgacttgtacaaagattccttcggaaaagaccataatggaaaagatatttatttaaaagacatttggccatcaaataaagaaattgaggataccttaaaacaatcattaaatgctgaaatgtttattaaaaggtattcaaatgttgctgcagggccaaagcaatggcaagatataaaaagtgaaaagagcagtatctataactgggattctggatcaacttacgtaaaaaaaccacctttctttgataatttaccagatgaacctgaagggtttaaacctataaaagaggcaagacccttgttaatacttggcgatatgatcacaacagatcatatatctccagctggaagtattcaaaaagacagtcctactggagattattttatggagcatcaaattttaccacaagattataactcttatggtgcaagaagaggaaatcacgaagttatgatgagaggtacttttgcaaatataagaattagaaacgaaatggcaccaggtaccgagggtggtttcactaaattatatccagaaaataaaatagttccagtttatgatgcggtagtagaatataaaagaagaggaacagacttggttgtaattggaggtaaagaatatggtactgggtcctcaagagattgggctgcaaaaggaacaaaattactcgggattacccttgtgattgcagaaagttttgagagaatacacagatctaatttgataggtatgggggtgttacctcttcaatttgtaaatggtatggacagaaaaagtttgaaactgactggatcagaattaataagtgttttaaatcttgaagaaggaataaatccttctgatcaagtagatgttgaaatcaaatatatttcaggtgaaattaaaaaaattaaagcactttgtagaatagacaccaaaaacgaacttgaatattacaaaaatggtggaatacttcaatatgttttgcgtaatatgatttaaa

SEQ ID NO: 283018 - DNA, 1554 bp, Unknown
  Bacterial polypeptide expressing nucleotide sequence isolated from the Sargasso Sea
tatgtcagaaaaatcagaaataactataaataataacaacttcgatgtttttaatataaataaataccaaataaatcacttaccttattctctaagggttttaatggaaaactatttaagaaatgaatctgataataataagtttgactctattatagaaaaatttacaaaatggaatgggagcgctgacgctaataccgaactaactttttatcctagtagagttattatgcaagattttaccggtgtacctgcagtagttgacttagcgtcaatgagagatgcaatgacatccttagatgagagtaaagctgatgcagtcaacccacagtgccaaactgacttagtaatagatcattctgtcatggttgatcactttggcacctctgaatctaaagatcttaataccaagcttgaatatgagagaaatacggaaagatataaactcttaaaatggggtcagcaagcatttaaaaatttaagaatagttccacctaacaacggaattatccatcagatcaacattgaatatattgccagggtaatatatgaaaaagagggacagctttaccctgacacagtggttgggactgattcacacacgacaatggtcaatggtctcggtgttcttggatggggagttggagggattgaagctgaagctgctatgttaggacaacctattcctatgttacttccagaagtaattggttttgaattgaccggtaaacttggtcaaacaaccacggcaacagatcttgtgctcacaattgtccagatgcttagagaaaaaaatgttgttggtaaatttgttgaattttatggctcaggactagataacttgagtatagctgatagatgtacaatctcaaacatggctcctgagtatggtgctacttgtggatttttcccagtagatgctttgacaatcgattatttgaaaatgactggtaaagatgaagatcatcttgcagtagtagaacagtatagtaagacgtgcggattttttagagatgatagtcaagatattaaatatacaagctcattatctttagatatgggagatgttgaagcttgtctctcaggtcctaaacgaccacaagatagagtgcttctgtctgatgttaaagatgtatgtgaaagagagataaagaaattaaaaaaatcgcccagttcagatggtgtaattaatgatggcaacattcttattgctgctataacaagttgtactaatacatcaaatccaagtgtaattttgggagcaggcttgctagcaaaacgggcagtagagaaaggactagcaacgaaagaatgggtcaagacatcactcgctccaggctctagagttgtagaaaactatttgaaaaaagcaaatcttttggattcacttaataagttaggttttaatattgttggttatgggtgtacgacatgcatagggaattctggaccactcgataatgaatatgtaaaagaaattaatgatagagatcttgttgtgagctctatactatctggaaacagaaactttgagggaagaattcatccagaaat

SEQ ID NO: 283019 - DNA, 850 bp, Unknown
  Bacterial polypeptide expressing nucleotide sequence isolated from the Sargasso Sea
aatgtttaaccagtcatacaaaaacctttttgaaggtgatagtaattggatgtctattccaacttctgactctgatagattcgattgggatgaagaatctacatacattcaaccatctccattttttggaaaagaaaaagatgatcaagaaaaattacctgcaattgaaaatgcttatccacttgttattttgggagatagtgtcactacagatcatatttcacctgcaggatcttttaaggatacaactccagccggtaaacatttgattgataattctgtgaatattaaagattttaattcgtatggatccagaagaggtaatttcaagattatgcaaagaggtacttttgcgaatatccgtttatcaaataaacttgttccagagaaaactggtgggttcacaaaacttttgcctcaaggtaaagagatgtcaatttatgatgcagctcaagaatataagaaaagcggcactaaccttataatatttgctggtaaagattatggatgtggatcatcgcgagattgggcagcaaaaggcactaagttgcttggtgtgaaggcagtcattgctgagagttttgaacgaattcataggtcaaatttggtagggatgggaattatgcctcttcaatttaataatgatgacagctttgaagtgcttggattgagtatgaattcttcttttgatatagcagagattaagaaggatgcagataccgttacaatcacagaaaaagaaacgggtaaatcttttgaagctaaagttagaattgatacagaaaaagaatgggaatatttcgttagtgacggaatactaaactatgtccttaaaaaacttgccaactaa

SEQ ID NO: 283020 - DNA, 1822 bp, Unknown
  Bacterial polypeptide expressing nucleotide sequence isolated from the Sargasso Sea
gaaaggtacgaatttttaaaatggggccaatacgcttttgataatttttatttagcaccacctggtggaggaatatgtcatcaagtaaaccttgagaatattgcaactactatttggtcaagtagtattggtgaacataattatctctatccagactcagttgttggaactgacagtcatacaacaatggttaatgcactttcagttttaggttggggtgttggcggtatagaggcagaagctgcaatgctaggtcaaccaatatctatgaatattccaaaagttttaggtttcaagttaaatggcaagcttcaggaaggtattactgctacagatttagttttaactataactgaaatactaaggaagcacggggtggttggaaaatttgtagagttttatggtgagggattaaagaatttatctcttgcagataggtcaacaatttcaaatatggcacctgagtacggtgcgacatgcggttttttttctacagataaagaaacaataaagtatttgaagttatctggtaaaaatgagcatcaaattaatattgtaaaaaaatatacattaatgcaaaagatgtggactaatgatatttacaatcctaattttgatgaaaaaattagtttagatttaaataaaatagaaccgtcagttgcaggtccaaaaagaccacaagataagatatttgttagagatattcctgaagtatttaaaacaattgataatactccttatgacaaatcaattaaaaataataaacttcaatccggtgatgttgtgattgcagccataacaagctgtacaaacacttcaaaccctaatgttatgattgctgcgggcttagttgcaaaaaaagctgtagaattaggtttgtctgcaaagccgtgggttaaaacaagcttagcgcctggaagtaaagtagttagtgattatttagataaagcaaatttgtctaaatatcttaaccaaattggttttaatttggttggctatggctgcactacctgcataggtaattcaggaccactggaggactggatttctaatgaaataaaaaataacaatttaacagtatgttcagttttatcaggcaatagaaactttgaaggtagagttcatcaagaagtaaaagcaaattttttagcctcacctcctttagttgtagcttttgccattgcaggtaatatgaatattaatatttttaatgaagttattggaataagtaagttaggaaaagagatctttcttagggacttatggccgtctacatctgaaataaatgaaatagtagataattcaatatctactgaaatgtttaaaaaaagatataaggagatttataatggtgatcaaaattggcaatcaatagaaagcattcaggacaagacttattcttggagcgcatcaagcacttatataaaacacccacctttttttactgatgaaaaaaatcagattgaagatataattaatgcaagaattcttgctatgcttggcgacagtgttactactgatcacatctcaccagcaggtgcaataaaattagatagtcctgcaggtaaatatttaaatgagagacaaataagcagaaaagacttcaattcttatggctctagaagaggaaatcatgaaataatgatgagaggcacttttgctaacattcgcattaaaaatgaaattgttcctggaatagaaggaggagttactaagttttttgatcaagatgaaaaaatgtcgatttatgatgctgcaattaaatacaaagagaacaatgtacctcttgttgtttttgcaggcaaagaatatggaactggtt

SEQ ID NO: 283021 - DNA, 1669 bp, Unknown
  Bacterial polypeptide expressing nucleotide sequence isolated from the Sargasso Sea
aagagatcaacatactgtaaatatagttgaaaattatgctaaggaacaaggattatgggcaagtagtgatttagaatttactgacatcatatctttagatatgtctacagttgttccaactatttcaggtcccaaaagacctcaagacaaagtacctttaactgatgcaccatattcttttaaaaaagtattacaggaagctacaagcaaaaatgaaaaatctgtttcaaaagtggctaatacagactacgatattaaagatggttctatattaattgctgcaattacttcttgtactaatacttcaaatccaaatgttttgattggagcaggacttttggcaaaaaaggcaattgaaaaaggtttacaagttaaaccatgggcaaaaacttctttagcaccaggatctaaagtagttacagactatttggcaaaagctggattaaacaaatatttggataatcttggctttaatttagttggttatggctgtacaacttgcattggaaattcaggaccacttccagaaaatattgtagaagcaatccaaaaagaaaatatttatgcagtttctgttttatcaggaaatagaaattttgagggaagaatttcaccacatataaaagctaactatctggcctcacctccacttgttgttgcatacgcgatagctggacatatggaagtagatttatataaagatccactaggaaaagataaagatggtaaagaagtatttttaaaagatatttggccttccaataaagagattgaagaaactttaaaagattctctaaatgcagagatgtttatacaaagatattccaatgtaaccgagggcccaactcaatggcaaaaaattaaaaccgataaaagcagcatctataattgggatgagggttcaacatatgttaaaaaacctccattctttgactctttatcagacgaaccagagggatttaaagaaataaaggatgcaagaccattattaatattaggggacatggtaactacagaccatatatcaccagctggaagtattcaaaaagatagtccaactggtgaatattttatggaacatcagattttgccaaaagattttaactcatacggttcaagaagaggtaaccatgaagttatgatgcgaggaacttttgcaaatataagaatcagaaatgaaatggctccaggtacagaaggtggttttacaaagttatatccagaagaaaaagttcttcctatctatgatgcagtagttgaatataaaaaaagaggaacagatttagttgtaattggtggaaaggagtatggaactggatcgtctagagattgggcagctaaaggaacaaaattacttgggataaaagcagtaattgcagagagttttgaaagaattcaccgatctaatttaattggaatgggtatattgccattacaatttatcgacgatgtaaatagaaaaaatctaaaattaattggttctgaattaattagcattttaaatataaaaaaaggtgttaatccctcagatgaagtgacggtcgaaattaaatatgcttctggcgaaataaagaaaattaaaactttatgcagaattgatacaaaaaatgaattagagtattataaaaacggaggtattctgcagtacgttttaaggaatatgatttag

SEQ ID NO: 283022 - DNA, 912 bp, Unknown
  Bacterial polypeptide expressing nucleotide sequence isolated from the Sargasso Sea
caaataaagaaattgaagaaactttaaaaaattcattaaatccagaaatgtttgtaaaaagatattcaaatatttcaacagggccagaacaatggcaaaaaattaaaacagataaaagcagtatttacaaatgggatgaaagttcaacgtatgtaaaaaaaccacctttttttgaaaatttaagcgatgagccagaaggttttaaagaaattaaagatgcaagaccattattaattttaggagatatggttactacagatcatatttctccagctggatctattcaaaaagaaagtccaaccggagattattttatgaaaaatcaagttttacctaaagattataattcatatggttctagaaggggaaatcacgaagtgatgatgagaggaacttttgcaaacattagaattaagaatgaaatggcaaaaggaaccgaaggaggttttacaaaactatatcctgaaggaaaagttatgtcagtttacgacgccgttgttgaatataaaaaaagaaaaacagatttagttgtaataggtggtaaagaatatggaacaggatcttcaagagattgggctgcaaaaggaacaaaattactaggaataaaagctgttataactgaaagttttgaaagaatacatagatcaaatcttataggaatgggaattctaccacttcaatttatagagggaaaagatagaatgaatttaaatttaaaaggttcagaattatttagtgttattaatttagaaaaaggaattgcaccatctgatcatgtagagatagaaataaaatatgcttcaggagaaagtaaaaaaatcaagactttatgcagaattgatactgaaaacgaattagaatattataaaaatggtggaatattacagtatgtattaaggaatatgatttaaa

SEQ ID NO: 283023 - DNA, 1722 bp, Unknown
  Bacterial polypeptide expressing nucleotide sequence isolated from the Sargasso Sea
tttattacaagattacacaggaattccagcagtggctgacctagcggcaatgagagaagctgtaaaagaaaaaaataaggatccaaataccatcaaccctctttctaaagtagacctagttatagatcattcagttcaagttgatacatctgcaaaatcagactcttttgaaaaaaacgttgatattgaatttaaaagaaatggtgaaagatattcttttttaaaatggggacagcaagcgtttaacaattttcgaatagtccctcctggaactggaatttgtcatcaagtaaatttagaatacttgtcaaaagtggtttggactgaaaagtttgaaacaaataattatatttttcccgatactttagttggaactgatagtcatacaactatggttaatggattatcagtattaggatggggcgttggaggaatagaggctgaagctggaatgctgggacaaccaatttcaatgctgattcctgaagtaattggatttgaaatgaaaaataaattacctgaaggaactacagcaactgacctagttttaactgtagttaaaatgttaagagataaaggtgttgtaggaaaatttgtagaattttatggagaaggattaaaaaatttgactctagctgatcgagcaacaattgcaaatatggctcctgaatatggagcaacttgtggattttttccaatagatgatgaaactttaaattacttaaaattttctggaagagataaacacacagtagatatcgttgaaaattatgctaaggagcagggattgtgggcaagtagcgacattgtttttacagataaattatctttagatatttcaacagtagttccgacaatttctggtcctaaaaggccacaagataaagtattactaactcaatcttctcaaaattttaaaaaagtttttgaacaaattacaaaaaaaaaaaaaatatatgtttcaaaagttaaaaatgaagaatttgaagttaaagatggaagtattttaattgctgctataacttcttgcacaaatacatcaaatcctaatgttttaataggcgcaggattacttgctaagaaagcaatagaaaaaggattaaaaacaaaaccttgggtaaaaacttctttagcacctggttctaaagttgttaccgattatttagtaaaagcaggactaaataattacttagaccagctgggttttaatttagttggttatggatgcaccacatgcattggtaactctggacctttacaggaaaatatttcagaagctgtaaaaaaagaaaatatatatgcagtatctgtgttatcaggtaatagaaattttgaaggtagaatttcaccattagtaaaagcgaactatcttgcatcaccaccgcttgtagttgcttatgcattagccggaacaatgactattgatttatacaaagatcctttaggaaaggatactgaaggaaaagatgtttttttaaaagatatttggcctagcaataaagaaattgaagaaactttaaaaaattcattaaatgcagatatgtttttaaaaagatattctaatatatctgaaggccctaaacaatggcaaaaaattaaaatagaaccaaccagtatttataagtgggaagaaacatcaacttatgtaaaaaaacctccattttttgaaaatctacctgatgagccagaagatattaaagatattaatgatgcaaggccttt

SEQ ID NO: 283024 - DNA, 774 bp, Unknown
  Bacterial polypeptide expressing nucleotide sequence isolated from the Sargasso Sea
ctacgtatgtaaaaagacctccattttttgatgatttacctgacaaaccagaaggttttaaaccaatcaatgatgctagaattcttttattattagctgactcagtaacaacggatcatatttcaccagcagggagtattaaaaaagaaagtccaacgggcgattattttatgaagcaccaaatacaacaaaaagattttaattcatatggtgcgagaaggggaaatcatgaagtaatgatgagaggaacttttggaaatataaaaattagaaatgaaatggctcctggtactgaaggtggatttacaacgttacagccagatggaaaagtaatgagcgtttacgaagctgcaatggaatacaaaaaaagaaacaatgatttagttgtaatagctggaaaagaatacggaacaggttcatcaagggattgggcagctaaaggaactaaacttttaggaattaaagctgttttagcagaaagttttgagagaattcatagatcaaatttaattggaatgggagttttaccacttcaatttaaagaaggttttgaccgtaaaaaattaaatattacgggagcagaattagtttcagttattaatattgataaaggtgtaaaaccaagacaagaagtaacttgtgaaattaaatatcaagacggaactagtaaaaaaattcaaatgctttgtagaattgataccgctaatgaagttgagtactacaaaaatggaggaattttgcagtatgttttaagaaatatgcttgccaactaaa

SEQ ID NO: 283025 - DNA, 901 bp, Unknown
  Bacterial polypeptide expressing nucleotide sequence isolated from the Sargasso Sea
gattcgcagaaccgtagaagccgccattggtccggagatgttcatcaggcgatactcagatgttctaagtgagcccagatgggactcgattcctagtgaagcaagcgaacttttcccgtgggacgaggattccacgtacgtgcgactaccctctttcttccagggcatcgaacccgaaccatctcccgtggaaccgatagaggatgcgagggtcctggtgaaggtcggcgactcggttactacggatcacatcagtcctgcgggggccttccccagcagcggcccagcgggtaagtatctgatgagcaagggagtcgaaccccgagacttcaactcctttgggagccgtcgaggcaatcatgaggtaatgatcagggggacattcgccaacatcaggatgaggaaccagactgcacccggaaccgagggcggactcacaacacactttccaaccaacgaggtagtttccatacacgaagccagtgagaggtaccaatcagaatccacgcaactagtggtattggcagggtctcagtatggctccggtagcagcagggactgggctgcaaaaggcaccttccttcttggcgtcagggccgttatagccaagtcatacgagcggatccataggtctaacctggtgggaatgggagttctcccactagcattctctgatggggccgatgcagaatcattgggtctcgatggcaccgagctctacagcatccctgcatccggtgatctcgatccgttctctgagataatcgtaacagcgaagaagggggacgggacagtggtcagcttccctgtcattgtcagattggagacgccagtagaggtcgagtactacagaaacggaggaatcctgcaaacggtcctcaggaatctggcaaaagattga

SEQ ID NO: 283026 - DNA, 1668 bp, Unknown
  Bacterial polypeptide expressing nucleotide sequence isolated from the Sargasso Sea
taaaacttacaggtgaattaaacgggtggacatcctctaaagatgtgatacttaaggttgcaggattactatctgtaaaaggaggaacaggtgctattattgagtactttggttcaggcgccaagaatctttcttgtactggaaaaggaacaatatgcaatatgggagcagaaataggtgctacaacatctgtttttgcatatgatgaaaatatggctaagtatcttcaagcaactggtcgttcagaagttgtagaattagctgataattatagagattatttacaagctgatatggaagtatatgctgaaccagaatcttattttgatcaagttatagagataaatctatctgaactggagcctcatttaaatggtccatttactcctgatttagcaacacctatatctcagatgactaaagtcgcaaaaaagaataattggccaactaaaattgaagttagcttgatcggatcatgtacaaattcatcttacgaagatatatctcgttctgctagtatagcacagcaggcgttagataaaaatctttctattaaaagtgattttacaataactcctggaagtgagcaggtgcgatttactgtagatagagatggatttcttggagtgtttgaaaaaattggaggagttgttcttgcaaatgcttgtggtccatgtattgggcaatgggcaaggcattcagatgatccagataagaaaaatactattgtcacatcatttaatagaaattttgctaaacgaaatgatggtaatccaaatacatttgcttttgtagggtcaccggagcttgttactgctcttgctatatcgggagatttatctttcaatccaatgaaagacactttgataaatgacaatcatgaagaagtaatgttagagcctcctattggtttagatttacctgataatggatttgaggttgataacctcggttataaagaacctgataaaaatggtgctaaggtcaaagtcatcgttgatccaaattcaaaaagattacaattacttaatcccttttcaaaatgggatggtaataaccttagcaatttaagattattaattaaagcaaaaggaaaatgtactactgatcatatatctatggcgggtccatggttaaagtatagaggtcatttagataatatttctgataatatgctaactggggcaaataattattttaataataagtctaacttagtaaagaatcaattaactggggattatggcccagttccagaagttcaaagatattataaaagtaacaatactttatctattgtgataggcgatgagaattatggagaaggttcatctagagaacacgcggctatggagccaagacatttaggggtaattataatcttagtaaaatcatttgcaagaattcatgaaactaatctcaaaaaacaaggaatgttggctcttacatttaatgatccttctgattatgataaaattttagaagatgatctttttacgtcccttgatctagatgatataaaacctgaaaaatctattagtttagaagttcatcatgctgactcaactatagatattattaaatgtaatcatacatataataattcacagatagagtggtttcgagcaggatcagcactaaacttgattcgacaaaatgaaagataaa

SEQ ID NO: 283027 - DNA, 1159 bp, Unknown
  Bacterial polypeptide expressing nucleotide sequence isolated from the Sargasso Sea
ttatctagaaaaagctgggctaaatatttatttagataagttaggttttaatttagttggttatggatgtacaacttgtattggtaattcaggtccattagccgataatatctcagattccataaaaaataataatatttatgctgtctcggttttatctggaaacagaaactttgaaggaagaatttcacctttaataaaagcaaattatttagcgtctccgccattagtcgttgcttatgcaatagcaggaactatgagatttgatttgtataaggatccattaggtaaagataaagatggtaaagatgtttttttaaaagatatatggccatctaacaaagaaatagaagaaacattgagaaattcattaaatgcagaaatgtttataaaaagatactcaaatgtttctcaaggaccagaacaatggcaaaaaattaaaacagaggaaaccaatatttataattgggaagataattcaacgtacgtaaaaaaacctccgttttttgacaaccttcctgataaaccagaaggatttaaagaaattaaggatgcaagaccactattaatattgggtgatagcattaccactgatcatatttcacctgctggatcaattcaaaaagatagtccaactggagaatattttatgaaacatcaaatacttccaaaagactataattcctatggagcaagaagagggaatcatgaggttatgatgagaggaacttttgcaaatataagaattagaaatgaaatggcacctggtactgagggtggttttactaagttgtaccctgaggaaaaagtaatgccagtttatgatgcggttgttgaatataaaaaaagaggtaccgatttagttgtaattggcggtaaagagtatggaactggttcatcaagagattgggcggctaaaggaactaaacttttaggtgtaaaagctgtttttgcagaaagttttgagagaattcatagatcaaatcttataggaatgggtatactaccattacagtttaaagatggaataaatagaactaatctaaaattagatggctcagaactattttctattattgacttagaaaaaggtatagatcctagagatgaagttgatgttgaaatcaaatatgtcttctggagacatcaagagaattaa

SEQ ID NO: 283028 - DNA, 637 bp, Unknown
  Bacterial polypeptide expressing nucleotide sequence isolated from the Sargasso Sea
ttgaattcatctatgacacaaacttttgtatattttgacgactgttttaaaggtcacgtacaatctttggattatccagagtgttccgatcgtgttaaaaatatcattgaactaataaataaagaagagtttaaaaatataataattaaacaacctaataaaatagagcaatcacttatttatgctgcccatgaagagaaatttgttagggaaactctagcaagatttccatctgatgatcaaatagtttttttagaccaagaaactcctgtatcaaaagggtctctggatgcaaccttaaaagctgctggagcaggaatagatgctgtggatgctataatgagtaataacagtctaaatgccttttgcattgtcaggccacctggccatcatgcatgttatgatcgatcaatgggtttttgtgtttttaataatgttgcaattgctgcacattatttaataaacaagtataaatttaaaaatatagctattattgattttgatgttcaccatggaaatggtacgcaagatatattctataataattcaaaagttacctattactcaacgcatcagtatccactatatcctggcacaggtgatgtaaatgaaataggattaggcaatatcgttaatg

SEQ ID NO: 283029 - DNA, 313 bp, Unknown
  Bacterial polypeptide expressing nucleotide sequence isolated from the Sargasso Sea
tttgcagatatattctacaacaactgctttaataatggtcttctgcccatcgctgtttcagaacatgaaatttcaaccttgcttgatttatctaataagagaaaagaaatagaaatagatctacagaatcaaattatctttgttgaggataatgaaatagcgcattttgaaattgaccctttcaggaaaaaatgcatcttagaaggtctggatgaaattggattgagtcttactcattcgtcagaaatcaaagaatttgaaaggaaacattacttaaaatctccttggatctttaatagagaaaatgattgat

SEQ ID NO: 283030 - DNA, 118 bp, Unknown
  Bacterial polypeptide expressing nucleotide sequence isolated from the Sargasso Sea
aatgtctacaacattatacgataaaatttggaacgatcatctagttgatcaaacagatgacggcacatctttgctttttgtagatagacatttaattcatgaggtgacaagcccccag

SEQ ID NO: 283031 - DNA, 194 bp, Unknown
  Bacterial polypeptide expressing nucleotide sequence isolated from the Sargasso Sea
cgcccagccgggcatcgagatcgaagtggatctggaggccaatcaggtgcgcgcaggtagcctgtgcttcgatttcgagatcgatgaattccgccgctactgcctgctcaacgggctggatgccatcggcctgaccctgcaacacgaagccgccatcagcgccttcgaggcgaagcagccgagctggatttgac

SEQ ID NO: 283032 - DNA, 136 bp, Unknown
  Bacterial polypeptide expressing nucleotide sequence isolated from the Sargasso Sea
aatgaaaaaattttcaaaattaaaaagtataccagcttatttgcctctgcaaaatatagatactgatatgataattccaaagcagtttttaaagactattaaaagaactggtttaggtaaaagtttatttttttga

SEQ ID NO: 283033 - DNA, 311 bp, Unknown
  Bacterial polypeptide expressing nucleotide sequence isolated from the Sargasso Sea
tatgaatgagtacacaattcatcaagctaaaatgctacctcttgatagggcaaatgtagatactgatcagataatccctaagcaattcttaaaatcaattaagaaaagtggatttggaccaaatttatttgattcatggagatatttggatacaggatatcctggacaaaacaattctattagacctttgaataatgaatttgttatgaacaaaaaaaagtttctaggatcagaagttcttatagctaaggataattttggttgtggctatagtagagaacatgcagtttgggcgctccaagattcaaaaa

SEQ ID NO: 283034 - DNA, 283 bp, Unknown
  Bacterial polypeptide expressing nucleotide sequence isolated from the Sargasso Sea
gtattaccagcagcaatatcaatatacaaaagagcaatgcaggatggcttgttgcaaatattcatggatgccggtgcaatggttggtccacctacatgtggagcatgttgtggcgcacatatgggcgtgttagcaaaagatgaaatatgtattagtacaaccaacaggaattttcctggccgtatgggtcatattgactcacagacttaccttgcatcaccattggtcgctgctgcatctgctgtaacaggtaaaattactgatccgagggatttgaattgaa

SEQ ID NO: 283035 - DNA, 781 bp, Unknown
  Bacterial polypeptide expressing nucleotide sequence isolated from the Sargasso Sea
tgctatatgttcggtattggcgccacggaaatggcgggggtgctcgctactggagagatatggatccgggttcccgaaacgatccggattgaatgggaagggactttccaggaaggggtcatggccaaggacgtgatgctttttctttgcggccgaatgggaatggatggaggccgttatcaggcagtcgaatactgtggagaagccgtttcggagttatccatgcaggaacgcatgaccctcagcaacatgagcgccgaactcggggcccaggccggattgattgcaccggacgctaccaccatgaaatggcttgagggccatggatcggagagcgatccagtcgaaccatggcaaactgatccagattcggatttcgaataccatcgctttgatgcagaccaactggagcctcaagttgccgcgcctcacagtccagcaaacgcggcttctgttttggaatacaacgctatccgtccggatgtgctttaccttggtgcatgcaccggcgccaaacttcatgatcttcgggctgcagcctcaattctcaaagaaaacagggtgcaatctggaatcgaattttgggttgccccttcttcaaaaagagacttccacgaagccaggaaagaaggggtgatgaaaatcctggaagacgcaggagccaaaatccttcccaccagttgtggactatgtgcgggttatggacctcaacgtttgggacaaggaaccgtttgcctttcctccacagcccgtaattttaaaggcaggatgggggatgaat

SEQ ID NO: 283036 - DNA, 133 bp, Unknown
  Bacterial polypeptide expressing nucleotide sequence isolated from the Sargasso Sea
tgcatctacctctaatagaaattttgagggtagacagggaagaggtggtagaacacatttagttagtccagcaatggctgcagcagctgcaatttctggaaacttagatgatgttagaaaataccaaaattaa

SEQ ID NO: 283037 - DNA, 127 bp, Unknown
  Bacterial polypeptide expressing nucleotide sequence isolated from the Sargasso Sea
atgaacaatccaaataataaaacattatttgataaaatttggtctcatcatcttgtccaccaacaagaagatggaacttgtctaatttatattgatcgtcatttagttcatgaggtaacaagtcccc

SEQ ID NO: 283038 - DNA, 121 bp, Unknown
  Bacterial polypeptide expressing nucleotide sequence isolated from the Sargasso Sea
tatggaagccttcacacaacttgaagacttgacggcggtcatggaccgcatcaacgtcgataccgaccagataattccaaaacagtttctcaaaaaaatcgaacgaaccggtttttggtaa

SEQ ID NO: 283039 - DNA, 112 bp, Unknown
  Bacterial polypeptide expressing nucleotide sequence isolated from the Sargasso Sea
tatgaatgcagataagttgaagccagaagaaagatgtgcatcaacatcaaatagaaatttcgaaggaagacaaggacgaggtggaagaactcatttagttagtccagctatg

SEQ ID NO: 283040 - DNA, 280 bp, Unknown
  Bacterial polypeptide expressing nucleotide sequence isolated from the Sargasso Sea
atggcttacgaaaaattcaacatattagaaagtactgctgttcctttacccatagaaaatattgatacagaccaaataatacctgcaagatttttgaaagcaaccgaaagaaaaggttttggtgaaaatttgtttcgtgattggaggtatgattcaaataataatcctaaagaagattttgtgcttaataataataagtatacaggtaagattttaataggaggtaaaaattttggctctggatcatctagggaacatgctgcatgggcaaatatatgat

SEQ ID NO: 283041 - DNA, 788 bp, Unknown
  Bacterial polypeptide expressing nucleotide sequence isolated from the Sargasso Sea
gatgagcaaagtaatttttagttttgatgacaagaagttaaaaacactcaaaaataaaaagaatattttaggtggaaaaggaaccaatcttgcggaaatgggaagactaggtcttcctgtgcctccaggattcactatttcaactgaagtttgtgatattttctataataataagaaaaaattacccagtaaaataataaaagatattgaaaaaaagttaaaagaaattgaaaaaaatacaaagaaacaatttggagatttaattaatccacttttagtttcggtaaggtctggtgccagaatatctatgccaggtatgatggatactattttaaatcttggtttaaacgacaggacagttcaagctttagcaaataaaacttctaacggaagattcgcaaaagatagctacagaagatttattcagatgtacagcagtgtagttttaggaataggaaatcatttatttgaagaaatgatcgataattataaattaactaaaggggttctttcagatacagagttagatgaaagtgattgggatggtttaattaaaaattttaaagaattagtaaaaaaagaaaaaaaaatagagttccctcaagatgttaaaaaacaactttatggagctattagtgcagtatttttatcttggaatagtcagagagctaaaacctacagaaaattgaatcaaatcccagatcattggggaacagctgtaaatgtgcaggctatggtttttggtaacatgagagagaattgttcgactggagttgcttttaccagaa

SEQ ID NO: 283042 - DNA, 630 bp, Unknown
  Bacterial polypeptide expressing nucleotide sequence isolated from the Sargasso Sea
ttacagccatagatggtgtacaaaataaagtatttaaaaatgcattttgtaatgttcgtcctccaggtcatcacagtaaccaaaataaagctgcaggattttgtattttaaataatgttgcaattggggcaaaatatctacttaacaaatataagtacaataaaatagctattctagattttgatgttcatcatggtaacggaactcaagatattttttataataataagaatgttttattcgtttcaacacatcaatatccttactatcctgggacaggctcagagaaagaaaaaggtaattttaataacatttgcaatatcccattacccgctggaacaaactctgaggaatatttaaatgcttttgaatttgctttaaaaagattaaatgaatttcagccagaatttatccttattagtgcaggatttgacgggcatgcatcagatcctcttgcgcagttcaaactttctactgaagactattatgaaattaccagaagattacttgaatcgtcaaaaaaattttctaatggaaaagtggtttcaatacttgagggtggatatgatttactagcacttaaagatagtgcaaagagacacgttgatgcattattagaattcaattgat

SEQ ID NO: 283043 - DNA, 196 bp, Unknown
  Bacterial polypeptide expressing nucleotide sequence isolated from the Sargasso Sea
aatggaaaaatttaagattataaaaggaataccagcacatttacctatgataaatgtagatactgatatgattattcctaaacaatttttaaaaaccataaaaagaactggtcttggtaaaagtctttttttcgaaatgcgctacaaagaaaatggcaataaaaatgaagagtttgtactcaataaagaaccttat

SEQ ID NO: 283044 - DNA, 151 bp, Unknown
  Bacterial polypeptide expressing nucleotide sequence isolated from the Sargasso Sea
aagccaaaagaaagatgcgcttcaacatcaaatagaaattttgagggaaggcaaggaaggggaggaagaacacatctagttagcccagccatggcagccgccgctgctattgaggggcgtttatccgatgtaagaaaatttaataattaat

SEQ ID NO: 283045 - DNA, 378 bp, Unknown
  Bacterial polypeptide expressing nucleotide sequence isolated from the Sargasso Sea
caagccgtgagcatgctccttggcttttgcacgattacggattcagatgtatattagctcctagttttgcagatattttttataacaattgtaggaaaaacggtattttagctgtagttttaagggacgatgaaatacaggccttatttgaagaagttgaagcgaatgaaggatgcttgctgacagtagatcttcctaggcagaatgttacctctcccgaaggcaaaaagttctcttttgagattgattctttttcaaaaaattgtctgcttgaaggattagacgatattgggtggacgatgcagtttgaagaaaaaattcagagttatgaaagccaggctaggcttgaaaagccgtggttgtttataagcaattgat

SEQ ID NO: 283046 - DNA, 848 bp, Unknown
  Bacterial polypeptide expressing nucleotide sequence isolated from the Sargasso Sea
aatggcgggggtgctcgctactggagagatatggatccgggttcccgaaacgatccggattgaatgggaagggactttccaggaaggggtcatggccaaggacgtgatgctttttctttgcggccagttgggaatggatggaggccgttatcaggcagtcgaatactgtggagaagcggtttcggagttatccatgcaggaacgcatgaccctcagcaacatgagcgccgaactcggagctcaggccggattgattgcaccggacgctaccaccatgaaatggcttgaggactataggtcagaaaacgatcaaattgaaccatggcaaactgatccagattcggatttcgaataccatcgatttgatgcagaccaacttgaaccccaggttgccgcacctcatagcccttctaacgcggcttctgttttggaatacaacgctatccgtccggatgtgctttaccttggtgcatgcaccggcgccaaactgcatgatcttcgaactgcagcctcaattctcaaagaaaacagggtgcaatccggaatcgaattttgggttgccccctcttcaaaaagagacttccacgaagccagaaaagaaggggtgatgaaaatcctggaagactcaggagccaaaattcttcccaccagttgtgggctatgcgctggttatggccctcaacgtttgggacaaggaaccgtttgcctctcctccacggcccgaaattttaaaggcaggatgggggatgaatcctcagaggtctaccttgcttctcccatgaccgtcgcctccaccgcagtcacaggttacatcagtgatccccgaaactttcttggagcaagttgat

SEQ ID NO: 283047 - DNA, 385 bp, Unknown
  Bacterial polypeptide expressing nucleotide sequence isolated from the Sargasso Sea
gatggctaagactttatttgaaaagttatgggatgcccacgtagttgacagtgtgaatgatactactgatatcatttatattgatcagcacatgattcatgaggtaacgagccctgtggctttctctggattagaggcaagaggaagaaaggtgtacagaccaggtcaaactgttgcgacaccagaccacaacgttcccactattaatcaagatcaacctattcaagaggctctttcaagaaatcaagtaaacactttagctagtaattgtgaaaatcacggtatagatatgtatggtcttggacatccatttcacggtgttgtacatatcattggtccggaattaggtgttactttacctggtatgactgtagtgtgtggagat

SEQ ID NO: 283048 - DNA, 159 bp, Unknown
  Bacterial polypeptide expressing nucleotide sequence isolated from the Sargasso Sea
atgataaaatacccaagggtaaatatgcagtaagtaccacaaatagaaattttgaaggaaggcaaggacctggagctagaactttacttgcaagccctttggtcgctgctgcttctgctattactggaaaaataactgatccaagagaaattatttaaa

SEQ ID NO: 283049 - DNA, 172 bp, Unknown
  Bacterial polypeptide expressing nucleotide sequence isolated from the Sargasso Sea
atggataagtttcattccttaaaaggtatcgcagctcctttaccaattgttaatatcgatactgatatgatcatcccaaagcaatttctcaagacaattaaaagaactggtcttggtgtaagtttgttttatgagatgagatatgataacgatggaaacctcattaaagatt

SEQ ID NO: 283050 - DNA, 715 bp, Unknown
  Bacterial polypeptide expressing nucleotide sequence isolated from the Sargasso Sea
taaaaaaggtttagtatttttagacggagatacaatcatttctcctggaagtaaagatgcaacaaaagatgcagtaggctcaataattgcagcaatagatggagtagaaaataaagaatttaataatgcattttgtgctgtcagaccacctggtcatcatgctgaaaaagataaagctatgggattttgtatttataataatgtagctgttggtgctaattatttaattgaaaaatttaaatacaataaaattgctataattgattttgatgttcaccatggtaatggaacacaagatattttctacaataacgaaaaagttttatatatttcaactcaccaatatccatactacccaggttcagggtcggaaaaagaaaagggaaattttgataatgttttaaatattccattaaaagctgggacgacctctgaagaatattttaatgcctacgaaatagttttaaataaattaaagaaatttaaaccagaatttatattgttttctgcggggtttgatgcacatgttgatgatcctttagcacaacttatgctaagttcagaggatttttacaaaattactaaaagaacattagagtgtactaggtctttttgtaaaggtagagtagtttcaattcttgaaggaggctacgatctaagagcactacaaaacagttctaaacgacatgttgatgcattaatagaatttaattga

SEQ ID NO: 283051 - DNA, 195 bp, Unknown
  Bacterial polypeptide expressing nucleotide sequence isolated from the Sargasso Sea
aatgcaaaaatttaataaattaaaaagtatcccagcttatttaccaattgtaaatattgatacagatatgataattccaaagcagtttttaaaaactatcaaaagaactggtctaggaaaaaatttattttttgaaatgagatatgatgatcaaggtaaagaaataaatgattttgtgttaacaaagatccattt

SEQ ID NO: 283052 - DNA, 477 bp, Unknown
  Bacterial polypeptide expressing nucleotide sequence isolated from the Sargasso Sea
ataaacttaataaaattgctataatagattttgatgttcatcatggaaacggtacacaagatattttttataataatgaaaaagttttatatatatcgactcatcaatatcccttttatcctggaactggtgcagataatgaaaaagggaaacacgataatatttttaatattcccttgccagctggaacaaactcagaggaatatatgaatgcatatgaacatgttttaaaaaaacttaaggagtttaaaccagaatttttattattttctgcaggatttgatgcgcaccaagacgatcctcttgctcaatttaaattaaagtcaaaagatttttacgatattacaaaaagaacattaaaagttattaataaaagtattaataataaagttgtttcaattttagagggtggttatgatttaaatgctcttaaagagagctccgaataccacttaaaagctttattagaaaattaat

SEQ ID NO: 283053 - DNA, 227 bp, Unknown
  Bacterial polypeptide expressing nucleotide sequence isolated from the Sargasso Sea
aatgcaaaaatttagcacattaagaagtattccagcatatttaccaatagtaaatattgatacagatatgattattccaaaacaatttcttaaaacaattaagagaactggattgggtaaaaatttattttttgagatgagatatgatgataatggcaaagaaataaatgatttcattttaaataaaaatccatttaataattcaaaaattttgattgctgggaaaa

SEQ ID NO: 283054 - DNA, 229 bp, Unknown
  Bacterial polypeptide expressing nucleotide sequence isolated from the Sargasso Sea
gatgcaaaaatttagcacacttaaaagtattccagcatatttaccgattgtcaatattgatactgatatgattattcctaaacaatttcttaaaactattaaaagaactgggttaggtaaaaatttattctttgaaatgagatatgatgataaaggtaaagaaattaatgaatttgttttaaataaaactccatttaataaatcaaaaattttgatagctgggaaaaat

SEQ ID NO: 283055 - DNA, 233 bp, Unknown
  Bacterial polypeptide expressing nucleotide sequence isolated from the Sargasso Sea
aatgcaaaaatttagcacattaagaagtatcccagcttatttaccgatagtaaatattgatacagatatgattattccaaaacaatttcttaaaacaattaagagaactggattaggtaaaaatttattttttgagatgagatatgatgatagtggtaaagaaataaatgatttcattttgaataaaattccattcaataattcaaaaattttaattgcagggaaaaaatttt

SEQ ID NO: 283056 - DNA, 121 bp, Unknown
  Bacterial polypeptide expressing nucleotide sequence isolated from the Sargasso Sea
aatggagaagtttataaatttgaaatctataccatcatacctatcattacaaaatattgatacggacatgataataccaaaacaatttttaaaaactattaaaagaactggattaggcaaa

SEQ ID NO: 283057 - DNA, 178 bp, Unknown
  Bacterial polypeptide expressing nucleotide sequence isolated from the Sargasso Sea
atgggaaaaacattatttgaaaaaatctgggatagacacttagttgcgtctatagatgagagtacaaatttagtatttatagatttacatcttgtacatgaggtaacatcccctcaggcgtttgacagcttgaggctagctggtagaaaagttaaacatcctgaaatgacccttgcaa

SEQ ID NO: 283058 - DNA, 154 bp, Unknown
  Bacterial polypeptide expressing nucleotide sequence isolated from the Sargasso Sea
atgccttttacaacttacgataaaatttggaacgaacatcttgttgatgaacaaccagatggtacatcacttttgtttgtagatagacatttaattcatgaagttacaagccctcaagcatttgaaggcttaagaaattcaaatagaaaagtaa

SEQ ID NO: 283059 - DNA, 81 bp, Unknown
  Bacterial polypeptide expressing nucleotide sequence isolated from the Sargasso Sea
aatgttagctgaaaaagaaggtcttgataaagtatttattaattctggatttgagtggagagaagcaggttgttcaatgtg

SEQ ID NO: 283060 - DNA, 630 bp, Unknown
  Bacterial polypeptide expressing nucleotide sequence isolated from the Sargasso Sea
ttgccgcaatggatggtgttcaaaataatgaattaaaaaatgcattttgtgctgtaagaccacctggtcatcatgctgaaaaagagaaagcaatgggattttgtatatataataatattgctgttggtgccaattatctaattgaaaaatataaatacaataaagtagcaattattgattttgatgttcaccatggaaatggaacccaggatattttttataataatgaaaaagtgttgtatatttcaacacaccaatatccctattatccaggttcgggatcagaaaaagaaagaggtaaatttaacaatatttttaatattccccttgaagcaggcactacttctgaggagtatcttaatgcatacgagcatgttcttaaaaaactaaaagagtttaaacctgaatttttgttgttttctgcaggatttgacgctcatattgatgatcctttggcacaactcagattaaactcagatgatttttatcatttaacaaaaagaacgttagaattttctaaatcattttgtaacggaaaagtagtttcaattcttgaaggtggatatgatcttaaagcgcttcaaaatagtacacaaagacatgttgatgctttaattgaatttaattaat

SEQ ID NO: 283061 - DNA, 559 bp, Unknown
  Bacterial polypeptide expressing nucleotide sequence isolated from the Sargasso Sea
gtgccccttccaatcgaaaatgtagatacggatcagatcatccccgcacgatttttaaaagccaccgaaagaattggttttggtgacaatctttttagagactggcgttacaataaggataattccccaaaaaaggattttgttcttaacaatccctcgtttagcggtaaaatacttgttggggctaaaaactttggttcaggttcttcaagagagcacgctgcctgggcgatatacgattatggattccgttgcgttatctcaagtttttttgccgatatttttaagaataattgtttgaatataggtgtattgcctgttcaggtcagtccagaatttttagaacatattttcactgccattgatatggatcccaacacttccctcacggttgatctgccaaatcaaatggtaactatcgacataaaagacagttcagaagcttttgagataaatccttacaaaaaggaaaacatgactaatggttttgatgacattgactaccttttgaacattaaaaaggaaataaaagaatttgcacaggacactcccctttagt

SEQ ID NO: 283062 - DNA, 795 bp, Unknown
  Bacterial polypeptide expressing nucleotide sequence isolated from the Sargasso Sea
attgttaataagcaatgccctttatgccgattgttctgacctcaatcaatcagattgtgaatactggagcgcttattgccaatggaattctgagcaaaacatttgtgaagaaaccggtggtggtggcggcggtaatattgaatatggaccctacgaatttgctttattaactgaaactgatggcatgccatcaagtccgttttacaacggagccctgcttttttacccaacaaatgccacgccgccatttagaagtgttattttcatacctgcttttggggaggcgtatggacttgaggcttgggctgagtttgttgcttctcatggatatataggtatgaccattggtaattatgaaggtacagaggaggattattgggattatgagagtagagcggtcggccttatggctgcgagagaaataataaaagaagaaaacgaaaggattaattctccactgttttcagttgtagataccattaactttattttttcaggtcattctactagtgggggaggtgcacatgttgcagcgactttggattctaccattaatgctgtgatgttgcttaatccagctgtcgcgtttgttgattctctaaattgtccggcagagacagagtattactgcctgattcctgaacatttggatcacaacgttccaacgctagtatatgcaggagaaacagaatatgaagaattagttaatcccgatgatgatatttactcaaatatgtgggcaaggcctcagtatgactatattccagagacaactgataaactctggtttgagtc

SEQ ID NO: 283063 - DNA, 136 bp, Unknown
  Bacterial polypeptide expressing nucleotide sequence isolated from the Sargasso Sea
tttttcatttgaggttgatccatttaagaaacattgcttgcttaatggcttggacgatattggcttaacgatggaaaagtcgtctagtatagaagcctttgaaagaaaagtagagattgaacagccttggttatga

SEQ ID NO: 283064 - DNA, 124 bp, Unknown
  Bacterial polypeptide expressing nucleotide sequence isolated from the Sargasso Sea
atgaaatctttctcaaaaatttcgagtaaaatcactccatttgataaagcaaatgtagacacagatcaaatcattccaaaacaattcctcaaattaataacaaaatctggatttggaaaatttc

SEQ ID NO: 283065 - DNA, 181 bp, Unknown
  Bacterial polypeptide expressing nucleotide sequence isolated from the Sargasso Sea
aatggaaaaatttattaaattaaaaagtatacccgcacatattcctttaatgaatatagatacggacatgataattcctaagcagtttttaaaaactattaaaagaactgggttaggaaaaagtctattctatgaaatgagatatgatgaaagtggcaaattaattgaaaatttatattaa

SEQ ID NO: 283066 - DNA, 229 bp, Unknown
  Bacterial polypeptide expressing nucleotide sequence isolated from the Sargasso Sea
atgccacaaactatttacgataaaatttggaacgatcatctggttgatgaacaagatgatggaacttgcttgctttttgttgataggcatttagtgcatgaagttactagcccgcaggcatttgaaggcttaagaaattcaaatagaaaagttagacaacctaatttaactcttgctgttgcagatcaaaatgtaccaacaacagatagaacaaaaggaatgaagatga

SEQ ID NO: 283067 - DNA, 786 bp, Unknown
  Bacterial polypeptide expressing nucleotide sequence isolated from the Sargasso Sea
tacctcaacccatataatagttaaaaatgtaaaattttatacaaataatttacaagaaccaaaagaactcgctcaaataaaaaaattgaaaatatttatcagtcaaaaaaacttatttaaaattaataatctagaaataaaaaaaattctttttgacgaagcaaatttttcaattcagcaagaagatttgggttattttaaaaaatttgtagaaaaaagattttcaactaaaaaaattgccataactaatagcaattttttttatatagataagaataaaaatgtaattgctatatttcctgttttaaaatttagtttattttttgacgtgaaaaatcttaaaaatttaattgcttctaaaggagaaatttttgcaatgccatattccttaaattggaataaaaattttaaaaataatttaagttcaacattgctaaagattaataaattaaacttaaaattagaaaatcaatcaaaaataaaaaattctgatttattgatcaaaaattttattttttttagaagtctggaaattgaatcagatattttagttaataaagactggataaaaataagttctgctcaaaatccaaaaacaaaaaaaagtatcttaacctatgatggtaaaattgatttaaatccgtttaatttaattatggatattgatttagaaaaactaaattttaaaagagatattttttataacaatctactacaaaatttatttgaattaagacatttatataatgaaaatcttagttctcaaataacactcaatgtcaacaa

SEQ ID NO: 283068 - DNA, 214 bp, Unknown
  Bacterial polypeptide expressing nucleotide sequence isolated from the Sargasso Sea
aatgcaaaagtttaatacattaaaaagtattcctgcatatctaccaatagttaatattgatacggacatgattatacctaagcaatttttaaaaactattaaaagaactggacttggaaaaaacctgttttttgaaatgagatatgatgataaaggaattgaaattgataattttgttcttaacaacgaaccatttaataagtcaaaaatttta

SEQ ID NO: 283069 - DNA, 119 bp, Unknown
  Bacterial polypeptide expressing nucleotide sequence isolated from the Sargasso Sea
aatgaaaaaatttagtacagtagagagcattcctgcatacttaccaattgtaaatattgatactgatatgattattccaaaacaatttttaaaaacaataaaaagaactggtttaggaa

SEQ ID NO: 283070 - DNA, 160 bp, Unknown
  Bacterial polypeptide expressing nucleotide sequence isolated from the Sargasso Sea
ataacctcttcggatggaagtatttttccatttgatgttgatcctttcaagaaacactgtctgctgaatggattagatgacattggtttaacgatggaaaagtcatcgagtatcgaagcttttgaaaaaaaattagaaaatgaacgaccctggctttaac

SEQ ID NO: 283071 - DNA, 715 bp, Unknown
  Bacterial polypeptide expressing nucleotide sequence isolated from the Sargasso Sea
atgttacaagatattaagcagtataaagatatattttataataacttttcggaaaatcatttaatagttttaggaattaataatgcaaagcctagtgaagattttaaagaagaaaagatttataatagtttagttattttaaataataatttagaagttttatcaatatataataaaattaaacttgtcccttttggtgaatttttgccttttgaaaaaattttttataattttggattaaaaaaaataactagaggatataattcattttcggcaggcaacgaaagagagttaataaatttaggaaaaaattttaataaaaaatcaatactaccgttaatttgttatgaaattatctactcaggtaatgtaaaaaagaaaaaccaatttcctgatttaataactaatatttctgaagatgcttggtttgggcgatcgataggacctcatcaacatttttcaaaagcaatttataggtcaatagaagacggagtttttattgctaggtcagctaataagggggtttctgcatttatcaatccaaacgggaaagttattaagtcacttaatacgggagagtcgggcaatattgagcttaattttcctatttttagtgaaaaaactttattttcaaattatggaaataaaatattttatttaataatttttttgtatatgtttcttattttaattttaaggaaatttaaaatttaat

SEQ ID NO: 283072 - DNA, 249 bp, Unknown
  Bacterial polypeptide expressing nucleotide sequence isolated from the Sargasso Sea
tatggctaaaacactatttgataaagtttgggattcacatgtaattgaaagaataaaagatggtccagatgttctttttattgacagacactttattcatgaagttacaagtccagtagcatttgttgggcttaaaaacaggggtcttaaagtaatgtttcctgatagaacttttgctactgctgaccataatacaccaactataaatcaacatctaccaattaaggataaactttcggctatgcaagt

SEQ ID NO: 283073 - DNA, 129 bp, Unknown
  Bacterial polypeptide expressing nucleotide sequence isolated from the Sargasso Sea
caacatcaaatagaaactttgagggaagacaaggtcgtgggggtagaacacatctagttagcccagcaatggcagcagtagcagctattgaagggcacttatcagatgtgagaaaatttaataattagt

SEQ ID NO: 283074 - DNA, 127 bp, Unknown
  Bacterial polypeptide expressing nucleotide sequence isolated from the Sargasso Sea
ttcaacatcaaacagaaattttgagggtagacaaggtagaggaggtagaactcatttagttagtccagccatggcagttgccgcagcaatcaaaggatgtctttttgatgtgaggaaaattcaataa

SEQ ID NO: 283075 - DNA, 239 bp, Unknown
  Bacterial polypeptide expressing nucleotide sequence isolated from the Sargasso Sea
tatgcaaaaatttaataaattaaaaagtattccagcatatttgccaatagtaaatatcgatacagatatgattattcctaaacaatttttgaaaactatcaaaagaacaggccttggtaaaaatttattttatgaaatgagatatgatgatcaaggaaaaaaaattgatgactttattttaaatcaaaatccctataatgattcaaaaattttattagcaggaaaaaactttggttgcg

SEQ ID NO: 283076 - DNA, 155 bp, Unknown
  Bacterial polypeptide expressing nucleotide sequence isolated from the Sargasso Sea
aataaagccagaagaaagatgtgcctctacatcaaatagaaattttgaaggaagacaaggtagaggtggtagaacccatctagttagtccaggaatggctgcagcagctgcaatttcaggtaatttagatgatgtcagaaagtatcaaaattaaa

SEQ ID NO: 283077 - DNA, 169 bp, Unknown
  Bacterial polypeptide expressing nucleotide sequence isolated from the Sargasso Sea
atggcaagcacaatttacgataaaatatggaacgaacatttagtccacgaacaagaagatggaacatcacttctttttgtcgatagacatttagttcacgaagtaactagcccacaagcatttgagggcttgagatcatccaacaaaaaagtaagacaaccaggtttaa

SEQ ID NO: 283078 - DNA, 157 bp, Unknown
  Bacterial polypeptide expressing nucleotide sequence isolated from the Sargasso Sea
atgccttttacaacttacgataaaatttggaatgaacatcttgttgatgagcaaccagatggtacatcactattatttgtagatagacatttaattcatgaagttacaagccctcaagcatttgaaggattaagaaattcaaatagaaaagtaagac

SEQ ID NO: 283079 - DNA, 343 bp, Unknown
  Bacterial polypeptide expressing nucleotide sequence isolated from the Sargasso Sea
tacggattcagatgtattttatctcccagttttgcagatattttttataacaattgtaggaaaaacggtattttggctgtagttttgaaggatgatgaaatacaggccttatttgaagaagttgaagcaaatgaaggatgcttactgacagtagatcttcctgggcagaatgttatctctcccgaaggcaaaaagttctcttttgagattgattcatttgaaaaaaactgtctacttgaaggattagacgatatcggatggacgatgcagtttgaagataaaattcagagttatgaaaggcaggctaaaagtgaaaagccgtggttgttcattagcaattgat

SEQ ID NO: 283080 - DNA, 253 bp, Unknown
  Bacterial polypeptide expressing nucleotide sequence isolated from the Sargasso Sea
atggttaaagaacaagctgagaaggagggaatccataaaatattcattgatgctggatttcagtggagggcgccgggttgttccatgtgtttaggcatgaatccggaccaactcagtccatatgaaagatgtgcttcaacttcaaataggaattttgagggtcggcaaggtaacttaggtagaacacatttaatgagcccaaagatggctgctttaactgcaataaacggaaggattgtaaaagagatttaag

SEQ ID NO: 283081 - DNA, 388 bp, Unknown
  Bacterial polypeptide expressing nucleotide sequence isolated from the Sargasso Sea
attggtttcaggaacaaattttggctccggttcttctagggagcacgctccatgggccttacttgattatggatttagggtaattattgctccaagtttcgcagatatatttaggaataattgttttcagaatggaatactatctattgttttagaaaaaaatgaagttgattatttgatgggcatgtcattttcaaataaaggctatcagttaaatgtcgatcttgaaaatgaaataatttatgacgaaaaagagtttaaaacaaattttaaaatcgatcctttcagaaaggaatctttattaaaaggtcaagatgaaatagctaggaccctaacctcaagtaaccatattgataattttgaaaataaaagaattgaaaggtggtaa

SEQ ID NO: 283082 - DNA, 598 bp, Unknown
  Bacterial polypeptide expressing nucleotide sequence isolated from the Sargasso Sea
aaaaatgctttttgtgcagtgagaccaccaggacatcatgcagaaaaaaataaagcaatgggattttgcatttttaataatggtttggctgttggagcaaaatatctattaaaaaaatataaattaaaaaaaattgcgatcatagattttgatgttcatcatggcaatggaactcaagatattttctacaataatgataaagttctatatatatctacacatcagtatcctttttatcctgggtctggatctagtaatgaaaaagggaaatttaataatattttaaatattcccctgatggctggcaccagttcagaagaatatttaaatgcatatgaaagagtattgaataaactagcagagtttaaacctgatttcattttattttctgcaggttttgatgctcataaagatgatccattagcccaatttcaactaaaatcaatagacttttatactttaactaaaagaactttagaagtatctaaaaatttgtgtcatggaaaagttgtatcaattttagagggtggatatgatcttaatgcattaatggaaagtactgagatgcatgttaaagcccttttagaatttaattgaa

SEQ ID NO: 283083 - DNA, 718 bp, Unknown
  Bacterial polypeptide expressing nucleotide sequence isolated from the Sargasso Sea
gatggttgacgggacggaataccaggcaacaggttcggatacccaatggacggtgcagacggatacgacgactccactgacagggaaccaggaagtttctttttccctcagccgctatacggatcttgccggtaacgaacagatcactccaacgacatcggtcagcgaaggaacggactcgaagtcggtgtatgtggatgacactgcaccagacgaaacgacgataatcgtaagctcatcgattgagacgtcgaacttccttggggagacgaatccggaggatccagaccagtacctgtctctgaccggggatcaactgaccctggaatttacgacagaggaacatctgtcggaagtccatgtgatggttgacgggacggagtaccaggcaacaggttcggatacccaatggacggtgcagacggatacgacgactccactgacagggaaccaggaagtttctttttccctcagccgctatagggatcttgccggtaacgaacagatcactccaacgacatcggtcagcgaaggaacggactcgaagtcggtgtatgtggatgacactgcaccagacgaaacgacgataatcgtaagctcatcgattgagacgtcgaacttccttggggagacgaatccggaggatccagaccagtacctgtctttgaccgggaatcaactgaccctggaatttacgacagaggaacatctgtcggaa

SEQ ID NO: 283084 - DNA, 148 bp, Unknown
  Bacterial polypeptide expressing nucleotide sequence isolated from the Sargasso Sea
atgcctagaactttatacgacaaaatttggaatgaacatttagttcatcagcaagatgatggtacatctttattatttgtggatagacatttaatacgcgaggtaacaagcccacaagcattcgaagggcttagaaattcaaaaagaa

SEQ ID NO: 283085 - DNA, 761 bp, Unknown
  Bacterial polypeptide expressing nucleotide sequence isolated from the Sargasso Sea
tttgggcgcagtgaggcccgcggggtttaacgggttcgctgtgggcaccacgctctttgacaagctgtggcaagaacatgaggtgacgacgctgtcagcgcgtcaatccctgctttatgtagatcgtatttttctgcatgagcgaaccggcagcgtggccttgaacggcttgcttgagaaacagcgcccggtacgcagacgcgagcatgcgttctgcacgatggaccacattgtcgatacattaccggggcgtagtgacgatacgctgatgcccagtggccgggatttcatcgtcgcaacccgacacgcggctcaggaagctggcattcaactgttcgacattaccgatactaaccagggcattgtgcatgtgatctcgcccgagctcggcatcgcattacccgggttgtcactcatctgcccagacagccacacctgcactttgggtgggctcggtgccctcgcctggggtgtgggttcgactgaggccgagcatgcgctggcgaccagcacgctgcgcgtctcccgaccacagacgatgcgcgtcagcttcgcaggtctgctcggtgagggtgtctccgcaaaggatcttattctgttcactatccgcgagctgtcagcgtcaggaggcgcgggctatgccatcgagttcgcagggcctgctatcgatgcgctgccggtagaagcccgactcacgctgtgcaatatgaccaccgagctctccgccttcaccgggctcatcgctcccgatcaaaaggtgc

SEQ ID NO: 283086 - DNA, 336 bp, Unknown
  Bacterial polypeptide expressing nucleotide sequence isolated from the Sargasso Sea
atttaagacaagcagctgaaatagtaaaaggtaaaactgttgctgacaatattactgaagccatagttgttccaggctctggtatggttaaagaacaagctgaaatggaaggtttagatgaagtatttaaagatgctggttttgtatggagagatccaggctgctcaatgtgtttaggaatgaacccagatcagttgaaaccttatgagagatgtgcttctacatctaatagaaattttgaaggcagacaaggttatctaggacgtacgcatttaatgagtcctatcatggcagcatataccgcaataaacggaacagttggagagccatcatgaa

SEQ ID NO: 283087 - DNA, 834 bp, Unknown
  Bacterial polypeptide expressing nucleotide sequence isolated from the Sargasso Sea
tgcgcgtttaaaagcaggatcattgagtcgggataataataaaaatttaaattctggaaaaatttacaacatttgtgatcaaagaatttactcaaattggaaagaaatgttagaaaaagaggttggcgaccttgatgctgttgtgatactcagtccttcaaacctgcattttgaaatggttgaatatgcgttaaaattaaactatcctgtgatatgtgaaaaacctttagctagcaatctagacgaacttgaggttattataaatttacagaaaaatttaaatgcctttattgcagttacttataattatacgggctacccaatgataagattgctaaaaaaaattatttctgattatatacttggagaaatatttcattttcagattgaaatgccgcaagaaacatatgtcaggagtgatagcaataataatccattttttgtggaagattggcgaaaaaaggaccataacacacctactattaattttgatttagctgttcacatgcaccaaattattttttatttattaggtgaatacccaaaaagtgtagttgctcatgaaaaaaaccacaacaaaaattttgatattatagataatgttaattgtttaacagagtattctaacggtctggatggtcatttttggtggagtaaaagttcgttaggaaatagaaatggtttgaaaattagaatttttggatccgaaggatcagcgtgttgggttcaagaaaaacctgaactgctttatgtgtcatataaagatggtaagaaagagacaatcgatagaggagatagtagatattcaaattttatgaaaccttatcatcgttt

SEQ ID NO: 283088 - DNA, 166 bp, Unknown
  Bacterial polypeptide expressing nucleotide sequence isolated from the Sargasso Sea
tatgaattctgataaattaaatgaaggtgatagatgtgcaagtacttctaatagaaattttgaaggtagacaaggtaaaggtggaagaacacatttggtgagccctgaaattgcagcagcttctgcagtaacaggaaaattaactgatcctagaaatgtgtcatag

SEQ ID NO: 283089 - DNA, 917 bp, Unknown
  Bacterial polypeptide expressing nucleotide sequence isolated from the Sargasso Sea
gaacttccttgggggagacgaatcccggaggatccagaccagtacctgtctctgaccggggatcaattgaccctggaatttacgacagaggaacatctgtcggaagtccatgtgatggttgacgggacggagtaccaggcaacaggttcggatacccaatggacggtgcagacggatacgacgactccactgacagggaatcaggaagtttctttttccctcagccgctatacggatcttgccggtaacgaacagatcactccaacgacatcggtcagcgaaggaacggactcgaagtcggtgtatgtggatgacactgcaccagacgaaacgacgataatcgtaagctcatcgattgagacgtcgaacttccttggggagacgaatccggaggatccagaccagtacctgtctcttaccggggatcagctgacccttgaatttacgacagaggaacatctgtcggaagtccatgtgatggttgacgggacggagtaccaggcaacaggttcggatacccaatggacggtgcagacggatacgacgactccactgacagggaatcaggaagtttctttttccctcagccgctatacggatcttgccggtaacgaacagatcactccaacgacatcggtcagcgaaggaacggactcgaagtcggtgtatgtggatgacactgcaccagacgaaacgacgataatcgtaagctcatcgattgagacgtcgaacttccttggggagacgaatccggaggatccagaccagtacctgtctctgaccggggatcagctgacccttgaatttacgacagaggaacatctgtcggaagtccatgtgatggttgacgggacggagtaccaggcaacaggttcggatacccaatggacggtgcagacggatacgacgactccact

SEQ ID NO: 283090 - DNA, 226 bp, Unknown
  Bacterial polypeptide expressing nucleotide sequence isolated from the Sargasso Sea
atgcaaaaatttacttttataaaaggtattccatcatatttacctatagtaaatattgatacagatatgattattcccaagcaatttttaaaaactataaaaagaacagggttaggaaaaaatttattttttgaattaagatatgatgacaaaggaaatgaaattaaagattttattcttaataataaaccacataataattcaaaaatattaattacaggtaaaa

SEQ ID NO: 283091 - DNA, 725 bp, Unknown
  Bacterial polypeptide expressing nucleotide sequence isolated from the Sargasso Sea
aaatccaaaatatgatgagagagataagataaaaatctcagaaaaatttaataattttaaagtcaagtacattagctcaaataaaaaaaattctttaaaaattttagaaaaaattattattaagagttctaatatattacttaccccaacttccttaggtttagctttactttgtgagaatattaaaaaagatggaagaagagttttgttaacaggtataggtggagacgaactattttgcggctactatattaattatttagcacatataaattcatacagcagaaaaagtaaaatttttaaaaaaaaacatgctttttggaaacaaaatatatttaaatttataagaaatccaaatctaaaaaacttcaaagactcaaagaaaaaaaatattagaaatagattacatttctttaccgaaggtaattcagttccttataactacttaaaaaaaaataaaaaaattaatataaagaatttttcacgagatatattttacaataatatgcttcaaaatatttatttacaaagtataccaacacaactaatgcaaactgacatcgtttcaatgtgctatgatatagagtctagatccccatttttatctcataaattgtttgaaaatgtgtataaattaaaaaaagattttttcatgcatgacggaaaaccaaaatctttattaagagatgcaatgaaaaatatttttccaaatgtaaattattaac

SEQ ID NO: 283092 - DNA, 235 bp, Unknown
  Bacterial polypeptide expressing nucleotide sequence isolated from the Sargasso Sea
atgcaaaaatttaataaattaaaaagtatcccagcttatttaccaattgtaaatattgatacagatatgataattccaaaacagtttttaaagactatcaaaagaactggtcttggaaaaaatttattttttgaaatgagatatgatgatcaaggcaaagaaataaatgattttgtattaaataaatatccatttaatcaatctaaaattttaattgctggaaaaaactttggat

SEQ ID NO: 283093 - DNA, 301 bp, Unknown
  Bacterial polypeptide expressing nucleotide sequence isolated from the Sargasso Sea
atgaataaatttatctcaataaaaagtattcctgcttatctacctatcgtcaatatagatacagacatgataattcctaaacagtttttaaaaaccataaaaagaactggactaggaaaaaatttattttttgaaatgagatatgatcaaagtggtaaagagatagatgactttattttaaataatagtccgtataataattctaaaattttaattgcaggaaagaattttggatgtggctcttatagagaacatgccccttgggctttaatggattttggaataacttgtgtaattagtt

SEQ ID NO: 283094 - DNA, 238 bp, Unknown
  Bacterial polypeptide expressing nucleotide sequence isolated from the Sargasso Sea
atagggctggataaaatattcgaatcagcaggagcagaatggcgtgaatctggatgctcgatgtgccttggaatgaatggtgatacagttggaaatgggcaattggcagtgagtactagtaaccgaaattttgagggtcgacaaggtaaaggggctagaacaatactagcaagtccaaaaactgctgctgcatcagcgatcgcaggatctgtagatgacccaaggaaatatagttaac

SEQ ID NO: 283095 - DNA, 148 bp, Unknown
  Bacterial polypeptide expressing nucleotide sequence isolated from the Sargasso Sea
ttaaaacctagagaaagatgtgcctcaacatcaaatagaaattttgaaggaaggcaaggtagagaaggtagaacacatttagttagtccagttgttgctgctgcttctgcaattaaaggctcatttgctcaggagactgatttataat

SEQ ID NO: 283096 - DNA, 106 bp, Unknown
  Bacterial polypeptide expressing nucleotide sequence isolated from the Sargasso Sea
atgacaattgaaggtggtgcaagagcaggattaattgcaccagatgaaaaaatttttgaatatttaaaaggaaaaccgatgtcaccaaaaagtgaaaattgggata

SEQ ID NO: 283097 - DNA, 310 bp, Unknown
  Bacterial polypeptide expressing nucleotide sequence isolated from the Sargasso Sea
agttcaagttatgcagatatattttataataactgttttagaacggggattctcccaattacaatttcagaggatcaaatcaaagaaatttcagagtactcgaatagaaaagaggaaatttctgtaaatttacctgaacaaacaataagttttggtaataaagaaattaaatttgaaatagatcaatttaagaaaaaatgtctaattgagggactagatgacattgctttatcactagaaaaatctgaaaaaatagtttcatacgaaaataaaattaaagaagcaaaaccttggatatttaatgattaaa

SEQ ID NO: 283098 - DNA, 254 bp, Unknown
  Bacterial polypeptide expressing nucleotide sequence isolated from the Sargasso Sea
aatggaatcatttaaaacaataactggtatacctgcgccactgccaatgattaatgtcgataccgatatgattattccaaaacaatttttgaaaacaataaagagatctggtttaggtaaaaacttatttcatgaattgagatacgatattcaaggtaatataaagaatgattttgttcttaactgggatccttataaaacttcaaaaattttaattgctggggcaaattttggttgtggatcaagtagagagc

SEQ ID NO: 283099 - DNA, 190 bp, Unknown
  Bacterial polypeptide expressing nucleotide sequence isolated from the Sargasso Sea
aatgtctaaaacaatctacgataaaatttggaatgaacatcttgttcatacacaagaagatggaacatcattattatttgttgacagacatttaatacatgaagttactagtccgcaagcatttgaaggtttaagaaattcaaaaagaaaagtaagacaacccaaagttaacacttgcagtagcagacca

SEQ ID NO: 283100 - DNA, 121 bp, Unknown
  Bacterial polypeptide expressing nucleotide sequence isolated from the Sargasso Sea
atgcaaaaatttaatactttgaagagtataccggcgtatctaccaatagttaatattgatacagatatgattattccaaaacagttcttaaagacaattaagaggactggattaggtaaaa

SEQ ID NO: 283101 - DNA, 276 bp, Unknown
  Bacterial polypeptide expressing nucleotide sequence isolated from the Sargasso Sea
aatgggaaaaacattatttgaaaaaatctgggatagacacttagttgcgtctatagatgagagtacaaatttagtatttatagatttacatcttgtacatgaagtaacatcccctcaagcgtttgatagcttgaggcttgctggtagaaaagttaaacatcctgaaatgactcttgcaacagtagaccatggtgtcccaacttcaaataggctactgggaataaaagatcctctctctaaaatccagattgaagctttagaaaataattgtgagga

SEQ ID NO: 283102 - DNA, 156 bp, Unknown
  Bacterial polypeptide expressing nucleotide sequence isolated from the Sargasso Sea
aaatttttattaaagctggttttgaatggagggagcctggctgctcaatgtgtttgggcatgaatcctgatcagttgaagcctaaagaaagatgtgcatcgacatcaaatagaaatttgaaggaagacaaggaagaggagggagaacgcatctagt

SEQ ID NO: 283103 - DNA, 277 bp, Unknown
  Bacterial polypeptide expressing nucleotide sequence isolated from the Sargasso Sea
atggaaaaatttatcaaattaaaaagcataccagcacatattcctttaatgaatatagacacggacatgattattcctaagcaatttttaaagactattaaaagaactggtttaggaaaaagtctattctatgagatgagatatgatgaaagtggcaaattaattaataaatttatattaaataatgatccatattcaaaatcgaaaatccttttagctggaaaaaattttggctgtggttcttcaaggggaacacgcgcccatgggccttacttga

SEQ ID NO: 283104 - DNA, 239 bp, Unknown
  Bacterial polypeptide expressing nucleotide sequence isolated from the Sargasso Sea
aatgcaaaaatttaataaacttacaagtattcctgcgtatctaccaatagttaatattgatacagatatgataattcctaaacaatttttaaaaacaataaaaaggactggtcttggaaaaaatttgttttttgaaatgaggtatgatgatcaaggaaatgaaataaaagattttattttaaaccaaaaaccatttaatcagtctaaaattttaattgcaggaaagaattttggatgtg

SEQ ID NO: 283105 - DNA, 116 bp, Unknown
  Bacterial polypeptide expressing nucleotide sequence isolated from the Sargasso Sea
aaacagaaattttgaaggaaggcaaggtagagagggcagaactcatcttgttagtccggccgtagctgctgccacagcactcaagggtaagttgagcttggtagaagatatataag

SEQ ID NO: 283106 - DNA, 175 bp, Unknown
  Bacterial polypeptide expressing nucleotide sequence isolated from the Sargasso Sea
aatgaataaatttacaacattaaaaagtatacctgcatatttacctatcgttaatatagatactgatatgattattcctaagcagtttttaaaaacaataaaaagaactggtttaggtaaaaacctttttcatgaaatgagatacgataacaatggaaaagaaataaaagatttt

SEQ ID NO: 283107 - DNA, 895 bp, Unknown
  Bacterial polypeptide expressing nucleotide sequence isolated from the Sargasso Sea
gattaataatttaaaagataacctcacaatattgggcgcaagcgataaagagttagattcattgactgataaatttataaatgaaaatgtcaatcaggtggttgttgtagatgatattttttataataattcaaactattttcctgatcaaacatttataaataatgatcaaatagatgatttaaaaagtcattatccaaaatacatcaatgatgatgaaaaaaaatggtcgaaattaaaccacttgtttaaatatgtatatgaagagataataagaataattggattttcggatactgattttaatccagataaaaatagcttaattttagtaatcaaaaaaactgcaatagacaaaattccaaatataaattttaaaaagatatatatttattttggtgcttctttgcatcatgtttctcatcaaatgacatatacagaaaaagattggaatgctaaaaaaattgtaggagcgctagttaataataatgaagaagggataaataagataaaagataaattattttctgttgcaacaaatgtcagtgaaaaatttattttatcaaatgattttaaagatagcaatttatctaaagaagactttttaaaacctacagatttcactcagatagtagataatatagaaattaaagatgaaaaaattaaaaaccttacccattgttggattgagggcgtaaatccatggcaagaaaaatatatcaaattagatgaatttgataaatttataccaacagagaatttagagtatttaaaattaagtgattgtttgcaaagtgagaatttagacttacctcatttcccaaagttaaaaattctaaaaatgaatttttttcaaaatcatcatagaaaatctttagataaggtaacattatca

SEQ ID NO: 283108 - DNA, 694 bp, Unknown
  Bacterial polypeptide expressing nucleotide sequence isolated from the Sargasso Sea
agatggcgatactgttgtatcacctggcagtaaaggtgctgttgtagacgcagtaggttcaattattacagctattgatggtgttcaaaataaagaatttaaaaatgcattttgtgcagtaagaccacctgggcatcatgctgaaaaaaataaagctatgggtttttgtatttataataacgttgctgttggagcaaattacttattaaaaaaatataaactaaataaagtagcaattattgattttgatgttcaccatggaaatggaacacaagatattttttataataatgaaaaagttttatatatatcaactcatcaatatccttattatcctggaacaggaactgaaaatgagaaaggtaagtataacaatatttttaatattccattgccagcaggtactacttctaatgaatatctaaatgcatatgaatttgtccttaaaaaaattaatgaatttaagcctgaatttattttattttcagcgggctttgatgctcataaagatgatccattagctcagtttcaattaacttctaatgatttctatcatttaaccaaaagaactttagagttatccaaactttattgtagtggaaaaattgtttctattttagaagggggatatgaccttaatgctctccaaaaaagtaccgagaagcatgttaacgcactcttagaatttaattga

SEQ ID NO: 283109 - DNA, 1720 bp, Unknown
  Bacterial polypeptide expressing nucleotide sequence isolated from the Sargasso Sea
tatggatttactactgatcgatgatgatgaagtcgatagaactgcgattattcgggcactgcgacagtccaaattagccttcaatgtggttgaggcaaattgtgctttcgatggccttaacttggctctcgaaaggcatttcgacggtattttgttggattatctattacccgatgccaatggtttagaggtgctgatcaaactcaattcgatgactcaagatcaaactgtggtggtgatgctgagtcgctatgaggatgagaaactggcgcagcgctgtatcgagctgggcgcgcaggattttctgttaaaagatgaagtcaattcacggatcttaagccgtgcgattcgttacgctaaacaacgttcctccatggccttagccctaagaaatagtcatcaaaaactcaaagagttggctgagcatgattctctaaccaaattagtgaaccgctacgggtttgaactgtgtttgaaccgcgctatagcaagggcaaaacgcagcaatgactttctcgccgttatcttgctcgatctagatgattttaaagcaattaacgatactttaggtcatcaaactggcgatatcttactcgtcaaagtcgcctcgcgattaagctcagtgctgcgagatggtgatgtgatcgcccgcttaggtggcgatgagtttgtggtactcgtgaccgacaatgactacaaatatttccctatgatagtcgccaatcgcctgcttaaggcctttgaggaggttttctgtctgggtgaaaacgatgtgatgattggtgccagtatcggggtggctttttataatgaggccgcctccgatagttctgagttgatgaaatgcgccgatattgccatgtatcgcgccaaaaaaatggggcgcaaccaaattcagttttattctgaggccttagataaagaagtccgttaccgtaatcatatcgagtccagcttgcgcatggcgctaaagcagaatgaattcaaggtttattatcaggcacaagtagattctcaaacccatcaggtgatagggatggaggcgttaatccgttggttgcatccgcaagatggtttgattgcaccggatcaattcctatccattgcagaggaaattggtctgatggaagaaatcggtgactgggtgcttatcgaagcctgtcgtcaagcgcaggaatggctcacgcggctaacccccgttggacatcgctttaccattgcagtgaatttgtcggcatcgcaaattggacacattgatctatatgaaaaaattgtccatgccctcgaggtgacgggattagatgcgaaagcgctagagcttgagattaccgaaaacagcttaattgaagaaccccatgaacatgccaaggtgctcgataggattgcgcaactcggagtacgattcgcgctcgatgacttcggtacaggcttttcttccctagaacatataaaactctttccaatcagtgtattaaaaattgataagagctttattgcctcctacgataaggatgacaaagatacgcggttactcgcggcattactcaatttcgcctatggttttaacgtgacatcggttgccgaaggcattgaaacggctgaacaagccgagttttgcaccgcacgaaattgcaatgtgctccaagggtatttattttcgcggcccttagaggcgagcgaatttgaggccaagtacattactccactacttacaaaataa

SEQ ID NO: 283110 - DNA, 1270 bp, Unknown
  Bacterial polypeptide expressing nucleotide sequence isolated from the Sargasso Sea
catgaacataaccgaaaaaatacttgctagggcttcaggtaaatcaagtctatctccagatgatgtagtttttgccaaagtagataaggtgatggtacatgacgtctctggaccaggtgtcttgaaagtatttgataaattacaaaaacaaggtattgacacatccaaactacatgattctacaaaagtatggattgctgaagatcattttgttccttctgctgaaaaaatttctgcagaaaatattgtaaaactatctaatttttcaaaacaatatgatatcaaaaaacatttcaaatatggaatgggtcaatatggaatatgtcacactctatctcatgaagaagcattggtaaatccaggagaagtatatgttggtggtgattctcatacaaatactactggtggattaggtgcatttgcttgtggtctaggccatacagatgttgcatatgtattactgaatggagaaatttggtttaaagttcctgaaacctattatttcaaactaaatggaaaattacctcctcatgttatggctaaagatttcattttgaaaataattggtgatattggtactgacggtggtgcatacaatactatgcagtttgggggaacaggaattgatgaaatgtcagtagaaagtagattaactctaaccaatatgactactgaggctggagcaaaaaatggaattattgaagctgatgaaaaaacagtacaatatcttaacgagagaggatcaaacagtgcttctgtttttcatggagattctgatgcagaatactcaaaagtttttgaatatgaggcatcagaattagaaccaacagtagcaaaaccattttcacctgaaaacatcactgttgcaagagaattgtcatctactgaattggataaatcatacattggttcgtgtactggcgcaaagtatgaagatcttttagccgctgctaaaattctcaaaggaaggcaagtaaagatacgtactgaagtgttacctgccgcaatctcaatatacaaaaaagctgttaaagatggtttgatagaaatctttctagatgcaggtgtaactgtaggtcctcctacatgtggtgcatgttgtggtgcacacatgggcgtgttggcaaaagatgaaatttgtgtaagtactacaaatagaaatttccctggacgcatgggtcatgttgaatcacaaacttatcttgcatctccccaggttgctgcagcatctgcagtaactggaaaactatctgatccgagggacttgaat

SEQ ID NO: 283111 - DNA, 133 bp, Unknown
  Bacterial polypeptide expressing nucleotide sequence isolated from the Sargasso Sea
gcttcaacttcaaatcgtaattttgaaggaagacaagggcgtggtggtagaacacacctagtaagcccagaaatggctgcggcagctgcaatttcaggaaatttagatgacgtaagaaagtaccaaaattaaa

SEQ ID NO: 283112 - DNA, 1273 bp, Unknown
  Bacterial polypeptide expressing nucleotide sequence isolated from the Sargasso Sea
tatgaacataactgaaaaaatactagctcgtgcttctgagaaaaataccgtttctccggatgatattgtatttgctaaggtcgataaggttatggtacatgatgtttctggacctggagttttgaaagtttttgataaattacaaaaacaaggaattgatacatcaaaattacatgatccctcaaaagtttggattgctgaagatcattttgttccatctgcagaaaaaatttctgcagaaaatattgtaaaattatcaaatttctcaaaaaaatatgatattaaaaaacacttcaagtatggaatgggacaatatggaatatgtcatacattatctcatgaagaggcgttagtcaatcctggcgatgtctatgttggcggtgactctcatactaacacaactggtgcattgggcgcatttgcttgtggattaggccatactgatgttgcatatgtattattgaacggagaaatttggtttaaagtacctgaaacatattatttcaaacttaatggaaaattacctccacatgtaatggctaaagatttcatactcaacgttattggcgatattggaaacgatggcggagcatacaacactatgcaatttggtggaacaggaattgatgaaatgtctgtagaaagtagattgacattatgtaatatgactactgaagcaggcgcaaaaaatggaattattgaatctgatcaaaaaacagttgaatatctaactcaaagaggcgcaaccaatgtttcagaattccatggagattctgacgcagagtattctaaaactttcgagtatgaagcatctgaattagaacctaccgtttcaaaaccattttctcctgacaacattactgttgctagggaactgtcttctactgaattagataaatcatacattggttcttgtactggtgcaaaatatgaagatcttttagcagccgctaaaattctcaagggaagacaagtaaaaatacgaactgaagtattgcctgcggcaatttcaatatacaaaaaagctgtaaaagatggcttgattgaaatatttctaaatgcgggtgtcactgtaggtccacctacatgtggtgcatgttgtggtgctcatatgggtgtattagcaaaagatgaaatttgtgttagtaccacaaacagaaatttccctggtagaatgggtcatgtcgaatctcagacatatctcgcttctccacaagttgctgctgcatcagctgtaactggaaaattaactgacccgagggatttgaattga

SEQ ID NO: 283113 - DNA, 928 bp, Unknown
  Bacterial polypeptide expressing nucleotide sequence isolated from the Sargasso Sea
atgaagacaggaataataactactgatacctatttaaatcataatacgggacagggacatcctgaaagagcagatcgtgtaactgtagttatagatcatttaaaaaaattaaaatcaaaaaatttaatttggaaaaaaccagctaaatttgatcttaaatatttagaatatgctcatgacaaagaatatctaaataatgtaactgaatcttttcctaaacaaggtttaaatttcttagatggagatactatagtatcgcctggaagcaaagatgccacgaaagatgctgtgggctctattctaactgccattgacggtataataaaaaaagattttagtaatgccttctgtgctgtaagacctccaggtcatcatgcagaaaaacaaaaagctatgggcttttgtgtttataacaatgtagcagtaggcgcttattatttactagaaaaatataaattaaaaaaagtcgcaattattgattttgatgttcatcatggcaacggaacacaagacattttttataacaatgaaaaagttttatatatatcttctcatcaatacccttattatcctgggtctggagcagcagatgaaaaaggtgataaggacaatgttttaaatgtcccattgagcgcagggactcagccacacgaatttttaaacgcttatgatagtatttttaaaaaacttaaagaatttaaacctgaatttattttattatcggcgggatttgatgctcacaaagatgatcctcttgctcaaattaatttagaatctaaagattattatacactaacaaataggatactgattttagctaaaaaactttgtaatggaaaagttgtgtctattctggaaggtggatatgacttgaatgcacttagagagagtgttgattaccacgtaaaatctctgttagaaaactagt

SEQ ID NO: 283114 - DNA, 355 bp, Unknown
  Bacterial polypeptide expressing nucleotide sequence isolated from the Sargasso Sea
tatggaaccggtagaaatagtttttggcacagcacttcctttaaaccgctctgacgtagacacggatcaaataatcccaagtgattggctcaagcgagtagaacgaacaggttttgatagaggattatttagcgaatggagagataatccttctttcgtgcttaacgatgaacgatttgctcaggcaaggatccttgtagcaggaccaaattttggaactggatcctctagagaacacgcagtctgggcgattcaacaatatggattccaagcagtgatatcacctcgttttgcagatattttccgaaataattgcaccaaaaacggacttgtgccagttgaagtatcagacgaa

SEQ ID NO: 283115 - DNA, 265 bp, Unknown
  Bacterial polypeptide expressing nucleotide sequence isolated from the Sargasso Sea
tatggctaaaacactatttgataaagtttgggatccacatgtaattgaaaaaataaaagatggcccagatgttctttttatagatagacatttcattcatgaagttacaagtccagtagcatttgttgggcttaagaacagaggtcttaaagtaatgtttcctgataaaacttttgctactgctgaccataatacaccaacaataaataaacatctaccaattaaggataaactatcagctatgcaggtaaaaaccctagaaaaa

SEQ ID NO: 283116 - DNA, 126 bp, Unknown
  Bacterial polypeptide expressing nucleotide sequence isolated from the Sargasso Sea
catgcaaaaatttaacactttgaagagtataccagcgtatttgccaatagttaatattgatacagatatgattattccaaaacaatttttaaaaacaattaaaagaactggactcggcaaaaattt

SEQ ID NO: 283117 - DNA, 202 bp, Unknown
  Bacterial polypeptide expressing nucleotide sequence isolated from the Sargasso Sea
atgaaaaaattcactacattaaaaagcatacctgcatatctaccaatagttaatattgatacagatatgattatcccaaaacaatttttaaaaactatcaaaagaactggtcttggtaaaaacttattttttgaaatgagatatgatgaaaaagaaaatccaataaatgattttatcttaaataatgatccattcaataaat

SEQ ID NO: 283118 - DNA, 169 bp, Unknown
  Bacterial polypeptide expressing nucleotide sequence isolated from the Sargasso Sea
aatgaaaaaattcatttctataaaaagtattcctgcttatctcccgatcgttaatatagatacagacatgataattcctaaacaatttttaaaaacaattaaaagaactggattaggtaaaaatttattttttgaaatgagatatgatcaaagtggtaaagaaaaataa

SEQ ID NO: 283119 - DNA, 176 bp, Unknown
  Bacterial polypeptide expressing nucleotide sequence isolated from the Sargasso Sea
aatgtcacaaacaatctacgataaaatttggaatgatcatctagttcatgagcaaaaagatggaacttcccttctctttgttgatagacatttaatccatgaagttactagcccacaggcatttgaaggtttaagaaattcaaatagaaaagttagacaaccaaaattaacacttg

SEQ ID NO: 283120 - DNA, 163 bp, Unknown
  Bacterial polypeptide expressing nucleotide sequence isolated from the Sargasso Sea
atgtctaaaacaatctacgataaaatttggaatgagcatctagttcacgaacaagatgatggaacttctttattatttgttgatcgtcacttaattcatgaagtgacaagcccacaagcatttgagggtttaagaaattctaaaagaaaagtaagacagccta

SEQ ID NO: 283121 - DNA, 239 bp, Unknown
  Bacterial polypeptide expressing nucleotide sequence isolated from the Sargasso Sea
aatgcagaaatttactaacttaaaaagtattccagcatatttaccaatagtaaatatcgatacagatatgattattccaaagcaatttcttaaaacaattaaaagaactggacttggtaaaaatcttttttatgagatgaggtatgatgtagagggaaaaataattaatgattttattcttaatcaaagtcctttcaatgagtcaaaaattttaattgcaggaaaaaattttggatgtg

SEQ ID NO: 283122 - DNA, 121 bp, Unknown
  Bacterial polypeptide expressing nucleotide sequence isolated from the Sargasso Sea
aacatcaaatagaaattttgaaggtagacaaggtagagaaggtagaactcatcttgttagccctgcaatagctgctgcctctgcaattaaaggttcatttgcaacagtagaggatttataa

SEQ ID NO: 283123 - DNA, 106 bp, Unknown
  Bacterial polypeptide expressing nucleotide sequence isolated from the Sargasso Sea
tttgagggtagacaaggtagagaaggaagaacacatttagtaagtccagccgttgctgcagcttctgcaatcaaaggctctttttcttctgttgaggatttataaa

SEQ ID NO: 283124 - DNA, 197 bp, Unknown
  Bacterial polypeptide expressing nucleotide sequence isolated from the Sargasso Sea
aatgaaaaatcaatatattttccattctggaattattatgcccctacctagagataatgtagatacagatcaaattattcccaagcaatttttaaaatccatcaaaaagagtggttttggacccaatttatttgacgcttggagatatgaagatgaaggatatcctggacaagacaatgactataggcccaaaaatc

SEQ ID NO: 283125 - DNA, 121 bp, Unknown
  Bacterial polypeptide expressing nucleotide sequence isolated from the Sargasso Sea
tttgcataaaatatttatcgaagcaggcttcgaatggagagaacctgggttgctcaatgtgtttaggtatgaacccagatcaattgaagccaaaagaaaggtgtgcatcaacttcaaatag

SEQ ID NO: 283126 - DNA, 232 bp, Unknown
  Bacterial polypeptide expressing nucleotide sequence isolated from the Sargasso Sea
atgcaaaaatttaataaacttacaagtattcctgcttatctaccaatagttaatattgatacagatatgataattcctaaacaatttttaaagacgataaaaagaactggtcttggaaaaaatttgtttttcgaaatgcgatacgatgatcaaggaaatgaaataaaagattttgttttaaaccagaaaccccatttagcccagtctaaaaattttaattgcgggaaaaaac

SEQ ID NO: 283127 - DNA, 619 bp, Unknown
  Bacterial polypeptide expressing nucleotide sequence isolated from the Sargasso Sea
atggaagcatttcgaaaactgactgcaacggctgcaccaatccaaatagccaatatagatacagatcaaataattccagctcgatttttaaaaactccgcgaagcaccgatcatggtcaatttttgtttcacgatatgcgccgcggcagagacggaaacttgagcgaagacttcatactgaatcaaaaagaattcaaagcgtctggcattctggtcgcagacaataattttggctgtggctcctcaagagagtccgctgtatatgcacttcatgacgcaggtataaagtgcgtaattgcccccagtttcggtgatattttttatactaactcactaaaaaatgggttgttgcctatcaaacttgatcgatcgattgtgcaagccatttggaaggcgctggcatcagcaaatagttcggaggtcgaggttgaccttgaaagccaaacaattcatttgcctgatggtagtacatatggtttcgaaattgacgcctttcgaaaacaatgtcttctagagggcttagatgatattgatctcacgttaaaacaccaagaaagtatagaacaacatgagttgattgagaaaacgaattatccctggacgcgctctattaattaat

SEQ ID NO: 283128 - DNA, 1258 bp, Unknown
  Bacterial polypeptide expressing nucleotide sequence isolated from the Sargasso Sea
cctggcccagaaaatcattgcccgagctgcaggaaaagcagaagtcgcggttggtgaaatcgaaatcggctcggtggatcttgccatgatccatgattccggaggtccgcgcagggtggcgccaatccttgagcggctcggggtggaggtctgggatccagaaaaactggtggtggtcaccgatcactatgtcccggtttttgatgctgaatcgagagcaatcctggatttggcacgtgactgggtgaaaaagcagggagtgtcccgattccatgatgaggaggggatttgccatgtggtcctgccggaaaacggatatttgaaaccggggatgtttgcagtcgggggagacagtcattctcccacaggtggagccttcggttgctacatgttcggtattggcgccacggaaatggcgggggtgctcgcaactggagagatatggatccgagttcctgaaacgatccggattgaatgggaaggaactttccaggaaggggtcatggccaaggacgtgatgcttttcctttgcggccggttgggaatggatggaggccgttatcaggcagtcgaatactgtggagaagcaatttcggagttatccatgcaggaacgcatgaccctcagcaacatgagcgccgaactcggagcccaggccggattgattgcaccggacgctaccaccatgaaatggcttgaggaccatggttcggagagcgatccagtcgaaccatggaaaactgatccagatgcggatttcgaataccatcgctttgatgcagaccgactggagcctcaagttgccgcgcctcacaatccagcaaacgcggcttctgttgtggaatacaacgacatccgtccggatgtgctttaccttggtgcatgcaccggcgccaaactacatgatcttcgtgctgcagcctcagttctgaaagaaaacagggtgcaatccggaattgaattttgggttgccccttcttcaaaaagagacttccacgaagccaggaaagaaggggtgatgaaaatcctggaagacgcaggagccaaaattcttcccaccagttgtgggctatgtgcgggttatggccctcaacgtttgggacaaggaaccgtttgcctctcctccacggcccgtaattttaaaggcaggatgggggatgaatcctcagaggtttaccttgcttctcccataaccgtcgcctccaccgcaatcacaggttacatcagtgatccccgaaactttcttggagcaagttga

SEQ ID NO: 283129 - DNA, 598 bp, Unknown
  Bacterial polypeptide expressing nucleotide sequence isolated from the Sargasso Sea
tatgggttacgaaaagtttaaaatattaaaaagcactgtagttccactaccaattgagaatgttgatactgatcaaataatacccgcaagatttttaaaagcaacagagcgagttggatttggtgataatttgtttcgtgattggagataccatgcagataattctaaaaaaaaggattttgtattaaacaacaataattactccggtaaaattttagttggcggaaaaaactttggttcaggatcatctagagaacatgccgcatgggctatttatgattatggctttagatgtgttatttcaagtttctttgctgacatttttaaaaacaactgcttgaatattggtgttttgccagttcaagtatccccaaattttttagataaaatatttgaaatcgtattcaaaaatcctcaaaccaatttagttattgatttgaaaaaacaaactgttgagattgaaggaacttctcaaattgaaagttttgatataaacggatacaaaaagaataatctattaaatggatacgatgatattgattaccttctaaatataaaagattcaatccagacattttcaactaaaactccattataa

SEQ ID NO: 283130 - DNA, 511 bp, Unknown
  Bacterial polypeptide expressing nucleotide sequence isolated from the Sargasso Sea
ttggattatccagagtgttccgatcgtgtccaaaatatcattgaactaataaataaaaaagaagagtttaaaaatataataattaaacaacctaataaaatagagcaatcacttatttctgctgcgcatgaagagaaatttgttagggaaactcttgcaagatttccatctgatgatcaaatagttttcttagatcaagaaactccagtttcaaaaggttctctggatgcaaccttaagagccgccggagcgggaatagacgcggtagatgctataatgagcaataacattcacaatgccttttgtattgttaggccacctggccaccatgcatgttatgatcgatcaatgggtttttgtgtatttaacaatgttgcaattgccgcacattatttaatcaacaagtataagtttaaaaatatagccattattgattttgatgttcatcatggaaatggtacccaagatatattctataataattcaaaagttacctattactcaacgcacc

SEQ ID NO: 283131 - DNA, 241 bp, Unknown
  Bacterial polypeptide expressing nucleotide sequence isolated from the Sargasso Sea
tatgggaaaaacattatttgaaaaaatctgggataaccaccttgtagcttcgatagacaaaagtacaaacttaatatttgtagatttgcatctcgtacatgaagtaacctctccccaagcttttgatagtctgagaatagccggaaggaaggtaaagtatcctgaattaactcttgcaacagttgaccatggtgttccaacatcaaatagattacttggtataaaagatccattatcaaaa

SEQ ID NO: 283132 - DNA, 169 bp, Unknown
  Bacterial polypeptide expressing nucleotide sequence isolated from the Sargasso Sea
atgaaaaaatttacatcaattaaaagtataccagcttatcttccaatagttaatattgatactgacatgattattccaaagcagtttttgaaaacaataaaaagaacaggactaggaaaaaacctattttatgaaatgagatatgaccaaaaatggaaacttaattgat

SEQ ID NO: 283133 - DNA, 1120 bp, Unknown
  Bacterial polypeptide expressing nucleotide sequence isolated from the Sargasso Sea
actggcacggcgaactggcgggattgggggcgcgcagccgctgctgcacaccgataaaggggtcagcggcactggcctcgccaccctgctggccggggtactggccgaaggggagctgccggtggccgccatctgggacgagatcccggccgactcctccaccgccgtggtggagcggattgcggcccgtcaccgggagctcggctgtgacagcctggtggcgctgggcggaggttccgtcatcgacaccgccaaggcggtcaacattctcgcctccatgggggggacgcggctgctggattacgccggcgccggctgcctgacccggccgctgcaaccgctggcggtggtgcccaccacggcgggcaccggctcggaagtgaccctggtggcggtgatcaaggacgaggcgagcgggcgcaaggtgcccttcacctcccccttcctgctgccccagctggcggtgctggatccgcgcctcacccaggggctgccgctcaacatcaccgccgccaccgccatggatgccatgacccacgccatcgaggccttcatcggcaacgccaagaatccggtcagcgacgccctggccctgatggcggtggagaagatcgccaatgccctgccccaggtgctgagcaacccgcaggacaagcggctgcggctgcagctggcggaaggttccaccctggcgggcatggccttctccaactccatggtggggctggtgcacgccctcggccacagtctgggggcccgctgccacctgccccacggcctgtgcatgaacctcttcctgcccaccgtgctcgactacaaccggccgggcatcgatcctgaactggcccgcctgttgctgccgctggtgggggccgagcgctttgccgcgaccccggccaccgcccgggcccaggccgccatcgaggcgttgcaggcgctgcgcgataccctgtggcaggcggtgaagctgccgcgcaccctgcgcgaggctggcgtcaccgacaaggcgctgctgcccgagatccgcgatctcgccatcaacgacggcgccctgctatacaaccgcaaggatgccgaccgcacccagctgctcggcctgctcgagctggcctgggagtga

SEQ ID NO: 283134 - DNA, 238 bp, Unknown
  Bacterial polypeptide expressing nucleotide sequence isolated from the Sargasso Sea
aatgcaaaaattttctacattaaaaagtattccagcatatttaccaatcgtaaatattgatactgatatgatcatcccaaagcagtttttaaaaacaattaaaagaactggacttggaaaaaatttgttttttgagatgaggtatgatgataatggaaataaaataggcgattttatattaaatcaagatccatttacaaattcaaaaatattgatagcaggaaaaaactttggttgt

SEQ ID NO: 283135 - DNA, 2047 bp, Unknown
  Bacterial polypeptide expressing nucleotide sequence isolated from the Sargasso Sea
tttgttaagtacattttatcttacgagcgtttttgctcaagaagattttcaatttacttttgaaccaccagagcttcaaattcagttaggtgaaagtaaaaaagtcactatcaggcttcttgacaaacagcagaaccttgtgaagtctagtttttcaatgtactcagcgcacgatccaggaattgggcctacacctgattggcccggaaccagcttgtctatttccccaagagtaagcgatgagaccggaaaggctacggtttcaatagagccaaacagatctggaacattaaaattaaaagttcgtggtgcaaatggcgctactggcgaaatgattgtaatggtacctaagcccgcagtaaagaagattgatatatctgcaatccctcctaaagtttatgtaggtacttttgtaccgttaaaatttaaaataattgacgcatcaaataatgaaagagatgatgttgaattatcaatatcatcatcggatgacaaaaaaggaagagttgacgtcttcaatacctttgaggctaagaaaacaggaacggtaaaggtttcagttaaggctgaaaaaatttcagaaacctttaaaattaagattgtcagcaatcctgttagacggatttccatggattttcagcaaactgaaattcgcactggagatgtactccatattaatgctaaggctttagcgggtaatggcagcttggtcaaagacgctcccttagattatgcctattttggaaaagcaggatatggtgagtatggacttccagcttccgcatacatttcagaagacggaaggttcgttgctgaaactccagggctttatactttagttgtatcatcaggtagttattcatcacagaaaaaagtaaatgttgtttccagaaatgtaaaaaaagaagttcgtttggttggtcatggtcttatatcaaatgtaaaatctggcgatttgtgggtgtggcccggagtaggcaaacacagtggaaaagactttgcagctacaggaagtatttttggagatggagaggcatatttttgggatgtaacagatccggcgaatatgaaaataattgatactgtaaaagttgacgcccgaaatgtgaatgatgtgaaagtttctgaggatggacgaacaggagtaataactcgcgaaggagcttctaatagaaaaaatggctttgtaatacttgatgtttccgacccatttaatgtaaaaatcctttcaacatttaacgatgatatgaccggtggtgtacacaatacatttatttacaagaatcatgtttatgccgtgaataatggccgaaaatatgatattataaatattgaggaccccaaaaacccctttagagttggcgtctttgagttgaatactgctgggcatgctattcatgatgtttggatcgaaaatggaattgcttattcatcaaactggagagatggtattgtagctgttgatataggaggaagcacttcaaatgagaaagaaagctctgatattggttttaatcctttgcttttgaaagcgggtaatggaagcccatcaaacccagttcagctcgcttcttttccagattttaaaggtagaaatcattcagccttccctttttccagtcagtcaacagggaatttttatattgtaatgggagatgaagtattcccaaatggtttggaaaaccttatcaataacaaaccttcccaaccccgcggcgggttccactttataaattttagcgatcccgacaatcctgttgaagatgcggcatatattgtacccgaagccggaagtcacaatcaatgggtttatggcgatgtgttattagctgctttttatcagggaggtattagaatccttgatatttctggtgagcttcttggtgatctctataagcaggagagagagattggctattttttaccacaacacagagatggaattatccctaatgcgccaatggtatggggggcgcagccgtacaaggattacattttcttatcagacatgaacagcggactttattgtattgaggttgtggattag

SEQ ID NO: 283136 - DNA, 172 bp, Unknown
  Bacterial polypeptide expressing nucleotide sequence isolated from the Sargasso Sea
ccaggctcaggtttggtaaaacaacaagcagaacaagaaggattagacaaaatatttataaattcaggttttgaatggagagagcccggatgttcaatgtgtttagctatgaatgctgacaaacttaagcccgaagaaagatgtgcgtctacatcaaacagaaatttataaa

SEQ ID NO: 283137 - DNA, 148 bp, Unknown
  Bacterial polypeptide expressing nucleotide sequence isolated from the Sargasso Sea
aatgtctaaaacactatatgacaaaatatgggaaaatcaccttgttcatcagcaagaagatggaacatcattaatatatgttgatcgtcatttagttcacgaagttacaagtcctcaggcattgaaggatgagaatacaaaaaagaaa

SEQ ID NO: 283138 - DNA, 200 bp, Unknown
  Bacterial polypeptide expressing nucleotide sequence isolated from the Sargasso Sea
ctggagagaagctggttgctcaatgtgcttaggtatgaatcctgatatattagccccaggtgagagatgtgcttctacttcaaacagaaattatgaaggaagacaaggtgtcggagggcgaacacatctcgtaagcccccaaatggctgctgcagcagcaattaatggcttctttgttgatgttagagaaggcaattaat

SEQ ID NO: 283139 - DNA, 920 bp, Unknown
  Bacterial polypeptide expressing nucleotide sequence isolated from the Sargasso Sea
attatttgaaaagatatgggatagccatttcgttacagaaattgatggggaacacttagtttacgtggaccgccttttcattcacgaggggtctcggcactcgttctctatgcttcgtgattcaaacattaagccttatagggtagaacaaattattggttttgctgaccactacatgcctactgaaactactgttggaggtgtcagcggtgtaaaagatcccgaaattcgcggtatgttggaattaatggaaaaaaatacctccgaattcggaattcggtattttggatttcaagaccccgaccaagggattttacacgttaccccacccgaacagggaatttcccagccaggtatgctcatctgtggcgcagattcacatacttcaacacatggcgcttttggaagccttgcctttggtattggagcatcggaggccgggcacataatggccactcaatgcatttggcagcaacgcccctccacactcaggataaatattgaaggatctcttccatttggagtttatgccaaggatataattttggggttaatagccaaatttggtgtaggcttaggggtaggaacggcaatcgaattttctggatcatgcatcaacaatctgaccatggaagaacgtatgaccgtctgtaacatgacaatagaggcagctggacggatgggaatgattgcaccagatgacaccacatatgaatacatggaggaaaggccctatatacctaaaggcacgctctggaataatgccattaattattggcagacattaccgacagatgacggagcgatatttgatgatgaaaaagagctaaatattgacgagcttgtgccaatggtaacttgggggtacaaatcctggaatggctgttccaattacaggttcggttccgtcaccggatgag

SEQ ID NO: 283140 - DNA, 280 bp, Unknown
  Bacterial polypeptide expressing nucleotide sequence isolated from the Sargasso Sea
aatagcaattttggatgtggttccagcagagaacatgcccctcaagcgcttatgagatggggtataaaagctatcataggcgagagtttcgccgacattttttacagtaactgtattgcgataggagttccatgttttacgctacctaaaaaatcgatagaagaaatacaaaactattgcgataatcaatctttattcttagaaattgatcttaaaaattcattagcagaatcaaaagatttaaatttctatcttgagattaaggagagctcaagataga

SEQ ID NO: 283141 - DNA, 470 bp, Unknown
  Bacterial polypeptide expressing nucleotide sequence isolated from the Sargasso Sea
ggatgatcgccgtgaactcaagggtcagcacccttttgaccaggagcgattcaggggggcatcgatccttgtggtgaacggcaacttcggctgtggatccagccgcgaacatgcacctcaggcactgatgcgctgggggatccgtgccgtggtgggcgtcagcttcgccgagattttttacggcaactgtcttgccctgggccttccatgtgccacagcgtcttcttcagatgtggaggcgattcagcaacgggtgatgcaggccccggatcgctcctggtcactggatctggaggctgaacgactgacctccgacgagcaccagtgggacatctctgtggatgcagggccgcggcagatgttgctcagcggccgctgggatgccacatcgcagttgctggcccatggcccagaggtggagcagttgatgcaggcactgccgtacatcaacgggttcagccgtcgctgac

SEQ ID NO: 283142 - DNA, 301 bp, Unknown
  Bacterial polypeptide expressing nucleotide sequence isolated from the Sargasso Sea
tatgaaatctaatagcgagggattaatcatagatggagttgttgcatatatagatagagataatattgatactgatcaaattatccctacagaatatttaaaatctattaaaaagtttggctttgaagattatctttttgatggttggagatataaagatgatggaaagctaggtatcacaaaggatcaaagagtgattgatgaaaactttatactcaataaaaatcctttcaatgaatcgaaaatacttttaactcgagataattttggatgtggctcatcaagagaacatgcagtttgg

SEQ ID NO: 283143 - DNA, 351 bp, Unknown
  Bacterial polypeptide expressing nucleotide sequence isolated from the Sargasso Sea
ctttgagagattttggtataaaggctgttattgcatcttcatttggtgatattttttacaataattgttttaaaaatggagtattgcctatcaaattagaaaaagaaaatattgagagactttttgaccttgttaagaaagaagctgttgaattttcaataaatctccaacaaagaataattcatttaaatgataaagataaaattaagtttaaagtagatgctcatttgattgatcgaataatatttggcttggatgatgtagatataagtttaaaagaaaaagataaaattatgctttttgaaaaaaatagaaaaatttcaaaaccttggatatatgtaaatgagtaaa

SEQ ID NO: 283144 - DNA, 132 bp, Unknown
  Bacterial polypeptide expressing nucleotide sequence isolated from the Sargasso Sea
catgtctgcaaaaacgctgtacgacaagttgtgggccaaccatctcgtcaaggaacgggatgatggttctgcgttgatctatatcgaccgtcacattcttcacgaagtgacttcaccgcaggcgtttgaagg

SEQ ID NO: 283145 - DNA, 181 bp, Unknown
  Bacterial polypeptide expressing nucleotide sequence isolated from the Sargasso Sea
atgggatacaccatatatgacaagctctggaatgagcacttaataagatcctatgatgatggagactcactaatttatattgataggcattttcttcatgaagtaacatctcctcaagcttttgagggcctcaaaaaaaaatcactcaaaccatggagaattaatgcaaacattgctactc

SEQ ID NO: 283146 - DNA, 484 bp, Unknown
  Bacterial polypeptide expressing nucleotide sequence isolated from the Sargasso Sea
attgaaaggtaatgtaatcaaatatgaaagagataacatagatacagatgtaattattccaggcacatatctaaaaattcatgattataacgaattagctaaacatgctatggaaggattagatcccgaatttcattccaaagttcatgaaggtgattttcttttagctggaaagaattttggatgtggttcatctagagaacatgcaccaattgcactttctacatgtggaattaaagcagtgttggcagtatcatttgcaagaattttttatagaaattctgtagacggtgcgtttctcttaccaattgagatagatgaaaaaacataccaaacaatttcaaataatgatgaactagaaatagacatagaaaaaaatgagataaaaaatatttcaaaaaatgagacatacgcaataaaaccattctcagaaataattgcaaaaataatttctgcaggtggtttgttcaaatataaaaagtga

SEQ ID NO: 283147 - DNA, 236 bp, Unknown
  Bacterial polypeptide expressing nucleotide sequence isolated from the Sargasso Sea
aatgtctgaaacattatttgaaaaaatctggagttcacatgttgttaaggaaaaggaaaatgagccatcattaatctatattgacagacacttaattcatgaggttacatcaccacaagcatttgaaggattacgtaccaacaatagaaaagtaagaagaccagatcttacaattgccacagttgaccataatataccaaacacagacagatcattgcctatattagatgaaacct

SEQ ID NO: 283148 - DNA, 625 bp, Unknown
  Bacterial polypeptide expressing nucleotide sequence isolated from the Sargasso Sea
aatgaaatcggagtttcaaccgccaattgggaaaatctcacaaataagtgggcaatgcatttcattgattggtaacgacattgatacggatcgaataattccagcgcgattcttaaagtgtattaattttgattcattgggcaaatctgtttttgaagatgatagaaaaactttaaaaggaagacatccatttgatctagaggaaaacgaaaatgcctcaatactaattgttaatagcaattttggatgtggttccagcagagaacatgccccacaagcacttatgagatggggaataaaagcaattataggcgaaagttttgccgagattttttatagtaattgtattgcaattggaattccttgttttacgctcccaaaaaaaaccatccaatatattcaaaaatataacgataataaatttttatccttagaaattgatctgaaaaattccttagcaaaatcaaaaaatttaaatttaaatcttgagattaaggcgagcacaagaaaaatgtttttatcaggagaatgggatgcaacttcaacactacttgagaatgaaaatctaattgaaaataaattgaatgatttaccctatttaaactttaatgttgatttcttttag

SEQ ID NO: 283149 - DNA, 277 bp, Unknown
  Bacterial polypeptide expressing nucleotide sequence isolated from the Sargasso Sea
gatgaaaatagagtttaagccaccaattggaaaaatttcaaatataaacgggcaatgtatctccttgattggaaacgacattgatacagatcgaataattccagctcgttttttgaagtgtgtgaactttgattcattgggtgaatctgtttttgaggacgatagaaaaactttaaaaggaaagcatccttttgatctagaggaaaacaaaaatgcctcaatactagttgttaatagcaattttggatgtggttccagcagagaacatgccccccaa

SEQ ID NO: 283150 - DNA, 316 bp, Unknown
  Bacterial polypeptide expressing nucleotide sequence isolated from the Sargasso Sea
atggaaaaatttgaaatattaaaagggattgccgctccacttcctatgataaatgttgatacggatatgatcataccaaaacagtttttaaaaacaattaaacgttcaggtttaggtaaaaatctttttcatgaacttcgctatgatatgcaaggcaatataaaaaatgattttgtcttaaactgggatccttataaacaagcgtcaattcttattgctggagataattttggttgtggatcaagtagagagcatgcgccttggtcacttttagattttggctttaaatgtattattgctcccaagttttgctgat

SEQ ID NO: 283151 - DNA, 625 bp, Unknown
  Bacterial polypeptide expressing nucleotide sequence isolated from the Sargasso Sea
atgaaatcagagtttaccccaccaattggaaaaatttcaaatatgaaagggaaatgcatctccttgattggaaacgatattgatacagatcgaataattccagcgcgttttttgaagtgtattaactttgattcattgggtgaatctgtttttgaggacgatagaaaaactttaaaaggaaagcatccttttgatctagaggaaaacaaaaattcctcaatactagttgttaatagcaattttggatgtggttccagcagagaacatgccccccaagcgcttatgagatggggtataaaagcaattataggagaaagttttgccgacattttttatagtaactgtattgcgataggaattccatgttttacgctacctaaaaaatccatagaagaaatacaaaactattgcgataatcaatttttatttttagaaattgatatgaaaaactccttagcaaaatcaaaagatttaaatttcaatcttgagattaaggaaagctcaagaaaaatgttcttatcaggagaatgggatgctacttcaacactacttgataataaaaatttaatcgaaaataaatttaaccaattaccctatataaaatttaatactaattttttatagc

SEQ ID NO: 283152 - DNA, 364 bp, Unknown
  Bacterial polypeptide expressing nucleotide sequence isolated from the Sargasso Sea
gcatgctgtatgggccttaagagactttggcatcaaagcggttatagcatcctcatttggagatattttttacaataattgttttaagaatggagtcctgccaatctatttagaaaaaaatcaaattgaaaaactttttagtttagtaaaaaaagaagttgttgaattatcaatagacctccaaaaaagaataatttttttaaaaaatcaggatgaaattaattttgaggtagatgatcatctaatcgaacgaatcatatatggattagacgatattgatattactttaaaagaaaaagacaagatttctaattttgaaaaaaatagaaaaataacaagaccatggatttatgcaaatgagtaa

SEQ ID NO: 283153 - DNA, 148 bp, Unknown
  Bacterial polypeptide expressing nucleotide sequence isolated from the Sargasso Sea
tatgcctaggaccttgtacgataaattatgggaccttcatgaggtaactcagagacaagatggaacttaccttctatatatagatagacatttaattcatgaggttacttctccgcaagcttttgagggtttaaggcttgctggaaga

SEQ ID NO: 283154 - DNA, 178 bp, Unknown
  Bacterial polypeptide expressing nucleotide sequence isolated from the Sargasso Sea
tatgtcagaaaataaaactctttatgacaaaatttgggatgatcatctaatttctgaggaagatgatggcacatcactattatatgtagataggcatttagttcatgaagttacaagtcctcaagcttttgagggtttaagactttcaaatagaaaagtaagatcaccagaaaaaaca

SEQ ID NO: 283155 - DNA, 391 bp, Unknown
  Bacterial polypeptide expressing nucleotide sequence isolated from the Sargasso Sea
gcaggtaaaaattttggctgcggctcctctcgagagcacgcaccttgggctttattagattttggaattacttgtgttataagctcaagttttgcagatatttttcataataattgtttcaagaatggaattttaccagtaactctagatgaagaaaaaattagagaattatctgaatacgcaaatagaaaagaagaaatttctattgatctagttgaggaaaaagttgtttatggcaacaatgaggtcacctttaaagtagatccatttaaaaaaaaatgcttacttgagggattagatgaaatagctttatctcttaataaatcaaataaaattgaaagttttgaaaataatttgaagtctaaaaagccttggatttttaatgattaag

SEQ ID NO: 283156 - DNA, 295 bp, Unknown
  Bacterial polypeptide expressing nucleotide sequence isolated from the Sargasso Sea
gatggaaaagtttaagaccctagaaggtatagcggctccaatgcctctcattaatatagacacggatatgttaataccgaagcagtttctaaaaaccataaaaagaacagggctcggtgagaacctatttttcgaaatgcgatatgataaaaatggaaatgaaattaaagattttattttaaacagagaacactattcaaaatcctcaattattattggaggtgctaattttggttgtggctcatctagagagcatgcaccttgggctcttaaagattttggaattaagtgcata

SEQ ID NO: 283157 - DNA, 610 bp, Unknown
  Bacterial polypeptide expressing nucleotide sequence isolated from the Sargasso Sea
ttgaaaactttaaaatcagatgatgatgctatttttgataaagaatttacctttgatggatctttgatagaacccatgattacttatggaactaatcctggtatgggtatttcaataaattcaggaattcctagttcaaatcaacatggaggaaataaagaaactttcttaaaatctcttgaatacatggattattcagaaggagataaaattctcggaaaaaaaatagattttgttttcttgggtagttgtacaaatggaagaatagaagattttagagcttttacaaatattgttaaaggaagaaaaaaagctcccaatgttactgcttggttagttccaggatcacacaaggttgagaaagcgattaaggatgaaggacttttaactattttaaatgaatcaggatttgaactcagagaaccaggatgttcagcatgtttggctatgaatgatgataaaattcccccaggaaaatatgctgtcagtacatcaaatagaaattttgaaggaagacaaggtcctggatcacgaacactattggccagtcctattgtcgctgctgctgctgcaattactggaatggttactgaccctagatatttataat

SEQ ID NO: 283158 - DNA, 151 bp, Unknown
  Bacterial polypeptide expressing nucleotide sequence isolated from the Sargasso Sea
aatgactgaaacattatttgagaaaatttggaattctcatgttgtagttgaaagagaaaatgaaccttctttgatttacattgaccgtcatttggttcatgaagttacatctccacaggcatttgatgggttaagacaaaacaatagaaag

SEQ ID NO: 283159 - DNA, 373 bp, Unknown
  Bacterial polypeptide expressing nucleotide sequence isolated from the Sargasso Sea
atgtggtcttcaagagaacatgcgccttgggcattattagattttggaataacatgtgtaataagccctagttatgctgatatattttataacaattgttttaagaatggaatattgccaataatactagatgatgaaaaaattaaacaaatttcacaatactctaacagaaaagaagaaatagaagtagatctatataatcaaaaaatagtttttggaaataatgaaattaaatttgaattagatgcatttaaaaaaaaatgtctattagaaggtctggatgatattgctttatcattagaaaaaactgacaaaataatatcttttgaaaaaaatttaaaaaatacaaagccttggatatttaatgattaaa

SEQ ID NO: 283160 - DNA, 451 bp, Unknown
  Bacterial polypeptide expressing nucleotide sequence isolated from the Sargasso Sea
ttggcgatacaatgaagatggaacagatgatcctaattttattctgaataaaaaagaaaacaaaggctctgaaatccttattgctggaaataattttggttgcggatcctcacgagaacatgcgccatgggctatactggattatggcattaaagttgtaataagctcaaaaattgctgacatctttaaaggaaattctctcaagaatggtcttttaccaatcgttgtaacagaagatattctctcaatgctaatggatattccatgtccgtatctcagtatttgcatcaagaagtcagaattaacattacctaacaacgaaatatttgaatatgagattgatgagttttcaaaatattgtctaatcgaaggtattgatcagcttggttatataaaaagaaacattaatctaatagaaaagtttgaggagaaaagatcatggacgccctaa

SEQ ID NO: 283161 - DNA, 520 bp, Unknown
  Bacterial polypeptide expressing nucleotide sequence isolated from the Sargasso Sea
tttaaaacaataaaaagaactggactaggtaaaaatcttttttttgaaatgagatatgatgagaatggtaaaaaaattgaagattttattttaaataaagaaccatttaataaatcaaatattttaatagcgggaaaaaattttggctgtgagtcttcaagagaacatgcaccttgggctcttttagattttggaattacttgtgttattagctcaagttatgctgatatattttataataattgttttaaaaatggaattttgccaatcactatttcagaagatgaaataaaagagatatcagagtattctacaaggaaagaagaaataagtataattttagaagatcaaaaaatattatttggaaacaaagaagtaaaatttgaaattgatcaatttaaaaaaaaatgtttaatagaagggttagatgacatagccttatcacttgagcaaaaaactaaaattgaaaaatttgaaaataatttaaaatcaagtaaaccatggatttttaatgattaaa

SEQ ID NO: 283162 - DNA, 690 bp, Unknown
  Bacterial polypeptide expressing nucleotide sequence isolated from the Sargasso Sea
cttgaaaatcgattcactctttgcaacatggcggttgaattttctgctttcacagggatcattgctccagatcaaaaggtgtttgattatcttaaagatcgcccttattctcccaataaaacatgggcagaaaccatcgattattggaaaagccttcatagtgatgaaaatgctatttttgataaggctattgaaattgatgcatctcaaatctatccatctgtatcttggggtttgagtccagaacaatcgatacccattgacggatccattccaaatcttcacgaaatatcaaatccagataaaaaagaggagttagaaagttcactaaaatatatgggtttaaaaagtggtcaatcattaatgcatctccccattgatgctgcctttattggctcatgcacaaatgcacgattagatgatttaagatcagcggcaaaaattcttaaaggcaataaagtctcgggcgatgtgcttgcgatctgcacgcctgcttcggcaaccgtgaaacgcaatgctgaaaaagaagggattgatcaaatatttaaagatgctggatttgaatggcgtgagccaggttgttccttgtgtttttatgcaggaggagaaggttttttacctgaacaaagagtcataacaagcaccaacagaaacttcagaggcagacaagggcccggagttcgatcccat

SEQ ID NO: 283163 - DNA, 453 bp, Unknown
  Bacterial polypeptide expressing nucleotide sequence isolated from the Sargasso Sea
gatgacggattcttttcaggataaaattgttagagttaaaggaactggagtttgggttgaaggggatgatttggatacagaccgaattattccagcagagtacctcaagtgcgttacctttaatggtcttggtgaatttgctttttacaatgcgcgtttcgatgccgacggcaatgaaactgaccaccctttaaatgatgctcgctttgaaggcgcctcggtcatgctttctgggcgtaatttcggttgcggatcttcgagagagcatgctcctcaatctctttatagagctggttttcgggcaatcattgctgaaagctttgcggaaatcttttttggaaactgcactactttggggctaatttgtgtttgcgctccccgcggtgacattaatcaattgggggcacttttagaggaagaccccactttagaaatttcgatcgatttaaatac

SEQ ID NO: 283164 - DNA, 943 bp, Unknown
  Bacterial polypeptide expressing nucleotide sequence isolated from the Sargasso Sea
ataggtcttcatcttattcatgaggtgactactcctcaggctttcgcaatgttagaagagttagatgctagcgttgcatttcccgataggactgttgctacagttgatcacattatacctactctatcgttgcttcgtccattggaagatcagcaagcggaattgatgatggcttcacttgaacaaaatgtggaaaagtttggtattcgttttttaaataagaattcacagatgcaaggaattgttcatgtaataggtccggagttagggttgagtcagcccggtatgacaattgcttgcggagatagtcatacaagtactcatggtgcaatgggggctctaggatttggaataggaacaacggaagtaggtcatgtcttagcttctcaaactctttctcttaatagattaaaagttcgtcgtattgaagtaaatggtgatttgcaaggtggagttttacctaaagacgttattttaagaattatccatgatcttggaattaagggtggtattggacatgcttatgaatatgctggaacagtttttgataatatggatatggaaggaagaatgacagtttgtaatatgagtatagagggtggtgcaagaattggttatgtgaatcctgataagaccacttttgattatttgtctggtagagagttcgctcctaaaggtgatgatttcaaaaaagcacaagttttttgggagtcgatagcttcggatactgatgcaaaatatgatgatacttttgaaattctagctgattctattgagccgatggttacttggggtataaatcctggacaatcaataggcctgtcagattcgttgccagatccgtctgttttctctggagaagatataaagacagctgaaaaaggttttgaatttatgggattgcgacctggaactccgatacgcgatacgaaaatagatgttg

SEQ ID NO: 283165 - DNA, 178 bp, Unknown
  Bacterial polypeptide expressing nucleotide sequence isolated from the Sargasso Sea
gttattgtatgtggtgatagccatacagctactcacggagcttttggtgcattagcttttggtataggcacttctgaagttgaacacgcttttagcaacacaaaccttaattcaaaaaaaatcaaaaaattttcgcataaatgtcataggaaaattaaatttaggagtgacttctaag

SEQ ID NO: 283166 - DNA, 295 bp, Unknown
  Bacterial polypeptide expressing nucleotide sequence isolated from the Sargasso Sea
ttaatttcatctttaagcgtagaaaataggatgactgtatgcaacatgaccattgaagctggagcaagagcaggattgatccagcctgatcaaaaagtatttgactatttaaaaaataaaccgatgtctccaaaaaatgaaaattgggataaagcagttcaatattggaatactctcaagtcagatcatggagcaaaatttgataaagaagtaattatcgagggaaacgaattaattccaatggtaacttggggtacatcaccccacgatgttataactattgatggaaaagttc

SEQ ID NO: 283167 - DNA, 150 bp, Unknown
  Bacterial polypeptide expressing nucleotide sequence isolated from the Sargasso Sea
aatgtctacaacactttacgataaaatttggaacgatcatttagtcgatcaacaagaagatggtacatcattactttttgtagatagacatttaattcacgaagtaacaagtccacaagcttttgaaggactaagaaattctaaaagaaa

SEQ ID NO: 283168 - DNA, 219 bp, Unknown
  Bacterial polypeptide expressing nucleotide sequence isolated from the Sargasso Sea
aatgccatatacaatttacgataaaatttggaatgaacatcttgtacacgaacaagaagatggaacttcattactttttgttgatagacatttaattcatgaagtaactagcccacaggcatttgagggtttaagagattcaaaaagaaaagttagacagcccaaacttactttagctgtagcagatcataatgttcccacaacggatagaacacaagg

SEQ ID NO: 283169 - DNA, 160 bp, Unknown
  Bacterial polypeptide expressing nucleotide sequence isolated from the Sargasso Sea
atgcccaatactctttacgataaaatttggaatgaccatttagttcatcaacaagatgatggaactgcattactatttgttgatagacatttagttcatgaggttactagcccacaagcttttgaaggattaagaaactctaaacgtaaagttagacacc

SEQ ID NO: 283170 - DNA, 253 bp, Unknown
  Bacterial polypeptide expressing nucleotide sequence isolated from the Sargasso Sea
aatgccttttacaacttacgataaaatttggaatgaacaccttgttgatgagcaaccagatggtacatcacttttgtttgtagatagacatttaattcatgaagttacaagccctcaagcatttgaaggcttaagaaattcaaatagaaaagtaagacatcctaaattaactcttgcagttgcagatcataatgttccctacactgataggtcaaaaggtattgcagatgaagattcgagaatttcagtttga

SEQ ID NO: 283171 - DNA, 274 bp, Unknown
  Bacterial polypeptide expressing nucleotide sequence isolated from the Sargasso Sea
atggaacaaaatcaaccgagaacgttatttgaaaaaatttggcaatcacatttagttagagagaaaacaggtgaaccaactttactttatgtagatttacatttagtacatgaagtcacatctcctcaagcatttgatggattgagaatagcaggtagaaacgtaaggcgtactgacctgacaatagcagttatggatcacaatacaccaacatgggacctgtcattgccagtaaaagacccaatagcaaaacaacagttagacgcacttgcaa

SEQ ID NO: 283172 - DNA, 130 bp, Unknown
  Bacterial polypeptide expressing nucleotide sequence isolated from the Sargasso Sea
tatgaaacctcaaactttatttgataaaatttggaatactcatttagtcgaaaagcaagaagacggtacttgtttgatttatatcgacagacaccttgttcatgaggtaactagcccacaggcattaaag

SEQ ID NO: 283173 - DNA, 357 bp, Unknown
  Bacterial polypeptide expressing nucleotide sequence isolated from the Sargasso Sea
cttcaagagaacatgcgccatgggcattacttgattttggaataagagtaatagtaagtgaaagttttgcagatattttttataataattgttttaaaaatgggatactcccagtcattgcgaacgaaggtatcataaatgaattaaaagactattctttaagaaaagaaaatatcgaagttaaacttgaagaacaagaaattctttatggaaacaaatcatttaaatttgaattagacacttttaaaaaaaaatgcctattagaaggactggatgatattgcactttctttaaaaaaaattgaaaatataaaaaaatttgagaacaaaatatctcaaagtaaaccttggttataat

SEQ ID NO: 283174 - DNA, 286 bp, Unknown
  Bacterial polypeptide expressing nucleotide sequence isolated from the Sargasso Sea
aatggaatcatttaaaacaataattggtatccctgcaccactaccaatgattaatgtcgatactgatatgattattccaaaacaatttttgaaaacaataaagagatctggtttaggaaaaaacttatttcatgaattaagatacgatattcaaggtaacataaagaatgattttgttctaaactgggacccttataaaacttcaaaaattttaattgctggggcaaattttggctgtgggtcaagtagagagcatgcaccatggtcacttttagattttggtttt

SEQ ID NO: 283175 - DNA, 154 bp, Unknown
  Bacterial polypeptide expressing nucleotide sequence isolated from the Sargasso Sea
tatgtcaaaaacactctacgataaaatttgggatgaccaccttgttcacaaagataatgatggaacagctttactttatgttgatagacatcttattcatgaggtcactagtccacaagcttttgaaggattaagaattcaggcagaaaagtaa

SEQ ID NO: 283176 - DNA, 364 bp, Unknown
  Bacterial polypeptide expressing nucleotide sequence isolated from the Sargasso Sea
atggaacccttcattcggcataagggaacggccgcccccttgcgccggagcaatgtcgataccgatcagatcatcccggcggagtacctcaaacgcattacccgtgatggattcgaggacggtctcttctccgcgtggcgcaaggaccccgactttgtcttgaatcgacacgaatatcggggggtcagcatcctggttgccggtccggacttcggtaccggctcctcccgggaacacgcggtgtgggccctgcagaactacggattctgtgtcgtcctgtcctcgcgcttcgccgacatcttccgaggaaactcaggcaagggcggactcttgaccgcccaggtcgaccagcgcgtgatcgagg

SEQ ID NO: 283177 - DNA, 123 bp, Unknown
  Bacterial polypeptide expressing nucleotide sequence isolated from the Sargasso Sea
aatgcccaatactctttacgataaaatttggaacgaccacttggttcatcaacaagatgatggtacgtctttattatttgtagatagacatttagttcatgaagttacaagtccacaggcttt

SEQ ID NO: 283178 - DNA, 288 bp, Unknown
  Bacterial polypeptide expressing nucleotide sequence isolated from the Sargasso Sea
gttgagtaccggcaccctctacgacaaggtctgggatctgcattgcgtgggggatctcccaggaggatcaacgcagctgtttgtcggtctgcacctgatccacgaggtcaccagtcctcaggcgttcgcggcactcagagacaagggactgactgtgcgatgtcccgaacgcaccgtcgcaacggttgatcacatcgttccaaccacctctcaggcgcgaccgtttgccgatcccttggcagaggagatgctcagcaccctggagcgcaattgtgaggagtacggcat

SEQ ID NO: 283179 - DNA, 257 bp, Unknown
  Bacterial polypeptide expressing nucleotide sequence isolated from the Sargasso Sea
aatgccttttacaacttacgataaaatttggaacgaacatcttgttgatgagcaaccagatggtacatcactattatttgtagatagacatttaattcatgaagttacaagccctcaagcatttgaaggattaagaaattcaaatagaaaagtaagacatcctaaattaactcttgcagttgcagatcataatgttccaactacggataggtcaaaaggcattgcagatgaagattctaaaattcaagtggaaactt

SEQ ID NO: 283180 - DNA, 349 bp, Unknown
  Bacterial polypeptide expressing nucleotide sequence isolated from the Sargasso Sea
ctcctgggccttagacgattttggaatacggtgtgtaattgctccagattttgctgatattttctttaataacagtttcaagaatggaattctcttaataaagcttcctcaaaaagaagttgatgatttgatggaggccgctgaaagaggtgccaactcaactatgactatcgatttagcgactcaagaaattatttcgtccgatggtaagtcgataaagtttgaattagatccttttaaaaaacattgtttgttaaatggcttggacgatattggcctaactatggaaaaagaaaagaagatagggacttttgaggaaaaccagaaggtcacgcagccttggctataa

SEQ ID NO: 283181 - DNA, 187 bp, Unknown
  Bacterial polypeptide expressing nucleotide sequence isolated from the Sargasso Sea
atgccccaaactctttacgataaaatttggaatgaacatatagttcatcaacaagatgacggaacaacattactatatgttgatagacatcttattcacgaagtaacaagcccacaagcttttgagggtttaagattatcaaaacgaaaagtaagaaaaccaaatcttgctttagctgtagccgatc

SEQ ID NO: 283182 - DNA, 130 bp, Unknown
  Bacterial polypeptide expressing nucleotide sequence isolated from the Sargasso Sea
atggctgaaacgttatttgagaaaatttggaattctcatgttgtagttgaaagagaaaatgaaccttctttaatttacatagatcgtcatcttgttcatgaagttacttcgcctcaggcttttgatggat

SEQ ID NO: 283183 - DNA, 456 bp, Unknown
  Bacterial polypeptide expressing nucleotide sequence isolated from the Sargasso Sea
aatggtagatttttcaaattcaagcccaaaaacattgtttgataagatttgggataaccatgtcgttatggagaacgatgacggtacatctttaatatacattgatatgcacctgacacatgaagtgaccagttggacgggttttgaataccttcgtgacacaaataaaactgttaggagaactgataaaactctagcagttccagatcattctatacctactctcaaccaggctaatggtattaaagatccgatagctagagagcaggtggaagcacttgtgaaaaatacaaaagattttgatattccatatattccacttttagatattcgacaaggtatcgttcatgtaattggacctgaacagggtgttactcaacctggttcaacattagtttgtggagatagccatacggcaacacacggcgcatttggatgtcttgcctttggaatagg

SEQ ID NO: 283184 - DNA, 407 bp, Unknown
  Bacterial polypeptide expressing nucleotide sequence isolated from the Sargasso Sea
atctaaaattttaattgctgaaaaaaactttggatgtggttcatcaagagaacatgctccttgggctttattagattttggaattacttgtgtaataagttcaagttatgcagatattttttttagtaattgttttaaaaatggaattttgcctataatccttgaagaagaaaaaataaaagagctatctgaatacgcaaatagacaagaagaaatttctattgatttgcaagaggaaaaaatagtttatggaaataatgagctaaaatttgaagttgatccatttaagaaaaaatgtttgttagaagggcttgatgatatcgctttatcactaaaaaaatcagaaaaaatagaaaagtttgaaacaaatttaaaaaacgaaaagccttgggtatttaatgattaaa

SEQ ID NO: 283185 - DNA, 925 bp, Unknown
  Bacterial polypeptide expressing nucleotide sequence isolated from the Sargasso Sea
agcgaaggaacggactcgaagtcggtgtatgtggatgacactgcaccagacgaaacgacgataatcgtaagctcatcgattgagacgtcgaacttccttggggagacgaatccggaggatccagaccagtacctgtctctgaccggggatcagctgacccttgaatttacgacagaggaacatctgtcggaagtccatgtgatggttgacgggacggagtaccaggcaacaggttcgaatacccaatggacggtgcagacggatacgacgactccactgacagggaatcaggaagtttctttttccctcagccgctatacggatcttgccggtaacgaacagattactccaacgacatcggtcagcgaaggaacggactcgaagtcggtgtatgtggatgacactgcaccagacgaaacgacgataatcgtaagctcatcgattgagacgtcgaacttccttggggagacgaatccggaggatccagaccagtacctgtctctgaccggggatcagctgaccctggaatttacgacagaggaacatctgtcggaagtccatgtgatggttgacgggacggagtaccaggcaacaggttcggatacccaatggacggtgcagacggatacgacgactccactgacagggaatcaggaagtttctttttccctcagccgctatacggatcttgccggtaacgaacagatcactccaacgacatcggtcagcgaaggaacggactcgaagtcggtgtatgtggatgacactgcaccagacgaaacgacgataatcgtaagctcatcgattgagacgtcgaacttccttggggagacgaatccggaggatccagaccagtacctgtctctgaccggggatcaactgaccctggaatttacgacagaggaacatctgtcggaagtccatg

SEQ ID NO: 283186 - DNA, 715 bp, Unknown
  Bacterial polypeptide expressing nucleotide sequence isolated from the Sargasso Sea
ggtgcacgaggaggtatgattgctcctgacgaaaaaacttttgaataccttaaggacaaagaatactctccaaaaggtcaagattgggataatgctattaaaaattggaatagtctaaagtccgattctaattcagtttttgacaaagaaatttcatttaatgctagtgatattgagcctatgataacatatggcacaaatcctggtatggcggttcctatttcaaaagaaatccctcattttgatgattcaggttcaaaatcgtcattttctaaatcactagaatatatgaacttcaaagaaggtgatgtaatgttaggcaaaaaaattgattatgtatttctaggtagctgtactaatggaagaattgaagattttagatcatttgcaagtttaattaaagggaagagaaaggcagaaaatattgatgcatggctagttcctggatctcacaaagtactaaaaagcattaaagaagaaggaatacttgaaattttagaaaattctggatttaaactaagagaaccaggctgttcagcatgtctagctatgaatgatgataaaatacctgctggaaaatatgcagttagtacaactaacagaaactttgaaggaagacaaggcccaggagcaagaacacttcttgcaagtcctttagttgctgctgcatctgcaattactggaaaaataactgaccctagagaaattacttaat

SEQ ID NO: 283187 - DNA, 627 bp, Unknown
  Bacterial polypeptide expressing nucleotide sequence isolated from the Sargasso Sea
tatggctacacaaactctatataataaagtatgggatcttcataaagttgccacattgccaactgggcaagatcaactatttattgggcttcatttaattcatgaagtgactaccccgcaagcctttgcagctattaacgaatccaatgggactgtggcgtaccctaatcgtacatttgcaactgtggatcatattattcctacactgactcaatcacgtccgtatcaagacgctcaagcagagattatgtctagcacattggaatctaatgttaaaaaacatgggatccagttttttgatcctaactcatcaaaacaaggtattgttcatgtcattggccctgaactagggattacacaacctgggatgaccattgcctgtggggatagccacacaagtactcatggagcatttgggtctcttgcatttgggattgggactacagaagttcgactcattctcgaaacccaaacactggcactaagccccctaaaagtccgtcgtatttcagttgatggagaactgggcactggactctctgctaaagatgtaatcttagcaattattaacaaattaggtgttaaaggtggtattggttatgcctatgaatacggtggggatgtctt

SEQ ID NO: 283188 - DNA, 178 bp, Unknown
  Bacterial polypeptide expressing nucleotide sequence isolated from the Sargasso Sea
atgcctaatactctttacgataaaatttggaaagatcacctagttgatcaacaagacgatggtactgctttattatttgttgatagacatcttgttcatgaagtaacaagcccgcaagcatttgaaggccttagaaattctaatcgaaatgtgagacaccctaatcttactttggctg

SEQ ID NO: 283189 - DNA, 170 bp, Unknown
  Bacterial polypeptide expressing nucleotide sequence isolated from the Sargasso Sea
tatggaagccttcacccaacttgaagccttgacggcggtcatggaccgtatcaacgtcgataccgaccagatcattccgaaacagtttctcaaaaaaatcgaacgaaccggttttggcaaacaccttttccatgactggcgttatctcaacgacgagggaacgcagccca

SEQ ID NO: 283190 - DNA, 143 bp, Unknown
  Bacterial polypeptide expressing nucleotide sequence isolated from the Sargasso Sea
catgccccaaactctttatgataaaatttggaatgaacatatagttcatcaacaaaatgatggaactgcattattatatgtggatagacatcttattcatgaagtaacaagtccacaagcgtttgaaggtttaagaatatcaa

SEQ ID NO: 283191 - DNA, 133 bp, Unknown
  Bacterial polypeptide expressing nucleotide sequence isolated from the Sargasso Sea
aatgaaaaaaaatattgataaaaagaattcaataaatagatcgcttgattatatggggcttaaacctgacgtgaaagttcaagacattaaaattgataaagtttttattggaagctgtactaatggaagaatt

SEQ ID NO: 283192 - DNA, 766 bp, Unknown
  Bacterial polypeptide expressing nucleotide sequence isolated from the Sargasso Sea
atgtctatggaggggagaatgacagttgtaaatttgagtatagaaatggtgcaaaggggtggaatgatagctcctgatcaaaagacatttgattatgttaaagggagagaatttgcacctgttggagcagattgggaatcagtaattgaattttggaaaaatttaccttcagataagggtgcaatttttgataaagaatttcactttgatgggaaagatatagaaccaatgatcacatttggaacaaacccaggaatgggtatgagtattttgaaagatattccaaagtataattcggaaactggacaagaggaaacatataaaaaatcattagattatatggcttacaaagagggtgagactatgatcggaaaacagattgactttgtttttcttggtagttgcacaaatggtaggattgaggactttagagctttttcagaaattgttaagggaaagaaaaaagctaaaaatgttgttgcatggttagtaccaggttctcataaagttgaaaaagcgattaaagacgagggtattttaaagattcttaatgaggctggctttgaattaagagagccaggttgttctgcttgtcttgcaatgaacgacgataaagttcctcctgggaagtatgctgttagtacttctaacagaaactttgaaggaaggcaagggcctggttcaagaaccctcttagcaagccctattgttgctgcagctgcagcaataaccggtaaagttactgatccaagaacccttttttaga

SEQ ID NO: 283193 - DNA, 839 bp, Unknown
  Bacterial polypeptide expressing nucleotide sequence isolated from the Sargasso Sea
cgggatcgcattgcccgggctgtcattcatctgcccggacagccacacctgtactttgggaggactcggtgcgctcgcgtggggtgtgggttcgactgaagccgagcatgcgttggcgaccagcacgctccgtgtgacaagacctcagaccatgcgcgtcagcttcgcaggtctgctcggcgcgggcgtctccgcaaaggatcttattctgttcactatccgcgagttgtcagcctcagggggtgcgggttacgccattgagtttgccgggcccgctatcgatgcgctgccggtagaagcgaggctgacgctctgcaatatgacgaccgagctctccgcctttaccgggctgatcgctcccgaccaaaaagtgctcgactattgtgtgggccgccgctacgcgccgcagggtcagctctgggatcaggccgcccaacactggcaatctttgcgcagtgatgagggcgctgcgtttgatcaggaacaccgctttgacattgggtcactcaaaccccagctcagttggggcaccagtccgcaacactgtgtcgactgggatgatgccatcccgcatgtcagggatgcgcctgatgcgtcggcgtcggcggcttggcagcgcgcgcaggactacatgggggtgacaccgggcagtcagttatcggattacgccctggacgctgcgtttattggctcgtgtaccaacagccgattgcccgacttacagctggcggccgcgtatttggtccgcaccggccacaaggttgcaaaaggggtgaaggcgctctgcgtgcctggtagtggtcaggtgaagcgggctgctgaggccgagggattggacg

SEQ ID NO: 283194 - DNA, 276 bp, Unknown
  Bacterial polypeptide expressing nucleotide sequence isolated from the Sargasso Sea
caggatctggactagttaaaaatcaagctgaacaagaaggtttggataagatttttaaaaaatcaggttttgaatggagagaaccaggctgttcaatgtgtcttggaatgaacgaagatcaattaaagccaaaagaaagatgtgcatcaacttcgaacagaaattttgaaggtagacaaggtcgaggaggtagaacgcatcttctaagtccagctatggcagctgcagcagcaatcgaaggtcatttgtctgacgttagaaagtttgataattaaa

SEQ ID NO: 283195 - DNA, 158 bp, Unknown
  Bacterial polypeptide expressing nucleotide sequence isolated from the Sargasso Sea
gatgacaataaataatcctaaaactctttttgataaaatttgggaacatcatcttgttgatagacaagaagatggaacttgtcttatatatattgatagacaccttgttcatgaagttacaagccctcaagcatttgaaggtttaagaaataataatc

SEQ ID NO: 283196 - DNA, 465 bp, Unknown
  Bacterial polypeptide expressing nucleotide sequence isolated from the Sargasso Sea
gttgagtaactctggaaaaacattatttgaaaaggtctggaacgatcatttggttcttcaggagactgaagagacacccgcaatactctatattgaccttcacctcattcatgaagttacaacgcctcaagcatttcagtcccttagagatcaaggtttatctgtaagagatccaaacaaagttttggcaacaatggatcattccactccgactctgccagtcagaagtttaagagatctcgatatagttgctgaaaaagggcctgccgatcaaatcagagacatgataagaaattgtgaagaatttggaattgagcttcatggttttgattcagataaaagaggaatagttcatgtgattggaccagagttaggtgctactcaaccaggaaaaacgattgtttgtggcgatagccatacaagcacacacggtgcgtttggtgcacttgcatttggcataggcac

SEQ ID NO: 283197 - DNA, 716 bp, Unknown
  Bacterial polypeptide expressing nucleotide sequence isolated from the Sargasso Sea
aatgaatggtggggcctaccaagcatttcaatatacgggagatgcggttcaatctttatcaatgaccgagcgcatgacactatgcaatatgtctgcagagcttggtgcgcagacgggcataattgctcccgacgaaacaacttttgaatatataaaagaggcagggggggatattgaagatgaaaataatttaattagtgacgatgatgccaattatttaattaaacacgaattttctgctaatgatttggaacctcaagttgcaacgcctcatagcccagcaaattcgacggaaataaaaaatatagaaaaagtgcaggtagataagttttatataggtgcatgtacaggggcaaaattagtcgatctatcaatggcggcaaaaatactaaaaaataacaaagtggctgcaggaaagcagctcactgtggctcctgcttcatctaaaatatataatcaggcgtcagagaatggcgtcatgagtatacttacagaggctggtgccaagctattaccgcccgggtgtggcgcctgtgcaggctacggagcaggggttttagaaaacaatgaggtatgtctagcgtcaacagctagaaattttcagggtcgaatgggtgccagcacttcacacgtttacttgggatccccatataccgtagcagcaagcgcggtaactggagcaattactgatccccgagaatttctggaggattaat

SEQ ID NO: 283198 - DNA, 145 bp, Unknown
  Bacterial polypeptide expressing nucleotide sequence isolated from the Sargasso Sea
aatgtctaaaactctatacgataagatatgggaaaaccatcttgttcacgaacaaagtgatggaacatcattaatttatgtagatagacatttagtccatgaagttacaagcccccaagcttttgaaggtctcagattacaaaaa

SEQ ID NO: 283199 - DNA, 271 bp, Unknown
  Bacterial polypeptide expressing nucleotide sequence isolated from the Sargasso Sea
attggaacctttcaaaacaataaaaggaatacctgctccattacctatgatcaatgttgatactgatatgattataccaaagcaatttttaaaaactataaagagatcaggtttaggaaaaaatttatttcatgagctgagatacgatatacaaggtaacataaaaaatgattttgttttgaattgggatccatataaaagttcaaaaattttaataactggtgctaactttggctgtggatcaagtagagagcatgcaccatggtcactt

SEQ ID NO: 283200 - DNA, 178 bp, Unknown
  Bacterial polypeptide expressing nucleotide sequence isolated from the Sargasso Sea
catgaccccagctccccgcaccctgtacgacaaactgtgggacgcccacgtggtcgtgcccgaatcggacagcgcgcccgccgtgctgtacatcgacctgcacctgatccatgaagtgacctcgccgcaggcgttcaccgaactgcgcgagcgcggcctgtccccgcgccgcccggac

SEQ ID NO: 283201 - DNA, 468 bp, Unknown
  Bacterial polypeptide expressing nucleotide sequence isolated from the Sargasso Sea
aatggggaaatgtatatcattagttggagatgatattgataccgacagaataattcctgctcgatttcttaaatgtattgattttgattccttaggtaaatctgtttttgatgatgatcggaaaactcttaaagggaatcacccctttgatttagagactaataaaggagctacaatacttattgttaatagtaattttggatgcggttcaagcagagagcatgctcctcaagcattgatgagatggggaataaaagccataattggagaaagttttgcagatattttttatagtaactgtattgcaattggagttccatgctttactcttccaaagaaatcgataaaagaaatccaaaaatatctggatattaagaatttattcttagagattgatcttttcaaatccactgcaaaaggagaaaaattgaaatttaatcttgaaataaaagaaacttcaaaaaaaat

SEQ ID NO: 283202 - DNA, 491 bp, Unknown
  Bacterial polypeptide expressing nucleotide sequence isolated from the Sargasso Sea
aaaaaatttattttttgaaatgagatatgatgatcaaggcaaagaaataaatgattttgtgttaaacaaagatccatttaatcaatctaaaattttaattgctggaaaaaattttggatgtggttcatcaagagaacatgctccttgggctttattagattttggaattacttgtgtgataagttcaagttatgcagatattttttttagtaattgttttaaaaatggaattttgcctataatccttgaggaagaaaaaataaaagagctatctgaatacgcaaatagacaagaagaaatttctattgatttgcaagaggaaaaaatagtttatggaaataatgagctaaaatttgaagttgatccatttaagaaaaaatgtttgttagaagggcttgatgatatcgctttatcattaaaaaaatcagaaaaaatagaaaagtttgaaacaaatttaaaaaacgaaaagccttgggtatttaatgattaaa

SEQ ID NO: 283203 - DNA, 544 bp, Unknown
  Bacterial polypeptide expressing nucleotide sequence isolated from the Sargasso Sea
caatgttgatactgaccaaatcataccagcgaagtatctaaaaagagtagaaaggactggatttgggcaatatttatttgacgcctggaggaaattacctgacggtacaccgaatccagagtttattcttaatgatgatcgttataacggggcaactattttagttgctggtcctaattttggtagtggatcatcacgagaacatgcaccttgggctttgaatgattatggctttagaactattatagccccaagttttgcagatatttttagaaataactgctttcaaaatggaatgctgccgatcgttttagatcaggcaattatagataaaattattgaaaagtcttctaaaaacccagactactctttaactgttgatcttgaatcaggagtcattagtgattcagaagaattaacaattgaatttacaattgattcttttaaaaaacattgtttactcgaaggtttagatgatattggtttgactttgtctgaagaatcaatgatcaaaaactttgaatcgagacacgtaataagttag

SEQ ID NO: 283204 - DNA, 220 bp, Unknown
  Bacterial polypeptide expressing nucleotide sequence isolated from the Sargasso Sea
aatgtcacatacaatttacgataaaatttggaatgaacatcttgttcatcagcaagaagatggaacttcattactttttgttgatagacatttaattcatgaagtaaccagtccccaagcatttgaaggtttaagaagttcaaatagaaaagttagacagcccacacttactttagctgtagcagatcataatgttccaacaacagatagaacaaaaggg

SEQ ID NO: 283205 - DNA, 196 bp, Unknown
  Bacterial polypeptide expressing nucleotide sequence isolated from the Sargasso Sea
atgagcaatcctagccctaaaacactttttgataaaatttggtcgcatcatcttgtacatcaacaagaagatggaacttgtctaatttacattgaccgtcatttagtacatgaagtaacaagccctcaagcttttgaaggcttaagaaataataatagaaaagttcgtcgtccagaaagtcttttgcagagctgat

SEQ ID NO: 283206 - DNA, 258 bp, Unknown
  Bacterial polypeptide expressing nucleotide sequence isolated from the Sargasso Sea
aatgccaaagactttatacgataaaatctggagtgatcacttagtccaccaacaggatgatggaacatctttgctatttgtggacagacatttgatacatgaggtgactagcccacaagcctttgaaggaattcgaaatagcaaaaggaatgtaagacatccaaacttaactcttgctgttgttgatcacaacatacctacaactgacagatctaaaggaattgatgacaacgactcaagaattcaagtagaaacact

SEQ ID NO: 283207 - DNA, 598 bp, Unknown
  Bacterial polypeptide expressing nucleotide sequence isolated from the Sargasso Sea
atgccatacgaaaaatttagaatattagaaagttcgggtgttccgttagatatcgaaaatgttgatacagaccagattatccctgcaagatttttaaaggcaactgaaagaaaagattttgataaaaatcttttcagagattggcgatataaccaagataacacattaaaaaaagattttgttttaaatgataaaaactattctggaaaaatactagttgcaggtaaaaattttggttcaggatcttccagagagcacgctgtttgggcaatttatgactatggatttcgttgcgttatatcaagtttttttgctgatatttttaaaaataattgcttaaatattggtgttttaccagtgcaaatatccgctgattttcttaagctgatttttaattcaattaaaaaaaatccaaaagtcaatttaaaagtaaatttaatagaacaagaggtttcaatttctgatatctcacaaatagaaaaatttgaaattaatccatataaaaaagaaaatatgatgaatggttttgatgatatcgattatttattaaatatgaaatcagaaattaaaaactttgctgccaaaagacctttttaat

SEQ ID NO: 283208 - DNA, 149 bp, Unknown
  Bacterial polypeptide expressing nucleotide sequence isolated from the Sargasso Sea
tatgaaacctagaacattatttgacaagatatgggaaagccacgtagttgataaacaagcagatggaacttgtcttctttacattgatagacatttagtgcatgaagttaccagtccgcaagcgttcgaaggacttagaaaatcaaaaa

SEQ ID NO: 283209 - DNA, 214 bp, Unknown
  Bacterial polypeptide expressing nucleotide sequence isolated from the Sargasso Sea
cactaatgcgggtatacagtggcgcgaacctggctgttccatgtgcctagccatgaattcagatcaacttggagagggcaagcattgtgcatctacatccaaccgaaactttgaggggcgacaaggttttggggggagaactcatctagttagtccggctatggccgccgcagctgcgattcatggtcattttgttgatgtaagtaagatctga

SEQ ID NO: 283210 - DNA, 196 bp, Unknown
  Bacterial polypeptide expressing nucleotide sequence isolated from the Sargasso Sea
attggagagaccaggttgttcgatgtgtttagctatgaatcctgatcaattaaaaccaaaagaaagatgtgcttcaacttcaaacagaaattttgaaggcagacaaggtagagaaggaagaacgcatttagtaagtccagcaatagcagctgcttctgcaatcaagggctctttttctaatgttgaggatttatag

SEQ ID NO: 283211 - DNA, 439 bp, Unknown
  Bacterial polypeptide expressing nucleotide sequence isolated from the Sargasso Sea
aatagagaaccatttagaaaaggcaatattcttgtttcaaaaagtaattttggctgcggctcatctagagaacatgctgtctgggccatacaaaattatggtattgatgttgtaatcgcagaaagttttgcagatatattctcgaggaatagttttaaaaacggattattgctcattactctagaatcacaaatcattaatgaaattatagaatcatcattattgtcaaattcgtatatattagatgttaatcttgcagaggataaaattttactaccaaatgataaaacgataacattttctatatcgagatcttataaagatagaattattaatgaactcgatgatatcgagcttacattaagaaataaagatcaaataaaaaattatgagaatcaaatgaagctatccaagccatggttatttaataatgagtaaa

SEQ ID NO: 283212 - DNA, 490 bp, Unknown
  Bacterial polypeptide expressing nucleotide sequence isolated from the Sargasso Sea
aaaaatttatttttcgaaatgagatatgatgatcaaggaaaagaaataaatgattttgtattaaacaaagatccttttaatcagtctaaaattttaattgctggaaaaaattttggatgtggttcatcgagagaacacgctccttgggctttattagattttggaattacttgtgtaataagttcaagttatgcagatattttttatagcaattgttttaaaaatggaattttacctataattcttgaagaagaaaaaataaaagagctatcagaatatgcaaatagaaaagaagaaatttctattgatttgaatgaagaaaaaatagtttatggtaacaatgaactaaaatttgaagttgatccatttaaaaaaaaatgtttgttagaaggacttgatgatattgccttatcattaaaaaaatcagaaaaaatagaaaagtttgaaaaaaatttaaaaaacgaaaagccttgggtgtttaatgattaaa

SEQ ID NO: 283213 - DNA, 335 bp, Unknown
  Bacterial polypeptide expressing nucleotide sequence isolated from the Sargasso Sea
agattttggtattacttgtgttattagttcaagttttgcagatattttttataataattgtttcaaaaatggaattttacctattgttcttgatgatgaaaaaattaaagaattatcagaatatgcaaatagaaaagaagaaatttttatagatcttaaagaagaaaaaattatttatggaaatagtgagactgaatttaaagtagatacatttaagaaaaagtgcttactagaaggattagatgatatagcattatctttaaagaaatcagataaaattgaaactttcgaaaaaaatataaaaaataaaaagccatggatttttaatgattaaa

SEQ ID NO: 283214 - DNA, 487 bp, Unknown
  Bacterial polypeptide expressing nucleotide sequence isolated from the Sargasso Sea
aatttgttttttgaaatgagatatgatgatcaagttaaagaaataaatgaatttatattaaatcaagatccatttaataattctaaaatattaattgcaggtaaaaattttggatgcggctcgtctagagaacatgctccatgggcactattagattttggtattacttgtgtgataagttcaagttttgctgatattttttacagcaattgttttaagaatggaatattacctatcattcttgatgatgaaaaaattaaagaactatcagaatatgccaatcgaaaagaggaaatttctataaatcttaaagaagaaaagattatatatggaaataatgaaatagaatttaaggtagattcatttaagaaaaagtgtttattagaaggactagacgatatagctctatctttaaaaaaatcagataaaattgaaaattttgaaaaagatctaaaagataaaaagccatggatatttaatgattaaa

SEQ ID NO: 283215 - DNA, 586 bp, Unknown
  Bacterial polypeptide expressing nucleotide sequence isolated from the Sargasso Sea
actgacaggaagggctgttcctgttaaaggaaatgaagttgatactgaccgtattatacctgcacgatatcttaaagaaacaacctttgatcgaatgggggagtatttgttttttgatgcacgttttgatgcagagggaaatcaagtcgatcacccattaaatgatactcgttttaaaggcgctgaatttatggtcgtccaaaataactttggctgtggctcatcaagagaacatgcgccccaggcaattatgagatatgggattaaagcattaattggggagtcctttgctgaaatatttgccgggaattgtaaggcattaggtataccagttgtaacattggaaaaagaaaaaattgatcagttaatggatgccgtagaagaaaatccggatattgaattaatgattaatttagagaataaacaagtattagcaggagatattgtatttaatattgaaattagtgaagagcgtcggcaaagtttcattcaaggatcttgggatgagttagcaatactaaagaataaccaacccctcattgaagatacagcgaatagcttgccttacttttctaatttccagtaa

SEQ ID NO: 283216 - DNA, 598 bp, Unknown
  Bacterial polypeptide expressing nucleotide sequence isolated from the Sargasso Sea
atgagtattattacctgtattcaaggaagtgccatctatatccctggggatgatatcgatacagacaggatcgtacctgcccgctttttaaaagaaattagctttgaaaatatgggtgaatacttattttacgatgtccgctttaatgaggatggtagcccaaaagatcatgttttaaatcatcctgacactcagcatgctaagatattaatcgtcgattctaactttggatgtggctcatcacgagaacatgcccctcaagccttaaaacggtttggctttgaagcgattattgggatctcgttttcagaaatatttgctggtaattgcaaagcgattgggatccctgttttacgaacgacagctaccgctattcaaaaaatgaatacccaacttcaacataacacacgaactcagttttcaattgatttggcgactcgtcatgttcgcttttttgaagagtctattcttttcgaaatttcatccgctcaccaagaatcgttcttaagtggcacctgggatagccttgggattcttaaacaaaacacggcacttattcaagataaagtggcaaccttgccgtatcttaacttttagg

SEQ ID NO: 283217 - DNA, 181 bp, Unknown
  Bacterial polypeptide expressing nucleotide sequence isolated from the Sargasso Sea
atgtgcttggctatgaacccagacaaactaataggggatcaagtatgcgcatctactagcaatcgtaactttattggacgacaagggagctctacagggcgcactttattaatggggcctgggatggcagctgcagccgctctggaaggaaaagttgttgatgtgagggactacttatgag

SEQ ID NO: 283218 - DNA, 211 bp, Unknown
  Bacterial polypeptide expressing nucleotide sequence isolated from the Sargasso Sea
ggcttcgaatggagagagccaggctgttcaatgtgtctagcaatgaatgcggataagcttaaacctgaagaaagatgtgcatctacctctaatagaaattttgagggtagacagggaagaggtggtagaacacatttagttagtccagcaatggctgcagcagttgcaatttctggaaatttagatgatgttagaaaataccaaaattaaa

SEQ ID NO: 283219 - DNA, 370 bp, Unknown
  Bacterial polypeptide expressing nucleotide sequence isolated from the Sargasso Sea
ttggctgtgggttcttcaagagaacatgctccttgggctttattagattttggaattagagttatcgtcagtgaaagttttgctgatatcttttataacaactgttttaaaaatggaatactcccaattgttgcaaaagatgaaattataaatgaactgaaagactatagtgcgagaaaagaagctatcgaagtcaagcttgaagaacaagaaattatttatggaaataaaacttttaaatttgaattagactcttttaagaagaaatgtttattagaaggactagacgatatagctttgtctcttaaaaaaactaaaaatattgaaagttttgagaataaaatgtctcaaaataaaccttggttataaa

SEQ ID NO: 283220 - DNA, 518 bp, Unknown
  Bacterial polypeptide expressing nucleotide sequence isolated from the Sargasso Sea
gatgagatcagagtttacccagccaattggaaaaatttcagatattaacgggcaatgtatctccttgattggtaatgacattgatacagatcgaataattccagcacgttttttaaagtgtgttaactttgattcattgggtgaatctgtttttgaagacgatagaaaaactttaaaaggaagtcatccttttgatcttgagaaaaacaaaaatgcctcgatactaattgttaatagcaattttggatgcggttccagtagagaacatgccccccaagcgcttatgaggtggggtattaaagcaattataggcgagagtttcgccgatattttttacagtaactgtattgcaatcggaattccatgttttacgttacctaaaaaattcatagaagaaatgcaaaactattgcaataatcaatttttatttttagaaattgatctgaaaaaatccttagcaaaatcaaacgatttaaattttaatcttgagattagggaaagctcaagaaaaatgtttt

SEQ ID NO: 283221 - DNA, 267 bp, Unknown
  Bacterial polypeptide expressing nucleotide sequence isolated from the Sargasso Sea
gatggataaatttgtaaagttttcgggaatagctgctcctatgccgctgataaatatagatacagacatgcttattccaaaacagtttttaaaaacaattaaaagaactggtcttggagaaaacttattctttgaaatgagatatgacacaaaaggtaatttaataaaggatttcatcttgaacaaagatcattattcttcagcttcaattattgtggcaggcgattattttggatgtgggtcgtcacgtgaacacgcccctggggc

SEQ ID NO: 283222 - DNA, 307 bp, Unknown
  Bacterial polypeptide expressing nucleotide sequence isolated from the Sargasso Sea
tagttttgctgatatattttataacaattgttttaaaaatggaattttaccaataaaaataagtgaagaaactgttttagaattatctgattattcaaaaagacatgaagaaattgaggtaaatttagagaaacaagaaatatttttcgggaacaaagtggttaaatttgagatagataaatttaaaaaaaagtgcttgatcgatggtttagatgatatcggattatcaatgaaaaaagtaaatcacattgataactatgaaaaaaaaattaatgtaaacaaaccttggattttaaagaatgactaa

SEQ ID NO: 283223 - DNA, 424 bp, Unknown
  Bacterial polypeptide expressing nucleotide sequence isolated from the Sargasso Sea
tatggaaaagattattgaatttagttctaaaactgttgttttgtcagtgaatgacattgatacagatcaaattatccctgctagatttctaacagttacaacgaaagacggacttggcgatggcttatttgcagattggcgatttgatgaagacggaaataaagttgaacaatttccattgaaccaggataaatcagatgggtgctctattttaatttctggcagtaattttggctgtggatcgtcacgtgagcacgctccttgggcattggttgattatggatttaaggcaattttatcaacctcatttgcagatatttttagaaacaatgcactaaagaatggcctattacctcttacagtgtcagaagagtttcatgcgatgttgactgagaatgaagggattgaagtcaatgtcagtcta

SEQ ID NO: 283224 - DNA, 166 bp, Unknown
  Bacterial polypeptide expressing nucleotide sequence isolated from the Sargasso Sea
atgccaaaaactttatacgataaaatttgggatgatcatcttgtctttaaacaagatgatggtacttcactgttatatgtggatagacatttagtacatgaggtaactagcccgcaagcttttgaaggtctaaggttaaataaaaggaaagtaagaaaacctaatt

SEQ ID NO: 283225 - DNA, 208 bp, Unknown
  Bacterial polypeptide expressing nucleotide sequence isolated from the Sargasso Sea
ttttgaatggagagaaccaggctgttcgatgtgtttagccatgaatgcagataaattaaaaccagaggaaagatgtgcttctacttcaaatagaaattttgaaggtagacaagggagaggtggcagaacacatctagtaagtcctggaatggcagcagcagcagctatctctggaaacctcgatgatgtgagaaagtatcaaaattaa

SEQ ID NO: 283226 - DNA, 474 bp, Unknown
  Bacterial polypeptide expressing nucleotide sequence isolated from the Sargasso Sea
tgcgactcggtatggagaaagcgctagattatatgaatctaatcccaggtcaacgtctgaaagataccaaggtggatgtagtttttataggttcctgtaccaatggtcgattgtccgatctgcgtgcagctgcggaagtaataaaggggcagaaagttcatcccggtgttaaggctttggtggtgccaggctcaacttcaactagaagagcggcggaacaagaagggcttgatgttatcttcaaaagggcaggcttcgaatggaggcattcgggatgctcgctatgtgtagcactgaatggtgatcggcttaaaaagggacaaagatgtgtgtccacgtctaacaggaattttgaaggaagacagggggcgggtggacgcacgcatcttgccagtcccacgacagcggccgcatccgccataatcggtcggattagtgatcggttgtctttggccgacggatgcacgcgatgag

SEQ ID NO: 283227 - DNA, 175 bp, Unknown
  Bacterial polypeptide expressing nucleotide sequence isolated from the Sargasso Sea
atgtcagaatataaaactctttatgacaaaatttgggaaaatcatcttatttcagaggaagatgatggtacttctttgttatatgtagataggcacttagttcatgaagttactagtcctcaggcttttgaggggctaagaatgtctaatagagtagtaaggtcgccagagaaaa

SEQ ID NO: 283228 - DNA, 418 bp, Unknown
  Bacterial polypeptide expressing nucleotide sequence isolated from the Sargasso Sea
aatgaaatccaagttcaccccaccaattggaaaaattacaaaaatagacgggcaatgtatctccttgattggtaatgacattgatacagatcgaataattccagcgcgtttcttgaaatgtgttaactttgattcattaggtgaatctgtttttgaggacgatagaaaaactttaaagggaaggcatcctttcgatctagaggaaagcaaaaatgccagaatattaattgttaatagcaattttggatgtggttctagcagagagcatgccccccaagcgcttatgagatggggcataaaagcaatcataggagagagtttcgctgacattttttatagtaactgtatttgcataggaatcccatgttttacgctacctaaaaaatcgatagaagaaatacaaaactattgcgataat

SEQ ID NO: 283229 - DNA, 277 bp, Unknown
  Bacterial polypeptide expressing nucleotide sequence isolated from the Sargasso Sea
atgccaaagactttatacgataaaatctggagtgatcacttagtccaccaacaggatgatggaacatctttgctatttgtggacagacatttgatacatgaggtgactagcccacaggcctttgaaggacttcgaaatagcaaaaggaatgtaagacatccaaacttaactcttgctgttgttgatcacaacatacctacaactgatagatctaaaggaattgatgacaacgactctagaattcaagtagaaacacttgaaaaaaattgcaaagact

SEQ ID NO: 283230 - DNA, 160 bp, Unknown
  Bacterial polypeptide expressing nucleotide sequence isolated from the Sargasso Sea
attcttccatttataggatcatgtacaaatggaagaattgaagacttaagagcagcagcttcaatagtaagtgaaaataaagtttctgatcatgttaatgcaattgttgttccaggttcaggacttgtaaaggctcaagcagaaagcgagggtttagata

SEQ ID NO: 283231 - DNA, 311 bp, Unknown
  Bacterial polypeptide expressing nucleotide sequence isolated from the Sargasso Sea
aatgcctttttcaacttacgataaaatttggaacgaacatctagtcgatgagcaaccagatggcacgtcgttattgtttgtagatagacatttaattcatgaagttacaagccctcaagcatttgaaggcttaagaaattcaagtagaaaagtaagacatcctaaattaactcttgcagttgcagatcacaatgtaccaacaacagataggtcaaagggtattgcagacgaggactctagaattcaagtggaaactttgaataaaaattgcaaagaatttggagtaaaaatatttggaatggatgataaaa

SEQ ID NO: 283232 - DNA, 148 bp, Unknown
  Bacterial polypeptide expressing nucleotide sequence isolated from the Sargasso Sea
atggatcaaaataataaaaagagaactttatttgataaaatatggaatagtcatttagttgaaaaacaggatgatggaacatgtcttatttatatagatagacatttagttcatgaggttactagccctcaagctttgaaggactaag

SEQ ID NO: 283233 - DNA, 301 bp, Unknown
  Bacterial polypeptide expressing nucleotide sequence isolated from the Sargasso Sea
atggaaaaatttacaaaaataaaaagtatacccgcatatattcccttaatgaatatagatactgataaaattattcctaaacaattcttaaaaacaatcaagagatcaggtttaggcaaaagtttattttatgaaatgaggtttgatgaaaaaggaaattcaataaagggtttcattttagaccaggaacctttcagtagttctaaaatcttaataacaggaaagaattttggttgtggttcatcaagggaacatgcaccgtgggctctattggattttggaattagagttattatcagcg

SEQ ID NO: 283234 - DNA, 586 bp, Unknown
  Bacterial polypeptide expressing nucleotide sequence isolated from the Sargasso Sea
aatggaaaaatttaacactattatatcgcctgctgttccattaactacagaaaatattgatactgatcaaatcatccctgctcgtttcttaaaagcgacaactagagacggatttggagacaacttattcagagattggcgttttgacaaaaacaacaacccaataacgagttttcctttagaggatccaaaatattccggtaacgtattaattgcaggaaaaaactttgggtgcggatcatccagagaacatgcagcttgggcaattgctgattatggatttaaagtagttatttcctcagaatttgctgatattttcaacaacaacgcattaaataatggcgttttaactgtatccgtaagccctgaatttttagctagtgcatttgctgcaattgaagaagacaataatacacatatcaaagttgatttggaaaatcaatttgttgagttaatggcaactggagaaaaaattggattccaaataaatggatacagaaaggaatgtttactaaacggttatgacaacattgattatttactcgctcaaaaagataaaattgaatcctatgaggcgaaaagataa

SEQ ID NO: 283235 - DNA, 236 bp, Unknown
  Bacterial polypeptide expressing nucleotide sequence isolated from the Sargasso Sea
attagatgtgatttttaaaaaatcaggttttgagtggagagaaccaggttgctcaatgtgtttggctatgaatgcagacaaacttaaaccagaggaaagatgtgcctctacatcaaatagaaactttgaaggaagacaaggaagagggggaaggactcatctggtgagtcctgctatggcagcagcagcagcactttctggaaatcttgatgacgttagaaaatatcaaaactaat

SEQ ID NO: 283236 - DNA, 157 bp, Unknown
  Bacterial polypeptide expressing nucleotide sequence isolated from the Sargasso Sea
tttatactcaataaaaatcctttcaatgaatcgaaaatacttttaactcgagataattttggatgtggctcatcaagagaacatgcagtttgggcgttgcgagattttggtataaaagctgtaatagcatcctcttttaggggatattttttataat

SEQ ID NO: 283237 - DNA, 331 bp, Unknown
  Bacterial polypeptide expressing nucleotide sequence isolated from the Sargasso Sea
atggaaaaatttaaaaatataaacagtattcccgcacatctaccattaatgaatgtagacacagataagattatacctaaacagttcttaaaaactattaaaagatctgggctgggtaagagtttattttatgaaatgaggtttgatgaaaaaggtgctccaattaaaggatttatattggataatgaaatatacaagaattcaaaaatattaataacaggaaaaaattttggctgcggatcctcaagagagcatgccccatgggccttacttgacttcggaattaaagctattgtgagtgaaagcttcgctgatattttttacaaataat

SEQ ID NO: 283238 - DNA, 286 bp, Unknown
  Bacterial polypeptide expressing nucleotide sequence isolated from the Sargasso Sea
gaacatgcgccttgggccttgctagattttggaattaaagtaatagtgagtgagagttttgcagatattttttataataactgttttaagaacggaattcttcctataatagcagacgaaaatacagttaaagaattagccgaatactctagaagaaaagaaaatttagagatcaaacttgaagaaccggaaattatttatggaaataattcgtataagtttaaattagactcttttaaaaagaaatgtttagttgaaggattggatgatattgctttatcactcg

SEQ ID NO: 283239 - DNA, 277 bp, Unknown
  Bacterial polypeptide expressing nucleotide sequence isolated from the Sargasso Sea
atggaaaaatttaaaattttaaaaggtatagctgcgccacttcctatgatgaatgttgataccgatatgatcataccaaaacagtttttaaaaacaataaagcgttcaggattaggtaaaaatctctttcatgagcttcgttatgatatgcaaggtaatattaaaaatgattttgttctaaattgggatccttataaacaagcttcaattcttattgcgggagacaattttggttgtggatcaagtagggagcatgcaccttggtcacttttagatt

SEQ ID NO: 283240 - DNA, 499 bp, Unknown
  Bacterial polypeptide expressing nucleotide sequence isolated from the Sargasso Sea
tgtcagtttctccgcattaggagaacaagtcttcgcagatgacagagaagaacttaaagggaatcatccctttgatctcgagcaaaataaaagagccaatattcttgttgttaatgataattttggctgtggttcaagtcgcgaacatgccccacaagctcttatgagatggggaataagattaattataggagaaagcttcgctgagattttctttggcaattgccttgcacttggcataccttgcatgacgacttcaaagcaagaaattactaagttacaaaacctagttaatgagaactccaatcaaatttgggattttaatcttcaggaactttcaattactaatcaaaaagaaaatttcaaactcgatcttgatgagggagcctacaagatgctttattcagggaaatgggatgcaacttctcaactattagatgcagaggaaaaggtcaataatacagtaaaaaatctaccttatctaaataatttcaaataa

SEQ ID NO: 283241 - DNA, 310 bp, Unknown
  Bacterial polypeptide expressing nucleotide sequence isolated from the Sargasso Sea
aatgtcacaaactatttacgataaaatttggaatgaacatttggttcataaacaaaaagatggaacctcccttctttttgttgataagcatttaattcatgaagttactagcccacaagcatttgaaggattgagaacttccaatagaaaagttagacaaccaaagttaacacttgcagttgcagatcacaatgttccgactaccgataggtcaaaaggtatatctgatgaagactctagaatacaagtagagactttagaaaaaaactgtaaagagtttgggattcaattgtttggaatgaagacaaaa

SEQ ID NO: 283242 - DNA, 433 bp, Unknown
  Bacterial polypeptide expressing nucleotide sequence isolated from the Sargasso Sea
catgctggcacaacagaattttggctgcgggtcatctcgagaacacgcggtatgggggctcgaagatattggagtccaagctattctagctccatcttttgcagacatattccgcaataattgttcgaaagttggactgctaacgatagtgcttgctcaagaagacattgactatcttatgtcacgctcggaggaattacctgattcccagcttcaaattgatttgaagtctcagacggtgactgttgcggggtccgagtggcaacgaagcttcgaaattgatccatttataaaaaaccgattattaaatggactggatgatattggcatcacaatggagcatgagcaagatatttctgattttgaagaagcaagaccacgtataaaacccagtactgctgatgctttcgaagacactctgaagatggcttaa

SEQ ID NO: 283243 - DNA, 440 bp, Unknown
  Bacterial polypeptide expressing nucleotide sequence isolated from the Sargasso Sea
tgattttgtgttaaacaaagatccatttaatcaatctaaaattttaattgctggaaaaaactttggatgtggttcatcaagagaacatgctccttgggctttattagattttggaattacttgtgtgatatgttcaagttatgcagatattttttttagtaattgttttaaaaatggaattttgcctgtaatccttgaagaagaaaaaataaaagagctatctgaatacgcaaatagacaagaagaaatttctattgatttgcaagaggaaaaaatagtttatggaaataatgagctaaaatttgaagttgatccatttaagaaaaaatgtttattagaagggcttgatgatatcgctttatcactaaaaaaatcagaaaaaatagaaaagtttgaaacaaatttaaaaaacgaaaagccttgggtatttaatgattaaa

SEQ ID NO: 283244 - DNA, 709 bp, Unknown
  Bacterial polypeptide expressing nucleotide sequence isolated from the Sargasso Sea
tggtggggactaccaagcaatccaatatacgggagatgcggttcaatctttatcaatgaccgagcgcatgacactatgcaatatgtctgcagagcttggtgcgcagacgggcataattgctcccgacgaaacaacttatgaatatataagagaggcaggggggcatattgaagatgaaaataatttaattagtgacgatgatgccaactacttaattaaacatgatttttctgccaatgatttagaacctcaagttgcaacgccgcatagccccgcaaattctacagaaataaaaaatatagaaaaagtgcaggtagataagttttatataggtgcatgtacaggggcaaaattagtcgatctatcaatggcggcaaaaatactaaaaaataacaaagtggccgcaggaaagcagctcactgtggctcctgcttcatctaaaatatataatcaggcgtcagagaatggcatcatgagtatacttacagaggctggtgccaagctattaccacccgggtgtggagcctgtgcaggctacggagcaggggttttagaaaacaatgaggtatgtctagcgtcaacggctagaaattttcagggtcgaatgggttccagcacttcacacgtttacttgggatctccgtataccgtagcagcaagcgcagtaacgggaacaattactgatcctcgagaatttttggaggattaa

SEQ ID NO: 283245 - DNA, 394 bp, Unknown
  Bacterial polypeptide expressing nucleotide sequence isolated from the Sargasso Sea
agggatgttgacgttgtcttcattggcagctgcacaaactcgagattaagtgatctacaagctgcagctcatatcctaaaagatagaaaagttgccaacagtgttaaaatgctagttgtgcccggatcacaaaaaatcaaggctgatgctgaaaaaataggattaaataaaatatttaaagaagctggagcagaatggagagaatctggatgctccatgtgtttgggtatgaatggagatacagttgattccggaaaattaagcgtgagcactagtaacagaaattttgaaggcaggcaaggaaaaggatctcgaaccatactcgcaagcccactaaccgctgctgcctctgcagttgaaggcaaagtggctgatccaagaaaatacttataaa

SEQ ID NO: 283246 - DNA, 207 bp, Unknown
  Bacterial polypeptide expressing nucleotide sequence isolated from the Sargasso Sea
ttgaatggagagagccaggctgttcaatgtgtctagcaatgaatgcggataagcttaaacctgaagaaagatgtgcatctacctctaatagaaattttgagggtagacagggaagaggtggtagaacacatttagttagtccagcaatggctgcagcagctgcaatttctggaaacttagatgatgttagaaaataccaaaattaaa

SEQ ID NO: 283247 - DNA, 304 bp, Unknown
  Bacterial polypeptide expressing nucleotide sequence isolated from the Sargasso Sea
gtttctccaaatttgaatgcgatgatagtaccaggctcacaaatggtgaaacatgaagcagaacagatgggtcttgataaaattttcaaagatgcaaattttgaatggagggaatctggatgtagtatgtgtttaggaatgaatccagatattttaaagccaggcgaacgttgtgcaagtacttctaatagaaattttgaaggaaggcaaggtgcaggaggtcgtacacatttagttagtcctgtaatggctgcagctgcagcaattgaagggcattttattgacattagagagtggtactaaa

SEQ ID NO: 283248 - DNA, 373 bp, Unknown
  Bacterial polypeptide expressing nucleotide sequence isolated from the Sargasso Sea
agagaacatgcagtatggtctttaatggactttggatttaaggttgtaatagctgaaagctttgcagatatattctataacaactgctttaataatggtcttctgcccattgctatttcagaacatgaaatttcaaccttgcttgacttatctaacaagagaaaagaaatagaaatagatctacagaatcaaataatctttgttgaggataatgaaatagcgcattttgaaattgaccctttcagaaaaaaatgcatcttagaaggtctggatgaaattggattgagtcttactcattcatcagaaatcaaggaatttgaaaagaaacattacttaaaatcaccttggatctttaacaaagaaaataattgat

SEQ ID NO: 283249 - DNA, 251 bp, Unknown
  Bacterial polypeptide expressing nucleotide sequence isolated from the Sargasso Sea
agctgaatctgaaggtatcaaagaaatttttttagaagctgtttttgagtggagagatcggggctgttcgatgtgtcttggtatgaacccagatcagttggcttctggagaaaggtgtgcttctacttctaatagaaactttgaaggtaggcagggcagaggaggaagaactcacttagtaagtcctattacagctgcagcaagtgcaattaaaggattttttgtagatgtaaccgaagagagtttatgaa

SEQ ID NO: 283250 - DNA, 134 bp, Unknown
  Bacterial polypeptide expressing nucleotide sequence isolated from the Sargasso Sea
aagtttaagtgtagaacaacgtatgactatatgcaatatgactatagaagctggtgccagagcaggattaatagctccagatgataaaactatagagtactttaaagatagaccgatgtctccaaaaaggtgag

SEQ ID NO: 283251 - DNA, 754 bp, Unknown
  Bacterial polypeptide expressing nucleotide sequence isolated from the Sargasso Sea
ggaaggaagaatgacagtttgtaatttaggcatagaaatgggggctcgtggagggatgatagcaccagacgatagaccatttgattatttagagggtagagaatatgtaccaagaggtgatgaatgggctaaagcagttaattattggaagacattaaacactgatgaaggtgcaacttttgacaaggaatacaattttcaagctgaagaaattgagcctatgattacttatggaactaatcctggaatggcaatacctatttcaaagtcaattccaaaagctgacaaatctgagtctaaattatcttatcagaaagctcttgattatatggaatttaaagagggtgacagaatgattggtaaaaaaatagattatgtctttttgggaagttgtacaaatggtagaattgaggattttagaacttttgcaagtataattaagggtagacaaaaatcaaacactgtcgatgcatggcttgtaccaggatctcataaagtactaaagagtataagagatgagggaatacttgatattcttactgagtcaggctttaaactaagagagccaggttgctccgcatgtttagctatgaatgatgataaaatcccaaaaggaaaatatgcagtaagtacaactaatagaaattttgaaggaagacaagggccaggcgcgaggacacttttagcaagtcctcttgtagctgcagcaacagccataactggtgagataactgatccaagagatattatataa

SEQ ID NO: 283252 - DNA, 601 bp, Unknown
  Bacterial polypeptide expressing nucleotide sequence isolated from the Sargasso Sea
atggataaatttacagaaattaccgaagttgcagcaccaatgccgctccctaatattgatacagatatgattttccctggaagatttctaaaaactgtggaaagaactgggctcgggaaaattgctttttatagaatgagatacaatgatgacggcacagagaataaagattttatcttgaataaggatgaataccgtaagtctagaataattattgctggtgataattttggatgtggatctagtcgggagcatgctccttgggctcttttagactttgggattagatgcataatatcaactagctttgctgatattttttttaataatgctttcaaaaacggtattctttgtatccctatgaaagaacaagaagtaactatattaatggctgatgcagttaataaaaataaacttaaaattgaccttgttaaaaaaaatatagttcgtgaagataactcaactgtaccttttgagatagaccaacacaggaggcataaccttcttaatggtttagatgagataggtattactctcgaaagtgaagaagaaatctctaagtttgaaacaaaactttctcttgaaaagccctgggtttaaa

SEQ ID NO: 283253 - DNA, 577 bp, Unknown
  Bacterial polypeptide expressing nucleotide sequence isolated from the Sargasso Sea
atggaaaagattattgaatttagttctaaaactgttgttttgtcagtgaatgacattgatacagatcaaattatccctgctagatttttaacagttacaacgaaagacggacttggcgatggtttatttgcagattggcgatttgatgaagacggaaataaagttgaacaatttccattgaaccaggataaatcagatgggtgctctattttaatttctggcagtaattttggctgtggatcgtcacgtgagcacgctccttgggcattggttgattatggatttaaggcaattttatcaacctcatttgcagatatttttagaaacaatgcactaaagaatggcctattgcctcttacagtgtcagaagagtttcatgcgatgttgacagagaatgaagggattgaagtcactgtcagtcttgaaaaaatgatgattcatgcctctaacgggatgaaagaagctttcgatctcgagcctttttcgagatattgcttaatgaatggtattgatcaaatgggattcatcatgaatcacgaagaacaaattaatgcatttgagaataaaggacagtaaa

SEQ ID NO: 283254 - DNA, 562 bp, Unknown
  Bacterial polypeptide expressing nucleotide sequence isolated from the Sargasso Sea
gttgattggtaatgacattgatacagatcgaataattccagcgcgttttttaaagtgtgttaactttgattcattgggtgaatctgtttttgaagacgatagaaaaactttaaaaggaaggcatccttttgatcttgaggaaaacaaaaatgcatcaatactaattgttaatagcaattttggatgtggttcaagcagagaacatgctccccaagcgcttatgagatggggtataaaagcaattataggagagagtttcgccgatattttttacagtaactgtattgcaatcggaattccatgttttacgttacctaaaaaatccatagaagaaatgcaaaactattgcgataatcaatttttatttttagaaattgatctgaaaaaatcccatgcaaaatcaaaagatttaaatttaaatcttgagattagggaaagctcaagaaaaatgtttttatcaggagaatgggatgctacttcaacactacttgacaatgaaaatttaatagaaaataaatttaaccaattaccttatattaaatttaactctcattattcttaa

SEQ ID NO: 283255 - DNA, 562 bp, Unknown
  Bacterial polypeptide expressing nucleotide sequence isolated from the Sargasso Sea
attgcttggtaatgacattgatacagatcgaataattccagcgcgttttttgaagtgtgttaacttcgattcattgggtgaatctgtttttgaggacgatagaaaaactttaaaaggaaagcatccttttgatctagagaaaaacaaaaatgcctcaatattggttgttaatagcaattttggatgcggttccagcagagaacatgccccccaagcgcttataagatggggtataaaagcaatcataggcgagagtttcgccgacattttttacagtaactgtattgcgataggaattccatgttttacgctacctaaaaaatccatagaagaaatacaaaactattgtgataatcaatctttattcttagaaattgatcttaaaaattcatcagcagaatcaaaagattttaatttcaatcttaagattaaggaaagctcaagaaaaatgtttttatcaggagaatgggatgctacttcaacattacttgacaatgaaaatttaatagaaaataaatttaaccaattaccttatacacaatttaatactaattttttatag

SEQ ID NO: 283256 - DNA, 138 bp, Unknown
  Bacterial polypeptide expressing nucleotide sequence isolated from the Sargasso Sea
gatgaagacactttacgacaaactttgggatgatcatgttgtacatgattttgatgatgacacatcactaatatatattgatcgtcatctaatacatgaagttacttcagcacaagcatttgatgggcttagactggc

SEQ ID NO: 283257 - DNA, 625 bp, Unknown
  Bacterial polypeptide expressing nucleotide sequence isolated from the Sargasso Sea
atgaaatcagagttttcccagccaattggaaaaatttcaaatgttaacgggcaatgtatcccgttgattggtaatgacattgatacagatcgaataattccagcgcgttttttaaagtttattaactttgattcattgggtgaatctgtttttgaagacgatagaaaaactttaaaaggaaagcatccttttgatcttgaggaaaacaaaaatgcctcaatactaattgttaatagcaattttggatgtggttccagcagagaacatgctccccaagcgcttatgagatggggtataaaagcaattataggagaaagtttcgccgatattttttacagtaactgtattgcaatcggaattccatgttttacgttacctaaaaaatccatagaagaaatacaaaactattgcgataatcaatttttatttttagaaattgatctgataaaatccttagcaaaatcaaaaaatttaaattttaatcttgaaattaaggaaagctcaagaaaaatgtttttaacaggagaatgggatgcaacttcaacactgcttgagaatgaagattttattgaaaataaattagatgatttaccctatttagaatttaattcacctatcacttaat

SEQ ID NO: 283258 - DNA, 453 bp, Unknown
  Bacterial polypeptide expressing nucleotide sequence isolated from the Sargasso Sea
ttggtcataaacagtcactgaattatatgcagattgaagccgacaaacccattataggaaaagagattgatgtagtttttataggaagttgcacaaactcaagaatatctgaccttcatgatgcagccgaaattctcaagggcagaaaagtttcaaatggggtcagagcattggttgtaccaggttcacaggcagtaaagaaagaagcagaaagtttagggctggataaaatattcgaatcagcaggagcagaatggcgtgaatctggatgctcgatgtgccttggaatgaatggtgatacagttggaaatgggcaattggcagtgagtacgagtaaccgaaattttgagggtcgacaaggtaaaggggctagaacaatactagcaagtccaaaaactgctgctgcatcagcgattgcaggatctgtagatgacccaaggaaatatagttaac

SEQ ID NO: 283259 - DNA, 616 bp, Unknown
  Bacterial polypeptide expressing nucleotide sequence isolated from the Sargasso Sea
atgagcagctttccttccggtccgttgagccaggtggtgggtcgcgcccttgtcgtcagcggcgaggacattgacaccgatcggatcattcctgcccgcttcctcaagtgcgtgagtttcgatgccctgggggaccaggtgttcgcggatgaccgtcgtgaacgcaagggtgagcaccccttcgaccaggcgcgatttcagggggcgtcgattcttgtggtgaatggcaacttcggttgcggatccagtcgcgaacatgcacctcaggcactgatgcgctggggcatccgcgcggtggtgggcgtcagcttcgccgagattttctatggcaactgtctcgccctcggcatcccctgtgccacggcgtcggcagcggaggtggaggcgattcagcgacaagtcaatgatcgtccggatcagaactggtctctggatctggaggctgaacagctgtcatccgcggatcaacaatggagtgttgctgtggatgaggggccgcggcagatgttgctgagtggccgctgggatgccacgtcgcagttgctggcccatggcccagaggttcaacagttgatggacgcattgccgtacatcaacggcttcagcaacgtctgac

SEQ ID NO: 283260 - DNA, 586 bp, Unknown
  Bacterial polypeptide expressing nucleotide sequence isolated from the Sargasso Sea
atggaaaaatttattgaacatacaggtcttgtagcaccacttgatagagttaatgttgataccgaccaaataattccaaaacaatttctaaaaagaattgaaagaacaggttttgggcaatttgcattctacgattggagataccttgaagatggagtccctaatcctgaatttatcttaaataatcctaagtttgatggggcatcaatacttgttgcaggcccaaattttggatctggatctagtagagagcatgctccatgggctttatctgagtatggattcaaggtgataatatcaacaagttttgcagatatttttagaaataattgtatgcagaatggactgattactatagttttgtctcaagaaaaggtagataaaatcatgactaatgcaataagggttccagaatataaattaactgttaatttagaaactcaaaatgtttcagataataatgacttttcatctgattttgactttgatcaatttagaaaagattcaattttgaaaggtctagatgatattggtatcactttacaatttgagaaagaaatttctaattttgaatcaaaaatataat

SEQ ID NO: 283261 - DNA, 523 bp, Unknown
  Bacterial polypeptide expressing nucleotide sequence isolated from the Sargasso Sea
aatgaaaagtaaatcctataacgggcaagtcattccaattaatagagataatgttgacacggatttaataattccaaaacaatatttgaaatcaataaaaaaatctggattcggcccatttttatttgactctctacggtataacgatactgcaacattagatagcaatggtgagagagaggaaaactctgaatttatactcaatagagaaccatttagaagaggcaagattctgatttcaaaaagtaatttcggctgcgggtcatcaagagaacatgctgtctgggctatacaaaattatggcattgatgttgttattgcagaaagttttgcagatatattctcgaggaatagttttaaaaatggattgctactcatcactctagacttacaaaccattaatcaaattatagatttatcattgtcgtcaagttcatatatattagatgttaatcttacagaagataaaattttactaccagatgataaaacgataacattttctatatcgagatcttataaa

SEQ ID NO: 283262 - DNA, 634 bp, Unknown
  Bacterial polypeptide expressing nucleotide sequence isolated from the Sargasso Sea
gatgaaagaatatattaaagggcaagtaatacctatcaataaagctaacattgatacagatattataattccaaaacaatatttaaaatcgatcaaaaaaactggatttggaccctttctttttgattctgagcgatattctaatccaggtacattagataatttagatcagagaaaaattaatccagattttattttaaacaagagtccgtacaatcgaggcagtatacttatagtaaacgacaattttggatgtggctcatcgagggagcatgctgtatgggcaattaaagatttcggtatagacgctgttatctcatcgtcatttgcagatatcttttatcgcaacagttttagaaatggattattactaataacaattacaaaattagatttagagaaattatttcaaaatgtagaaaaaaataaagaatatgaattaacaatcgatttgattaacagtaaaattacatcccaagatggccttaaaataagctacactttagatacttcggatagagatagaatcatcaaaggtcaagacgatattgcaataacgctcgaaaacaaagaaaaaataattaattttgaaaatgaaataaaaaaaaggaaaccatggctatatgaagagtga

SEQ ID NO: 283263 - DNA, 646 bp, Unknown
  Bacterial polypeptide expressing nucleotide sequence isolated from the Sargasso Sea
atgacaaagcaatcatttaggaaaatcaacaaaattgatgggatccccattgcattcgatcgaatcaatgtagacaccgatcaaataattccgagtgatttttgtaagaagacagggaaaaccgggtatggagttcatctgtttcactattggagatatcttgatgggaacatggactgtccagatccaggattcattctcaacgattcaacttttaaagctgccaatatccttctgacgagggaaaattttggttgtggttcgagccgtgaagcagctccctgggctttgtcggaatatggttttagatgtttgattggagtgagttattctgaaattttttataataactgtataaacaatggcatcctgatttttaccctggaatctgaaaaaataaatgatctttttgaatctgttgaagcaaatgctggcttgagtatgaatatcaatttgattcaacaagaaataataacaccggagggtaaatcaatgcattttgaaatcggtgaattccataaattctgcctcgtcaatggaatcgatcagattgattggactctacaatttgaaaacttaatctttcagcatgaaaaaaaagttgaaaatggttttccttggttgagcttaaaaagcgatgcttaga

SEQ ID NO: 283264 - DNA, 592 bp, Unknown
  Bacterial polypeptide expressing nucleotide sequence isolated from the Sargasso Sea
atggaaaaatttgttaagcatgaaggtatagttgctccattagatagagtaaatgttgatacagaccaaataattccaaaacaatttcttaagagaatagaaagaacaggttttggtaaatttgcattttatgattggagatatttagaagatggagtaccaaatccagattttatccttaatcatcctaaatattctaaagcttcagtattagttgctggccctaattttggttcaggttcaagtcgagagcacgctccgtgggcgttatctgagtacggatttaaggttattatttctacaagttttgctgatatttttagaaataattgtatgcaaaatggcttaattactgttcaattatctagcgaaaatgtagatagaattatgacaaattctataaagatggatgattataaaataactgtagatcttgaaaatcaaaaagtttttgataattttggctttgaagaaacttttgattttgatcaatttagaaaagattctattttggaaggattggatgatattggtataactcttcagtttgatcaagaaatagaaaaatttgaaagaaacacactaaaataat

SEQ ID NO: 283265 - DNA, 274 bp, Unknown
  Bacterial polypeptide expressing nucleotide sequence isolated from the Sargasso Sea
atgaaaacactttttgaaaaaatctgggatacccatctggttcacgagcaggatggaaacagtatcctctacatcgaccggcatctggtccatgaagtcacctcaccgcaggcctttgagggactcaggatggcaggaagaaaggtccgggttcccgaggccacatttgccgtaccggatcacaacattccaacccgcaaccagcttcagccgatcaaggacccggtttccgccaagcaagtcgagaccctgcggaagaactgcaaggatttcg

SEQ ID NO: 283266 - DNA, 340 bp, Unknown
  Bacterial polypeptide expressing nucleotide sequence isolated from the Sargasso Sea
gatgaaaccagagtttaccccaccaattggaaaaatttcaaatattaatgggcaatgtatctctttggttggtaacgacattgatacagatcggataattccagcgcgttttttgaagtgtgttaattttgattcgttgggtgaatctgtttttgaggacgatagaaaaactttaaaaggaaagcatccttttgatctagaggaaaacaaaaatgcctcaatactaattgttaatagcaactttggatgtggttccagcagagaacatgccccccaagcgcttatgagatggggcataaacgcaatcataggagagagtttcgccgacattttttatagt

SEQ ID NO: 283267 - DNA, 151 bp, Unknown
  Bacterial polypeptide expressing nucleotide sequence isolated from the Sargasso Sea
atgtctactaccctttacgataaaatttggaacgatcatcttgttgatcaacaagaggatggaacagcattattgtttgttgatagacacttaattcatgaagttactagtccacaagcttttgagggtttaagaaattcaaatagaaaag

SEQ ID NO: 283268 - DNA, 499 bp, Unknown
  Bacterial polypeptide expressing nucleotide sequence isolated from the Sargasso Sea
aatggaatccgagtttaccccaccaattggaaaattttcacaaataactgggaaaagcatctcattgattggtaacgacattgatactgatcgaattattcctgcgcgtttcttaaaatgtgttaattttgattcattgggccaatatgtttttgaagacgatagaaaaactttgaaaggcgttcatccctttgatctaaaagaaaatcaagattcctctattcttatcgttaatagtaattttggttgcggctctagcagagaacatgcacctcaagctctacttcgatggggtataagagcaataataggtgagagttttgctgaaattttttatagcaattgtattgcaattggaattccatgttttactcttcctaaaaaatcaatacaaaatatccaaaaatataacattagtaagagtttattcttagaaattgatctcaaaaaatcttcagccaaatcaaaagatttaaattttaatcttgaaattaaagag

SEQ ID NO: 283269 - DNA, 250 bp, Unknown
  Bacterial polypeptide expressing nucleotide sequence isolated from the Sargasso Sea
agcagagcaagaaggtttagacaaggtatttaaagagtcgggatttgaatggagagaaccaggttgttctatgtgtctgggaatgaacgaagatcaactaaaaccaagagaaagatgtgcatcaacatctaatagaaactttgaaggtagacaaggtcgtgggggaagaacacatttagtgagtccagccatggcagcagtagcagctattaaaggacatttatctgatgtcagaaagtttaataattag

SEQ ID NO: 283270 - DNA, 190 bp, Unknown
  Bacterial polypeptide expressing nucleotide sequence isolated from the Sargasso Sea
atgaacgacagaccgacactttatgacaaaatttggaacgaccatcttgtttctgaagaacaagacggaactagcctgttatacattgatagacatcttgtacatgaggtcacgagtccgcaagctttcgagggcttgagaatggcaggtagaaaagtacgttgtccagaaaaaactattgcagttcctc

SEQ ID NO: 283271 - DNA, 574 bp, Unknown
  Bacterial polypeptide expressing nucleotide sequence isolated from the Sargasso Sea
tatggaaaagattattcaatttagctcaaaaacagttgtcttggcagtcaatgacattgatacagatcaaattatacctgcaaggtatttaactgtgacaacgaaagatggactcggtgaagggttatttgcagattggaggttcgatgagtctggtgaaaaagtagaagaatttccattaaatcaggataagtcatcaggatgctctatattggttgctggtagtaattttggttgtggatcatcacgtgaacatgccccatgggcactcgttgattatggattcaaagcaattttgagcacatcatttgcagatatctttaaaaacaacgcattaaaaaatggcctgcttcccttatccgtatctgaagagtttcatcgaatgctcaatgagaatgaagggactgagattactatcagcctcgaaaaaatgacaattgaaagctctaatggaatgaccgagacattcgatttagagcctttttcaagatattgcttaatgaacggagttgatcagcttggattcataatgaaacacgaagatcaaatcaatgcatttgaaaacaaaggataa

SEQ ID NO: 283272 - DNA, 129 bp, Unknown
  Bacterial polypeptide expressing nucleotide sequence isolated from the Sargasso Sea
catgtcattcaccctatacgataagctttggaatcttcatgaggtctctcaaagagaagacggcacctatcttttatatatagatagacatttgattcacgaagttacatcccctcaagcatttgaagg

SEQ ID NO: 283273 - DNA, 577 bp, Unknown
  Bacterial polypeptide expressing nucleotide sequence isolated from the Sargasso Sea
atggaaaagattattgaatttagttctaaaactgttgttttgtcagtgaatgacattgatacagatcaaattatccctgctagatatctaacagtaacaaagaaagatgggcttggcgatggcttattcgcagattggcggtttgatgaagacggaaataaagttgaacaatttccattgaaccaggataaatcagatgggtgctctattttaatttctggcagtaattttggctgtggatcgtcacgtgagcacgctccttgggcattacttgaatatggatttaaggcaattgtatcaacctcatttgcagatatttttagaaacaatgcactaaagaatggtctattgcctcttacagtgtcagaagattttcatgcgatgttgactgagaatgaagggattgaagtcactgtcagtcttgaaaaaatgatgattcatgcctctaacgggatgaatgaagcattcgatctcgagcctttttcgagatattgcttaataaatggtattgatcaactgggattcatcatgaatcacgaagaacaaattaatgcatttgagaataaaggacagtaaa

SEQ ID NO: 283274 - DNA, 265 bp, Unknown
  Bacterial polypeptide expressing nucleotide sequence isolated from the Sargasso Sea
atgccaaagactttatacgataaaatctggagtgatcacttagtccaccaacaggatgatggaacatctttgctatttgtggacagacatttgatacatgaggtgactagcccacaagcttttgaaggacttagaaacagcaaaaggaatgtaagacatccaaacttaactcttgctgttgttgatcacaacataccctacactgacagatctaaaggaattgatgacaacgactctagaattcaggtagaaacgcttgaaaaaa

SEQ ID NO: 283275 - DNA, 616 bp, Unknown
  Bacterial polypeptide expressing nucleotide sequence isolated from the Sargasso Sea
atgacgcgactcacgaccatcgaaggcagcgctgtgccgctgccgatcgacaacctcgacaccgaccagatcatgcccaagcagtttctgcgcattatcgacaaggcgggtctcgcggacggcctgttatacgacctgcgtttcgacgaacatggcgcgccgcgcgccgattgcgtgctcaaccagccccgctacgcgaatgcgcgtgtcctgattggcggctccaatttcggttgcggatcgagccgcgaacatgcggtatggggcttgcagcagtacggcgttcaggcggtgatcgcgccgagtttcgcggagatcttctattcgaacgcgatgaacaacaggctgctgctcgtgcaactggagcgcggcgttgtcgatgccttgttgcgcgacgcgagcgacgctcccggcacatcgctcgcgatcgatctcgaacgacagacggtgacgtccgcctcggggcatgtgtacccgtatcccatcggcacacgccacaaacgcatggtgatcgaaggcatggataccgtcgatctcaccttggcttgcgtcgccgagatcgaggcattcgaacgcgagcattttgtccggcatccctgggcacaggtgatgtgac

SEQ ID NO: 283276 - DNA, 622 bp, Unknown
  Bacterial polypeptide expressing nucleotide sequence isolated from the Sargasso Sea
aatgaaatctgaatttattccaccagctggaaaaattttacaaataagtgggaaatgcatctcattaattggtaacgacattgatactgatcgaataattcctgcgcgtttcttaaagtgcattaattttgatgcattgggcaattctgtttttgaagacgatagaaaaactttaaaggggaggcatcctttagatttacaggagaacaaaaatgcctcaatattaattgttaatagcaattttggatgtggatctagcagagaacatgccccccaggcacttatgaggtggggtatcaaagcaataataggtgaaagttttgctgaaattttttatagcaattgtgttgctattggaattccttgttttactcttcctaaaaaatcaatacaagatattcaaaaatatactgaaaataaaagtttatttttagaaattgatctgaaaaattgcttagctaaatcaaaagatttaaattttattcttgaaattaaagaaagttcaagaaaaatgtttttatctggagaatgggatgctacagctacattattagaaaatgagacattagttgaaagtaagtctaaagaactaccttatataaaatttgattatgacttctaa

SEQ ID NO: 283277 - DNA, 238 bp, Unknown
  Bacterial polypeptide expressing nucleotide sequence isolated from the Sargasso Sea
aggtttagatgtaatatttaaaaattctggatttgaatggcgtgagccaggttgttcaatgtgtttagctatgaatgcagataagttgaagccagaagaaagatgtgcatcaacatcaaatagaaatttcgaaggaagacaaggacgaggcggaagaacacatttagttagcccagctatggctgcagcagctgctatatctggaaatttagatgacgttagaaaatacaatagttaa

SEQ ID NO: 283278 - DNA, 391 bp, Unknown
  Bacterial polypeptide expressing nucleotide sequence isolated from the Sargasso Sea
ggataaatcagatgggtgctctattttaatttctggcagtaattttggctgtggatcgtcacgtgagcacgctccttgggcattggttgattatggatttaaggcaattttatcaacctcatttgcagatatttttagaaacaatgcactaaagaatggcctattgcctcttacagtgtcggaagagtttcatgcgatgttgacagagaatgaagggattgaagtcactgtcagtcttgaaaaaatgatgattcatgcctctaacgggatgaaagaagctttcgatctcgagcctttttcgagatattgcttaatgaatggtcttgatcaactgggattcatcatgaatcacgaagaacaaattaatgcatttgagaataaaggacagtaa

SEQ ID NO: 283279 - DNA, 613 bp, Unknown
  Bacterial polypeptide expressing nucleotide sequence isolated from the Sargasso Sea
atgcgcccttttccttcgggtcagatccagatgattgaaggcaccgccatggtgcttgccggtgaagacatcgatacggatcggatcattcccgcccgttttctcaaatgtgtgagcttcgatgccctggcggatcaggtgttcgctgatgaccgcagcgaactgaacggccagcatcccttcgatcagccgcagtttcagggcgcctcgattctggtggtcaacggcaacttcggatgtggctccagccgcgagcatgcgccccaggctctgatgcgctggggcatcagagccgttgtcggggtcagtttcgctgagatcttctacggcaactgtctggctcttggaatcccctgtgcgacggcctcggcggatgagatcgcttccctccaacaggcggtgctcaacgaacccggcggagtctggtcactgaatctgacaacgatgcgcctggcgagcggtagcgctgactgtgccgtgagcatcgatcccggtccgcgcgacatgctgtgcagcggccgctgggacgccacctcgcagctgctggaccacggcgaacaactggaggccttgatgggacggctgccctatctgaatcgtttcgctacctgat

SEQ ID NO: 283280 - DNA, 676 bp, Unknown
  Bacterial polypeptide expressing nucleotide sequence isolated from the Sargasso Sea
atttgattatatagaaggaagagagtatgctccaaaaggtgatgtttggactaaagcagttaattattggaagacattaaaaactgataaagatgcaatttttgataaggaatacaattttaaagctgaagaaattgaacctatgattacttatggaactaatcctggaatggcaataccaatttcaaagtcaattccaaaagccaataaatctgaatctaaatcatcttatcagaaggctctagattatatggaatttaatgagggtgatagaatgattggtaaaaaaatagattatgtttttttgggtagttgcacaaatggcagaattgaagattttagaacttttgctagtataattaagggtagaaaaaaatcaagcaatgttgacgcatggcttgtaccaggatctcacaaagtactaaaaagtataagagatgagggaatacttgatattcttactgagtcaggatttaaactaagagaaccaggttgctctgcatgtttagctatgaatgatgataaaatcccaaaaggaaaatatgcagtaagtacaactaatagaaattttgaaggaagacaagggccaggcgcgaggacacttttagcaagtcctcttgtagctgcagcaacagctataactggtgagataactgatccaagagatattatataa

SEQ ID NO: 283281 - DNA, 640 bp, Unknown
  Bacterial polypeptide expressing nucleotide sequence isolated from the Sargasso Sea
aatgaaaaataataattttgaagggcaagttattcctataaatagagataatgtagatacagatttaatcattccgaagcaatacttaaaatctattaaaaaatctggttttggaccatttttgtttgactcacttaggtacactacaacagctacgcttgacagtaacagtgaaagaactgaagtttcatcttttatattgaatcagacaccttataagaatggcacaatattaattgcaaaatctaacttcgggtgcgggtcatctagagaacatgcagtatgggctatacagaattatggaattaatattgtaatcgctgaaagttttgcagatatctttacaagaaatagttatgcaaatggccttttattaatttgtttggataaaaatatcattattaagattattaatgatgctttgtcatcagattcttatgaaattaaggttcatctagaatctaatactataactttgccaaacgaagaagatatatcatttactattgatgattcttataaagagagaatcttaaataacttagatgatatagaattaaccttaaaacataaaaacaaaattactgaatatgagaataaaataaaacaaacgaagccttggctatttaataatgaataa

SEQ ID NO: 283282 - DNA, 238 bp, Unknown
  Bacterial polypeptide expressing nucleotide sequence isolated from the Sargasso Sea
aggattagacaaaatatttaaagattcaggttttgattggagagaaccaggctgttctatgtgtttagcgatgaatgcagataaattaaaacccgaagaaagatgtgcatcgacttcaaacagaaattttgaaggtcgtcaaggaagaggcggcagaacacatttagtgagcccagcaatggctgcagctgctgctatatcaggaacattagatgatgttagaaaatacagaaattaa

SEQ ID NO: 283283 - DNA, 169 bp, Unknown
  Bacterial polypeptide expressing nucleotide sequence isolated from the Sargasso Sea
atgcccaaaacactttacgataaaatctggacagaacatcttgtgcatcagcaaaaagatggtacatcattgctttttgtagacaggcatttaattcatgaagtcacaagtccccaagcatttgagggtcttagaaatactgggagaaaagttagacaacctagttgac

SEQ ID NO: 283284 - DNA, 199 bp, Unknown
  Bacterial polypeptide expressing nucleotide sequence isolated from the Sargasso Sea
aatggaagcatttgaaactctttctggaaaagctgtgccgcttgacataataaatgtggatacagatcagattattccaaaacaatttttaaaaaaaatagatcgtgctggatttggaattcatctttttcatgattggcgttacttggatgactcaggtactaagatgaatccggagtttgtattgaattttaaacgt

SEQ ID NO: 283285 - DNA, 199 bp, Unknown
  Bacterial polypeptide expressing nucleotide sequence isolated from the Sargasso Sea
atgtcacttacaacttacgataaaatttggaatgatcacctagttgatgaacaaccagatggaacatctttattatttgtagatagacatttaattcatgaggtgaccagcccacaagcatttgaaggattaagaaattctaacagaaaagtcagacatccaaaattaacacttgctgttgcagatcacaatgttccta

SEQ ID NO: 283286 - DNA, 122 bp, Unknown
  Bacterial polypeptide expressing nucleotide sequence isolated from the Sargasso Sea
gatgcccgatacactttacgataaaatttggaacgaacacttggttcatcagcaagaagatggaacagcgttattgtttgttgatagacatttagttcatgaggtcacaagtcctcaagctt

SEQ ID NO: 283287 - DNA, 419 bp, Unknown
  Bacterial polypeptide expressing nucleotide sequence isolated from the Sargasso Sea
aatgggatacaccatatatgacaagctctggaatgagcacttaataagatcctatgatgatggagactcactaatttatattgatagacattttcttcatgaagtaacatctcctcaagcttttgaaggcctcaaaaaaaaatcactcaaaccatggagaattaatgcaaacattgctactccagatcacaatgttccaactacaagggataataaatttagcattgagagcattgaggacaatatctcaaagttgcaggttgttgagttagataaaaattgtaatgatttcggcataaaacaatttaatatcaactcaaataatcaaggtatagttcatgtaattggaccagaattaggcttaacgcttcctggaatgagtattgtttgcggcgactctcatacttcaactcatggtg

SEQ ID NO: 283288 - DNA, 220 bp, Unknown
  Bacterial polypeptide expressing nucleotide sequence isolated from the Sargasso Sea
atgtcaaaaaccttatacgataaaatttgggaagaacatcttgtacatcaacaagaagatggaacatctttactttatgttgatagacacttagtccatgaagttaccagtccacaagcttttgagggactaagaattaataaaagaaaagtaagaaaaccaaatttaacattggcagttgcagatcataatgtaccaacaacagaccgatctaaaggaa

SEQ ID NO: 283289 - DNA, 1069 bp, Unknown
  Bacterial polypeptide expressing nucleotide sequence isolated from the Sargasso Sea
cgaagtaacttcacctcaagcctttgagggactctcaaagaaaaacttaaaaccttggagacttgaggcaaatattgctacaccagatcacaatgttccaactataagaggagatggctttgattctgaaaaaattaaggacgagatttcaaaaattcaagttattgagttagataaaaattgtaatacctttggaatcaaacaatttgatataaaatcaaccaaacaaggtattgttcatgtcataggtccagagcttggatacacattgcctggaatgacaatagtttgtggtgattctcatacatcaacacacggtgctcttggctgcctagccatgggaataggtacttcagaagttgagcatgttttagcaactcaatgtcttaaagtatccaaacttaaaaacatgcttgttaaatttgaaggtactccatctgaaaatgtttcatcaaaagatatagttctgtattttattgggcagattgggactgctggcggtacaggatatgcaatagaatttgctggaagttatatcgaacaaatatcaattgagagcagaatgaccatttgtaatatggccattgaagccggcgcaaaggttggtttagtggctccagatgataagactatagactatattagaaaaaaatcttttctagacaaaaaactattaatagaagcagaagattattggtctagtttgaaatcagatgaggatgcaatttttgataaggagaaaactatagatatttctaaaattaaacctcaagtaacttggggaacatctccagaaatggtcgtaaattttgatgatgatattccaagaacatcagattattctgaacaaaataaaaaaaacatagaacttgcaagagattatatgggcattaaagatgaggctaagctttctgatttagtatttgataaagtttttataggctcatgtactaactctagaatcgaagatcttagacaggccgctgaaatagttaaaaggaaatttgttgccgaaaatattagtgaagcaatagtggtaccaggatcaggtatggttaaagaggcagct

SEQ ID NO: 283290 - DNA, 979 bp, Unknown
  Bacterial polypeptide expressing nucleotide sequence isolated from the Sargasso Sea
atagttcatattattggtccagaacaaggattcacacaacctggaactattatcgtttgtggtgatagtcacacagctactcacggagcattcggtgcactagcatttggaattggaacttcagaagtagagcatgtattggcaacgcagactttagttcaaaaaaaatcaaaaaattttagaataaacgttaatggttctcttcctgttggagtaacatcaaaggatgtaatattacaaataattggaaaaattggcacagctggcggcactggttatgtaattgaatatgctggaaacttaatttctaatttaagtgtcgaacaaagaatgacgatttgcaatatgacaattgaaggtggagcaagggctggattaatagagccagatgaaaaagtttttaattatttaaaaggtaaaccaatgtctccaaagaattcaaattgggacaaagcattagaatattggagtaaattaaagtctgatggtgatgcagtatttgacaaagaaatcagtcttgagggcaaagatattaaaccaatggtaacttggggaacttcgcctcaggatgtagtagatattgatggaattgtccctgatcctgaaaatgagctaaacgaagacagaaaaaattctattaatagatcattaaaatatatgggtttaaagccgaagactaaaataaaagatataagaattgataaagtttttattggaagttgcacaaatggaagaatcgaagatctaagagaagctgcgaaaatcttaaaagataaaaaaattgcttctcatgtaaatgcaatgatagtccctggttcaggattagtaaaacaacaagcagagcaagaaggtttagatataatatttaaaaattctggatttgaatggcgtgagccaggttgttcaatgtgtttagctatgaatgcagataagttgaagccagaagaaagatgtgcatcaacatcaaatagaaatttcg

SEQ ID NO: 283291 - DNA, 858 bp, Unknown
  Bacterial polypeptide expressing nucleotide sequence isolated from the Sargasso Sea
gatgttcttgctacccaaaccatagctatcaacaaattgaaagtgaggcagatttggtgtgacaaaaaattatctaatggtgtttttgctaaggatttagtactgcatatcattaataaacttggagtaaaggcaggagtaggtttcgcatatgaattcgcagggcctgcaatagatgaattatcaatggaagaaaggatgacaatatgcaatatgtctattgaaggaggagcaagatgcggctacattaaccctgatgacaagacatttagttatattaaaaataaattgtgtgccccaaaaagtgagcattgggataaagcgctcacatggtgggaatcattaaaaagcgatgaaaattcaatttatgatgatgtaattaaattagatgcttctaaagtggagccaaccgtaacctggggaattactcctagccaaagtataagcattaatcaacaaatcccttttttagatgacttgtcctcaaatgataaattaattgcaaaagaagcttatgaatatatgagtttcaagccgggacaattaataaaagatactcctgtagacgtttgtttcataggaagttgcacaaatggaagaatcagtgacttaagagttgccgctaaagtattaaaaggcaaaaaagtatccaagaatgtcaaagcatttgcagttccaggttcagaaaaagtggcaactgaagcaaaacaagaaggtcttgatcagatatttaaggattctggatttcaatggagagagcctggctgctcaatgtgtttagcaatgaattcagataagctaataggtaatcaagttagcgctagttctagcaatagaaatttcaagggtaggcaagga

SEQ ID NO: 283292 - DNA, 571 bp, Unknown
  Bacterial polypeptide expressing nucleotide sequence isolated from the Sargasso Sea
aatgcctaatacactttacgacaaaatctggaatgaccacttagttgaccaacaacctgatggcactgctttattgtttgtagatagacatcttgtccatgaagtgactagtccgcaggcatttgagggtcttagaacttctaatcgtaaagtaagacatccaaaacttactctggcagttgcagatcataacgttccaacaacagatagaactaatggtattgcagatcaagagtcaaaaattcaggtcgatactctagaaaaaaattgtaaagaatttggagtacagctttttggtatggacgataaaagacaaggaattgtacatataattggaccagaacaaggatttactcaaccaggaacagtaattgtttgtggagacagtcatactgctacacatggtgcttttggagctttggcatttggaattggtacatcagaggtagaacatgttttagcaacacaaacattggttcaaaaaaaagcaaaaaattttagaattaatgtgaatggaaaacttcctttaggagtaacttctaaagatgtaattttacaaataatcggaaaa

SEQ ID NO: 283293 - DNA, 676 bp, Unknown
  Bacterial polypeptide expressing nucleotide sequence isolated from the Sargasso Sea
attgagtcaagataccctatttgataaagtttgggatttacataaagtttcaagtcttcctggaggctctgatcaaatatttattggtcttcatcttatccatgaagtgacgagtcctcaagcatttggtgctttaaaggacaaaaaattaaaagtaaaattccctgatagaactgtcgctactgttgatcatattgtgccaacagataatcagagcaggcctttcaaagataatctcgctgaacagatgattgaaacacttgagaagaattgcttagaacataaaataagattttttaatattggtagtggtaatcaaggaatagttcatgtagtagcaccggaattaggccttactcagccaggaatgacaatcgcttgcggagattctcatacttcaactcatggagcttttggatcaattgcttttgggataggtacaagtcaagtaagagatgttcttgctactcaaaccttagctatgaacaaattgaaagtaaggcagatttggtgtgacaataaattatctaagggtgtttatgctaaggatttagtccttcatatcattaataaacttggtgtaaaggcaggagtaggtttcgcatatgaattcgcagggcctgctatagatgaattatcaatggaagaaaggatgacgatatgcaatatgtctatt

SEQ ID NO: 283294 - DNA, 445 bp, Unknown
  Bacterial polypeptide expressing nucleotide sequence isolated from the Sargasso Sea
aatgtctacaacattatacgataaaatttggaacgatcatctagttgatcaacaagatgatggcacatctttactttttgtagatagacatttaattcatgaggtgacaagcccccaagcttttgaaggattaagaaattctaatagaaaagttagacacccaaatttaactttagcagttgcagatcataatgttccaacaactgacagatcaaaaggtatttcagatgaagagtcaaaaattcaagtagatactttagaggcaaattgtaaagaattcggtgttcagttatttggtatggatgataagaggcaaggtatagttcatatcataggacctgaacaaggttttactcaaccaggtacagttattgtttgtggagacagtcataccgcaacgcatggagcatttggtgctttagcatttggaataggaacttcagaa

SEQ ID NO: 283295 - DNA, 559 bp, Unknown
  Bacterial polypeptide expressing nucleotide sequence isolated from the Sargasso Sea
atgcctcaaactatatacgataaaatatggaacgatcaccttgttcatcaacaagaagatgggacttcacttttatttgttgatagacatttaattcatgaagttactagtccacaagcatttgaaggtttaagaaattctaatagaaaagttagacaaccttctttaactttagcagtagcagatcacaatgttccaacaacagatagatcagtgcctattactgacaaagattcaaaaatacaaatcgagacactagaaaaaaactgtgcagaattcggaataaatctttttggaatgaacgataaaagacaaggaatagttcatattattggtccagaacagggatttacacaaccaggaacgattatcgtttgtggcgatagtcacactgctactcacggagcatttggtgcattagcattcggaattggaacttcggaagtggaacatgtcttggcaacacagactttagttcaaaaaaaatcaaaaaattttagaataaacgttaatggatctcttcctgttggagtaacatctaaggatgtaatattacaaa

SEQ ID NO: 283296 - DNA, 844 bp, Unknown
  Bacterial polypeptide expressing nucleotide sequence isolated from the Sargasso Sea
aatgaacgataaaagacaaggaatagttcatatcattggcccagaacaaggttttactcaacccggaactattattgtttgtggtgatagtcatacagcaacccatggagcatttggggctttagcatttggtattggaacatcagaagttgaacacgtactagcaacacaaactttagtacaaaaaaaatcaaaaaattttagaatcaatgtaaatggaacattaccaattggtgtaacagcgaaagatgtaattttacaaataataggaaaaattggaacagctggtggaacaggttatgtaattgaatatgcgggtaacttaatttctacacttagtgtagaaaatcgaatgacaatctgcaatatgactatagagggtggagcaagagcaggtttaattcaaccagatcaaaaagtttttgattatttaaaagataaaccaatgtcaccaaaaaaagacaattgggaaaaagcattagagtattggggcaatcttaaatctgacgatggagctaattttgataaagaaattaatttagagggaaatgatatcaaaccaatggttacttggggaacttcacctcaagatgtagtcacaattgatggaaaagttccaaatccaaaaaatgaaactgatccagataaaaaaaactcaatagaaagatcattaaaatatatgggtttaaattctgatattttagttaaagatattaaaattgataaagtttttattggtagttgtactaatggtagaattgaagatttaagagaagcagcaaaaatattaaaagataaaaaaattgcaaaacatgttaatgcaatggttgttcctggctcagga

SEQ ID NO: 283297 - DNA, 244 bp, Unknown
  Bacterial polypeptide expressing nucleotide sequence isolated from the Sargasso Sea
atgaagaccttatacgacaaactctgggaggagcatcacgtaacccaacttgattcaggtgaatcattgttatatatagataggcattatttacatgaggttacttcacctcaagcattcgaaggattatctaaaaaaaatctaaagccttggaggcttgaagcaaatatagcaacacccgatcataatgttcctacaactagggggaataactttaattcagataaaataaaagatgaaatat

SEQ ID NO: 283298 - DNA, 847 bp, Unknown
  Bacterial polypeptide expressing nucleotide sequence isolated from the Sargasso Sea
atgccttttacaacttacgataaaatttggaacgatcatctagttgatgaacaacctgatggtacatcacttttgtttgtagatagacatttaattcatgaagttacaagccctcaagcatttgaaggcttaagaaattcaaacagaaaagtaagacaccctaaactaactcttgctgttgcagatcataatgttccaacaactgacaggtcaaaaggtatcgcagatgaagactcgagaattcaagttgaaactttgaataaaaactgtaaggaatttggagtagagatttttggaatggatgataaaagacaaggcattgtccatatcataggacctgaacaaggttttacacagcctggaaatattattgtttgtggtgatagtcatactgcaactcatggagcatttggagctttagcttttggtataggaacttcagaagtagaacacgttttagcaacacaaactttagttcaaaaaaaatcaaaaaactttagaattagcgtaaatggttcattacctattggcgtaacatcaaaggatgtcatcttgcagataattggaaaaataggaacagctggtggtactggttatgtgattgagtatgctggtaaccttatatctaatctaagtgttgaacaaagaatgacgatttgcaacatgacgattgaaggtggggcaagagcaggactaattcaaccagatgaaaagatatttcaatatttaaaaggtaaaccaatgtcaccaaaaggagaaaactgggaaaaagctatggaatattggcatacattgaaatctgataaggacgcaaactttgataaagaattaacgttagatggatcta

SEQ ID NO: 283299 - DNA, 860 bp, Unknown
  Bacterial polypeptide expressing nucleotide sequence isolated from the Sargasso Sea
tgtaattttacaaattatcggaaaaattggtacagcggggggaactggttatgtaatagagtactcaggaaacttaatttcctcattaagtgtagaacagagaatgacaatttgcaatatgacaatagaaggtggtgctcgggctggtctaatcgaacctgatgaaaaagtattcaaatatttagaaggaaggccaatgtctccaaaaaaagaaaattggaacaaagcggttgattattggggttctttaaaaacagacaaggacgccaattttgataaggaagtaactttagagggaaaggatattttaccgatggttacttggggaacttcgcctcaggatgttgtttcaatagatggcaaggttccaaatcctaaaaatgaaacagatgaggataaaaaaaattctatggaaaggtcacttaattatatgggccttaagccagatacagcaatgaaaaatattaaaattgataaagtttttattggcagttgcactaatggaagaattgaagatttaagagatgcagcaaaaattttgaaaaatagaaaaattgcaaatcatgtttatggaatggttgtacctgggtcaggattagtaaaacaacaagcagaacaagaaggattagacaaaatattcaaaaaatctggttttgattggagagaaccaggttgttcaatgtgtctagctatgaattctgacaaacttaaggctgaggaaagatgtgcttctacttcaaatcgaaatttcgaaggtcgtcaaggtagaggaggaagaacgcatctagttagcccagcgatggcagctgcagcggctatttccggaactttagatgatgtcagaaaatatcaaaattaaa

SEQ ID NO: 283300 - DNA, 874 bp, Unknown
  Bacterial polypeptide expressing nucleotide sequence isolated from the Sargasso Sea
atggatgacaaaagacaaggcattgtgcatatcataggacctgaacaaggctttacccaacctggaaatattattgtttgtggggatagtcatacagcaacacatggagcttttggagccttggcatttggtataggaacttcagaagttgaacatgttttggcaactcaaactttagttcaaaaaaaatcaaaaaattttagaataagtgttaatggatcattacctattggggtaacatctaaagatgtaattttacagataattggaaaaataggaactgcaggaggtacaggatatgtcattgagtatgcaggaaaccttatatctgatttaagtgttgagcaaagaatgacaatttgtaatatgacaatagagggtggtgcaagagcaggactgatacagccagatgataaaatatttcaatatttacagggaaagccaatgtccccaaaaaatgagaactggtctaaagcactggaatattggcatacactgaagtcagactccgatgctcattttgacaaagaattaacattagatggttctcaaattaaaccaatggtaacttggggaacttctccgcaggacgttgttgaaatagatggtaaagttcctaatcctgatagtgaaagtgatccagataggaaaaattcgattaatagatcgttaaattatatgggactaaaaccaaacacaaatattcaagatataaaaattgataaagtttttataggaagttgtactaatggcagaatagaagatataagagaggctgcaaaaattcttaaagataaaaaaattgcatcacatgttcatgcaatgatagttccaggatctggattggtgaaagaacaggcagaacaagagggtt

SEQ ID NO: 283301 - DNA, 961 bp, Unknown
  Bacterial polypeptide expressing nucleotide sequence isolated from the Sargasso Sea
gatactttagaagctactgtaaaagaatttggtgttcaactttttggtatgaacgataaaaggcaaggtatagttcatataattggacccgaacaaggttttactcaaccaggaaatgtgattgtttgtggagatagccatacggcaactcatggtgcatttggtgcgttagcattcggaattggtacttctgaagttgaacatgtattagcaacacaaacattagttcaaaaaaaagcaaaaaattttataattaatgttaatggaaaacttccattgggagttacatccaaagatgtgatacttcaaattataggaaaaattggaacagctggaggaacaggctgtgttgtagaatatgcaggggatttaatcagatcattaagtgttgagcaaagaatgacaatttgtaatatgacaattgagggtggagctagagcaggattaatagcgccagatgaaaaaatatttgattatttaaaaggaaaaccaatgtctccaaaagcagaaaattgggataaagccattagttactggaatagccttaaaacagacagtgatgcaacttttgataaagagatcaacttagatgctggcgagattttacctatgataacatggggcacatctcctcaagatgtaattgcaattgatgacaaagttccaaatcctgaaaaagaaaaagatgaagataaaaaaaattcaattgaaagagctttaaagtacatgggtttaaaaccagatatggctgcaacagatatcaagatagataaagtttttattggaagctgtaccaatggcagaatagaagatctaagggaagctgccaaaatattgaaagataagaaaatttcatcacatgttagtgcaatagttgttcctggttctggattagttaaagaacaagcagagcaggaaggattagacaagatatttgttaattcaggtttgagggagagag

SEQ ID NO: 283302 - DNA, 667 bp, Unknown
  Bacterial polypeptide expressing nucleotide sequence isolated from the Sargasso Sea
tatgagtactccaaagacattatacgataaaatatggaatgatcatttagtttcagaaaatgaagatggaacatcaatcatttatattgacagacatcttgttcatgaagttacaagtccccaagcctttgaaggactaaaaattgcaaacagatcagttagaaaacctaattttacattagccactgctgatcacaatattcctacaacaaatagagatgagggaatatcagatccagagtctaagttgcaggtagacactcttgaagagaattgtaaggagcacggaattacttttctttctatgtctgataaaagacagggcatagttcatattatcggaccggagcaaggtttcacacaaccaggaatgactatcgtttgcggtgatagccatacttcaacacacggtgccttcggtgctcttgcatggggaattggaacttctgaagtagaacatgttcttgcaactcaaacattggtacaaactaaagctaagaatatgcaaattaatatacaaggtgaactgccactgggtgtcacagcaaaagatattgttctaaagattatacaaacaattggaactgctggaggcactgggtatgttattgaatacacaggtgatgcgatcaaatccctaacaatggagggaagaatgactgtctgt

SEQ ID NO: 283303 - DNA, 883 bp, Unknown
  Bacterial polypeptide expressing nucleotide sequence isolated from the Sargasso Sea
agtagatgttttgcgaataactgtaaagaatttgatgttgagttatttgatatgaatgataagcgccaaggtattgttcatattattgggccagagcaaggatttactcaaccagggaccgtaatagtttgtggagatagccatactgctactcacggagcatttggagctttagcatttggaattggaacttcagaggttgaacatgtgttagcaactcaaacattaatacaaaaaaaatcgaaaaattttagagtaaatgtaaacggaaaattgccgttaggagtcacagctaaagatgtgatacttaaaattattggtactataggaacagccgggggtactggatatgttatagaatttgctggagaagtaataagaggtttaagtatggaagaacgaatgacagtttgcaatatgactatagaagcaggtgcaagagcaggattaatagctccagatgaaaaaacttttgattatttaaaaggaaaaccgaaatcaccaaaagaagaaaaatggaaaatggcattagaaaattggaaaaaactttattcagatgaaggttgtaactttgataaagaaataaatattaatgcaaaagaaattgagcccttagttacttggggaacttctccacaagatgtttcaccaatatctggaatagttccagatcctgaaaaagagaaagataaggataaaaaggtagctatgtacagatctctagagtacatggggcttaaaccaaatatgaaaattactgatattaaagtagataaaatatttattggaagctgtaccaacggtagaattgaggatttaagggaagctgcaaaaatccttaagggaaaaaagatagctaataatgttagtgctatggttgttc

SEQ ID NO: 283304 - DNA, 859 bp, Unknown
  Bacterial polypeptide expressing nucleotide sequence isolated from the Sargasso Sea
atttggagctttagcttttggaataggaacctcagaagttgaacatgttttagctactcaaactttagtacaaaaaaaatctaaaaattttagaattaatgtaaatggaacattgccaataggtgtaacagcaaaagatgtaattctacaaattataggaaaaattggaacagctggcggcacaggctatgtaattgaatatgcaggaaacttaatttccactcttagtgtagaaaaccggatgacaatctgtaacatgactattgagggtggagcaagagcaggtttaattcaaccagatcaaaaagtttttgattatttaaaaaataaaccaatgtccccaaaaaaggataattgggaaaaagctgtagaatattggagtaaacttaaatctgacgatgaagcttattttgataaggaaataaatttagagggaaaagatattaaaccgatggttacatggggaacttctccacaagacgtagttacgattgatggaaaagttccaaatccaaataatgaaactgatccagataaaaaaaactcaattgaaagatcgttaaaatatatgggtttaaattctgatatttcagttaaagatattaaaattgataaagtttttattggaagttgtacaaatggtagaattgaagatttaagagaagcagcaaaaatattaaaagataaaaaaattgcaaaacatgttaatgcaatggttgtccctggttcaggactagttaaagaaaaggctgagcaagaaggtttagataaaatatttataaattcgggctttgagtggagagaacctggctgctctatgtgtttagcgatgaacgctgataaattaaaacccaggtga

SEQ ID NO: 283305 - DNA, 947 bp, Unknown
  Bacterial polypeptide expressing nucleotide sequence isolated from the Sargasso Sea
aatgtctaaaactctatacgataagatatgggaaaaccatcttgttcatgaacaaagcgatggaacttcattaatttatgtcgatagacatttagttcatgaagttacgagcccccaagcttttgagggacttagattacaaaaaagaaaagtcagaagaccagaattaactcttgcagtgcctgatcacaatgttcctacaaccgacaggtcgaaaggtataaatgatgaggactctagaattcaagtagaaacattaagaaaaaactgtaaagactttggagtagaactttttgatgttaatgacaagcgccaaggcatagtccatattataggacctgaacaaggtttcactcagccaggaacagtaattgtatgtggcgacagccatactgctacgcacggagcattcggtgcattagcttttggaataggaacatctgaagttgaacacgttcttgctacacaaactttaatgcaaaagaaatcgaaaaatttgagaattaatgttaacggtaatttaccaaaaggggttactgcaaaagatgtaatcttaaaaattattggtacgattggaactgcgggtggaactggatacgtagttgaatttgctggcgatgtgattaaaagcttaagcatggaagagagaatgactgtttgtaatatgaccattgaagcaggtgcaagagctggattaattgcaccagatgaaaaaacatttagctatttaaaaggtaaaacaatgtcgccaaaaggtgaaaattggactaaagccgtagaattttggaagactttgtattcagacaaagactgcaaatttgataaagaggtaaatattgatggcaaaaatatagaaccacttgttacttggggcacttcacctcaagatgtgtcaccagttactggtgttgtgccagatccagaaaaggaaaataacgaggatagaa

SEQ ID NO: 283306 - DNA, 904 bp, Unknown
  Bacterial polypeptide expressing nucleotide sequence isolated from the Sargasso Sea
cgcttttggagcactagcatttggtataggaacaagtgaagttgaacatgttttagcaagtcaaactttaattcaacaacctgcaaaaaatatgaaaatttcagttaatggaaatcttaaacctggagtgacagcaaaagatataatacttcatattataggcttgattggtacagctggtggcacaggatatgttattgaatatgcaggtgatgtaattcattcacttagtatggaaggtcgaatgactatttgcaatatgagtatagaagcaggggctagagcaggtttgattgctcctgaccaaactacttttgattatattgaaggtaggccttatgctccaaaaggtcaagactgggataaggcaatagagttttggaaatcattaccatcagatgaaaatgcaaaatacgataaagaaataaatattaaagctgaagagatctcaccacaaattacatggggaacaagtccacaagatgtagttccaataaatggaaaggttcccaacccagaaactattgaggatcttaatcgaaaaaaagctgtagagcgttcattagaatatatgggtttagaaccggatcaagaaattgaaaaaataaaaattgataaagtatttattggttcttgtacaaatggaagaatagaagatttaagagaggttgctagagttgttgagggaaaaaaagtatccgttgattcgatgatagttcctggatctggtttagttaaagagcaagctgagagagaaggtttagataaaatttttattgatgcaggatttgattggagagagcctggctgctcaatgtgtctggcaatgaatccagatcaactaaaaccaaaagaaagatgtgcatcaacatcaaatagaaattttgaaggaagacagggtaga

SEQ ID NO: 283307 - DNA, 985 bp, Unknown
  Bacterial polypeptide expressing nucleotide sequence isolated from the Sargasso Sea
gaaggtctaaagatagctggcagagagccctggagaatatcttcaaatatcgccacaccagatcataatgtccctacaacagatcgggaaaagggaattgaaggcatagaagacaaagtagcgaaacttcaagtaacaactcttgataagaactgttctgagttaggcattcttcaatttgatattttagataaaagacaaggcattgttcacgtaattgggccagaacaaggagttactttgccaggtatgactttggtttgcggagattctcatacatcaactcatggtgctttagctactcttgcaattggtataggaacatcagaagtagaacatgtattagctacacaatgtctaaaaacttccaaattaagaaatatgaaagttgtaattgatggggaactgtctcctggtgttacacccaaggacgttactttagctgtaataggaaaaataggaacagcgggtggtacaggctttgcaattgaatattctggatctgccatagaggctatgagcattgaaggtaggatgactgtatgcaatatgtctattgaagcaggagcaagggtaggcttagttgcctttgataatattactgaggaatatgtaaaaaatagaccctttactcctaaaggagatgagtgggaattagctttatctcaatggaaagagttaaaaagcgatgacgatgcacattttgaagaaataatttatttagacggatcaactcttaaacctcaggttacttggggcacttctccggagatggttatagacattgatggaaagattcctgaagctaattctgagtctatacagcatgcgttggaatatatgaacttagaatctggaatgaagatttctgatattaaattagatcaaatttttataggctcatgtacgaattctagaattgaagatttaagaatggctgcaaaagttgttgtagggaagaaaattcatctgagattagagagct

SEQ ID NO: 283308 - DNA, 638 bp, Unknown
  Bacterial polypeptide expressing nucleotide sequence isolated from the Sargasso Sea
tatggataaaacactttttgataaagtttgggattctcatgtaattgaaagaattaaagatgggcctgatgttctatttatagacaaacactttatacatgaagttactagtcctgttgcatttgttggactaaaaaatagaaatcttaaagttatgtatccccatagaacctatgctacagctgatcataacactccaacaatcaatcaacatctaccgattaaagacagactttcagcaatgcaagtaaaaacactggaaaaaaattgcaaagaacatggaattgatttctggggacttggtcataaaaaaaatggaattgtacatgtaattggaccagaaaatggtattactcaacctggcttaacaattgtatgcggagactcacacacatcaactcatggtgcttttggtgcaattgcttttggcattggaacttcagaggttgaaatggttttggcttgtcaaacaataatgcaacaaaaaccaatgaaaatgagaatcaacgtagatggtaaactttctcctaacgttactccaaaggatgtggctatttatataatttcaaagttgtcttcttcaggtgctactggatattttattgaatatgctggaagtgtatttaagaatatgtcta

SEQ ID NO: 283309 - DNA, 568 bp, Unknown
  Bacterial polypeptide expressing nucleotide sequence isolated from the Sargasso Sea
atgcccaatactctttacgataaaatttggaacgaacatttagttcatcagcaagaagatggaacagctttattgtttgttgacagacacttagttcatgaagtcactagtccgcaagcctttgagggattaagaaattctaaacgtcatgtaagacacccaaaattgacattagctgtcgcagatcataatgttccaacaacggataggtcaaaaggtatttcagaccatgaatctaaaattcaagttgaaactttagaggctaattgtaaagagtttggtattaaactttttggaatgagcgataagagacaaggaattgttcatgttacaggacccgaacagggttttactcaacccggtacagttattgtatgtggcgatagtcatacagcaacacatggtgcatttggtgcactagcttttggtattggaacttcagaagtagaacatgttttagcaactcaaacattagttcaaaaaaaagcaaagaattttagaataaatgtcaacggaacacttccattaggtgttacatcaaaagatgtaattcttcaaataatggaaa

SEQ ID NO: 283310 - DNA, 427 bp, Unknown
  Bacterial polypeptide expressing nucleotide sequence isolated from the Sargasso Sea
cttgcaacctgggaaaaaaataaaagatattaagctagatcagatttttataggttcgtgtacaaactcacgaatagaagatttaagagaagcagcaaaagtgcttgaaggcaagaagatttctgaatcaattaagagggctattgtagttcctggttcgggtcttgtttctcaacaggccatagatgaaggtttagataaaatatttattgactcaggctttgaatggagagcccctggttgctcaatgtgcttagccatgaacccagatcaactgggagatggtgagcattgtgcctctacttcaaataggaattttgagggcagacaaggctatggaggaagaactcatcttgtatctcctgtcacagcagcagcttcagctgttgaaggacattttgtagatgttagggagtatttattatga

SEQ ID NO: 283311 - DNA, 541 bp, Unknown
  Bacterial polypeptide expressing nucleotide sequence isolated from the Sargasso Sea
tgttttagctactcaatgtttgaaaacctcaaaactaaaaaatatgagggttaacatttcaggtgagctgcaagaaggtgtcactccgaaggacgttacattggcagttattggaagaattggaaccgcaggaggaactggttatgccatagaatatgctggttcagtcatcgaaaatatgtcaattgaaggaagaatgactgtatgtaatatggcaattgaagctggagctagggcaggacttgtagcatatgatcaaataactgaagcttatataaaagataggccatttactccaacaggagaacaatggttggtagcaaaagagcaatggcaagatcttgtcagcgatagcgaagctaaatttgataaagagattgaaattgatggatcttttatagcacctcaggttacttggggaacttcaccagaaatggtcagtgatattgatggtgtaatacctgagcctaatagcgaatctattagacatgctctgaactatatgaaccttgcaacctgggaaaaaaataaaagatattaa

SEQ ID NO: 283312 - DNA, 601 bp, Unknown
  Bacterial polypeptide expressing nucleotide sequence isolated from the Sargasso Sea
aaatttaataaattaaaaagtattccagcttatttaccaattgtaaatattgatactgatatgataattccaaagcagtttttaaaaactatcaaaagaactggtctaggaaaaaatttattttttgaaatgagatatgatgatcaaggcaaagaaataaatgattttgtgttaaacaaagatccatttaatcaatctaaaattttaattgctgggaaaaattttggatgtggctcatcaagagaacatgctccttgggctttattagattttggaattacttgtgtgataagttcaagttatgcagatattttttttagtaattgttttaaaaatggaattttgcctataatccttgaagaagaaaaaataaaagagctatctgaatacgcaaatagacaagaagaaatttctattgatttgcaagaggaaaaaatagtttacggaaataatgagctaaaatttgaagttgatccatttaagaaaaaatgtttgttagaagggcttgatgatatcgctttatcactaaaaaaatcagaaaaaatagaaaagtttgaaacaaatttaaaaaacgaaaagccttgggtatttaatgattaaa

SEQ ID NO: 283313 - DNA, 214 bp, Unknown
  Bacterial polypeptide expressing nucleotide sequence isolated from the Sargasso Sea
aatgccaaaaactttatacgataaaatttgggatgaccatcttgtctttgaacaaaatgacggtacttcattattatatgtggatagacatttggtacatgaagtaacaagcccacaagcttttgaagggctaaggttaaataaaaggaaagtaagaaaacctaattttactttggcagtcgctgatcataacgtacctacaacagatcgaaca

SEQ ID NO: 283314 - DNA, 505 bp, Unknown
  Bacterial polypeptide expressing nucleotide sequence isolated from the Sargasso Sea
aatgtcacaaacaatttacgataaaatttggaatgatcatctggttcatgaacaaaaagatggaacttcccttctttttgttgatagacatttaatccacgaggtaacaagtccacaagctttcgaaggactaagaacatctaacagaaaggttagacaacccaagttaacacttgctgttgctgatcataatgttccaacaactgatagatcaaaaggaatatcagacgaagactctagaattcaagtagaaactttagataaaaactgtaaagagtttgacatacaactgtttggtatgaatgataaaagacaaggcattgttcatataattggtccagaacaaggatttactcaacctggaaatataattgtttgtggagatagccatactgctacacatggtgcatttggtgctttagcatttggaataggaacatctgaagtggagcatgttttggcaacacaaacattggtgcaaagaaatcaaaaaattttagaataa

SEQ ID NO: 283315 - DNA, 760 bp, Unknown
  Bacterial polypeptide expressing nucleotide sequence isolated from the Sargasso Sea
gatgacaataaataatcctaaaactctttttgataaaatttgggaacatcatcttgttgatagacaagaagatggaacttgtcttatatatattgatagacaccttgttcatgaagtcacgagccctcaagcatttgaaggtttaagaaataataatcgtaaagttagaagacccgaaagtacttttgctgtagctgatcacaatgttccaacctcagatagatctaaaggtatagaaaataaagaaagtagaattcaggttgaaacactagaaaaaaattgcaaagattttgatgttacactttttccattattagatagcagacaaggtatagttcatatagttggaccagaacaaggcattacgcagccaggtatgacaatagtttgtggtgatagtcatacagcaacacacggagcatttggtgccttagcttttggtatcggcacaagtgaagttgagcatgtattagctacccagaccttaattcaaaaacctgcaaagaatatgcgaatttctgttgaaggtaaattaaacttaggtgttacagcaaaggatattattcttcatataataggaaggataggaacagctggtggaactggttatgttattgaatatgctggtaatgcgatttcctctctttctatggaaggaagaatgacaatctgcaatatgagtatcgaagcaggtgctagagctggtttaatcgctcctgacgaaaaaacttttgaatatattaaaggtagaccatacgct

SEQ ID NO: 283316 - DNA, 521 bp, Unknown
  Bacterial polypeptide expressing nucleotide sequence isolated from the Sargasso Sea
tatgggtaaaacactttttgataaagtttgggattctcatgtaattgaaagaattgaagatgggcctgatattctatttatagacaaacactttatacatgaggttaccagtccagttgcatttgttggactaaaaaatagaaatctaaaagttatgtatccccatagaacttttgctacagctgatcataacactccaacaattaatcaacatttacccattaaagatagactttcagcaatgcaagtaaagacactggaaaaaaattgtaatgaacacggaattgatttctggggacttggtcataaaaaaaatggaattgtacatgtaataggaccagaaaatggaattacacaacctggcttaacaattgtatgcggagactcacacacatcaactcatggtgcttttggtgcaattgcttttggtattggaacctcagaggttgagatggtcttggcttgtcaaacaataatgcaacagaaaccaatgaaaatgaaaattaacgtagatggtaaac

SEQ ID NO: 283317 - DNA, 949 bp, Unknown
  Bacterial polypeptide expressing nucleotide sequence isolated from the Sargasso Sea
gatgtcagaaacactttatgataaaatttggaatgatcacttagttgatcaacaaaatgacggtacagcgttaatatttgttgaccgacatttagttcatgaagtaacaagtcctcaagcttttgaggggctaagaaattctaaaagaaaagtgagacatccaaaactgaccttggcagttgctgatcataatgttccaactactgatagatcaggcggtatttctgataaagactcaaaaattcaggttgatactttgatgagtaattgtaaagaatttggtattgagctttttgggatggatgacaagcgacaaggaattgtgcatattatcggacctgaacaaggatttactcaacctggtacagttattgtttgtggagatagtcatacagcaactcatggagcttttggtgctttagctttcggaattggaacctcagaagtagagcacgttttagctacacaaacattggttcaaaagaaagctaagaattttagaattaatgtgaatggaaaacttccattaggggtaacctcaaaagatgtaattttacaaataatcgggaaaatagggacagcaggtggaacaggatgtgttgttgaatatgcgggagatttaattagttcgctaagtgtcgagcaaagaatgacaatatgcaatatgacaattgaaggtggtgcaagagcaggattaattgcaccagatgaaaaagtatttaaatatctaaaaggacggccaatgtccccccagggtgaaaagtgggataaagcattggaatattggcaaagtttaaaatcagatcagagtgcgacttttgataaagaggtaaatttaaaagcaagtgaaattttacctatgattacttggggaacatcacctcaagatgtaattactattgatggcaaaataccaaatccaagtaatgagaaagagaagataaaaaaa

SEQ ID NO: 283318 - DNA, 424 bp, Unknown
  Bacterial polypeptide expressing nucleotide sequence isolated from the Sargasso Sea
atgtctacaacattatacgataaaatttggaacgatcatctagttgatcaacaagatgacggcacatctttactttttgtagatagacatttaattcatgaggtgacaagcccccaagcttttgaaggattaagaaattcaaacagaaaagttagacacccaaatttaactttagcagttgcagatcataatgttccaacaactgacagatcaaaaggtatttcagatgaagagtcaaaaattcaagtagatactttagaggcaaattgtaaagaattcggtgttcagttatttggtatggatgataagaggcaaggtatcgttcatattataggacctgagcaaggttttactcaaccaggtacagttattgtttgtggagacagtcatactgcaacgcatggagcatttggtgctttagcat

SEQ ID NO: 283319 - DNA, 901 bp, Unknown
  Bacterial polypeptide expressing nucleotide sequence isolated from the Sargasso Sea
atgaagactttatacgacaaactctgggaagagcatcatgtcacccaactcgattcgggagagtcacttttatatattgatagacattatttgcatgaagtaacatctcctcaggcatttgagggactagttaagaaaaatttaaagccttggaggcttaatgccaacattgctactcctgatcataatgtacctacaacaagaggtaataattttaattctgaatcaataactgatgaaatttcaaagattcaagtagttgaattggataagaattgtaataaatttggtattaaacaatttgatattgagtcaaataaacagggtattgttcatgttataggacctgaattaggttttactattcccggaatgactattgtttgtggagattcacacacatctacacatggagctcttggttgtttagctatgggtataggaacttctgaagttgagcacgttcttgcaacccagtgcctaaaagtttctaaattaaaaaatatgaatgttagatttgaaggagaggtagatgagcatgtttcctcgaaagatattgtcttatatttgattggacaaatcggtactgctggtggaactggttacgccatcgaattttcaggatcttacataagtagcatatctgtcgagggaagaatgactatttgcaacatggccattgaagcaggggctaaggttggattaattgccccagacaataaaactattgagtatgttaaaagtaaatcatttcttgatgatgacacttttaatcatgcaaaagagtattggaaaactctaaagtcagatgatgatgcaaaatttgataaagaaataactatagatgtatcaaaaatcaaaccacaagtcacatggggtacttcacctgagatggtatgaa

SEQ ID NO: 283320 - DNA, 402 bp, Unknown
  Bacterial polypeptide expressing nucleotide sequence isolated from the Sargasso Sea
aggaattgagcgatttagatttcgataaagtattcattggatcatgtactaattctcgaattgaagatctaagagaagccgcagaagttttaaaaggtcaaaaggtatctgaaaatatccatgaagctattgttgttccagggtctggaatggttaaagaacaagctgagaaggagggaattcataaaatattcattgatgctggatttcagtggagggcaccgggttgttctatgtgtttaggcatgaatccagaccaattaagtccctatgaaagatgtgcttcaacttcaaataggaattttgagggtcgtcagggtaacttaggtagaacgcatttaatgagcccaaagatggctgctctaaccgcaataaacggaaggattgtaaaagagatttaag

SEQ ID NO: 283321 - DNA, 577 bp, Unknown
  Bacterial polypeptide expressing nucleotide sequence isolated from the Sargasso Sea
atgaaagattttattgaaggcattgtagctccaattgatagagataatatagatactgatcaaattatcccaacagaatatttaaaatctattaaaaaatttggatacgaggattatctttttgatggctggagatataaagatcagggtcgtcttggaatgaaaaaggctgaaagaaaaatcaatcatgagttcattcttaacaattcgccttatgataaatcaaaagttttgcttacaagagataattttggatgcgggtcaagtagagagcatgcagtttgggctctcagagactttggtattgaagttgttatagcaagctcatttggcgatattttttataataattgtttcaaaaatggtgttttaccattaaagctcaaaaaaactgaaattgaagaactattttcattgtctacagataatccagtaactatttcagtaaatataaaagataaagttatactttttaaagataagctctctatttattttgatcttgatgataatttggctgaaagaattatttatggccttgatgagatcgatattactcttaaagattcaaactaat

SEQ ID NO: 283322 - DNA, 964 bp, Unknown
  Bacterial polypeptide expressing nucleotide sequence isolated from the Sargasso Sea
aatggtaatatgtctaatatatattgatagacatcttgttcatgaagtaactagtcctcaagcatttgaaggattaagactcaataacagaaaagttaaattcccagaattcacgcttgcagtagcggatcataatgttcccacaactgatagatcaaaaggaattgaaaacaaagaatctgcgctccaggtagaaacgttagaaaaaaattgcaaagataacaatattgaattttatggtcttactgatgttagacaagggattgtacatgttataggaccagaacaaggttttacacagcctggaatgacaatagtatgtggcgatagccatacagctactcatggggcattcggagcattagcatttggtattgggacttcagaggtagaacatgttcttgcgactcagacattaatacaatcaaaatctaaaaatatgaaaatagaggttaatggaaatttaccaaacggagtaactgctaaagatataattttaaatattattggaaaaataggtactgctggtggtacaggttacgtcatagagtatgctgggcaaacaattaaaaatctctctatggaagaaagaatgacaatctgtaatatgtctatagaagccggcgcaagagcaggcttggtggcaccagacgaaaaaactataaattttattaaaggtaaaccgatggcgcctaaaggtgataattgggataaagcaaaagaattctggttatctttaaaatctgatgataacgcaaagtttgatagaattgaaaaattacaagcagaagaaattattccatcagttacatggggcactagtccgcaagacgtattaccaataaactcaagagttcccacacccgataattttaaagatgaagataaaaaaaaatctgtaaaaagagctttagattatatgggctttttgggaaatgaaaaactcgatgaggtaaaaattgat

SEQ ID NO: 283323 - DNA, 949 bp, Unknown
  Bacterial polypeptide expressing nucleotide sequence isolated from the Sargasso Sea
gtgtcccaacatcgaacagactatttgggaataaaagatcctctttcaaaaattcaaattgaagctttagaaaagaattgtgaggaatttggagtcactctttttggaattaatgatccccgtcaaggaatcgttcacgttataggacctgaacaagggattactcaacctggaatgactattgtgtgtggagatagccatacagcaacacatggtgctttcggagcattagcatttggaattggcacttcagaggttgaacatgttctagctactcagactttagcgatggaaaagccaaaaacaatgaaggttgaagttattggagatgtctcagatggagttggacctaaagatattattttaggcatcatcagaaaaattggaactggaggtggcgccggtcatgtaattgaatacgttggtgatgttataaaaaatatgagtatggagaatagaatgacaatttgtaatatgtcaatcgaaggtggagcaagagcaggaatgattgctccagatgaaactactttcaattatttaaaagataaaaactatgctcccaaagactctgattggaatgatgcaataaatgagtggggtgaacttttttctgatgatgacgctgcttttgataaagttgtaacaataaatgctggggagcttgaaccatcagtttcttggggtacaaatccatcacaagttatattcataaatgacgaaattccacatcctgataattttcaagacgaatcagataaagaagcagcaattagagctttagagtacatggatttagagcccggaataaagattaatgaaatcagtttagatagggtgtttataggcagttgtaccaatggtcgtattgaggatttaagagaggcggcccaagtcataaagggcaaaaaagtatcagagactgttggtgccatggttgttcctgggtcaa

SEQ ID NO: 283324 - DNA, 319 bp, Unknown
  Bacterial polypeptide expressing nucleotide sequence isolated from the Sargasso Sea
tactcctgttgatgtttgtttcataggtagttgcacaaatggaagaatcagtgacttaagagttgcagctaaagtattaaaaaacaaaaaggtatccaagaatgtcaaagcatttgtagttccaggttcagaaaaagtagccactgaagcaaaacaagaaggtcttgataaaatatttaaggattctggattccaatggagagagcctggctgctcaatgtgtttagcaatgaatgcagataagctaataggtaatcaagtaagtgctagttctagtaatagaaatttcaagggtaggcaaggatctcctagtggaagg

SEQ ID NO: 283325 - DNA, 634 bp, Unknown
  Bacterial polypeptide expressing nucleotide sequence isolated from the Sargasso Sea
taatcatgcaaaagagtattggaaaactctaaagtcagatgatgatgcaaaatttgataaagaaataactatagatgtatcaaaaatcaaaccacaagttacatggggtacttcacctgagatggtattgaattatgatgaatcaattccaacagtatttgataccaaagatgaaaacaagaagaatgttgagttggcaagagactatatgggcattgaaaatgaaacaaaattatctgatttaacattcgataaagttttcattggatcatgtacaaattctagaattgaagatttaagacaagctgctgaaatagttaagggtaaaactatcgcatcaaatatttcagaagctattgttgtgccaggatctggccttgttaaagaacaagcagaaaatgaaggattagataaagtttttactgatgcaggttttatttggagagatcctggatgttcaatgtgtctcggaatgaatccagatcaactcaagccttatgaaagatgtgcgtcaacctcaaatagaaactttgaaggaagacaaggatacttaggtaggactcatttgatgagtccaattatggcagcctatacagcaattaatggaactataggagacccttatgaaatctaa

SEQ ID NO: 283326 - DNA, 431 bp, Unknown
  Bacterial polypeptide expressing nucleotide sequence isolated from the Sargasso Sea
taaaccatatactgaatctaaaattcttctcggaagagataattttggatgtggttcatcaagagaacatgctgtctgggctttgagagattttggtataaaggctgttattgcatcttcatttggtgatattttttacaataattgttttaaaaatggagtattgcctatcaaattagaaaaagaaaatattgagagactttttgaccttgttaagaataaagctgttgaattttcaataaatctccaacaaagaataattcatttaaatgataaagataaaattaagtttaaagtagatgctcatttgattgatcgaataatatttggtttggatgatgttgatataagtttaaaagaaaaagataaaattatgctttttgaaaaaaatagaaaaatttcaaaaccatggatatatgtaaatgagtaaa

SEQ ID NO: 283327 - DNA, 850 bp, Unknown
  Bacterial polypeptide expressing nucleotide sequence isolated from the Sargasso Sea
aatgccatatacaatttacgataaaatttggaatgaacatcttgtaaacgaacaagatgatggaacatcattactttttgttgatagacacttaatccatgaagtaactagcccacaagcatttgaaggtttaagaaattcaaaaagaaaagttaggcaacctaaacttactttggccgtagcggatcataatgttccaacaacggatagatcaaaaggaatttcagatcatgaatcaaaaatacaagtagaaacgttagatacaaattgcaaagaatttggaattcaaatttttggaatgaacgataaaagacaaggcatagttcatatcattggtccagaacaaggttttacccagcccggaaccataattgtttgtggtgatagtcatacagcaactcatggagcatttggagctttggcatttggtataggaacttctgaagtagagcatgtattagctacacaaactttagtccaaaaaaaatcaaaaaacttcagaattaatgtaaatggaaatttaccaattggtgtaacttcaaaggatgtaatcttacaaatcataggtaaaattggaacagccggtggaacaggttatgtcattgaatatgcgggagatttaatttctaatctaagtgtcgaaaatagaatgacaatttgtaatatgacaatagaaggcggagcaagagcaggtttaattcaacctgatcaaaaagtttttgattatttaaaggataaaccaacgtcgcctaaaaaagaaaactgggaaaaggcgatagaatattggagtaatcttaaatctgacgaaggggctaattttgataaagaaataaatttgagtggaaatgat

SEQ ID NO: 283328 - DNA, 423 bp, Unknown
  Bacterial polypeptide expressing nucleotide sequence isolated from the Sargasso Sea
ttttagatacaagaccttttaataattcaaaaatactgataactggaaaaaattttggatgcggttcatccagggaacatgcgccttgggctttacttgactttggaattaaggttatcataagcgaaagttttgctgatattttttataataattgttttaaaaacggaatacttccaatagttgcaaaaaatgaaattattaacgaacttaaagactactctcaaaggaaagaaaatatcgaggtaaagcttgaagaacaagaaattgtttatggaaataaaatttttaagtttgaattagatatctttaaaaaaaagtgtcttcttgaaggattagacgatatagctttatcattaaaaaaattaaaaaatatagaaaattttgagaataaaatatctcaaaataaaccttggttataag

SEQ ID NO: 283329 - DNA, 754 bp, Unknown
  Bacterial polypeptide expressing nucleotide sequence isolated from the Sargasso Sea
gatgactgtttgcaatatgactatagaagcaggagctagagcagggctaatcgcaccagatgataaaacattcaaatatttaaaagacaagacaatgtcacctaaaggagaaaattgggataaagcaatcaattattggaaaactcttttctctgatgatgactgcaaatttgataaagaaattataattgaagcaaaagaaattgaacctttagttacttggggaacttcgccacaagatgttttgcctattactggaatggttccagaccctagtaaagaaagtgatgaagatcgaaagatggcaatgaaaagatctttagaatacatggggctaaaagcaaatactaaaatatccgatattaagatagataaaatatttatcggtagttgtactaatggtagaatagaggatttaagattggccgcaaaccttttaaaaggaaaaaaaatatcaaaaagtgtaagtgctatggttgttccaggttctggtctagtaaaagcacaagctgaagaagaaggattagacaaaatatttaccgatgctggatttgaatggagagaacctggttgttctatgtgccttggaatgaatcctgatcaattgaaaccaaaagaaagatgcgcatcgacgtctaatagaaattttgaaggaagacaaggcagaggaggaaggactcatttagtaagcccaggtatggctgtagcagcagcaattaagggtcatttaacagatgttagagaaattcaataa

SEQ ID NO: 283330 - DNA, 943 bp, Unknown
  Bacterial polypeptide expressing nucleotide sequence isolated from the Sargasso Sea
agtacttttgctgtagctgatcataatgttccaacttcagatagatccaaaggtatagaaaataaagaaagtagaattcaggttgaaacactagaaaaaaattgtaaagattttgatgttacactttttccattattagatagcagacaaggtatagttcacatagttggaccagaacaaggtattactcagccaggaatgacaatagtttgtggtgatagtcatacagcaacacacggagcatttggtgcattagcttttggtattggcacaagtgaagttgagcatgtattagctactcagaccttaattcaaaaacctgcaaagaatatgcgaatttctgttgaaggtaaattaaacttaggtgttacagcaaaagatattattcttcatataataggtaagataggaacagctggtggaactggttatgttattgaatatgctggtaatgcgatttcctctctttccatggaaggcagaatgacaatttgtaatatgagtattgaagcaggtgctagggctggtttaatcgctcctgacgaaaaaacttttgaatacattaaaggtagaccttacgctccatcaggagataattggaataaagcgttagaattttggaaatctcttccatctgatgagggcgtaaaatatgatgaagaaattttaattaatgctcaagatatttcaccacaaattacttggggcacaagcccacaagacgttgttgctataaatggtatagtaccaaatcctcaagaagagagtaatccaaatagaaagaaggctatggaacgttctcttgaatatatgggcttagaacccaaacaagaaatacaaaaaattaaaattgataaagtgtttattggctcttgcactaatggaagaattgaggatttaagagaagtggctaaagttgtagaaggcaaaaaagtttctgtag

SEQ ID NO: 283331 - DNA, 586 bp, Unknown
  Bacterial polypeptide expressing nucleotide sequence isolated from the Sargasso Sea
acattcagatccagaggctaattttgacaaagagatacaaatatttgtttcgagtttaaagccccaagtaacctggggaacttctccagaaatggttatagatatcgattctgaaataccttgtccaagaaatgaatccgaaaagcttgctcttgaatatatgggcctacaagaaggcatgaaaatggaagaaataaaactagatcaaatttttattggttcctgtactaattcaagaatagaagatttaagagttgcctcttctatagtgaagggtaataaagtgagtagtaatataaaaagagcgatagtagttcctggttcaggactagtcgatcaacaagcaaaagaagagggtattgataaaatatttactgaagcaggatttgaatggcgatctcctgggtgttctatgtgtttaggaatgaatccagatcaaataagtgaaggccagcattgcgcttcaacatcaaatagaaattttgaaggtagacaaggttataaaggtaggacccatttagttagtcctgcaactgcagctgcttcagctctttctggaaattttgcagacccaagaggatcttag

SEQ ID NO: 283332 - DNA, 631 bp, Unknown
  Bacterial polypeptide expressing nucleotide sequence isolated from the Sargasso Sea
aatgtcaaaacctcgtactttatttgataagatttgggaagcacatcttgttcattcagatccagatgcagctagtataatttatattgatagacacttggttcatgaagttacaagccctcaagcttttgaggggctgagaaattcaaatagaacagtaaggtcaccagaaagaacccttgctgttgctgatcataatattcccacatctgatagagataaagggattactgacaatgaatctagaatccaagttgaaactttaggcaaaaatgcaagcgatttttctattccttactttaagatggaagacattagacaaggtattgttcatgttattggaccagaacaaggttttactcaaccaggtatgacaatagtttgtggagactctcatactgcaactcatggtgcattcggtgcgcttgcatttggaataggtacatcagaagttgagcatgttcttgcaacacaaacactaattcaaaaacctgcaaaaaatatgcttgttgaggtaaatggtgatcttcctaaaggtgtaactgcaaaagatataatattagaaattattggtagaattggtacagctgggggtactgggtatgtgattgagtatgctggttcagctatt

SEQ ID NO: 283333 - DNA, 706 bp, Unknown
  Bacterial polypeptide expressing nucleotide sequence isolated from the Sargasso Sea
atgaaaactttgtacgacaaactctgggaagagcatcacgtaatacaactagattctggtgagtctcttttatatattgacagacattatttacatgaagtcacgtctcctcaagctttcgagggtttagagaaaaaaaatcttgcaccatggagattaaatgcaaatattgctactccagatcataatgttccaacaattagaggtaaaacctttgacgttgatcaaattgatgacaacatatcaaaaattcaggtagtagaactcgacaaaaattgtagtaaatttggcatcaaacaatttgatattacttccgaaaatcagggtattgttcatgttattggacctgaactaggatatacacttcctggaatgactatagtatgtggtgattctcatacctcaactcacggtgcttttggttgtttggctatgggtattggtacttctgaggttgaacatgttctagcaactcaaacattaaaaacaacaaagcttaagaacatgcgagtatgttttgaaggcagtcctaatgaagagattacatccaaagatatagtcttatatcttattaggaaaattggaacagcaggaggaaatgaacacgctatagaattctcgggatcttatataaaaagtatttctatggaagctagaatgacaatatgtaacatgtcaattgaagctggagcaaaggtggattaat

SEQ ID NO: 283334 - DNA, 694 bp, Unknown
  Bacterial polypeptide expressing nucleotide sequence isolated from the Sargasso Sea
atgtcattcaccctatacgataagctatggaatcttcatgaggtctctcgaagagaagacggcacctatctcttatatatagatagacatttgattcatgaagttacatcccctcaagcatttgaaggattgaaattagctggccgtaagccttggagaatatcagctaatattgcaacacctgatcataatgttcccacaactgacagggacaagggaatagctggtataaatgacgatgtatcaaaacttcaagtggtcactttagatgataattgtaaagagcatgaaatactgcagtttgatattcatgataaacgccagggcatagttcatgtggttgggcctgaacaaggattaactttacccggcatgacaattgtttgtggagattctcacacctctactcatggggcattggcgacactttcaatgggtattggcacttccgaagtggaacatgttttagctactcaatgtttgaaaacctcaaaactaaaaaatatgagggttaatatttcaggtgagctgcaagaaggtgtcactcctaaggacgttacattggcagttattggaagaattgggacagcaggaggaactggttatgccatagaatatgctggttcagtcatcgaaaatatgtcaattgaaggaagaatgactgtttgtaatatggcaattgaagctggagcta

SEQ ID NO: 283335 - DNA, 661 bp, Unknown
  Bacterial polypeptide expressing nucleotide sequence isolated from the Sargasso Sea
aatgcatagtacgctttatgacaaactctggaatgagcattttgtgacttcttttgatacaggtgagtcattaatttatattgatagacattatttgcatgaagtcacctcaccacaggcatttgaaggtttaataaaaaaaaatatcaaaccttggagagttgatgcaaatattgctactcctgatcataatgtgcccactcttaggacagaaggttttgctatagaatcaattgttgatgaaatttctaaaattcaagtaaaagaactagacaaaaattgtgaccgctttggcattaaacaatttgatattaaatctttaaatcaaggaattgttcatgttataggtccggaattgggttatacacttcctggaatgactattgtttgtggagattcgcacacttcaacacatggagcatttggatgtctagcaatgggtattggcacttcagaagttgagcatgttttagcaactcaatgtttaaaaatatcaaaacttaaaaatatgagagtaaattttgaaggtattccatctcctgacattacctcaaaagacgttattctttttcttattagaacaattggtgtatctggtggtaatggccatgccatcgagtttgccggttcatatattgaaaatatttctatggaagcaagg

SEQ ID NO: 283336 - DNA, 977 bp, Unknown
  Bacterial polypeptide expressing nucleotide sequence isolated from the Sargasso Sea
tatattgacagacatcttgtccatgaagttacaagtccccaagcatttgagggactaaaaattgcaaacagatcagttagaaaacctaattttacattagccactgctgatcacaatattcctacaacaaatagagatgagggaatatcagatccagagtctaagttacaggtagatactcttgaagagaattgtagggagcacggaattacttttctttctatgtctgataaaagacagggcatagttcatattatcggaccggagcaaggtttcacacaaccaggaatgactatcgtttgtggtgatagccatacgtcaacacacggtgccttcggtgctcttgcatggggaattggaacttctgaagtagaacatgttcttgcaactcaaacattggtacaaactaaagctaagaatatgcaaattaatatacaaggtgaactgccacttggtgtcacagcaaaagatattgttttaaagattattcaaacaattggaactgctggaggtactgggtatgttattgaatacacaggtgatgcaatcaaatccctaacaatggagggaagaatgactgtctgtaacatgtcaattgaagcgggagcaagagctggtttaatcagtcctgatgaaaaaacaattgaatacttaaagggtagaccattttctccagcggaaaatgaatatcagtcagcatcagattattggttgtcgctagcatctgatgaaggtgcagcttatgacaaaacagtaaatattgatgcaagcgacatcattccgcaagtcacatggggcacaagtcctgaggatgtagtttcgattgatggattggttccaaaccctgaggatgaaagggatgagacaaagaaaaaatcaatgattagagctttggaatatatgggtcttgttccgaatacaccacttaaagagattaaagtagataaggtattcattggttcatgtactaatggacg

SEQ ID NO: 283337 - DNA, 862 bp, Unknown
  Bacterial polypeptide expressing nucleotide sequence isolated from the Sargasso Sea
aatgtttgaaaaaatatggaatgctcatcttgttcatgagcaggaaggtaactcgattgtttatatagaccgtcatctggtacatgaagtaacttcaccccaggcatttgatggattaagaatatctggtaggtcagtggttcatccagaattaacctacgcggttcctgatcacaatgttcccaccaaaaatcaggacaaaccaattgaagatccgattgcagctctgcaggtagaaactttgagaaataattgtaaagaattcggaataactctatttgatttgggggacgagcgttcaggaattgtgcatgtaatgggaccagaacaggggctgacgctaccttggtcaactatagtttgtggtgattctcatacagctactcatggggcttttggcgcactggctttcggtattggcacttctgaagtagagcatgttctggccactcagaccttgcagcagaagaagccaaaaaccatgctagttgaagttgagggcatacttccaaaaaatgtaacaccaaaagatattattcttgcaatcattggaaaaataggtactgctggaggtacaggttatgtaattgaatatgcaggagaagcaattcggagcatgtcaatggaggggcgaatgaccctttgcaatatgacaattgaagcaggtgctcgtgctggtatggttgctccagatgaaacaacatttgaatatcttaaggacaagcctttttctcctaaaggggatgctttttttgaagcaatttcagtttggaaaaagctacctagtgatgaaggtgcagaatttgatatttcggtgaatatcaatgcacaggatgtattaccacaggttacatggggaaca

SEQ ID NO: 283338 - DNA, 913 bp, Unknown
  Bacterial polypeptide expressing nucleotide sequence isolated from the Sargasso Sea
gatagagcattgggaattaaagaccctttatcgaagaaacaaatagatgcattagaaaataactgtagtgagtttggaataactatttttggtgtaaatgatccacgacaaggaattgtacatgtaataggtcctgaacaaggcattactcaacctggtatgacgattgtatgtggggatagccacactgctactcacggagcttttggtgcactagcttttggaattggaacttctgaagttgaacatgtattagctactcaaactttggcaatgagtaaaccaaagacaatgaaagttgaagttattggggaaatgaatggaagaataactccaaaagatttaatactagggatcatcagagaaataggaactggtggcggagcaggccatgtaattgaatattccggagaagtaataaaaaaaatgagtatggaaaacagaatgactatatgcaatatgtctatagagggaggtgcaagggcagggatgatagcccctgatgaaacaacatatgaatatctgaaaaataaaaattatgctccaaaagatgaggaatggaaaaatgctattgctgaatggaaaaatctttattcagatgatgatgctgagtttgataaagttgttgaaattaatgtagataaactaaaaccctctatctcgtggggaacaaacccgtctcaagtaatttttattgatgaagaaattccaagcccagatagttttaagaatgatgcagacaaagaggctgcggaaagagcattagagtatatggatttaaagccggggcaaaaaattaacgaaatcccattagatagagtttttataggtagctgcacaaatggaagaatcgaagacttaagagctgcagcaaaaataatcgatggaggcaaggttcatgaaaatattaatg

SEQ ID NO: 283339 - DNA, 906 bp, Unknown
  Bacterial polypeptide expressing nucleotide sequence isolated from the Sargasso Sea
tggtattggaacaagtgaagtagaacatgttttggctactcaaacactaattcaaaagcctgccaaaaacatgcgtattattgtaaatggtgaacttggcttaggtgttactgcaaaagacattattcttcatattattggtcaaattggtacagcgggaggaaccggctatgtcattgaatattcaggagaagctatctccaatctttctatggaaggcagaatgactatttgtaatatgagtatcgaggctggagcaagagctggtttaattgcacctgatgaaaaaacttttgaatacataaaaggaagaccgtatgcaccctctggagataattgggataaggctatttccttttggaaatctttaccatctgatgatggtgcaaaatacgataaagaaatagtaattgatgctaaagagatatcccctcaaattacttgggggactagccctcaagatgtagttgcaattaaaggtaatgttccagatccagataatgaaaaaaaccctgatagaaaaaaagctatggaacgctcattagaatatatgggattagaacctaaacaagaaatacaaaaaattaaagttgataaagtatttattggctcttgcactaatggaagaatagaggatttgcgggaagtggcgaaagtagttaaaggtaaaaaagttacagtcgagtccatgattgttccaggatctggtttagttaaaaagcaggcagaagatgaagggcttgataaaatttttactgaagctggttttgattggagagagcctggatgttcaatgtgcttggctatgaatcctgatcaattaaaaccaaaagagaggtgtgcctccacatcaaacagaaattttgaaggtcgacaaggaagagaaggtagaacacatttagttag

SEQ ID NO: 283340 - DNA, 283 bp, Unknown
  Bacterial polypeptide expressing nucleotide sequence isolated from the Sargasso Sea
aatgcctcaaactttatacgataaaatttggaatcagcacttagttcatcaacaagatgatggtacatctctgctttttgttgatagacatttagttcatgaggtaacaagtcctcaggcttttgaaggcttaagaacatcaaatagaaaagttagacaaccgagtttaactttagcagttgctgatcataatgtacctactactgatagatcaaaagggattgaggatgaggattcaagaattcaagtcgaaacattagaaaaaaatttaaagaattggaat

SEQ ID NO: 283341 - DNA, 658 bp, Unknown
  Bacterial polypeptide expressing nucleotide sequence isolated from the Sargasso Sea
aatgtctaaaacaatctacgataaaatttgggaagaacacttagttcatgaacagcaagatgggacatctttattgtttgtagatagacatttaatacatgaagttacaagcccacaagcatttgaaggattaagaaaatcaaaaagaaaagtaagacaacccaatctaactttggctgtagctgatcataacgtcccaaccacagatagatctaaaggtatttcagatcaagagtctaaaattcaagtagatactttagacaaaaattgtatggaatttggtgttcaattgtttggcatggacgataaaaggcaaggtatagttcacattataggccctgaacaaggttttacacagcctggtacaataattgtatgtggagatagccacacagcaacccacggtgcttttggtgctcttgcatttggaatcggaacctctgaagtagaacatgttttagcaacacaaactttagtacaaaaaaaatcaaaaaattttaggattaatgttaatggcgaactttctcttggggtaacatctaaagatgtgattcttcaaatcattggaaaaataggaacggctggtggaacaggatatgtaattgaatatgctggaaatttaatttcttcattaagcgttgaacaaagaatgacaatt

SEQ ID NO: 283342 - DNA, 643 bp, Unknown
  Bacterial polypeptide expressing nucleotide sequence isolated from the Sargasso Sea
tatgaaatctaatagtgagggattaattatagatggagttgttgcacatatagatagagataacattgatactgatcaaatcatccccacagaatatttaaaatctattaaaaagtttggctttgaagattatctttttgatggttggagatataaagatgatggaaagcttggtgtcacaaaagatgaaagagtgattgatgaaaactttatacttaataaaaatcctttcaatgaatctaaaatacttttaactcgagataattttggatgtggatcatcaagagaacatgcggtttgggcgctgagagattttggtattaaagctgtaatagcatcatcttttggagatattttttataataattcttttaaaaatggtgttctgccaattattttagaaaaaaaagagatagatttcttatttaatcaaactcagcaaaaagttcttgaactttcaataaatttacaaaagaaagaaatcaactgtggtgaaaaaactatttcttttcatgttgataaacatcttgtagatagaattatttatggactagacgatgttgatataactttaaaggaaaaagataaaatctttgattttgaaaggactagaattgaagaaagaccttggatattcaaatga

SEQ ID NO: 283343 - DNA, 239 bp, Unknown
  Bacterial polypeptide expressing nucleotide sequence isolated from the Sargasso Sea
agaaggaatagctcaaaaactgcaggaagctgggtttgaatggagattagcaggctgttcaatgtgtttggctatgaatcctgatcaattaagccctaaagaaagatgtgctgccacatcgaacagaaattttgaaggtagacaggggcgtggtggtagaactcacttgatgagccctgctatggccgcggctgcggcagttactggttttttaactgacgtaagaaatctaatgtaat

SEQ ID NO: 283344 - DNA, 950 bp, Unknown
  Bacterial polypeptide expressing nucleotide sequence isolated from the Sargasso Sea
tcaaggaagaaaagttagaaagccagaatttactcttgctgttgcagatcataacgtaccaacttctgataggagtaaaggtatttctgacaaagagtctaggatacaagtcgaagtcttaaggaaaaattgtaaagaatttggagttgaattgtttgatatgaatgacaaaagacagggcatcgttcatattattggaccagaacaaggtttcactcagccaggttcagttatagtatgtggtgacagtcataccgcaactcatggagcttttggtgcactagctttcggaataggaacttcagaggttgagcatgttttagccacgcaaactctgattcaaaaaaaatcaaaaaattttagaattaatgttaatggaaaattacctgttggtgtgacgtctaaagatataatacttaaaataattggtactatcggaacagctggtggaacaggatacgtaattgagtttgcgggtgaagtaattgaaaatcttagcatggagcaaaggatgacaatttgcaacatgacaatcgaagctggagcgagagcgggattgattgcccctgatgaaaaaacttttgagtatcttaagggaaaaccaaaatctccaaaaggacaaaactgggaaatggcagtgaattactggaaaaaattaaagtctgacaaggacagcaaatttgataaggaaattaatatagatgcgaataaaatagagccattagttacttggggaacatcaccgcaagacgttacatccgtgaatggtcaagtcccggatcctgaaaaagagaatgataaagaaaagaaagattcaatgtatcgttctttaaaatacatgggcttgaaacccaacatgaagatttctgagattaaaatagataaggtctttatcggaagttgcactaatggaagaattgaagatttaaggttagcgacaaaaatttaaa

SEQ ID NO: 283345 - DNA, 607 bp, Unknown
  Bacterial polypeptide expressing nucleotide sequence isolated from the Sargasso Sea
aatgaataaatttatctcaataaaaagtgttccagcttatctacctatcgtcaatatagatacagacatgataattcctaaacagtttttaaaaaccataaaaagaactggactagggaaaaatttattttttgaaatgagatatgatcaaagtggtaaagagatagatgactttattttaaataatagaccatataataattctaaaattttaattgcaggaaagaattttggatgtggctcttctagagaacatgctccttgggctttaatggattttggaataacttgtgtaattagttcaagttatgcagatatattttataataactgttttaagaatgggattctcccaattacaatttcagaggatcagatcaaagaaatttcagagtactcgaatagaaaagaggaaatttctgtaaatttgcctgagcaaacaataagttttggtaataaagaaataaaatttgaaatagatcaatttaagaaaaaatgtctaatagagggattagatgacattgcgttatctctagaaaaatctgaaaaaatagtttcatatgaaaataaaattaaagaggcaaaaccttggatatttaatgattaa

SEQ ID NO: 283346 - DNA, 259 bp, Unknown
  Bacterial polypeptide expressing nucleotide sequence isolated from the Sargasso Sea
atgagtactccaaagacattatacgataaaatatggaatgatcatttagtttcagaaaatgaagatggaacatcaatcatttatattgatagacatcttgttcatgaagttacaagtccccaagcttttgaagggctaaaaattgcaaacagatctgttagaaaacctaattttacattagccactgctgatcacaatattcctacaacaaatagagatgagggaatatcagatccagagtctaagctacaggttgata

SEQ ID NO: 283347 - DNA, 556 bp, Unknown
  Bacterial polypeptide expressing nucleotide sequence isolated from the Sargasso Sea
gtagaaccaaccgtaacctgggggatcactcccggccaaagtgtaagcattaatcaacaaattcctcttttggatgacttatctcctaacgataaattacttgcaaaagaggcttacaaatatatgagtttcaagccgggacaattaataaagaatactcctgtagacgtttgtttcataggtagttgcacaaatggaagaatcagtgatttgagagttgcagcaaaagtattaaaagacaaaaaagtatctaaaaatgtcaaagcatttgtagtcccaggttctgaaaaagtggcccatgaagcaaaacaagaaggtatagatcagatatttaaggattctggatttcaatggagagagcctggctgctcaatgtgtttagcaatgaattcagataagttaataggtaatcaagttagtgctagttctagcaatagaaatttcaagggtaggcaagggtctcctaatgggagaacacttctcatgagtccagcaatggttgctgctgctgcaattaatgggaaagtcagcgacgttagagaattaattaactgat

SEQ ID NO: 283348 - DNA, 406 bp, Unknown
  Bacterial polypeptide expressing nucleotide sequence isolated from the Sargasso Sea
aatgacagatattaaaattgatagaatttttattggaagttgcactaatggaagaattggtgatttaagagaagttgcaaaaattgtaaaggataaaaaagttgcccaacatgttaacgcaatgattgttcctggttcaggacttgttaaacagcaagcagagcaagagggtttagacaaaatttttaaacatgctggatttgattggagagaacctggttgttcgatgtgcctggcaatgaatgcagataaacttaatcccaaggaaaggtgtgcatctacatcaaatagaaactttgagggacgtcaagggcgtggcgggagaacacacttggtaagtcctgctatggccgcagccgcagcagtcgatggtcatttaaccgatgtaagatcacatcaaaattaa

SEQ ID NO: 283349 - DNA, 505 bp, Unknown
  Bacterial polypeptide expressing nucleotide sequence isolated from the Sargasso Sea
tatgaagaaatttaatattttaaaaggaattcctgcaaatttaccaatgataaacgttgatactgacatgattattccaaagcaattcttaaagaccataaaaagaacgggtcttggaaaaagcttattttttgagatgaggtatgatgatcaaggtaaagaaattaaagaatttgtattaaataaagaaccatacaaaagttcaaaaattttgatagttggaaaaaattttggttgtggctcttctagagaacatgccgcttggtcattattagatttcggcattaaatctataataagttcaagttttgcagatatcttttacaataattgttttaaaaatgggatgctgccaattatattagatgagaaaaaaatacagcaattagccgaatattctgagagaaaagaaaatatagaaataaatctacaggatcaagaaattttattcggaaaattcaaaattcaattcgaaatagattcgtttaaaaaaaatgtttattaa

SEQ ID NO: 283350 - DNA, 856 bp, Unknown
  Bacterial polypeptide expressing nucleotide sequence isolated from the Sargasso Sea
aatgtctacaacattatacgataaaatttggaacgatcatctagttgatcaacaagatgatggtacatctttactttttgtagatagacatttaattcatgaggtgacaagtccccaagcttttgaaggattaagaaattctaatagaaaagttagacatccaaatttaactttagcagttgcagatcataacgttccaacaactgacagatcaaaaggtatttcagatgaagagtcaaaaattcaagtagatactttagaggcaaattgtaaagaattcggtgttaagttatttggtatggatgataagaggcaaggtatagttcatatcataggacctgaacaaggttttactcaaccaggtacagttattgtttgtggagacagtcataccgcaacgcatggagcatttggtgctttagcatttggaataggaacttcagaagttgaacatgttttagcaacccaaacattagttcagaagaaagctaaaaattttagaattaatgttaatggtgaacttcctttaggagttacttctaaagatgtaatacttcaaataattggaaaaataggtacagcaggtggaacaggatctgttgtggaatatgctggagatttaataagatctttaagtgttgagcaaagaatgactatttgcaatatgacaattgaaggtggtgcaagagcaggattaattgcaccagatgaaaaaatttttgaatatttaaaaggaaaaccaatgtcaccaaaaagtgaaaattgggataaagctttgaactattgggaaactttaaaaacagactctgatgctagttttgataaagaaattagccttaatgcaaatgaaatttac

SEQ ID NO: 283351 - DNA, 606 bp, Unknown
  Bacterial polypeptide expressing nucleotide sequence isolated from the Sargasso Sea
aatgaattggtcagaatcattaatcgctacagctgcgccattactgatggacaatgttgataccgatcaaattattccttcaagagagatgaagaccatctcaaaaaaaggactgaaaaaaggtttgtttgctaattggcaatacaactatttagacgggaaacagattggaaaaaatgatgattttattctcaacaaaaaagcatttgaagacacaaaaatacttgttagtggaaaaaattttggctgtggctcatccagagagcacgctgtttgggcattaaaagattttggaatcaatgtggtagttgccaaatctttcggacggatttttaaaaataattgtgcacgcaatcagctcctgacaattgagcttgctgatgagtatattgatcacattgttgatttgttagttagaggtgagagtcacaataaaataaccattgacctaaaaaagcagacgctgactacccctgaaaataaaataattaactatgaagttgatccttatttactgggaatgttattaaaaaatcaagatttcattgaccgctcgctgagttacgaagatagtattgatgaatttgttcgtcaggacaaaaaaat

SEQ ID NO: 283352 - DNA, 856 bp, Unknown
  Bacterial polypeptide expressing nucleotide sequence isolated from the Sargasso Sea
gcttttgaaggactaagaaattctaaaagaaaagtgagacatccaaacttaacattagctgttgcagatcataacgttcctactacagatagaacaaaaggtatttctgatcaggagtcaaaaattcaagttgatacgttagaagcaaattgtaaagaatttggagtacaattatttggtatggatgataagagacaaggtattgttcatataattgggccagagcaaggttttactcagcctggtacagttattgtctgtggagacagtcatacagctacacatggagcgtttggtgctttagcatttggaataggaacttcagaggttgagcatgttttagctactcaaacattagttcaaaagaaagctaataattttaggattaatgtaaatggtgaacttcctctaggtgttacttctaaagatgtaatacttcaaataattggaaaaattggtactgctggtggaacaggatgtgttgtggaatatgctggagatttaattagatctttgacagtcgagcaaagaatgacaatctgtaatatgacaattgaaggtggcgcaagagcaggattaattgcacctgatgaaaaaatttttgaatatttaaaagggaaaccaatgtctccaaaagatgaaaattgggagaaagctgtaaattattggcaaactttaaaaacagatactggtgcaagttttgataaagaaattagtttaaatgcagatgaaattttacctatgattacatggggcacatcacctcaagatgtaattacaattgatggaaaagttcctaatcctgacaatgagtcaaaacaggataaaaaaaactcaattgaaagagctcttaact

SEQ ID NO: 283353 - DNA, 577 bp, Unknown
  Bacterial polypeptide expressing nucleotide sequence isolated from the Sargasso Sea
atgtcattcaccctatacgataagttatggaattttcatgaggtctctcgaagagaagacgggacctatcttttatatatagatagacatttgattcatgaagttacatcccctcaagcatttgaaggattgaaattagctggccgtcagccttggagaatatcagctaatatcgcaacacctgatcataatgttcccacaactgatagagacaagggaatagctggtataaatgatgaagtatcaaaacttcaagtggttacgttagatgataattgtaaagagcatgaaatactgcagtttgatattcatgataaacgccagggcatagttcatgtggttggacccgaacaaggattaactttacccggcatgacaattgtttgtggagattcccacacctctactcatggggcattagcgacactttcaatgggtattggcacttccgaagtggaacatgttttagctactcaatgtttgaaaacctcaaaactaaaaaatatgagagttaacatttcaggtgagctgcaagaaggtgtcactccgaaggatgttacattggcagttatggaag

SEQ ID NO: 283354 - DNA, 784 bp, Unknown
  Bacterial polypeptide expressing nucleotide sequence isolated from the Sargasso Sea
agaggcgatccggaatttgtcgatggaagggaggatgaccctctgcaacatgactatcgaggctggtgcacgggcgggaatggtcgcacccgatgaaaaaaccttcgagtatgtgaagggacgggattatgctccccagggcgaggcattcgaaaaagcagtagaggcatggaaaaagctgccttccgatgagggtgcggtttttgacgaaacggtaaaattgaccgccgatgaggtttttccccaggtgacctgggggaccaatcccggaatggtgaccgacatcaacggcaaggttccggatccctccgatatcaatgatcctgcagagagggagtccatccatcgtgctttggaatacatggggctcgaagccaatgtgcccgtgaaggacatccagatcgatcgggtttttatcggttcctgtacgaattcaaggatcgaggatctgagagccgtggcaggatttgtcgaagggaaaaaggtcagcggaagtgttgctgcgatgatcgtccccggaagcggactggtcaagcaacaggccgagtctgaaggtttgaacaccatcttcgaaaatgcggggttcgagtggcgtgaaccgggatgctcgatgtgcctggcaatgaacgacgatgtgctgaaacccggagaacgctgtgcctccaccagcaaccgtaatttcgagggccgacagggtaagggcagtaggacccatctcgtcagcccgatcatggctgccgctgctgcgattgcaggaacttttgctgaccccagaaccctctag

SEQ ID NO: 283355 - DNA, 887 bp, Unknown
  Bacterial polypeptide expressing nucleotide sequence isolated from the Sargasso Sea
taatgttccaacctctgatagaacaaaagggattaaaaataaagaaagcagaatacaagtagaaacactcgaaaaaaattgcaaagattttgatgttacacttttccctctcttagatattagacaaggcattgtacatatagtaggtccagaacaaggaataactcaacctggtatgacaattgtatgtggtgatagtcatactgcaactcatggagcatttggagcactagcttttggtataggaactagtgaggttgaacatgttctagctactcaaactctaattcaaaacccagcaaaaaatatgaaaattgaagttattggaaaacttaatttaggtgttacagccaaagatattattcttcatataataggtcaaattggaactgctggtggtaccggttatgtaattgagtatgcaggcgatactatctccaatctatcaatggaaggtagaatgacaatatgtaatatgagcattgaagctggagcaagagctggattaattgctccagacgataaaacttttgaatatataaaaggaagaccatatgctccagaaggagaaaattgggaccaagctattaagttttggaaatcccttccatctgatgaagaagctatttacgataaacaaattataattcaagctgaagacatttctcctcaaattacttggggtacaagtccccaggatgttgttgcaattaatggtgaagttccaaatccaaatgaagaaagtaatccaagtaggaaaaaagcaatggaacgctcgatagaatatatggggttagagccaaaccaagaaattcaaaaaataaaaattgataaagtatttataggatcatgtaccaatggaagaatagaggatttgcgtgaagtag

SEQ ID NO: 283356 - DNA, 572 bp, Unknown
  Bacterial polypeptide expressing nucleotide sequence isolated from the Sargasso Sea
caaagaaatacatattaaagctgaagaaatctcaccacaaattacttggggaacaagtccgcaagatgtagttccaataaatggaaaggttccaaacccagaaactattgaggatcttaatcgaaaaaaagctgttgagcgttcattagaatatatgggtttagagccagatcaagaaattgaaaaaataaaaattgataaagtatttattggttcttgcacaaatggaagaatagaagatttaagagaagttgctagagtcgttgagggaaaaaaagtatctgttgattcgatgatagttcctggatctggtttagttaaagagcaagctgagagtgaaggtttagataaaatttttattgaagcaggatttgattggagagaacctggttgttcaatgtgtctggcaatgaatccagatcaactaaaacccaaagaaagatgtgcctcaacatcaaatagaaactttgaaggaagacagggcagagagggaagaactcatttagtcagccctgttattgctgctgcttcagctattaaaggaacctttgctcaagagagtgatttgtaat

SEQ ID NO: 283357 - DNA, 574 bp, Unknown
  Bacterial polypeptide expressing nucleotide sequence isolated from the Sargasso Sea
atgtctaaaaaaactttattcgataaaatttgggaatctcatatagtagatgaaaggaatgatggcacttatttaatttatattgatcgccacctcgttcatgaagtcacaagccctcaagcgtttgagggactcagaaatgctaaccgtaaagtaagacaacctaaaagaactttagcagtccctgaccacaacgttccaactacggttgatcggttaaaacatatagaagatgaagattctagaattcaattgaacatattagaaaaaaatgtaaaagaatttggaattccatatataccgatggatgatataaggcagggcatagtccatataattggccctgaacagggcttaacattgcccggaatgacaatagtttgtggagattcacacactgcaactcacggtgcttttggatctttggctttcggtattggcacatcagaagtagagcatgttcttgctacacaaactttaccaatgaaaagaccaaaaaatatgcgggtaaatgtagtaggtgaacttggatttggagtagagccaaaagatctaatcttaaccataatggaaa

SEQ ID NO: 283358 - DNA, 352 bp, Unknown
  Bacterial polypeptide expressing nucleotide sequence isolated from the Sargasso Sea
atgattgatggaatcgttagttatatcgatagagataatatagatacagatcaaataatcccaacagaatatttaaaatcaataaagaagtttggttatgaagattatttatttgatggttggagatataaagatgatggaaagctgggagttaaaaaagaagaacgagatataaataaagatttcattctcaataacaaaccatttagtgagtctaaaattcttctaacaagagataactttggatgtggttcttctagagagcatgctgtatgggccttaagagactttggcatcaaagcggttatagcatcctcatttggagatattttttacaataattggttttaag

SEQ ID NO: 283359 - DNA, 523 bp, Unknown
  Bacterial polypeptide expressing nucleotide sequence isolated from the Sargasso Sea
ggaacttcacctgaaatggttgtaaattatgacgatgaaattccaactcctatgaatgtttctgaagataataaaaaaaatatagagcttgcaagaaattatatgggtattcaagatgaatcaaaattatcagatttagtttttgataaagtttttataggttcatgcacaaattctagaattgaagatttaagacaagcagctgaaatagtaaaaggtaaaactattgctaacaatattattgaagccatagtagtgccaggttccgggatggttaaagaacaagccgaaatggaaggtttggatgaggtatttaaagaagctggttttatatggagagatccaggttgttcgatgtgtttagggatgaatccagatcaattaaagccttatgagagatgtgcatctacatctaatagaaattttgaaggcagacagggttacctaggacgtactcatttaatgagtcctattatggcagcatataccgcaataaacggaacagttggagagccatcatgaa

SEQ ID NO: 283360 - DNA, 424 bp, Unknown
  Bacterial polypeptide expressing nucleotide sequence isolated from the Sargasso Sea
ttaaaacctaacactaaagttaaagacataaaaattgataaggtttttataggcagttgcaccaatggaagaatagaagatataagagaagctgcaaaaattttaaaagataaaaaaatagcatcccatgttaatgcaataattgttcctggttcaggattagttaaagaacaagcagagcaagaaggcttagataaaatttttataaattcaggatttgaatggagagaacccggatgttcaatgtgtcttgcaatgaatgcagataaactaaagccagaagaaagatgtgcttctacttcaaatcgtaattttgaaggaagacaaggacgtggcggaagaactcaccttgtaagcccagcaatggcagcagcagcagcaatttctggaaatttggatgatgttagaaagtatcaaaattaaa

SEQ ID NO: 283361 - DNA, 450 bp, Unknown
  Bacterial polypeptide expressing nucleotide sequence isolated from the Sargasso Sea
aatgaaaaaatttacaaatattaaaagtataccagcatatcttccaatagttaatatcgatacagatatgattattcctaaacagtttttaaaaactataaaaagaactggtttaggaaaaaatttattttttgaaatgagatatgatgaaaaaggaaataaaataaataattttattttaaataatgatccatatacacagtctaaaatattagttgcaggaaaaaattttggatgtggctcctcaagagaacatgcgccatgggcacttttagattttggaattacttgcgttattagttcaagctttgcagatattttttataataattgttttaaaaatggaattttacctatagctttaagcgaagaagaaataaagcaaatttcagaatactcaaatagaaaagaagaaatagcagttaatttatctgatcaaaaaattgtatt

SEQ ID NO: 283362 - DNA, 403 bp, Unknown
  Bacterial polypeptide expressing nucleotide sequence isolated from the Sargasso Sea
aacagatattaaggttgatagaatttttattggtagctgtactaatgggagaattggagatttaagagatgcggctaaaattatagagggtaaaaaagttgcacaacacgttaatgccatggttgttcctggctcaggtttagtcaaacaacaagcagaagaagaaggcattgataaaatatttaaacaagctgggttcgaatggagagaaccaggttgttctatgtgtctggcgatgaatgctgacaaacttaatccaaaagaaagatgcgcttctacttcaaatcgaaattttgaaggtcgtcaaggacgtggaggaagaactcatttattaagcccagctatggccgctgctgcagctattgatggacatttaacagatgtaagaaaatttaaaaactaa

SEQ ID NO: 283363 - DNA, 505 bp, Unknown
  Bacterial polypeptide expressing nucleotide sequence isolated from the Sargasso Sea
tatgaaaaaatttactattttaaaagggatacctgcaaatttacaaatgatgaatgttgataccgatatgattatacctaagcaatttttaaagactattaaaagaactggtcttggcaaaagtttattttttgagatgagatatgatgaaaaaggtaaagcaaatccgacatttattttgaataaagagccttacaacaaatcttctatattgttagtgggaaaaaattttggatgcggatcatcaagagaacatgcaccttgggcattattagattttggaattaaatgtataatcagccctagttttgctgatattttttataataattgctttaaaaatggcatgctaccgatagttttaaatgaaaaaagaattgaggatttaattcaatattcagaaaggaaagagagtatcgaaatcaatcttgaagaacaggaaataaaatttggaaataaaaagattcaatttgaaatcgatccatttaaaaaaaagtgtttatta

SEQ ID NO: 283364 - DNA, 288 bp, Unknown
  Bacterial polypeptide expressing nucleotide sequence isolated from the Sargasso Sea
ttgtagttcctggttcagaaaaagtagccaatgaagcgaaacaagaaggtcttgatcaaatatttaaggattctggatttcaatggagagaaccaggctgctcaatgtgtttagcaatgaattcagataaactaataggtaatcaagttagtgctagttctagtaatagaaatttcaaaggaagacagggatctcctagcggtagaacactactcatgagcccagcaatggttgctgctgctgcaattaatggcaaagtcagtgacgttagagaatttatcaactgat

SEQ ID NO: 283365 - DNA, 511 bp, Unknown
  Bacterial polypeptide expressing nucleotide sequence isolated from the Sargasso Sea
gtattaccgataaacggtctagttcctgatccagaaaaagagactgatgaggaaaaaaaacaatcaatgtatcgttcgcttgattatatgggtctaaagccaaatatgaaaatgtctgaaataaaaattgataaagtttttattgggagctgcactaatggaaggattgaagatcttagggtggcaacaaaaattcttaaaggaaaaaaaatagcttctcacgttaaagcaatggtggtcccaggttcaggtcttgtcaaaaaacaagcagagatcgagggattagataaaatatttaaagactcaggttttgaatggagagaacctggatgttcaatgtgtttaggcatgaatgaggaccaactttcgcctaaggaaagatgtgcatccacctctaatagaaatttcgagggaagacaaggaaggggtggaagaacgcatttagttagtccaggaatggctgtagcagcagcaattaagggttatttaactgacgtaagaaaaatctaac

SEQ ID NO: 283366 - DNA, 422 bp, Unknown
  Bacterial polypeptide expressing nucleotide sequence isolated from the Sargasso Sea
aatggacaaattttcaattataaaaagtatacctgcacatctaccaatttcaaatattgacactgatatgataattccaaaacaattcttaaaaacaattaaaaggactggcttaggtaaaaatttattttacgagctcagatttgacgaaaaaggagacttaatagataactttgtattaaattctcagccgttccaaaagtcaaaaattttgattgcaggtaaaaattttggttgcggttcatcgagggagcacgctccttgggcattaaaagattttggaataagatgtatcctaagccctagttttgcagatatcttttataacaattgctttaaaaatggtattcttccaattgttttgaataatactcaattagaggaattatccatttactcgaaaaataaacaagagatagagg

SEQ ID NO: 283367 - DNA, 331 bp, Unknown
  Bacterial polypeptide expressing nucleotide sequence isolated from the Sargasso Sea
atgaaaaatcctaaccctaaaactctatttgataaaatttggcatcatcaccttgttaaccaacaagaagatggaacatgccttatatatatagatcgtcatttagttcatgaagtaaccagcccacaagcatttgaaggtttaagagataacaatagaaaggttcatcgtccagaaagcacatttgctgttgctgatcataacgtcccaacatctgatagatctaaaggtatcgataatgaagaaagtagaattcaagtagagacacttgaaaataattgtaaagaatttggggtaacaatatttcctcttctagatagaagacaaggaa

SEQ ID NO: 283368 - DNA, 862 bp, Unknown
  Bacterial polypeptide expressing nucleotide sequence isolated from the Sargasso Sea
ctttacgataaaatatggaatgagcaccttgttaatcaacaagaagatggaacagctttgttatttgttgatagacatttgattcatgaagtaactagtcctcaagcatttgaaggtataagaaattcaaaaaggaaagtaagacaaccaaatttgactcttgcagtagctgatcacaatgttcctactactgatagatcaaaaggtatatctgatcaagattcaaaaattcaagtagatacattagctgaaaattgtaaagaatttggcattcaactttttggaatgaatgataaaagacaaggtatagttcatattataggacctgaacaaggttttacccagcccggaacaattatcgtttgtggcgatagtcatacagcaacacatggtgcatttggctctctggcatttggaattggaacttctgaagttgagcatgttcttgtgactcaaacattaattcaaaaaaaagcaaaaaattttagaattaatgttaatggcaagttacctattggagtaacttcaaaagatgtaattttacaaattattggcaaaattggaactgcaggtggtaccgggcacgttattgaatatgcaggaagtttaatttcatcgctatctgttgaacaaagaatgacgatttgtaatatgagcattgaaggtggtgctagagcaggattaattgaaccagataagaaaatatttgattatctaaaaaataagccaatgtctccaaaaaatgaaaattgggataaagctgtagattattggagtggtttaaaaagtgattcaggcgcaaattttgataaagaagaaaatttaaacgcagaagaaatcaaaccaaatggtgacatgggga

SEQ ID NO: 283369 - DNA, 889 bp, Unknown
  Bacterial polypeptide expressing nucleotide sequence isolated from the Sargasso Sea
tgtattagcaacgcaaactttgctgcagtataaacctaaaaatatgaaaatagaaattaatggagaaataggtaaaaatattacctcaaaagacattatacttaaaataattagccagataggaacatcagcgggaacaggacacgtaattgagtttatgggctctacagttaacaaaatgtccatagaggagagaatgactatttgtaatatgtctatcgaagctggagctaaggctggtatggtatctcctgatattaaaacttttgagtatttgaaacataaaaagtactctccaaaaaacaaacaatgggataaagcattagataaatggaccaaactgtacacagataaaaatgcatattttgataaaagttataaccttaatgttagtgacctaaaacccatggtaacttggggtacgagtcctgaagatggaatatgcattaatgaagttattccagatcctttgtctgtaagagataaagaaaaacaaaaagctataaaaaaatctttagagtatatgggactttaccctggtaagaaaatgttagatgttcctattcaaaaagtttttataggctcttgtacaaatgggcgtatagaagatttaagggtagcttcatcagttattaaaggaaaaaaagtagcaaaaaatttacaggctatagtagttcctggttccggtgtagtaaaaaaaatggctgaggatgaagggctacaagaaatatttatagatgcgggttttgagtggagagcaccaggatgttcgatgtgtctaggtatgaaccctgatcaattagaagatggcgaaagatgtgcttccacttctaatagaaattttgaaggaagacagggaagaggaggtagaactcatttagttagtcct

SEQ ID NO: 283370 - DNA, 337 bp, Unknown
  Bacterial polypeptide expressing nucleotide sequence isolated from the Sargasso Sea
catggccaagaccttatatgacaaagtgtggcaagcccacattattgaccaaatcggtgaagacagcttaatttatatcgaccgtcacttaattcatgaagtaacgtcacctcaggcatttgcaggccttaatgaaaaaggccgtaaagtacgacgtcctgatcgcaccgttggtactatggatcacagcatttcaacccgttcattggcaatcgatgcctgtggtccggcgaatgcgcttcagctacaaaccttggcaaaaaactgtgaagatcacggcattcagctatttccagtgggccaccagaagcaaggtattgtgcacgtaatgggcccg

SEQ ID NO: 283371 - DNA, 421 bp, Unknown
  Bacterial polypeptide expressing nucleotide sequence isolated from the Sargasso Sea
gttaaaagctaatacaaaaatatctgacataaaaatagataaaatatttattggtagctgtacaaatggaagaatagaagatctaagattagcagcagaacttttaaagggtaaaaaaattgcaagtaatgtaagtgctatggtagtacctggatcaggattagtgaaagctcaagcagagcaagagggcctagataaaatatttattcaagctggatttgaatggagagaacctggttgctctatgtgtctaggaatgaatcccgaccaattgaaacccaaagaaagatgtgcatctacatcaaatagaaattttgaaggaagacaaggaagaggtggcagaactcatttagtaagtcctggcatggcgatcgccgctgcaataaatggacatctttcagacgttagggaaattaaataa

SEQ ID NO: 283372 - DNA, 357 bp, Unknown
  Bacterial polypeptide expressing nucleotide sequence isolated from the Sargasso Sea
aatggaaaaattttttaaattaaaaagtataccttcttatttgcctttacaaaatattgatacggatatgataattccaaaacaattcttgaagactattaaaaggactggtcttggcaaaagtttattttatgaaatgcgatatgacgaaagcggagaaataataaaagaattcatattaaacaaagaaccttataataaatctaaaattttgttagccggtaaaaattttggttgtggatcttcaagagagcatgctccatgggcattatcagattttggaattaaatgtgttatcagtcctagttttgcagatatcttttataataattgttttaaaaatggtattttaccaat

SEQ ID NO: 283373 - DNA, 361 bp, Unknown
  Bacterial polypeptide expressing nucleotide sequence isolated from the Sargasso Sea
aatgtctacaacattatacgataaaatttggaacgatcatctagttgaccaacaagatgatggcacatctttactttttgtagatagacatttaattcatgaggtgacaagcccccaagcttttgaaggattaagaaattctaacagaaaagttagacatccaaatttaactttagcagttgcagatcataatgttccaacaactgacagatcaaaaggtatttcagatgaggagtcaaaaattcaagtagatactttagaggcaaattgtaaagaattcggtgttcagttatttggtatggatgataagaggcaaggtatcgttcatattataggacctgaacaaggtttactcaaccaa

SEQ ID NO: 283374 - DNA, 250 bp, Unknown
  Bacterial polypeptide expressing nucleotide sequence isolated from the Sargasso Sea
aatgaaaaacaataataatcctaaaacactttttgataaaatatggttaaaccatcttgttgatcaacaagaagacgggacatctttaatttatattgacagacatttagttcatgaagttactagtccacaagcttttgaaggtttaagaaattcaggaagaaaagttagacgacctaattatacttttgctgtagcagaccataacgttccaacttctgatcgtacaaaaggtattaaaaataaagaa

SEQ ID NO: 283375 - DNA, 571 bp, Unknown
  Bacterial polypeptide expressing nucleotide sequence isolated from the Sargasso Sea
tttggatggcgatgaaataaaaccaatggttacatggggtacatcaccccaagacgttgttgaaatagatggcaaagttcctaatcctgataatgaaaatgatgaggatagaaaaaactcaattacaagatctttaaattatatgggtttaaaacctaatactaacattaaagatattaaaattgataaagtatttataggcagctgtacaaatggaagaatagaggacctcagagatgctgctaaaattttaaaagataagaaaattgcttcacacgttaatgctattattgtgcctggctctgggttagtaaaagaacaagcagagcaagaaggtttagataaaattttcaagcaatctggttttgagtggagagagccgggttgttccatgtgccttgctatgaacgctgataaacttaagcctgaagaaaggtgtgcctcgacctcaaatagaaattttgagggaagacaaggaagaggtggaagaactcatttagttagcccaggtatggcagctgctgctgcaatatctggaaatttggatgatgtaagaaagtacgaaaattaa

SEQ ID NO: 283376 - DNA, 433 bp, Unknown
  Bacterial polypeptide expressing nucleotide sequence isolated from the Sargasso Sea
aactcaaagtttaaaagttatgaagcttaaaaatatgagaataaattttgagggatctattcaaaaaggagtgtcctcaaaagatattgttctatatttaattaggacaataggaactgcaggtggaacaggttatgcagttgaatttgcaggatcatatatccgaaatatctctatggaagctagaatgacaatatgtaatatgtctattgaagcaggcgctaaagtaggattagtgtctgttgacgacaaaactattgattatgttaaaaaacattcaaatctcgaagccaatttaataaatgatgccattataaaatgggagactctaagaactgataaggaagcaatattcgatatggaaatcgatattgatgtctcaaaaattaatccacaagttacttggggcacatcaccagaaatggtaattgac

SEQ ID NO: 283377 - DNA, 661 bp, Unknown
  Bacterial polypeptide expressing nucleotide sequence isolated from the Sargasso Sea
atagaccatatgcacctaaaggcgaagaatgggaaaaggctgtttgaattttggaaatccttgccatctgatgatgatgcaaaatatgataaagaaataaatattaatggtgaagacattactcctcaaattacttggggaactagcccccaagatgttgtgccaattaatggaaaggttccaaacccttcatccattgaagatactaatagaaaaaaatcaattgagcgatcacttgaatatatgggtttagaaccagatcaagaaataaataaaattaaaattgataaagtttttattggttcgtgtacaaacggtagaattgaggatctaagagaagttgcaagagtagttaaaggaaaaaaagttagtgttgattcaatgattgttcctgggtctggtttagttaaagaacaagcagaaagtgaaggattagataagatttttattgaagctggttttgattggagagaaccaggatgttcaatgtgtttagctatgaatccagatcaattaaaaccaagagaaagatgtgcctcaacatcaaatagaaattttgaaggcaggcaaggtagagaaggcagaacacatttagttagtccagttgttgctgctgcatctgcaattaaaggctcatttgctcaagagactgatttataat

SEQ ID NO: 283378 - DNA, 253 bp, Unknown
  Bacterial polypeptide expressing nucleotide sequence isolated from the Sargasso Sea
atgaccactcctaaaacactttatgataaaatctgggatgcacatgtggctcatgaggcagacgatggaacttgcctactatacattgatcgccatctagttcatgaggtaacaagtccacaggcttttgaagggttgagaatttctggccgtggggttcgggcaccgaataaaacaattgccgttccagatcacaatgttccaacaactactgatagggaaggaggtatagataatgaagaaagccgtattc

SEQ ID NO: 283379 - DNA, 832 bp, Unknown
  Bacterial polypeptide expressing nucleotide sequence isolated from the Sargasso Sea
tttgataaaatttgggaacatcatcttgtcgatagacaagaagatggaacttgtcttatatatattgatagacaccttgttcatgaagttacaagccctcaagcatttgaaggtttgagaaataataaccgtaaagttagaaggcctgaaagtacttttgccgtagctgatcacaatgttccaacttcagatagatctaaaggtatagaaaataaagaaagtagaattcaggttgaaacactggaaaaaaattgcaaagattttgatgttactctctttcccttattagatagcagacaaggtatagttcatatagttggaccagaacaaggtattactcagccaggcatgacaatagtttgtggtgatagtcatacagcaacacatggagcatttggtgcattagcctttggcatcggcacaagtgaagttgaacatgtgttagctactcagaccttaattcaaaaacctgcaaagaacatgcgtatttctgttgaaggtaaattaagcttaggtgttacagcaaaagatattattcttcatataataggcaagataggaacagctggtggaactggttatgttattgaatatgctggtaatgccatttcctctctttctatggaaggaagaatgacaatctgtaatatgagtatcgaagctggtgctagagctggtttaattgctcctgatgataaaacttttgaatatattaaaggtagaccttacgctccatcaggagataattgggataaagcattagaattctggaaatcccttccatctgatcagggagctaaatacgatgaggaaattttaattaatgcagaag

SEQ ID NO: 283380 - DNA, 908 bp, Unknown
  Bacterial polypeptide expressing nucleotide sequence isolated from the Sargasso Sea
tttgggtgtagaactatattcaatgaatgacattcgacagggaatctgtcatgtggttggccccgagcaaggatttacattaccgggtacaacattagtttgtggcgattctcacacagccactcatggagcctttggttccatgtcttttggtatagggacctcagaggttgagcatgttttagcaactcaaactttaatattacaaaaatgcagaaatatgcgggtaactgttaatggtagcttaagtgatggagttacagcaaaggacttaatacttgctgtaattggaaaaataggaaccgccggagggactggagcagctatagagttttcaggtgcagcatttgaatcactatcaatggaaggtcggatgactgtatgtaatatgactattgaggctggagcaagggtaggtttgtttgcacccgatgaaacaacgttcgaatatcttaagggtcgcccaaaatcccccaaaggtggtgcatgggagcttgcagtaaaatattggaagacattaaaaactgactcaaaagcaaaatttgatgaggaggttgtcattgatgcttcggatatacatcctcaagtgacttggggcaccagtcctgaggatgtaacaacgatcaacggccaagttccaaaccccgccgatatagaagatgaaaatcgtcgaagtaaaatggagcgatcattagaatatatgggtcttgaagccggtatgccaatgaaagatataaaaataaatactgcttttattggctcgtgcactaacagtcgtattgaagatattagagcagctgcagcagttgctaaaggaagaaaagtggccacgggagttcaagcgttagttgtaccgggatctgggttagttaaagagctggcagaacaagagggtttggataaaatat

SEQ ID NO: 283381 - DNA, 533 bp, Unknown
  Bacterial polypeptide expressing nucleotide sequence isolated from the Sargasso Sea
aatgaagaaatttaaaaaaattacagctattgctgctccacttccaatgatcaatgtcgataccgatatgatcattccaaaacaatttcttaaaactataaaaagatctggtttgggcaaaaatttatttcacgaacttaggtatgacttaaatggaaataaaaaaaatgattttattctgaattgggattattacaaaactgctcaaatattagttactggtgaaaattttggctgtggaagtagtagagagcatgctccttggtcattgctggactatggatttagatgtataattgctcctagctttgctgatatcttcttcaacaattgttttaaaaatggtattctccctataaaactgaatactgtaaatactaattattttatcaaacaagcagaaaataagaaactgatcacagttgatctggataaacaagaagtatcatgtgaaaatggaaaaattattaagtttgatgttgacccatttagaaaaaaatgtcttttagagggtttagatgatattgccctta

SEQ ID NO: 283382 - DNA, 367 bp, Unknown
  Bacterial polypeptide expressing nucleotide sequence isolated from the Sargasso Sea
atttataggttcttgtacaatggaagaatagaagatttaagagaagttgctaaggtagtagagggcaagaaagtaattgtcaatgcaatggtggttcctggttctggtttagttaaacagcaggctgaaaaagagggtatagacaaaattttaataaaagctggttttgattggagagagcctggatgttctatgtgtcttgcaatgaaccccgatcaacttaagcctaaagaaagatgtgcttcaacgtctaatagaaattttgagggaagacaaggtcgagaaggaagaactcacctagttagtccagctgtggctgctgcaactgcgcttaaaggtaaattaagcttggtagaagatttataaa

SEQ ID NO: 283383 - DNA, 232 bp, Unknown
  Bacterial polypeptide expressing nucleotide sequence isolated from the Sargasso Sea
atgcctcaaacactttacgataaaatttggaatgaacacttagttcatcaacaagaagatggaaccgctttactatttgttgatagacatttaattcatgaagtaacaagccctcaagcttttgagggtcttagaaattcaaatagaaaagtaagacaaccaaacctcactttagctgttgcagaccacaatgttccaactactgatagaagtaatgggaatagacgataaa

SEQ ID NO: 283384 - DNA, 448 bp, Unknown
  Bacterial polypeptide expressing nucleotide sequence isolated from the Sargasso Sea
gatgataaaaaataatcctaaaacactttttgataaaatttggtcacaccatcttgttgataagcaagaagatggaacatgtcttttatatattgatcgccaccttgttcacgaggtaacaagtcctcaagcatttgaaggattaagaaattctaatcgtaaggttagaagacctgaaagtacatttgctgtcgctgatcacaatgtaccaacttcggacagaactaaaggtattgaaaacaaagaaagcagaatacaagttgaaacacttgaaaaaaattgtgatgattttaatgtaacgctttttccactattagatagtagacagggaatagtccatatagttgggcctgagcagggtattactcaacctggaatgacaatagtttgcggggatagtcatacagcaactcatggtgcatttggtgcgctagcttttggtattggt

SEQ ID NO: 283385 - DNA, 877 bp, Unknown
  Bacterial polypeptide expressing nucleotide sequence isolated from the Sargasso Sea
tttggcgcttttaaagacaaaaacttaaaagttaaattccctgatagaactgttgctaccgttgatcatattgtgccaacagacaatcaaagcagacctttcaaagataatctagctgaacagatgattgaaacacttgagaagaattgcttagagcataaaataagattttttaatattggtagtggtaatcaaggaatagttcatgtagtggcaccagaattaggtcttactcagccaggaatgacaatcgcttgcggagattctcatacttcaactcatggagcttttggttcaattgcttttgggataggtacaagtcaagtaagagacgttcttgctacccaaaccatagccatgaacaaattgaaagtaaggcagatttggtgtgataataaattatctaagggtgtttatgctaaggatttagtgcttcatatcattaatgaacttggtgtaaaagctggagtaggtttcgcatatgaattcgcagggcctgcgatagatgaattatcaatggaagaaaggatgacgatatgcaatatgtctattgaaggaggagcaagatgcggatacattaatcctgatgaaaagacctttaattatattaaaaacaaattatgtgctccaaaaaatgagaattgggataaagcgctcacatggtggaaatcattgaaaagcgataaaaattcaatttacgacgatgtagttaaattagatgcttctaaaatagaaccaacggtaacctgggggattacacctggtcaaagtatcagtattaatcaacaaatccctcttttagatgacttatccccaaatgataaattagttgcaaaagaggcttatgaatatatgagtttcaagccaggacaataat

SEQ ID NO: 283386 - DNA, 893 bp, Unknown
  Bacterial polypeptide expressing nucleotide sequence isolated from the Sargasso Sea
tcgaggggctgcgtctggccgggcgcagccgtggcgcatcgacgccaacatcgccaccccggatcacaatgtgccgaccacccgggccgagcgccagggcggcctcgacgccatcgccgacgaagtgtcgcgcatccaggtacagaccctggacgagaactgcgatgacttcggcatcctcgagttcaagatgaacgacgtgcgccaaggcatcgtccacgtggtcggtccggagcagggcgccaccctgccgggcatgaccgtggtctgcggcgactcgcacacctccacccatggcgccttcggtgcgctggcgcacggtatcggcacctccgaggtcgagcacgtgctcgccacccagtgcctggtggccaagaagatgaagaacatgcaggtgcgcgtcgagggcaagctgccgttcggcgtcactgccaaggacatcgtactggccgtgatcggcaagatcggcaccgccggtggcaatggccatgccctggaattcgccggcagcgccatccgcgacctgtcgctggaagggcgcatgaccatctgcaacatgtccatcgaggccggtgcccgtgtcggcctggtggcggtggacgagaagaccatcgcctacgtcaaggatcgcccgttcgcgcccaagggcagcgactgggacaaggccgtggcgcagtggcagaacctggtctccgacgccgatgcggtgttcgacaccgtggtcgagcttgccgcctccgagatcaagccgcaggtcagctggggcacctcgccggaaatggtcctagccgtcgaccagaacgtgccggacccggctgtcgaggccgacccggtgaagaaggactcgatcacccgggcgctgaagtacatgggcctggctgccaaccagccga

SEQ ID NO: 283387 - DNA, 552 bp, Unknown
  Bacterial polypeptide expressing nucleotide sequence isolated from the Sargasso Sea
aatggaaccatttgttactttaaaaagtattcctgcaccattaccaatgattaatgttgatacagatatgataattccaaaacaatttcttaaaactattaaaagatctggtctaggtaaaaatttatttcatgaattaagatatgatattcaaggtaatataaaaaatgattttgttttgaattgggatccttataaaagttcaaaaattttaattgctggtgcgaattttggatgtggatcaagcagagaacatgcaccatggtcacttttagactttggttttaaatctatcattgcccccagttttgctgatattttttataataattgttttaaaaatggaattttaccaattaaacttgatcaaataaaagttgatttacttatgaatgaagcagaagaaaaaaatgaaataagtgtaaatttgcagaaacaaataataattcaccaacaacatgaaactataaattttgaaatagataaatttcgtaagaaatgtcttattgagggattagatgatattggtctcactcttcaaaaaaatgataa

SEQ ID NO: 283388 - DNA, 280 bp, Unknown
  Bacterial polypeptide expressing nucleotide sequence isolated from the Sargasso Sea
aatgattgttcctggctcaggtttggtaaaaaaacaagctgaagaagaaggtttagataaaatttttattgaagctggttttgattggcgtgaacctggttgttcaatgtgtttagctatgaatcctgatcaattaaaaccaaaagaaagatgtgcttcaacatcaaatagaaattttgagggcagacaaggtagagaaggaagaacacatttagttagccctgcaattgctgctgcttctgcaattaaaggctctttttctactgttgaggatttataa

SEQ ID NO: 283389 - DNA, 608 bp, Unknown
  Bacterial polypeptide expressing nucleotide sequence isolated from the Sargasso Sea
catggccaagaccttatatgacaaagtgtggcaagcccacattattgaccaaatcggtgaagacagcttaatttatatcgaccgtcacttaattcatgaagtaacgtcacctcaggcatttgcaggccttaatgaaaaaggccgtaaagtacgacgtcctgatcgcaccgttggtactatggatcacagcatttcaacccgttcattggcaatcgatgcctgtggtccggcgaatgcgcttcagctacaaaccttggcaaaaaactgtgaagatcacggcattcagctatttccagtgggccaccagaagcaaggtattgtgcacgtaatgggcccggaattaggtttaattcagccaggcatgacggtggtgtgtggtgactcacacactgcaacccacggtgcatttggtgcgctggcatttggtattggtacctctcaggtagagcatgtattggccacgcaaacgttgaaacaaagccgcgcgaaaagcatgcttatcaacgtaaatggcaagcttcctgttggtattaccgcaaaagacattattcttgccattatcggcaaaattggccacgccggcgctactggccatgtcattgaatatg

SEQ ID NO: 283390 - DNA, 811 bp, Unknown
  Bacterial polypeptide expressing nucleotide sequence isolated from the Sargasso Sea
attattggaccagagcaaggttttactcaaccaggcacagtaattgtttgtggtgatagtcatacggcaacgcatggtgcatttggtgctttagcatttggaattggaacttcagaagttgagcatgttttagcaactcaaacattagttcaaaaaaaagcaaaaaattttagaataaatgtagaaggcaaacttccactaggagttacatcaaaagatgtaattcttcaaataattggaaaaataggcaccgctgggggaacaggatttgtaatagagtacgcgggtgatttaattagatcattaagcgtagagcaaagaatgacaatttgtaatatgactatcgaaggtggtgctagagcaggattgattgcaccagatgaaaaaatttttaaatatttagagagcaagccaatgtcaccaaaaggaaaaaattgggatgaggctatagaatattggaaaagtttaaaaacagacaatgaggctaaatttgataaggagataaatttaaaagccgatgaaattttacctatgataacttggggaacatccccacaagatgtaattacaattgatgaaaaagttccaaatcctcaaaatgaaaaagaccaagataaaaaaaattctttagaaagagcattaaattatatgggtttaaagccaaatacgcccgctaaagatatcaaaatagataaagtttttataggaagttgtacaaatggaaggatagaggacttaagggaggctgcaaaaattttaaaagataagaaaatagcttctcatgttcatgctatggttgttcctggatcag

SEQ ID NO: 283391 - DNA, 472 bp, Unknown
  Bacterial polypeptide expressing nucleotide sequence isolated from the Sargasso Sea
aatgtctaatactctttacgataaaatctggaatgatcacttggttcatcaacaagatgatggaacagcgttgttatttgttgatagacatttagttcatgaagtgactagtccacaagcatttgaaggtcttagaaattctaaaagaaaagttagacatcctaatttaactttagcagtagcagatcataatgttcctacgacagatagatctaaagggatatctgataaagaatcaaaaatacaagtagatactttagaatctaattgtaaagaatttggtgttcaactttttgggatgaatgataaaagacaaggtattgttcatataattggacctgagcaaggttttactcaaccaggaactgtaattgtatgtggagacagtcatacagcaacccacggagcttttggtgcgttagcatttggaattggtacttcagaagttgagccatgtattagcaacgcaaac

SEQ ID NO: 283392 - DNA, 721 bp, Unknown
  Bacterial polypeptide expressing nucleotide sequence isolated from the Sargasso Sea
aatgccatatacaatttacgataaaatttggaatgaacatctagttcatcaacaagaggatggaacttctcttctttttgttgatagacatttaattcatgaagttacaagtcctcaagcttttgaaggtctaagaaattcaaaaagaaatgtaagacagccaaaattaactttagcagtagctgatcataatgttcctacaacagatagatctaaaggaatttcagataaagaatcgaaaatacaagtagatactttagagaataattgtaaagagtttggaataaaactgtttggtatgaatgataaaagacaaggaatagttcatattattggacctgagcaaggatttacccaaccaggaacaattatagtatgtggtgatagtcatactgcaacccatggagcatttggtgctttagcttttggtattggtacttcagaagttgaacatgtattagcaacacaaactttagttcaaaaaaaatcaaaaaactttagaataaatgttaatggaaaattatctcttggagtcacctcaaaagatgtaatattacaaattattggaaaaataggaacagctggtggaactggctatgtaatagaatattctggaaatttaatatcttctttaagtgtagaacaaagaatgacaatttgtaatatgacaattgagggtggagctagagctggactaattcaacctgatgaaaaaatttat

SEQ ID NO: 283393 - DNA, 604 bp, Unknown
  Bacterial polypeptide expressing nucleotide sequence isolated from the Sargasso Sea
atggaaaaatttgaacttttaacaggtatcgctgctcctttaccaatgatcaatgttgatactgatatgattattcctaaacagtttttaaagacaattaaacgctctggtcttggaaaaaatctttttcatgaacttcgatatgacatgcaaggtaatataaaaaatgattttgtattaaattgggatccatacaaacaagcttctattttagtcgctggagataattttggttgtggatcaagcagagagcacgcgccatggtcactcctagattttggatttaaatgtattattgctccaagttttgctgatatattttataataattgttttaaaaatggaattcttccaattcgtcttgatcaaaaaacagtcgatgttttgatggatcaagcaaatcaaaaaaaacatttaactataaatcttaaagatcaactaattatactagaagatggaaatacaattgagtttcaaattgatccgtttaggaaaaaatgtttacttgaaggtttggatgatatcggtctaactcttcaaaagaaagaaaaaattgatcaatatgaagcttctttaaaaaacacacatccttggattatctaaa

SEQ ID NO: 283394 - DNA, 880 bp, Unknown
  Bacterial polypeptide expressing nucleotide sequence isolated from the Sargasso Sea
aagcataattgtttgtggagacagccacacagcaactcacggagcttttggatctcttgcttttggcataggaacttctgaagtagaacacgtattagctacacaaactttagttcaaaaaaaatcaaaaaactttcgtattaaagtggatggaaagttgtcaatcggcgtaacatctaaagatgttattttacagatcattggtaaaattggtactgcaggtggaactggttatgtaattgagtacgcaggaagtttaatctcatcacttagtgtagagcaaagaatgacaatttgtaatatgactattgagggaggtgcaagagcaggattaatcgagccagatgaaaaaatatttaattatttaaatggcagaccaatgtctcctaaaaaagaaaattgggataaagcattagattactggagtaaattaaaatctgatagcgatgctgattttgataaagaagttactttagatggaaaagatattttgccaatggtaacatggggaacatccccacaagatgttatatctatagatggaaggataccaaatccagaaaatgaagcagatgaagatagaaaaaattcaatagagagatcattaaaatatatgggtttaaaacctggcacagctataaaggatgttaaaatagataaagtttttatcggaagttgtacaaacggtagaattgaagacttaagagatgcagcaaaaatagttaagaacaaaaaagtggcacaacatgtatacgctatggtagttcctggctctggactggtgaaacaacaagctgaacaagaaggtttagataaagtctttaaagactcaggttttgattggagagagcctggatgttcctatgtgcttagctatgaa

SEQ ID NO: 283395 - DNA, 896 bp, Unknown
  Bacterial polypeptide expressing nucleotide sequence isolated from the Sargasso Sea
aaagagaaaaaattcgttcacaatcacttcaaaagatattatccttagtataatccgtcagataggaacggctggtggagcaggtcatgtgttggaataccgtggtaatgcaatatctgatctttcaatggagcaaagaatgacaatttgtaatatgtcaattgaagcaggttcaagagcggggcttgttgctcctgatgaaaaaacatttgattatttgaataaacgtgaatttacaccaagtaattatgatgaattggtagatggttggaaagagaatctacagactgatccgaatacaaaatttgacaaaagttatacaattaacgttgatcaaattgccccgcaagtaagctggggaacaaatcctgcaatggtttgtgatgtgacagaaaatattccatcaccagaagagtttggcaaaggtgattctgtcaaaacacacagtgcagaaaaagcgctttcatacatggatttggaaccaggtactcctgtaacagaaattcaattagatagaatattcatcggctcatgcacaaattctagaatagaagacttggttgatgtagcggaagttgttaagggaaagagtgtatcttcaaatttgaatgcaatgattgtacctggttcacaaatggtcaaacatgaggctgagcaaatgggtcttgataaaattttcaaagatgcaaattttgaatggagagaatctggatgcagtatgtgtttagggatgaatccagatatcttaaagccaggtgagcgttgtgcaagtacttctaatagaaactttgaaggaagacaaggtgcaggaggtcgtacacatttagttagtcctgtaatggctgcagctgcagcaattgaagggcattttattgacattagagagtggtactaaa

SEQ ID NO: 283396 - DNA, 971 bp, Unknown
  Bacterial polypeptide expressing nucleotide sequence isolated from the Sargasso Sea
aatgtctaagaagaagactctgtatgataagatatgggaagagcatttgattttggaagaaggtgatggcacttcgctactttatgtggataggcatttggtgcatgaggtgacaagtccgcaagctttcgaaggattaaggttagctgggcggaaagttatggctcctgaaaaaacgatagctgttccagaccataatgtacctaccactactgatagaacaggtggaataagtaacgaacaaagtaggatacaggttgaggcgttagataaaaacgctaaagattttggagttatttactaccctgtagatgatattagacagggaatagttcatataataggaccagaactaggttggacattgcctggtatgaccatcgtatgtggtgatagccatactgcaactcatggggcctttggagcgcttgcacatggcatagggacaagtgaggtcgagcatgttttggctactcaaaccctgatgcagaaaaagtcaaagaatatgaaggtagaggtttcaggagagttaggtaatggggtgtctgggaaagatgttacgttaagtattataagagaaacaggtaccgctggaggtacaggtcatgttatagaatatatgggttcagtaataaaagacctttcggttgagggtagaatgactgtctgtaatatggctatcgagggtggtgctagagccggtctgatagctcctgatcaaaaaacttttgactatataaagggtaggccccatgcccctaaaggttctaattgggaactagctttgcaatattggagtaccctttactctgacaatggagctttttttgataaaaatatacacattgatggtggaaagattgcgccagtagttacttggggaactagtcccgaggatgttttaccgattaatggttttgtcccagaccctagtgattttgataaacaaaaaagtttagctgttaaaagat

SEQ ID NO: 283397 - DNA, 712 bp, Unknown
  Bacterial polypeptide expressing nucleotide sequence isolated from the Sargasso Sea
atgtctacaacattatacgataaaatttggaacgatcatctagttgatcaacaagatgatggtacatctttactttttgtagatagacatttaattcatgaggtgacaagtccccaagcttttgaaggattaagaaattctaatagaaaagttagacatccaaatttaactttagcagttgcagatcataacgttccaacaactgacagatcaaaaggtatttcagatgaagagtcaaaaattcaagtagatactttagaggcaaattgtaaagaattcggtgttaagttatttggtatggatgataagaggcaaggtatagttcatatcataggacctgaacaaggttttactcaaccaggtacagttattgtttgtggagacagtcataccgcaacgcatggagcatttggtgctttagcatttggaataggaacttcagaagttgaacatgttttagcaacccaaacattagttcagaagaaagctaaaaattttagaattaatgttaatggtgaacttcctttaggagttacttctaaagatgtaatacttcaaataattggaaaaataggtacagcaggtggaacaggatctgttgtggaatatgctggagatttaataagatctttaagtgttgagcaaagaatgactatttgcaatatgacaattgaaggtggtgcaagagcaggattaattgcacctagatgaa

SEQ ID NO: 283398 - DNA, 607 bp, Unknown
  Bacterial polypeptide expressing nucleotide sequence isolated from the Sargasso Sea
atgcaaaaatttactacattaaaaagtattccagcgtatttaccaatagtgaatattgatacggatatgattattccaaaacaatttttaaaaacaattaaaagaacaggacttggtaagaatttgttttttgagatgaggtacgacgagaaaggaaaaaaaataaatgattttatattgaatcaaaatccttttaataattcgaaaatattaatagcgggaaaaaattttggctgtggatcatctagggaacatgccccatgggcgttattagattttggtattacatgtgtaataagttcaagttttgctgatatattttttagcaactgttttaaaaatggaattttaccaatcattcttaatgaagaaaaaattaaggagttatcagagtatgcgaatagaaaagaagaaattttagttgatttaaatgaagaaaaaataatttatggaaatagtgagattttatttaacgttgattcatttaagaaaaagtgccttctagagggtttagatgatatagctttatccttgaaaaaatctgataaaatagaaaactttgaaaaaaatttaaaaaaacataagccttggattattaatgattaaa

SEQ ID NO: 283399 - DNA, 451 bp, Unknown
  Bacterial polypeptide expressing nucleotide sequence isolated from the Sargasso Sea
atgtcaaaaacactctacgataaaatttgggatgaccaccttgttcacgaagacaatgatggaacagctttactttatgttgatagacatcttgttcatgaggtcactagtccccaagcttttgaaggattaagaattcaaggcagaaaagttagaaaaccaaaacttactttagctgttccagatcacaatgttccaactactgatagatcaaaaggtatatctgacaagcaatctaaaattcaagttgatactttaagaaataattgtaaagaatttggaataaatttatttgatgtgaatgataagcgacaagggatagttcatattattggaccagagcaaggttttacacaaccagggacagtaatcgtatgtggagatagccacacagctacccacggagcttttggttcccttgcatttggaataggcacttctgaagtggagc

SEQ ID NO: 283400 - DNA, 610 bp, Unknown
  Bacterial polypeptide expressing nucleotide sequence isolated from the Sargasso Sea
aatgaaaaagttcaataatcttagaagcattccatcatatctatcgcttcaaaatatagatacagatatgattattccaaaacaatttcttaaaacaattaaaagaactggtttaggtaaaagtttattctatgaaatgagatatgacgaaaatggaaacttgataaaagattttactttaaataaagagccatacaataaatcaaaaattttattagcgggaaaaaattttggatgtggatcatcaagagagcatgccccatgggctttattagattttggcattaaatgcgttataagttcgagttttgcggacatattttataacaactgttttaaaaatggtattttgccaattaaaactaatgagcaaactattttagaattatcagaatattcaaaaagaaaagaagagattgaagttaatcttgaaaatcaggagataaaatttggaaataaagctgttaaatttgaaatcgatccctttaaaaagaaatgcttaatagagggtttagacgacattggattatcaatggaaaaaattaattatatagatagttttgagaaaaaattagaaacatctagaccttggttaatcaaaaatgattaa

SEQ ID NO: 283401 - DNA, 535 bp, Unknown
  Bacterial polypeptide expressing nucleotide sequence isolated from the Sargasso Sea
aaatcaaaaaactttagaattagcgtaaatggttcattacctattggcgtaacatcaaaggatgtcatcttgcagataattggaaaaataggaacagctggtggtactggttatgtgattgagtatgccggtaaccttatatctaatcttagtgttgaacaaagaatgacgatttgcaacatgacgattgaaggtggggcaagagcaggattaattcaaccagatgaaaagattttccaatatttaaaaggtaaaccaatgtcaccaaaaggagaaaactgggaaaaagctttagaatattggcatgcattaaaatctgataaggatgcaaactttgataaagaattaacgttagatggatctcaaattaagccaatggtaacttggggaacatctccccaggatgtggttgaaatagacggtaaagttcccaatcctgaaagtgaaactgacccagatagaaaaaattcaattaacagatcattaaattatatgggattaaaaccaaatacgaatattcaagatattaagattg

SEQ ID NO: 283402 - DNA, 805 bp, Unknown
  Bacterial polypeptide expressing nucleotide sequence isolated from the Sargasso Sea
taattgtaaagaatttggaattcagatttttgatatgaacgataaaagacaaggtatagttcatataattggtccagagcaaggttttactcaaccaggaaccattattgtttgtggtgatagtcatactgcaactcatggtgcatttggtgctttagcttttggaattggaacttcagaagttgagcatgtgttagctacacaaactttagtccaaaaaaaatctaaaaattttagaattaatgttaatggtagtttgccaattggtgtaacttcaaaagatgtgatcttacaaattataggaaaaattggaacagccggaggaacaggttatgtgattgaatacgcaggtgaattaatttcaaatcttagtgtggaaaatagaatgacaatttgcaatatgacaatagaaggtggagcaagagcaggtttaattcaacctgaccaaaaaatttttgattatttaaaagacaaaccaatgtcacctaaaaatgacaactggggaaaagctttagaatattggagtaatcttaaatccgatgaaggagcacattttgataaagaaataaatttgaatggaaaagatattaaaccaatggttacttggggaacttcaccccaagatgtagttacaattgatggaaaagttccaaatccaaaaaatgaacctgacccagataaaaaaaactcaatagaaagatcattaaaatatatgggtttaaattctgatattccagttcaagatattaaaattgataaggtttttattggtagttgtacaaatggtagaattgaagatttaaga

SEQ ID NO: 283403 - DNA, 601 bp, Unknown
  Bacterial polypeptide expressing nucleotide sequence isolated from the Sargasso Sea
atggaaaaatttaatattttaaatgggatacctgcaagtctatcaatgattaatattgatacagacatgattattccaaaacaatttttaaaaactataaaacgaacagggcttggtaaaaatttattctatgaaatgcgttatgatgataatggaaaaaaaatagcagattttattttaaataataaaccttatgataaatcacctattttaataacaggaaaaaattttggatgcggatcttcaagagagcatgctccatgggcacttttagattttggcatcaaatgtataattagtcaaagctttgcagatattttttataataattgttttaagaatggtatgctgccaattgttctagaagaaagtcaaattgaagaacttacacaatattcaaaaaggaaagaaaatattaagatagatttaagtgaacaggaaattaaatatggaaataaaagcatacgatttgaagtagatccatttaaaaaaaaatgtttaatcaatggattggatgatatatctctatctttaaaacaatcagaaaaaatatcttcttatgaagataaaataagaaaaaatagaccttggattagttaaa

SEQ ID NO: 283404 - DNA, 364 bp, Unknown
  Bacterial polypeptide expressing nucleotide sequence isolated from the Sargasso Sea
aatgaaaaaatttgtatccctcaaaagtattccagcatatttaccaatcgtcaatatcgatactgatatgatcatcccaaaacaattcctaaaaacaatcaaaagaacaggattgggaaaaaacctttttcatgaaatgagatatgacaacgatggaaatattattaaagattttattttaaataagaaaccatttgatgtttcaaaaatattaattgcggggaataattttggttgtggttcatcaagagaacacgcaccatgggctcttctagactttggaattacatgcgtgataagttcaagttatgccgatatcttttataataattgttttaaaaatggcataattaccaataatttt

SEQ ID NO: 283405 - DNA, 268 bp, Unknown
  Bacterial polypeptide expressing nucleotide sequence isolated from the Sargasso Sea
tggactagtaaaagaacaagctgaacaggattgtttagataaaatattcattgagtctggatttgaatggagagagcctggctgctcaatgtgcttagcaatgaatgctgataaattaaaaccacaagagagatgcgcatctacttcaaatagaaattttgagggaagacaaggaagaggtggtcgtacacatctagtaagcccaggtatggcagcagcagctgcaattgctggaaatcttgatgatgtaagaaaatatcaaaactaa

SEQ ID NO: 283406 - DNA, 488 bp, Unknown
  Bacterial polypeptide expressing nucleotide sequence isolated from the Sargasso Sea
attttttgaaatgagatacgatgatgaaggtaaagaaatagataaatttgttttaaaccaaaaaccttttaatcaatcgaaaattttaatagcgggaaaaaactttggttgtggatcttcaagagaacatgcaccttgggctttattagactttggaataacttgcgttataagttcaagttatgctgatattttttacaataattgctttaaaaacggaattttaccaattaaaattgaagagaataaaattaaagaaatttcagaatactcaaaaagacaagaggaaatatcgattgaccttgagaaacaaaaaattttatttggcaataacgagatttcatttgacatagatcaatttaagaaaaaatgtcttctagaaggacttgatgatatcgccttatcacttgagaaatctgaaaagataaaattctttgaaaataatttaaaagaaaaaaaaccttggatttttaatgataaaaattaag

SEQ ID NO: 283407 - DNA, 505 bp, Unknown
  Bacterial polypeptide expressing nucleotide sequence isolated from the Sargasso Sea
aatgggaaaaatccccaatccagaaaatgaaaaaaatattgataaaaagaattcaataaatagatcgcttgattatatggggcttaaacctgatgtgaaagttcaagacattaaaattgataaagttttcataggaagttgtacgaatggaagaattgaggacttaagagaggctgcacaaatattaaaaaataagaaaaaggcttcacatgtacatggaatggttgtccctggttctggtttagttaaagaacaagctgaacaagaaggtctagataaaatatttatagagtctggttttgaatggagagaacctggatgttcaatgtgtttagcaatgaatgccgataaattaaaacctcaagaaagatgtgcgtctacttcgaatagaaactttgaaggaagacagggaagaggaggaagaacccacttagtaagcccaggtatggcagctgctgctgctatcgccggaaatttagatgatgttagaaaatatcaaaactaa

SEQ ID NO: 283408 - DNA, 374 bp, Unknown
  Bacterial polypeptide expressing nucleotide sequence isolated from the Sargasso Sea
aatgaaaaaattcacctcacttaaaagcattccagcttatttaccgattgtaaatatagacacagacatgattattcctaaacagtttttaaaaactattaaaagaacaggattaggaaaaaacttatttcatgaaatgaggtacgatgatgatggaaaaaatatcgataatttcatattaaacaaatccccatacaataattcaaaaattttaatagctggaaataattttggctgtggatcatcgagagaacatgctccgtgggcacttttagactttggaataacatgtgttataagctcaagctatgccgacattttctataacaattgttttaaaaatggtattttgccgataattctcgatgaaaaaa

SEQ ID NO: 283409 - DNA, 502 bp, Unknown
  Bacterial polypeptide expressing nucleotide sequence isolated from the Sargasso Sea
acaggattaggaaagaacttatttcacgaaatgagatacgacgatgatggaaaaaatattgataattttattcttaataaatctccatatagcaattcaaaaattttaatagctggaaataattttggctgcgggtcatcgagagaacatgctccgtgggcacttttagactttggaataacatgtgtaataagctcaagctatgcagacattttttataataattgttttaaaaatggtattttaccgataattctcgatgaggaaaaaataaaagagttagctgagtattcaaagagaaaagaagaaattgaaatcgatttaaaggaagaaaaaattatttttggaaataacgaattaaaattcaaaatagatccttttaaaaaaaaatgcttgattgaaggtctagatgacatcgctttatcattagaaaaatcatcacatattaacgaatttgaaaaaaagattaagtcagcaaggccctggatttttaatgattaaa

SEQ ID NO: 283410 - DNA, 643 bp, Unknown
  Bacterial polypeptide expressing nucleotide sequence isolated from the Sargasso Sea
aatgaaaaataaagtaatacaaggtcaggccatcccatttacacagagtaatattgacactgatgcaataatcccaaaacaatatttaaaatccatcaaaaaatcaggatttggacccttcttgttcgattctttaaggtatctagatccgggtgatttgaatactaccaatgatcgtaaaatcaacccagattttattctgaatattgaaccatttaaatctggcaatatcattgttgctaatgataactttggttgcggctcatctagagaacatgcggtatgggctttaaaagattatggtatagaagcagttatctcatcatcttttgctgatatatttcatagaaatagctttaagaatagtttattactaatttgtctttcaaaagatgatataaaaatattattagaagatatatcgattaataaatataatttgacaatagacatacaaagtcagacaataacaacgcctaatcacagggtcttcaatttcgatattaatccatctgataaagagagaattattttgggctatgatgacattggtttaaccttaaaacattccaataaaatacatgaatatgaaaaaaaaatgaaaattaaaaaaccttggatatttgagattaatcatgagtaa

SEQ ID NO: 283411 - DNA, 838 bp, Unknown
  Bacterial polypeptide expressing nucleotide sequence isolated from the Sargasso Sea
acaacagatagaacaaaaggaattgaagatgaggattctagaattcaagtagaaacacttgaaaaaaactgtaatgaatttggcatcgaactatttggaatgaatgataaaagacaaggtatcgttcatattattggaccagaacaaggatttactcaaccaggcagtataattgtatgtggagatagtcatacagcaacccatggagcttttggagcgttagcctttggaataggtacatctgaaattgagcatgttttagctacacaaacacttttacagaagaaatcaaaaaactttagaattaatgtcaatggaaatttaccagtaggtgttacttcaaaagatgtaattcttcaaattataggaaaaataggaactgcaggtgggacaggttacgttattgaatattctggaaatttaatttcaagtcttagtgtagagcaaagaatgacaatttgtaatatgacaattgaaggaggtgcacgagcaggattaattcagcctgacgaaaaaatttttaaatatcttaaggacaaaccaatgtctcctaaaaacaataattgggacaaggctcttgaatattggagtagcttaaaatctgatactaatgctaattttgataaagacattaatattgaaggttctgaaattaagccaatggtaacttggggaacttcgccacaagatgtcgttgaaatagatggtaaagttccaaatccagacaatgaaattgatccagatagaaaaaactctatcaatagatccttaaattatatgggtttaaaaccaaacatgaaaataaaagatattaaaattgataaagtttttattggta

SEQ ID NO: 283412 - DNA, 847 bp, Unknown
  Bacterial polypeptide expressing nucleotide sequence isolated from the Sargasso Sea
aatgccccaaactctttacgataaaatatggaatgaacatttagttcataaacaagaagatggtacttcattattatttgttgatagacatttgatacacgaggtaactagcccccaagcttttgaaggactgagaaattcaaatagaattgttcgtcaaccaaaactaactcttgcagttgcagatcataatgtcccaacaagtgatagatcgaaaggaattgatgataaagattcaaaaattcaagtagatactttagagaaaaattgtaaagattttgggatagagctatttggcatgaacgataaaagacaagggatagttcatatcattggaccagaacaaggatttactcaacctggaacagtcatagtatgtggtgatagtcatacagcaactcatggagcatttggagcgttagcatttggaatcggcacatctgaagttgaacatgtcttagctactcaaacattagttcaaaagaaggcaaaaaattttagaataaatgtaaatggaaagttaccaacaggagttacatcaaaagatgttattttacaaataattggaaaaataggaacagctggtggaacagggtatgttattgaatatgcgggaagcttaatttcatctttatcagttgagcaaagaatgactatttgtaacatgaccattgagggtggagctcgagctggattaattcaacctgatcaaaaaatttttgattatttaaaaaataaacctaaatctcctaaaaatgaaaattggagccaggctataaaatattgggaaaatttaaaaactgataattcagctgaattcgataaggaaatcaatttatccgggaag

SEQ ID NO: 283413 - DNA, 730 bp, Unknown
  Bacterial polypeptide expressing nucleotide sequence isolated from the Sargasso Sea
aaaaaatatgaatattgctgttaatggaaaattaaaatctggggttacagcaaaagatattattctgcatattataggcgtaattggtacagctggtggaacaggttatgttattgaatatacaggcgatgtaattcattcacttagcatggaaggacgtatgactatttgtaatatgagtatagaagctggagcaagagctggactaattgcccctgatcaaaaaacctttgattatattaaagatagaccatatgcacctaaaggatcagaatgggaaaaggccattgaattttggaagtccttaccttctgatgatgatgcaaaatatgataaagaaataaatattaatgctgaagacattgctccccaaataacgtggggaactagccctcaagatgttgtgccaattaatggaaaggttccaaacccttcatctgttgaagatgttaatagaaaaaaatcaattgagcgatcacttgaatatatgggcttagaaccagatcaagaaataaatgaaattaaaattgataaggtttttattggatcatgtacaaacggtagaatcgaggacctaagagaagttgcaagagtagttaaaggaaaaaaagtaagtgttgattcaatgattgttcctggatccggtctagtaaaagaacaagcagagagtgaaggattagataaaatttttattgaagctggctttgattggagagaacccaggatgttc

SEQ ID NO: 283414 - DNA, 850 bp, Unknown
  Bacterial polypeptide expressing nucleotide sequence isolated from the Sargasso Sea
ttgtaaggagtatggaattacttttctttctatgtctgataaaagacagggcatagttcacattatcggaccggagcaaggtttcacacaaccaggaatgactatcgtttgtggcgatagtcacacgtcaacacacggtgcctttggcgctcttgcatggggaattggaacttctgaagtagaacatgttcttgcaactcaaacattagtgcaaactaaagctaagaatatgcaaattaatatacaaggtgaactgccactgggtgtcacagcaaaagatattgttttaaagattattcaaataattggaactgctggaggtactgggtatgttattgaatacacaggtgatgcgatcaaatccctaacaatggagggaagaatgactgtctgtaacatgtcaattgaagcaggagcaagagctggtttaatcagtcctgatgaaaaaacaattaaatacttaaagggaagaccattttctccaacagaaaatgaataccaatcagcatcagattattggttatcgctagcttctgatgatggtgcagcttatgacaaaacagtaaatattgatgcaagcgatatcattccgcaagtcacatggggcacaagtcctgaggatgtcgtttcgattgatggattggttccaaaccctgaggatgaaagtgatgagacaaagaaaaaatcaatgattagagctttggaatacatgggtcttgttccgaatacaccacttaaagaggttaaagtagataaggtattcattggttcatgtactaatggacgaattgaagacctgagagctgcatcaaaaattgcaaaagataagaaagttgcggaccatgtaaaa

SEQ ID NO: 283415 - DNA, 634 bp, Unknown
  Bacterial polypeptide expressing nucleotide sequence isolated from the Sargasso Sea
ctatagtgaaggattaataattgatggcgtagttgctcatatagacagagataccattgatactgatcaaattattccaacagagtacttaaaatcaattaaaaaatttggttttgaagactatttatttgatggatggagatataaagatgatggaaagcttggcgttacaaaagaagaaagaattatcgacaaaagctttattctaaataaagagccatataatgaatctaaaatacttctctcaagagacaattttggatgtggttcttctagagaacatgcagtatgggcattaagagattttggaattaaagctgtcattgcgtcatcattcggagacattttttacaataattcttttaaaaatggacttttgccgattatcttaggtaagaatgaaatagaatttttatttagtgagtctaaacaaaatgttcttgagctatccatagacttagaaaaaaaagagatcatatacaatcaaaaatgtataacattcgcagttgaaaaacatttaatcgacagaatcatttttggtttagatgatattgacataacatttaaagataaagacaaaataatagattttgaaaaaaacagaatctctacaaggccgtggatattcaaatga

SEQ ID NO: 283416 - DNA, 587 bp, Unknown
  Bacterial polypeptide expressing nucleotide sequence isolated from the Sargasso Sea
agtgattaatgagattaatatagacactgatgctattattcccaaacaatttctaaaaactatagagagaactggattaggaaaatttcttttttttgatagaaggtatgatagttctaataatataaaaactgattttattcttaataaagttccatggaataatgcaagaattttaatagcaggaagtaactttggttgtggttcctcaagagaacatgctccttgggcgttattagattttggtataagatgtattattgctccttctttcgcagatattttttttaataactcaattaaaaatgggcttttacctttaactttacataagacttcagttgaagttttatgtgagcatgctttagaaaaaaagcttattaaggtaagtttattagaaaagaaaatattttatgacaatctaaaattagattttaatatttcagaggatgttagagaaagattattaaatggctatgatgatatagagcttactttgcaaaaaaaagatatgatagaattttatgaaaaaaaaaatctttcagaaagttcatggagaattatagataatgaaagaaaaagttaac

SEQ ID NO: 283417 - DNA, 484 bp, Unknown
  Bacterial polypeptide expressing nucleotide sequence isolated from the Sargasso Sea
attgattggtaatgtaataaaatatgaacaagataacattgacactgatgtaatcattcctggaacatacctgaaaattcatgattataatgaattggcaactcatgcaatggagggaattgatcctgaatttccatccaaagtaaaagaaggtgattttattgttgcaggaaaaaactttggttgcggttcttcaagagaacatgcaccaattgcattatccacttgtggaataaaagcagtaattgcaacttcatttgcacgaattttttatcgaaattctgtagatggtgcatttttacttccaattgaggttaatgatgaaacctatcaaaaaatatctaattctgatcaattagaggtcaacattgaaaaaaatgaaataaaaaatctcacaaaaaatgaagtatacgctatgaaaccattttctgaaattattgcaaaaatcatcgccgcgggtggtcttttcaaatataaaaagtga

SEQ ID NO: 283418 - DNA, 947 bp, Unknown
  Bacterial polypeptide expressing nucleotide sequence isolated from the Sargasso Sea
cttttatatatagataggcatttgattcacgaagttacatcccctcaagcatttgaaggattgaaattagctggccgtaagccttggagaatatcagctaatatcgcaacacctgatcataatgttcctacaactgacagggacaagggaatagctggtataaatgatgaagtatcaaaacttcaagtggttacgttagatgataattgcaaagagcatgaaatactacagtttgatattcatgataaacgccagggcatagttcatgtggttgggcctgaacaaggattaactttacccggcatgacaattgtttgtggagattctcacacctctactcatggggcattagcgacgctttcaatgggtattggtacttccgaagtggaacatgttttagctactcaatgtttgaaaacctcaaaactaaaaaatatgagggttaacatttcaggtgagctgcaagaaggtgtcactccgaaggacgttacattggcagttattggaagaattggaaccgcaggaggaactggttatgccatagaatatgctggttcagtcatcgaaaatatgtcaattgaaggaagaatgactgtatgtaatatggcaattgaagctggagctagggcaggacttgtagcatatgatcaaacaactgaagcttatataaaagataagccatttaccccaaaaggagaacaatggttggtagcaaaagagcaatggcaagatcttgtcagcgatagcgaagctcaatttgataaagagatagaaattgatggatcttttatagcacctcaggttacttggggaacttcaccagaaatggtcagtgatattgatggtgtaatacccgagcctaatagcgaatctattagacatgctctgagctatatgaaccttgaaccctggaaaaaaaataaagatattaagctagatcagatttt

SEQ ID NO: 283419 - DNA, 574 bp, Unknown
  Bacterial polypeptide expressing nucleotide sequence isolated from the Sargasso Sea
atgagcaatacacttttcgagaaaatctgggatacccatctggtacacgagcaggatggaaacagtatcctctacatcgaccgtcatctggtccatgaggtgacctcaccgcaggcctttgagggactcaggatggcaggaagaaaggtccgagttcctcaggcgacctttgccgttccggatcacaacattccgacccgcaaccagctagagccaatcaaggatccgatttctgctaagcaggtcgaaactctgcggaagaactgcaaagatttcggagtacctttgttcgatctgggagacccccgccaggggattgtccatgtgatgggcccggagcagggattgaccctcccggggtcgaccatcgtctgcggagattcccatactgctacccacggagctttcggagcccttgcgttcggcataggtacttccgaagtggagcatgtgatggcaacccaaacgcttcagcaaaaaaagccgaaaacaatgctggtggaagtcagcgggacaattccggataacgtaaccgccaaggatatacatcctcgccatcatcggaaaaatcggg

SEQ ID NO: 283420 - DNA, 703 bp, Unknown
  Bacterial polypeptide expressing nucleotide sequence isolated from the Sargasso Sea
atgccacaaactatttacgataaaatttggaatgatcatctggttcatgaacaagatgatggaacttgcttgctttttgttgataggcatttagtgcatgaagttactagcccacaggcatttgaaggcctaagaaattcaaatagaaaagttagacagcctaatttaactcttgccgttgcagatcataatgtaccaacaacagatagaacaaaaggaatagaagatgaggattccagaatacaagtagaaacgcttgaaaaaaattgtaatgaatttggtatcgaactatttgggatgaatgataaaagacaaggcattgttcatataattggacctgaacaaggatttactcaaccaggaagtataattgtatgtggagatagtcatacagcaactcatggagcttttggtgccttagcttttggaataggtacatcagaaattgagcatgttttagcaactcaaacacttttacagaagaaatcaaaaaattttagaattaatgttaatggaaatttaccaataggcgttacttcaaaagatgtaattcttcaaattataggaaaaataggaaccgcaggtggcacaggttatgttattgaatattctggaaacttagtttcaagtcttagcgttgaacaaagaatgactatttgcaatatgacaattgaaggaggcgcaagagccggattaattgagc

SEQ ID NO: 283421 - DNA, 624 bp, Unknown
  Bacterial polypeptide expressing nucleotide sequence isolated from the Sargasso Sea
taaagtattgggaaacccttcactcagatgattctgcagatttcgataaatctatcgagtttgatgctagcgtcataaagcctcaagttagctggggtacatcacctgaaatgactgtcgatatagatgggaaagtaccagatccaaatgatattaaagataaaagcaaaaaacaatcctatattaatgctttaaagtatatggatttggatgcaaatcaaaaaatcgactctatagagcttgacaaaatatttatcggatcgtgtactaattcccgtatagaggatttgcgctgcgctgctttggaagtagaagggaaaagaatttcgtcgagaatcaaacaagctattgtagttccagggtcaggacatgtaaaaaaacaagctgagaatgaagggttagatattatatttaaaaaagcaggttttgagtggcgtgatccaggatgttcaatgtgtttaggaatgaatgacgataatttaaatccttatgagagatgtgcctctacatcaaatagaaattttgagggaaggcaaggtgatagaggtaggacgcatttagtcagtccaattattgcagcaagatcatcaatacatggatgcttaacgagtgaaaaaaaatgat

SEQ ID NO: 283422 - DNA, 827 bp, Unknown
  Bacterial polypeptide expressing nucleotide sequence isolated from the Sargasso Sea
ctgggaatctcatgttgttgatcagcaagatgatggcacttgcctaatttatattgatcgtcatttggtacatgaggttacaagcccgcaagctttcgagggtttgaggctggcgaacagagcagttcgtcgacccgatgcaactcttgccgtggctgatcataatgtgccgacgtctgatcggtcatctggtataaaagatcctgaatccctactacaagttgacaccctaacacaaaattgcttggattttgatattcaactgtttgaaatgaacgacgttcgacaaggaatagttcatataataggtccggagcagggctttacacaaccaggggcaacaattgtctgcggcgatagccatactgcaactcatggagcctttggtgctcttgcattcggcatagggacttcagaagttgagcacgttttagcaacgcagactttgctacaaaggccagcaaaaaatcttcgaattacagttgatggctcactacttcccggcgtaacggctaaagatatgatacttgcaatgatcggtaaaataggcacagcaggtggaaccggtcacgtaatagaatatgctggggaggctgttaaaaatctctcaatggaaggacgtatgaccgtctgcaacatgtcgattgagggtggggcccgcgcaggacttatagccccagatgatgttacttacgcttatttagagggtaggccaatgtcgccaaaggcaggcgcatggcaacaggctttatcttactggaaatctttgccatcagatcatggggccttttatgaaaaggaagtaaatctctctgctgttgatattt

SEQ ID NO: 283423 - DNA, 755 bp, Unknown
  Bacterial polypeptide expressing nucleotide sequence isolated from the Sargasso Sea
gatgacaataaataatcctaaaactctttttgataaaatttgggaacatcatcttgttgatagacaagaagatggaacttgtcttatatatattgatagacaccttgttcatgaagttacgagccctcaagcatttgaaggtttaagaaataataatcgtaaagttagaagatccgaaagtacttttgctgtagctgatcacaatgttccaacctcagatagatctaaaggtatagaaaataaagaaagtagaattcaggttgaaacactagaaaaaaattgcaaagattttgatgttacactttttccattattagacagcagacaaggtatagttcatatagttggaccagaacaaggcattactcagccaggtatgacaatagtttgtggtgatagtcatacagcaacacacggagcatttggtgcattagcttttggtatcggcacaagcgaagttgagcatgtattagctactcagaccttaattcaaaaacctgcaaagaatatgcgaatttctgttgaaggtaagttaaacttaggtgttacagcaaaagatattattcttcatataataggaaaaataggaacggctggtggaactggttatgttattgaatacgctggtaatgcaatttcctctctttctatggaaggaagaatgacaatctgcaatatgagtatcgaagcaggtgctagagctggtttaatcgctcctgatgaaaaaacttttgaatatattaaaggtagaccgt

SEQ ID NO: 283424 - DNA, 458 bp, Unknown
  Bacterial polypeptide expressing nucleotide sequence isolated from the Sargasso Sea
aatggaaaaatttattaaattgaaaagtataccagcacatattcctttaatgaatatagatacggacatgattattcctaagcaatttttaaaaactattaaaagaactggtttaggaaaaagtttgttctatgaaatgagatatgatgaaggtggtaaattgattgataaatttatattaaataatgaaccgtattcaaaatcaaaaatccttttagcaggaaaaaattttggctgtggttcttcaagggaacacgccccgtgggccttacttgattttggcattaaatgtgtaataagtcctagcttcgctgatattttttataacaactgttttaacaacggtattcttcctataactattaatgaaaaatcaattcaagaattgtctgaatattctaaaagaaaagaggagatagaagttgatttaaatgagcaggtggatctttatggtaata

SEQ ID NO: 283425 - DNA, 937 bp, Unknown
  Bacterial polypeptide expressing nucleotide sequence isolated from the Sargasso Sea
gcagttgcagatcataatgttcctacaactgataggtcaaaaggtattgcagatgaagattcaagaattcaagttgaaactttgaacaaaaactgtaaggaatttggtgtcgagatatttggtatggacgataaaagacaaggcattgtccatatcataggacctgaacaaggttttacacagcctggaaatattattgtttgtggtgatagtcatactgcaactcatggagcatttggagctttagcttttggtattggaacttcagaagtagaacacgttttagcaacacaaactttagttcaaaaaaaatcgaaaaactttagaattagcgtaaatggttcattacctattggcgtaacatcaaaggatgtcatcctgcagataattggaaaaataggaacggctggtggtactggttatgtgattgagtatgccggtaaccttatatctaatctaagtgttgaacaaagaatgacgatttgcaacatgacgattgaaggtggggcaagagcaggactaattcaaccagatgaaaagatatttcaatatttaaaaggtaaaccaatgtcaccaaaaggagaaaactgggaaaaagctttggaatattggcatacattgaaatctgataaggacgcaaactttgataaagaattaacgttagatggatctcaaattaaaccaatggtaacttggggaacatctccccaggatgtggttgaaatagatggtaaagttcccaatcctgaaagtgaaactgacccagatagaaaaaattcaattaacagatcattaaattatatgggattaaaaccaaatacgaatattcaagatattaagattgataaggtttttataggaagctgcactaacggtagaatagaagatattagagaggcagctaaaatattaaaagataaaaaagttgcatcacatg

SEQ ID NO: 283426 - DNA, 451 bp, Unknown
  Bacterial polypeptide expressing nucleotide sequence isolated from the Sargasso Sea
atgccacatacaatttacgataaaatatggaatgaacatcttgtacatcaacaagaagatggaacttctttgctttttgttgatagacatttaattcatgaagtaactagtcctcaagcatttgaaggtttaagaaattctaatagaaaagttagacaacctaaacttacattggccgttgctgatcacaatgttccaacaactgatagatctaaaggaatttctgatcaagaatcaaaaatacaggtcgatacattagatgcaaattgtaaagaatttggaattaagatttttggaatgaacgataaaagacaaggaatagttcatatcataggtcctgagcaaggttttactcaaccaggaacaattattgtttgtggtgatagtcatacagcaacacatggagcatttggtgctttggcttttggtattggaacttccgaagttgaac

SEQ ID NO: 283427 - DNA, 997 bp, Unknown
  Bacterial polypeptide expressing nucleotide sequence isolated from the Sargasso Sea
tgcatttggtgcacttgcttttggaattggaacttcagaagttgaacatgttctagcaactcaaacgctaatccaaaaaaaatctaaaaatcttcttcttaaagttgatggtaaattaccgattggggtcactgccaaagacataattttaaagattataggaacaataggaaccgctggcggcacaggatttgtcatcgaatactcaggagaagttattaaaaattttagtatggaagaaagaatgactatttgtaacatgacaatcgaaggtggagcaagggctggattaattcaacctgacgaaaaaacatttaactatttacaaaacagaccaatgtcaccaaaaaatgaaaaatggacaaaagctttggagtattggagcacacttaaatctgatgaaggatgtaattttgacaaggaagttataataaaaggcgaggaagtagcaccccaagttacgtggggaacatcacctcaagatgtagtccctgttaatggttttgttccagatcctaaaaatgaaaaaaatcaagatagaagagtcgcaatggaaagatctttagactacatgggactaaaaccaaacacaaaaatgacagaaatcaaaattgacaaagtttttataggaagctgtacgaatggtagaattcaagatctaagggaggctgcaaagttgctcaaagataaaaaaattgcaaaacatgttaatgctatggttgtcccaggttctggtttagttaaaaatcaagctgagcaggaaggtttggataaaatttttaaaaactcaggttttgaatggcgagagcctggttgctcaatgtgcttaggaatgaatgaggaccagttaaaaccaaaagaaagatgtgcgtctacatcaaatagaaattttgaaggtagacaaggaagaggaggaagaactcacctttgtagtccagctatggcagctgccgctgctttggatggccacctttcagatgttaggaaaatttggtag

SEQ ID NO: 283428 - DNA, 631 bp, Unknown
  Bacterial polypeptide expressing nucleotide sequence isolated from the Sargasso Sea
gcagttgaatattggggaaacattaaaaacagatgaaggtgcacactttgatttagttgttgagcttgaagctgacgacattcagccacaaattacctggggtacaagcccagagcaagtaattggtattgatgaatgcataccagatccagaccaagagccagatttaattaaagccgacgctattcgcagcgcacttagatacatggatttaaaagcgggcgataaattatcaagcgcaaaagtagatacagtctttattggttcgtgtacaaatagccgtattgaagatttacgtgccgcggcaaaaattgttgaaggcaagcaagtagtagctggcatagaggcattaattgtaccgggctctggtcttgttaaaaagcaagccgaagacgaaggcttagccgatatttttaaagcggcaggttttgagtggcgcgagccgggctgttcaatgtgtttagcaatgaacgacgaccgcttagaggcgggcaaacgctgtgcatctacgtctaaccgtaactttgaaggtcgccaaggccgtggcgggcgtacgcacttagtaagcccagcaatggcagccgctgctgcagtacatggtcactttgttgatataagaggagaagcctaa

SEQ ID NO: 283429 - DNA, 282 bp, Unknown
  Bacterial polypeptide expressing nucleotide sequence isolated from the Sargasso Sea
aatgagcgtattttttagtggcttaatggccccacttgataaaaacaatgtagatacagaccaaattattcctaagcagtttttaacatctactagccgtgatggttttgatgcagcactattttacgattggcgttacctagaaaacggcgaaccaaatcctgattttattttaaaccgcccatgctaccaaggtgcgcaaatattattaacgcgcgacaactttggttgtggctcatcacgcgagcatgcgccgtgggcgcttaagcaatatggttttga

SEQ ID NO: 283430 - DNA, 451 bp, Unknown
  Bacterial polypeptide expressing nucleotide sequence isolated from the Sargasso Sea
aatgtctacaacattatacgataaaatttggaacgatcatctagttgatcaacaagatgacggcacatctttactttttgtagatagacatttaattcatgaggtgacaagcccccaagcttttgaaggattaagaaattctaatagaaaagttagacacccaaatttaactttagcagttgcagatcataatgttccaacaactgacagatcaaaaggtatttcagatgaagagtcaaaaattcaagtagatactttagaggcaaattgtaaagaattcggtgttcagttattcggtatggatgataagaggcaaggtatcgttcatatcataggacctgaacaaggttttactcaaccagggacagttattgtttgtggagacagtcataccgcaacgcatggagcatttggtgctttagcatttggaataggaacttcagaagtttga

SEQ ID NO: 283431 - DNA, 725 bp, Unknown
  Bacterial polypeptide expressing nucleotide sequence isolated from the Sargasso Sea
tgaagcaggggctaaggttggattaattgccccagacaataaaactattgagtatgttaaaagtaaatcatttcttgatgatgacacttttaatcatgcaaaagagtattggaaaactctaaagtcagatgatgatgcaaaatttgataaagaaataactatagatgtatcaaaaatcaaaccacaagtcacatggggtacttcacctgagatggtattgaactatgatgaatcaattccaacagtatttgatactaaagatgaaaacaaaaagaatgttgagttggcaagagactatatgggtattgaaaatgaaacaaaattatctgatttaacattcgataaagttttcataggatcttgtactaattctagaattgaagatttaagacaggctgctgaaatagttaagggtaaaactattgcatcaaatatttcagaagctattgttgtgcccggatctggtcttgttaaagaacaagcagaaaatgaaggattagataagatttttactgacgcaggttttatttggagagatcctggatgctcaatgtgtcttggaatgaatccagatcaactaaaaccttatgaaagatgtgcgtcaacctcaaatagaaactttgaaggaagacagggatacctaggtaggactcatttgatgagtccaattatggcagcctatacagcaattaatggaactataggagacccttatgaaatctaat

SEQ ID NO: 283432 - DNA, 781 bp, Unknown
  Bacterial polypeptide expressing nucleotide sequence isolated from the Sargasso Sea
actcaaactttagttcaaaaaaaagcaaaaaattttagaataaatgtaaatggaaagcttccaattggagtaacatcaaaagatgttattttgcagattataggtaaaatcggtacagctggtggaacaggttatgtcgttgaatatgcaggaaatttaatttcatccttaagcgttgaacagagaatgactatttgcaatatgacaatagaaggaggcgcaagagcaggccttatagaaccagatcagaaaatttttgattacttaaaagataaaccaaaatcaccaaaatctaaaaattgggatttagcaatgaaatattgggaaaatttaaaaacagattcaaatgcaaaatttgaaaaagaaataaatttagaaggaagcgaaataagtccaatggtaacttggggaacttcaccccaagatgtagtgtctattgatggaaaaattccagatccaaaaaatgaaaaagatatcgataaaaaaaattctattgaaaggtcactaaaatatatgggtttaaaacctaatattgcagttaaaaatatcaagatagacaaggtttttattggaagttgtacaaatggaagaatagaagatttaagagaagcagcaaaaatattaaaagataaaaaaaaagcatcacatgttcatgcattagttgttccaggttcaggattagtaaaagaacaagctgagcaagaaggtatagataaaatatttgttaattcgggtttcgaatggagagagcccggttgttcaatgtgtttagcgatgaatg

SEQ ID NO: 283433 - DNA, 610 bp, Unknown
  Bacterial polypeptide expressing nucleotide sequence isolated from the Sargasso Sea
aatggagattaatatagatgggccggcaccaaccggagtgtcagcaaaagatattattttagggataataggccgaattggagtggcgggtgctgccggccatgtgattgagtatacaggtcaagctattacagatttatcgatggaaggcagaatgacagtttgtaacatgtcaattgaagctggagccagggccggaatggtggcaccagaccagactacatttgactacattagaggccgatcacatgcgcctaaagacgcagaatttcagattgctactgaacagtggactagattaagatcggatcctggcagtgtttacgattcgcgagttgttatagaagccaaagatttagaacctttcgttacatggggcaccaaccctggtatggttataccggtgacaagtaaaatacctaaccctaataatgcctttaatgaaattgaaaaggaatcttgggaaagagcactaagttacatggatttaaagccggatattccaattaccgatgttgcaatagatcgggtttttataggctcttgcactaattcgcgaattgaagatataagggccgcagccacggttgttaaaggtaaaaaaagttaa

SEQ ID NO: 283434 - DNA, 772 bp, Unknown
  Bacterial polypeptide expressing nucleotide sequence isolated from the Sargasso Sea
tccagaacagggcctaacccaacctggcatgacaatcgtttgtggtgatagtcataccgcaacacatggagcctttggtgctttggcttttggtataggaacgtcagaagttgagcacgtgctggcaacgcaaacacttgctatgaataaaccaaaaacaatgaatgtaaatgtttcaggtgaacttctttatggaataaccccgaaagatttaattctgggaataatcaaaactataggaacaggtggtggagctggccatgttattgaatatacaggaaaggctatagaagagttaagtatggaaaatagaatgacagtgtgcaatatgtcaatagagggtggggcaagagcaggaatgattgctcccgatgatacaacatttaattatataaaaagtaaaaattatgctcctaaagattctgattgggaagaggcagaaaaaaattggagagaactttatacagacaaaggagctaaatatgattctgtagtaactatagatgcagaggatattgaaccctatgtttcttggggaacaaacccctctcaagttatagctattaatgaattgattcctgatccaaatagctttaaagaaaaagcagagaaagagtctgccatgagagcccttgagtacatggacctatcacctggtacaaaaataagtgaagttcaaattaacaaaatatttattggtagctgcacaaatggaagaattgaagaccttcgagctgctgcttcagtgttagagggtaagaaaataagtaaa

SEQ ID NO: 283435 - DNA, 860 bp, Unknown
  Bacterial polypeptide expressing nucleotide sequence isolated from the Sargasso Sea
acatggtgctttcggagcattagcatttggaattggtacttcggaggttgaacatgttctagctactcagactttagcaatggaaaaaccaaaaacaatgaaggttgaagttattggagatgtctcagatggggttgggcccaaagatattattttaggaatcatcagaaaaattggaactggaggtggcgccggtcatgtaattgaatacgttggtgatgttataaaaaatatgagcatggagaatagaatgacaatttgtaatatgtcaatcgaaggtggagcaagagcaggaatgattgctccagatgaaactactttcaattatttaaaagataaaaactatgctcccaaagactctgattggaatgatgcaataaatgagtggggtgaacttttttctgatgatgacgctgcttttgataaagttgtaacaataaatgctggggagcttgaaccatcagtttcttggggtacaaatccatcacaagttatattcataaatgacgaaattcctcatcctgataattttcaagacgaatcagataaagaagcagcaattagagctttagagtacatggatttagagcccggaataaaaattaatgaaatcactttagatagggtgtttataggcagttgtacaaatggtcgtattgaggatttaagagaggctgcccaagtcataaagggcaaaaaagtatcagagactgttggtgccatggttgttcctgggtcaacacttgtaaaaaatcaagctgaggaagaaggattagacaaaatttttattgaagcaggttttgattggagagaagccaggatgttcaatgtgtctgggtatgaatccagaatatattaag

SEQ ID NO: 283436 - DNA, 246 bp, Unknown
  Bacterial polypeptide expressing nucleotide sequence isolated from the Sargasso Sea
aatgcctaaaactctttatgataaaatatggaatgaacaccttgttcatgaacaagaagatggtacttctttattattcgttgacagacatttaattcatgaggttactagtccacaagcattcgaaggtttaagaaattctcaaagaaaagtaagacaacctgatctaactttagctgttgctgatcataatgttccaacaactgatagatctaaagggatatcagatgaggagtcaaaaattca

SEQ ID NO: 283437 - DNA, 520 bp, Unknown
  Bacterial polypeptide expressing nucleotide sequence isolated from the Sargasso Sea
agttatcagcatattcccggttgaagacgaattacgtaatgaacaaaaagcaacctatagggaggctttggaatacatgggttttgaggatgggcagcccatcagtggagttccggtacaggtggcctttattggaagttgtaccaatagccgaatttcagatctgcgggaggtagccgcagtcgtcaaagggcatcaagttcaagataacgtgcgtgcattggttgttccggggtcgcatcttgttgctgctcaggcagttgaggaagggcttgataaggtttttacagaagctggatttgaatggagagagcctggatgttccatgtgtttggcgatgaatcctgacaaattaatcgggcgggaactttgtgtttcatccagtaaccgtaactttaaaggtaggcagggaagtgcgacgggccgaacggtcttgatgagcccggtaatggttgccgccgctgcaatacgtggtgagattagcgatgcccgctcggtctttgaaatggagggcgaataa

SEQ ID NO: 283438 - DNA, 581 bp, Unknown
  Bacterial polypeptide expressing nucleotide sequence isolated from the Sargasso Sea
aatgaattatactttatatgacaaaatatggaatgaacatagcattctagttaatgctgatgatagtgagttgttgtacattgatagacatcttgtacatgaagtaacatctcctcaagcttttgatggattagcgattaataatcgtaaagtttggagcaaaaagtcgatatgtgcagtatctgatcataacgtaccaacacgaaatagacttaatggaattaaagactctatctcaaaacttcaagttgatacgctaatcgataactgtaaaaaacataagattaattattttgatttaaatgatataaatcaaggtattgtgcatgtaataggaccagaacttggttttactcaaccaggcatgacacttgtttgtggagactctcatacttcaactcatggtgctctcgcatcacttgcttttggtgtaggtactagtgatgttgaacatgtgctagctacacaatgtattaatgtaaaaaaagagaagaatttcaatatcagcgttatcaattcgctctctgatggtgtgtcatcgaaagatttaatactctatattataagagagattggaacgt

SEQ ID NO: 283439 - DNA, 919 bp, Unknown
  Bacterial polypeptide expressing nucleotide sequence isolated from the Sargasso Sea
attcaagttgaaactttaagaaaaaattgcaaagaatttggagtggaactttttgatgtaaacgataaaagacaaggaatagttcatattataggtccagaacagggtttcactcaacctggaacagtaattgtttgtggtgatagtcacacagcaactcatggagctttcggttctttggcatttgggataggaacgtcagaagtagaacatgttctagctacacagacattgattcaaaaaaaatcaaaaaatttgaggattaacgttaatggagatttaccaaaaggtgtaaccgccaaagatgtgattttaaaaataattggcacaataggaacagctggcggcacaggatatgttgttgaattcgccggtgatgtcatcaaaagtttaagcatggaagagagaatgaccatctgcaatatgacaatagaagcaggagcaagggcgggtttaatagctcctgatgaaaaaacatttgaatacctaaaaggtaaaacaatgtctccaaaaggagaaaattggaaaaaagcgttagaattctggaagactttattctcagataaagattgtaaatttgacaaagaagtaaacattgaaggaaaagatattgaacccctagttacatggggaacttctcctcaagatgtttctcctattactggtgtagtgccagatccagctaatgagaaaaacgaagatagaaaaatcgcaatggaaaggtcgcttgagtacatgggtcttaaagctaatacaaaaatttccgatataaaaattgataagatttttataggaagttgtactaatgggcggattgaagatctcagattagccgccgatcttttaaaggaaaaaaatctcctcaaatgtgagtgcaatggttgttcctggatcaggattagtaaaggaacaagctgaa

SEQ ID NO: 283440 - DNA, 757 bp, Unknown
  Bacterial polypeptide expressing nucleotide sequence isolated from the Sargasso Sea
tgtcagtcttaagggaattgccgcgcccctcgagatccaaaactgcgactccgacatgattatcccgaagcagtatctgaagacgatcaagcgcaccggactcggattcgcggcgttcgccgagttgcgctacgagaacgcggttgaagtggccgcgaagggggcagagtctggcatcgagaagccggatttcattctgaaccagccgtactaccgagactcagtgatactcgtcgcgggagacaacttcggctgcggctcttcgcgagagcacgcgccgtgggcaatcaacggcttcggcatccgctgcatcatctccacgtccttcgctgacatcttcaacaacaattgctacaagaacggcatgcttccggtcgttcttccgttcgaccaggtggaggagctgatgaacgacgcgaaggcgaagaaagatatcgaggttgacctcgtctcacagcaggtcattcgcgcgtgtggcacgaagtaccctttcgaagtcgacccgttcaagaagcactgcctgctcaacgggctcgatgacatcggcttgacgatgcagaagctcggggagatccgagccttcgaggcggagcggtcgaagctctacccctggctcgacggggcgacgacgcgggtgccgaggctcttccccgtggccagcctcgaagcgcggatccacgaggtcgatcagagtgcgacgccaggtccggagcagtggcaggccgaggcgcgctctctggccgccgcggcctcctga

SEQ ID NO: 283441 - DNA, 415 bp, Unknown
  Bacterial polypeptide expressing nucleotide sequence isolated from the Sargasso Sea
aatacaaagataaaagacattaaaattgataaggtttttattggaagttgtactaatggtagaattgaagatttaagagaggcagccaaaattcttaaagataaaaaaattgctggacatgtaaatgccatggtagtcccaggttcgggtttagtaaaacaacaagcagagcaagaaggactggacaaaatatttataaattcaggttttgaatggagagagcctggatgttcaatgtgtttagcaatgaatgctgataaacttaagcctgaagaaagatgtgcctctacatcaaatagaaattttgaaggtagacaaggtagaggtggaagaacccatctagtgagtcctggcatggctgcggctgcagcaatttctggaaatttagatgatgttagaaagtttcaaaactaat

SEQ ID NO: 283442 - DNA, 491 bp, Unknown
  Bacterial polypeptide expressing nucleotide sequence isolated from the Sargasso Sea
aatgcagaaatttaacaaattgaaaagtattccagcatatttaccaattgtaaatattgatacagatatgataattccaaaacaatttcttaagacaattaagagaactggccttggtaaaaatttgttttttgaaatgagatatgatgaaaaaggaaatatagtaagtgattttattttaaatcagcatccattcaataaatcaaaaatcttgatagcaggtaaaaactttggatgtggatcttcaagagaacatgcgccttgggcattattagattttggaattacatgtgttataagctcaagttatgctgatattttttataataattgttttaaaaatggaattttaccaatcatattagatgatgaaaaaattaaacaaattgcagaatactcaaatagaaaagaagaaatagaagtagatttaaataatcaaaaaattgtgtttgggaatagtgaaattagttttgatatagactcattcaaga

SEQ ID NO: 283443 - DNA, 412 bp, Unknown
  Bacterial polypeptide expressing nucleotide sequence isolated from the Sargasso Sea
gttaaagttcaggatataaaaattgataaagtttttattggaagttgtaccaatggaagaatagaagacttaagagaggctgctcaaattttaaaaaataaaaaaaaggctgcacatgtgcatggtatggttgttccaggatctggactagtaaaagaacaagctgaacaggaaggtttagataaaatattcattgagtctggatttgaatggagagagcctggctgctcaatgtgcttagcaatgaatgctgataaattaaaaccacaagagagatgcgcatctacttcaaatagaaactttgagggaagacaaggaagaggtggtcgtacacatctagtaagcccaggtatggcagcagctgccgcaattgctggaaatcttgatgacgtaagaaaatatcgaaactaat

SEQ ID NO: 283444 - DNA, 490 bp, Unknown
  Bacterial polypeptide expressing nucleotide sequence isolated from the Sargasso Sea
aatgaaaaaatttgtatccctcaaaagtattcctgcatatttgccaatcgtcaatatcgatactgatatgatcatcccaaaacaattcctaaaaacaataaaaagaacaggattgggaaaaaacctttttcatgaaatgagatatgataacgatggaaatattattaaagattttattttaaataagaaaccatttgatgtttcaaaaatattaattgcggggaataattttggttgtggttcatcaagagaacatgcaccatgggctcttttagactttggaattacatgcgtgataagttcaagttatgccgatatcttttataataattgttttaaaaatggcatattaccaataattttaagtgaggaaaaaataaaagaattatcagattactcaaaaagacaagaagaaatagaaataaatttaaatgatgaaaaaattatctatggaaataatgagatcagttttaaaattgagcctttcaaa

SEQ ID NO: 283445 - DNA, 856 bp, Unknown
  Bacterial polypeptide expressing nucleotide sequence isolated from the Sargasso Sea
tgttcatgtcatcgctccagaacaaggtcggattatgccaggtatgacggttgtttgtggcgattctcatacctcaacgcacggcgcttttggcgccctcgctttcggtattggtacatcacaagttgagcatgtattggcgacacaaactctgcgtgtgactcgtgccaaaacaatgtctattactttgacaggagcactcgctgttggcgttactgcaaaagacatcgctctttacgttataggaaaattaggagcaaggggaggaacaggcttcgtaatagagtatcgcggagagtgtatctcttcactttccatggaatctcgaatgacgctgtgtaatatgtcaatcgaggccggtgccaaaagcgcacttatcgcgcctgacgaaactacatatcactatctaaaaccattaatggattcgtttaaattagaacagaatatgtctcaacgatggcagacactgttcaccgacgataatgcgaagttcgataagtccttaacgctggatgtcagtaaactgagcccacaggtaacgtggggaacatcaccagaccaagttatatccgtgaacgacactataccgaccgcttgtacgacgtcatctgaacgtgcgcttcactatatgaatctaaatgaaggcgatgccatcgatggtttagctgtcgatgtggtcttcataggttcatgcactaacagccgcattgaagatttaaggcatgccgcttccatcgccaagttgggaaaagtcagccctagtgttcgtgccatagtggtacccggttcagtagccgtcaaaacacaagctgaaaaagaggggctgggacaaatttttatagattctgggctttga

SEQ ID NO: 283446 - DNA, 847 bp, Unknown
  Bacterial polypeptide expressing nucleotide sequence isolated from the Sargasso Sea
gttgaacacgcttttagcaacacaaaccttaattcaaaaaaaatcaaaaaattttcgcataaatgtcataggaaaattaaatttaggagtgacttctaaggatgtaattttacaaaccataggaaagataggtactgctggcggtacaggaatggttattgaatatgctggtcccgtaatagaaagtttaaatatagaacaacgaatgacaatttgtaatatgtctatagaagctggcgctagagccggactaattgcaccagatgaaaaaacttttaaatatttaaaagatagaccaatgtctccaaaaaaagaaaattgggacaaagctgtagaatattggtctaaacttaaatcagattctggagctaaatttgaccaggaagtggaaatacatggtgacgatattaaaccaatggtaacctggggaacttctccccaagacgttgtttcaattacagattctgttccagatccagataaagaaaaggacgaagatagaaaaatgtcaatgaatagatcgttaaattatatggggcttaaaccaaatacgaaaatgacagacatcaaagtcgatagaatttttataggcagttgtacaaatggaagaattgtagatttaagagaagcagcaaaaattttaaaaggaaaaaaaattgcaaaacatgtgaatgccatggttgttcctggatcaggactggtgaaacaacaggcagaagaagaaggcttagataaagtatttaaagaatctggatttgactggagagaaccaggttgctcaatgtgtttggcaatgaatgctgacaaacttaatcctaaagaaagatgtgcttctacatcaaaatag

SEQ ID NO: 283447 - DNA, 493 bp, Unknown
  Bacterial polypeptide expressing nucleotide sequence isolated from the Sargasso Sea
atggaaaaattttcaaaattaaaatcaataccatcttatttaccgctacaaaatattgatacagatatgattattccaaaacagtttttaaaaactataaaaagaactggattaggaaaaagcttattttatgagatgcgatatgacgatgacggtaaaataaacaataactttattctaaataatccaccctacaataaatcaaagattttatgtgcaggaaaaaattttggttgcggttcctctagagagcatgcgccttgggctttattagattttggtattaaatgtatcttaagctctagttttgctgatattttttataacaattgttttaagaacggtattttaccgattaaaattgatgaaaaaattgtatttgaaatatctgaatattctaagagaaaagaagaaattgaaatagatctagaaaaacaagaaattaaatacggaaataaagttattaaatttgttttagatcctttcaaaaaaa

SEQ ID NO: 283448 - DNA, 319 bp, Unknown
  Bacterial polypeptide expressing nucleotide sequence isolated from the Sargasso Sea
cttttaaaaggaaaaaaaatagcaaacaatgtgagcgctatggttgttcctggatctggtttagtaaaagaacaagctgaaaaagagggattagatttaatttttaaaaatgcaggatttgagtggagggaacctggctgttctatgtgcttgggaatgaatccagatcaattaaagccaaaagaaagatgtgcttcaacatcaaatagaaattttgaaggcagacaaggaagaggaggaagaactcatttggttagcccaggtatggctattgcagctgcaataaaaggatatctcagtgacgttagagaaatataaa

SEQ ID NO: 283449 - DNA, 785 bp, Unknown
  Bacterial polypeptide expressing nucleotide sequence isolated from the Sargasso Sea
ctcaaagttgcaggttgtcgagttagataaaaattgtaacgatttcggtataaaacaatttaatatcaactcaaataatcaaggcatagttcatgtaattggaccagaattaggcttaacgcttcccggaatgagtattgtttgtggcgactctcatacttcaactcatggtgcttttggttgtcttgcaatgggaattggaacatctgaagtggagcatgttcttgcaactcaaagtttaaaagtaaggaagcttaaaaatatgagaataaattttgaggggtcgatacaagaaggagtatcctcaaaagatattattttatacttaattaggacaataggaactgcaggtggaacaggatatgcagttgaatttgcgggatcatatatacgaaatatctctatggaagccagaatgacaatatgcaatatgtctattgaagcaggagctaaagtaggattagtttctgttgacgacaaaactattgaatacgttaaaaaacattctaatcttgaagctaatttaataaatgatgctattaaaaaatggaaaaatttaataactgataaagaagcaatattcgataaggaaattgacattgatgtatcaaaaattaatcctcaagtttcttggggcacatcaccagaaatggttatcgatttcaatgaaagaattccaccgagctcaattttttctgctgaaaaaagaaaaagcttagatcttgctaaaaattatatgggattgtcagataatcaagaattgagcgatttagatttcgataaag

SEQ ID NO: 283450 - DNA, 604 bp, Unknown
  Bacterial polypeptide expressing nucleotide sequence isolated from the Sargasso Sea
atggaaaaatttgaacttttaaaaggtatttctgctcctttagaaatgatcaatgttgatactgatatgattattcccaaacagtttttaaaaacaattaaacgctccggtcttgggaaaaatctttttcatgaacttcgatatgatattcaaggtaatataaaaaatgattttgtattaaattgggatccatacaaacaagcctctattttagtcgctggagataattttggttgtggatcaagtagagagcatgccccctggtcactcctagacttcggatttaaatgcatcatagctccaagttttgctgatatattttataataattgttttaaaaatggaattcttccaattcgtcttgatcaaaaaacagttgatgttttgatggatcaagcaaatcaaaaaaaacaattaactataaatcttaaagatcaattaattgttttagaagatggaaatacgattgagtttcaaattgatccgtttagaaaaaaatgtttacttgaaggtttagatgatattggtttaactcttcaaaagaaagaaaaaattgatcaatatgaagcttctctaaaaaacacacatccctggattatttaaa

SEQ ID NO: 283451 - DNA, 607 bp, Unknown
  Bacterial polypeptide expressing nucleotide sequence isolated from the Sargasso Sea
aatgcaaaaatttaatacactaaaaagtattccagcttatttaccaattgtaaatattgatacagatatgattattcctaagcaatttttaaaaacaataaaaagaactggacttggaaaaaatttattttttgaaatgagatatgacgataatggaaaagaaattaatgattttatattaaaccaagaaccatttaataactctaaaattttaatagcaggaaacaactttggatgtggatcatcaagagagcatgctccatgggcgttgttggactttggaattacttgtgtgattagttcaagttttgctgatattttttatagtaactgttttaaaaatggaattttaccgataatccttgaagaagaaaaaattaaagaaatttctgaatatgctaatagaaaagaggaaatttctgtagatttaaatgatcaaaaaattatttatggaaacaatgaaattaaatttgaaatagatccattcaagaagaaatgtttgttagaaggattagatgacattgcactctctttaaaaaaatctgataaaattcaaaattttgaaaatcagttaaaaaataaaaaaccctgggtttttaatgattaa

SEQ ID NO: 283452 - DNA, 277 bp, Unknown
  Bacterial polypeptide expressing nucleotide sequence isolated from the Sargasso Sea
cctgggttcaggactagttaaagaacaagcagagcaagagggtttagataaaatatttgtaaattcaggatttgaatggagagagccaggttgttctatgtgtttagcaatgaatgcagataaattaaaaccagaggaaagatgtgcatctacttcaaacagaaactttgaaggaagacaaggaagaggtggcagaacccatctagtaagtcctggaatggcagctgcagctgcaatctctggtaatttagatgatgttagaaagtatcaaaattaa

SEQ ID NO: 283453 - DNA, 864 bp, Unknown
  Bacterial polypeptide expressing nucleotide sequence isolated from the Sargasso Sea
ggcgctttagcatttggaataggtacttccgaaattgagcatgttttagcaacacaaacacttttacagaaaaaatcaaaaaattttagaattaatgttagtggaaaattaccaactggtgttacttcaaaagatgtaattcttcaaattataggaaagatcggaactgctggtggtacaggttatgttattgaatatgccggtaacttaatttcaagtctgagtgttgaacaaagaatgacaatttgcaatatgacaattgaaggaggtgcaagagccgggttaattcagcctgacgaaaagatatttaaatatcttcaaaataaaccaatgtctccaaaaaataataattgggataaagcacttgaatattggagtaatttaaaatctgatactaatgcaaattttgataaagaaattaatatagacggattagaaattaaaccaatggtgacatggggaacctcaccccaagatgttgttgaaatagatggtaaagtgccaaatccagataatgaaattgatccagatagaaaaaattcgattaatagatcattaaattatatgggtttaaaaccaaatatgaatgttaaagatattaaaatagataaggtttttattggaagttgtaccaatggaagaattgaagacataagagaggctgcaaaaattttgaaaaataaaaaaatagcctctcatgttaatgcaatgatagttcccggatctggtttagttaaagagcaagctgaacaagaaggtttagataaaattataaaagaatccggatttgagtggagagaaccaggttgctcaatgtgtttagcaatgaatgctgataagcttaaaccagaagaaaggtgtgca

SEQ ID NO: 283454 - DNA, 400 bp, Unknown
  Bacterial polypeptide expressing nucleotide sequence isolated from the Sargasso Sea
aatggaagcatttgaaactctttctggaaaagtcgttccgcttgatatcataaatgtggatacagatcagattataccaaaacaatttttaaaaaaaatagatcgtactggatttggtatccatctatttcatgattggcgttacctagatgacactggtaccaagcagaatcctgattttgtactcaatttcccacgttaccaaggttcagaaatattgctgactcgaaaaaacttcggttgtggatcgagccgtgaacatgctccatgggctttgcacgattacggattcaggtgtattatcgcttctagttttgctgatattttttataacaattgcagaaaaaacggtattctggctgtggttctgcgagatcatgaaattcaggacttgttgaag

SEQ ID NO: 283455 - DNA, 450 bp, Unknown
  Bacterial polypeptide expressing nucleotide sequence isolated from the Sargasso Sea
aatctgtgaaaaaggccttgaaatatatggatctcaaggccaaccttcctatcaaggaaataagtgttgatcgagtttttattggttcatgtactaattcacgcatagaagaccttcgttctgttgctgagtttgtaaaaggacgtaaagtaagtgatgatgtctcagcaatgattgttcctggaagcggtttgatcaagcagcaggcagagcaggaaggactggatgaaatatttattgcagcagggtttgaatggcgtcaaccaggttgttccatgtgccttgcgatgaatgatgatgtcctgaaacctggtgagcgttgtgcttcaacaagcaatagaaacttcgaaggccgtcagggtaaaggaggccgtacacatcttgttagtccgctgatggctgcagctgctgccgttgcggggcattttgtcgatccacgcacctactaaa

SEQ ID NO: 283456 - DNA, 421 bp, Unknown
  Bacterial polypeptide expressing nucleotide sequence isolated from the Sargasso Sea
cctgaaaaatgattattattggatttacaaacagagccacatagtgaaaacattatatgacaaactttgggatgatcatgtcgtacatgattatgatgatcataggtctttgatatacatagatcgtcatctaatccacgaagttacatcagcacaagcttttgaaggacttagattagcaaatcgaaagccatggagagttaatacaaatttagctgttcccgatcacaatgttccgactaaaaatcgcgaaattattgaagacccaatttcaaaacttcaattagaaacattagataagaattgcagagaaactggaattacgaaatttgaaatgtctgattctagacagggaattgttcatgttattggacccgagcagggggcgtccttaccaggtatgacaattgtttgtggagat

SEQ ID NO: 283457 - DNA, 776 bp, Unknown
  Bacterial polypeptide expressing nucleotide sequence isolated from the Sargasso Sea
tacaaaaggtatcaatgatcaacaatcaaaaatacaagtagatacacttagaaaaaattgtaaagaatttggtgttccattgtttgacatgaatgataaaagacaaggtatagttcacattattggaccagaacagggatttactcaacctggaacaataattgtttgtggagatagtcatactgctacccacggagcttttggagcacttgcttttggaataggaacttcagaggtagaacatgttttagccacacaaactcttttacaaaaaaaatctaaaaattttttacttaaagttgatggaaaaataccaacaggagttactgccaaagatgtaattttaaaaataatcggaacaatcggtactgctggtggaaccggatttgtaatcgagtattctggaaacgttattaaaaattttagtatggaggaaagaatgacagtttgtaatatgactatagaaggaggggcgcgagcaggtttaatacaacctgacgataagacttttgaatatttaaaaaataaacctttatctcccaaaaaagataattggaaaaaagctctagattattggagtaatttaaaatcagatgatgattgtacttttgataaagagataattattaacggacacgatgtagttccacaagtcacttggggtacatcccctcaagatgttgttcctgttaatgggtcagtaccagatccaaaaaaagaaaaaaacgatgatagacgtgaagctatggaaagatcattagattatatgggttaaa

SEQ ID NO: 283458 - DNA, 710 bp, Unknown
  Bacterial polypeptide expressing nucleotide sequence isolated from the Sargasso Sea
cgtcaccctggagtacttccacaccaaaccgcttgctcccaagggagagctatggtttcaggcagaggcatggtggcgcacccttcgctctgatgaagcggccgaatttgatcgaactttgatcttggacggggaggcaatatcgcctcacgtcacgtggggaacgtctccggagatggttgcctcggtcgagggctgtgtgcccaaactcgaggatatggaggacgagaccagtcgacagggccttaggcgcgcgctggaatacatggggctggaggaaggtatggccattaccgatatcaagcccgacgcgatcttcatcggctcatgcaccaattcccggatagaagatctcagagctgccgcctcagtgctcaaaggtcgacggattgcggcgacaattcgcaaggcgctggtggtgcccggctcggggctggtcaaggctcaggcggagtccgagggtttggacaagatttttctcgacgcaggcatggaatggcgagaccccggctgctccatgtgccttgccatgaatgctgaccgcctgctgcctgatgagcgctgcgctagtacctcgaaccgtaattttgagggtcgccagggcgccggtggtagaacccatcttgttagcccggcgatggccgccgccgcggcagtggcgggacattttgttgcggtcgatagctcaatatttggggaggcgcagtgat

SEQ ID NO: 283459 - DNA, 935 bp, Unknown
  Bacterial polypeptide expressing nucleotide sequence isolated from the Sargasso Sea
cagacatccaaatttgactttagcagttgcagatcataatgttccaacaactgatagaactaatgggattgctgatcaagaatccaaaattcaagttgatactttagaaaataattgtaaagaattcggtattcaactctttggaatgaatgataagaggcaaggtattgttcatattattggcccagagcaaggttttactcaaccaggtacagttattgtatgtggagatagtcatacagctacacacggtgcttttggggctttagcatttggaattgggacatcagaagtagagcatgtattagcaacacaaacattggttcaaaaaaaagcaaaaaattttagaataaatgtaaatggaaaacttccattaggagttacttcaaaggatgtgattttacaaataattggaaaaataggaactgctggtggtaccggatgtgttgttgaatatgctggtgatttaattaaatcgttaagtgttgaacaaagaatgaccatatgtaacatgaccattgaaggtggagctcgagcaggattaattgcaccagatgaaaaaatttttaaatatttagatggaaagccgatgtcaccaaaaggtgaaaaatggaataaggctcttgagtattggaaaaatttaaaatcagatgataatgcaatatttgataaagaaattagtttagaagcaaaagaaattttgccaatgataacttggggaacttcacctcaagatgttattacgatcgatggcaaaattccaaatccaaattctgagcaagataaagacaaaaagaactcaatagagagagctttaaaatatatgggtcttaagccagatatggtggctaaagatataaaaatagataaagtttttattggtagctgtacaaatgggagaattgaggatttaagagaagcagcaaaaatttaaa

SEQ ID NO: 283460 - DNA, 829 bp, Unknown
  Bacterial polypeptide expressing nucleotide sequence isolated from the Sargasso Sea
gatgtcaaagactttatacgacaaactttggaaaaaaaatcttgtacacgaacaagaggatggtacctccttaatatatgttgatagacatttagttcacgaggtaacaagccctcaagctttcgagggattgagattaaataatagaaaagtgagaagacctgatctaactttagctgtaccagaccataatattcctacaactgataggtcaaaaggtattgacgacaaagaagctaaaatacaaatagaaacattaagaaaaaactgcaaagactttggtgtacaattatttgacgttaatgacaaaagacaaggtatagttcatattataggtccagaacaagggtttacacaaccaggttctgttattgtttgtggagatagtcacacagctacacatggagcttttggagctcttgcatttggtataggaacatcagaggttgagcacgttttagccactcaaacattaatgcaaaagaaatcaaaaaacttcagaattaatattaatggcactttaccaaaaggtgttacagccaaagatgtaattttaaaaattataggcactattagcaccgctggaggaactggttatgtaatagaatacgctggagatgtgatcagaaatttcagcatggaagaaaggatgactgtttgtaatatgactatagaggccggcgcaagagctgggttgatagctccagatcaaaaaacattcgattatttaaaaggaaaaaaaatgtcgcctcagggggaaaactggaacaaagcattagattattggaaaaccttatactctgatgatgattgtaaatttgataaagaa

SEQ ID NO: 283461 - DNA, 829 bp, Unknown
  Bacterial polypeptide expressing nucleotide sequence isolated from the Sargasso Sea
ctcgccgcaggcgtttgacggcctgcgcgcgcacaaacgtccggtgcgccagccgggtaaaaccttcgccaccatggatcataacgtctccacacagaccaaagacattaacgcctccggcgaaatggcacgtatccagatgcaggaactgatcaaaaactgcaacgaattcggcgttgagctgtatgacctgaatcacccgtaccaggggattgtccacgtgatggggcctgaacaaggcattaccctgccgggcatgaccattgtttgtggcgactcgcataccgcaacccacggcgcgtttggcgcgctggccttcggtatcggcacgtcggaagttgagcatgtgctggcaacgcaaaccctgaaacagggccgcgccaaaaccatgaagatcgaagtgaaaggcactgcggcaccgggcatcaccgccaaagatatcgtgttagcgatcatcggcaaaaccggtagcgcaggcggcactggccacgtggtggaattctgcggtgatgcaattcgcgcgctgagcatggaaggccgcatgacgctgtgcaatatggccatcgagatgggcgcgaaagccggtctggttgcaccggacgaaaccacctttaactacgtgaaaggccgtctgcatgcgccgaaaggcaaagattttgatgaagccgttgcttactggaaaaccttgcacaccgacgaaggggccactttcgacaccgttgtgaccttgcaggcagaagagattgcgccgcaggtgacctggggcaccaacccgggccaagtgatttcggtgaccgatatcatccccgatccggcatcttcgccgatc

SEQ ID NO: 283462 - DNA, 763 bp, Unknown
  Bacterial polypeptide expressing nucleotide sequence isolated from the Sargasso Sea
aatgccttacactttatacgacaaaatttggaatcaacacatagtgcatcaacaagaagatggtacttctctgctttttgtagacagacatttagttcacgaggtcacaagtccacaagcgtttgaaggtttaagaacatcaaatagaaacgttagacagccaaatttaactttagcagttgctgatcataacgttcctactactgatagatcaaaaggaattgaggatgaggactcaaaaattcaagtagaaaccttagaaaaaaattgtaaggaattcggaataaaattgtttggcatgaatgataaaagacaaggaattgttcacattataggtcccgagcaaggttttactcagcctggaactataatagtttgtggagatagtcacacagctactcatggagcgtttggtgctttggcttttgggattggaacctctgaagttgaacacgtgctagcaacccaaactttagttcagaaaaaatcaaagaatttaagaataagtgtaaatggtaaattagctattggcgttacttcaaaagatgtaattttgcaaataattggaaaaataggtaccgcaggcggcacgggttatgtaattgaatatgctggagatctagtctcttctttaagtgttgagcaaagaatgacaatttgcaacatgaccatagagggtggagcaagagcaggtttaattaaaccagatgaaaaaacatttaagtatttaaaaggtagaccactgtctcccaaaaatgaaaat

SEQ ID NO: 283463 - DNA, 289 bp, Unknown
  Bacterial polypeptide expressing nucleotide sequence isolated from the Sargasso Sea
aatgaagactttatacgacaaactctggaaagagcatcatgtcacccaactcgactcgggagagtctcttttatacatagatagacactatttacatgaggtcacatctcctcaagcgtttgaaggattatcaaaaaaaaatctaaagccctggaggctcgaggcaaatatagctactcccgatcataatgtgcccacaacaagaggcaataattttacatccgatttgattaatgacgagatttcaaaaattcaagtagtagaattagataaaaactgtaacaaattt

SEQ ID NO: 283464 - DNA, 784 bp, Unknown
  Bacterial polypeptide expressing nucleotide sequence isolated from the Sargasso Sea
atgaacaatcctaagcctaaaactctttttgataaaatttggcaccaacatcttgttcatcaacaagaagatggaacatgtcttatatatatagaccgacatttagttcatgaagtaacaagcccacaagcatttgaggggttaagagataataaaagaaaagttcatcgtccagaaagcacttttgcagttgctgaccataacgtaccaacatcagataggtctaaaggaattgataatgaagaaagtagaattcaagtagagacacttgaaaacaattgtaaagaatttggagttacaatattccctcttcttgatagaagacaaggaatagttcatattgtaggtccagagcaaggaataacacagccaggaatgacaattgtatgtggtgatagtcacacagcaacacatggagcgttcggtgcacttgcttttgggataggtacaagtgaagtggagcatgttttagcaagtcaaactttaattcagcagccagcaaaaaatatgaaaatttctgttaatggaaatcttaaacctggtgttggtgctaaagatataattttacatataattggcgttattggaacagcaggtggaactgggtatgttattgaatatgcaggtgaagcaattcaagcacttagtatggaaggtcgaatgactatttgtaacatgagtatagaagcgggtgcaagagcaggcttaattgctcctgatcaaacaacatttgattacattaaaggaagaccttatgcgccaaaaaggggaaaattgggacaag

SEQ ID NO: 283465 - DNA, 733 bp, Unknown
  Bacterial polypeptide expressing nucleotide sequence isolated from the Sargasso Sea
aatgtccacaactctttacgataaaatatggaatgatcacttagttgatcaacaagatgatgggacagcccttctttttgttgatagacatttagttcatgaggtgacaagtccacaagcatttgaaggattaagaaattcaaataggaaagtaagacatcctaatttaacactagcagttgcagatcataatgttccaaccacggataggactaaaggaatagctgatcaagaatctaaaatacaagtagatactctagatgcaaattgtaaagaatttggtgtccaactttttggaatggatgacagaagacaaggtattgttcacatcataggtccagaacagggatttactcaaccaggtactgttattgtatgtggagatagtcatacagcaacgcatggagcttttggagctttagcatttggtattggaacatcagaagttgaacatgttttagcaacacaaacactagttcaaaagaaagcaaaaaattttagaataaatgttaatggtaaacttccattaggtgtcacttcaaaagatgtaattcttcagataattggaaaaattggtacagctggtggaacgggttgtgtaattgaatatgcaggagatttaataagatcattaagcgttgagcaaagaatgactatctgtaatatgacaattgaagggtggagcagagcaggattgattgcgccagatgaaaaaatatttgagtatttaaaa

SEQ ID NO: 283466 - DNA, 214 bp, Unknown
  Bacterial polypeptide expressing nucleotide sequence isolated from the Sargasso Sea
atgagtgcaagaactttatacgataagctgtgggacgcccatgtagtacgttatctgagcaaagatactgcattgatttacatcgataggcatttgatccacgaggtaacgtcgcctcaagcctttgaaggattggaattagctggccgagatctttggcgaaaaaactcgttaaaagctgattctgatcacaacgttcctaccgtaaacttgg

SEQ ID NO: 283467 - DNA, 633 bp, Unknown
  Bacterial polypeptide expressing nucleotide sequence isolated from the Sargasso Sea
gatgaaaataaataatcctaaaactctttttgataaaatttgggaacatcatcttgttgatagacaagaagatggaacttgtcttatatatattgatagacaccttgttcatgaagttacaagccctcaagcatttgaaggtttgagaaataataaccgtaaagttagaaggcctcaaagtacttttgctgtagctgatcataatgttccaacttcagatagatctaaaggtatagaaaataaagaaagtagaattcaggttgaaacactagaaaaaaattgcaaagattttgatgttacactttttccattattagatagcagacaaggtatagttcatatagttggaccagaacaaggtataactcagccaggtatgacaatagtttgtggtgatagtcatacagcaacacacggagcatttggtgccctagcttttggtatcggcacaagtgaagttgaacatgtattagctactcagaccttgattcaaaaacctgcaaagaatatgcgaatttctgttgaaggtaaattaaacttaggtgttacagcaaaagatattattcttcatataataggaaaaataggaacagctggtggaactggttatgttattgaatatgctggtaaatg

SEQ ID NO: 283468 - DNA, 1038 bp, Unknown
  Bacterial polypeptide expressing nucleotide sequence isolated from the Sargasso Sea
gtactgttattgtttggtggagatagccatactgccacacacggtgctttcggtgcgctagcttttggtataggcacatcagaagttgaacatgtgttggctacacaaactttgatccagaaaaaatctaaaaattttttagttaatgtagtaggtacattaccaataggagttagttcaaaggatgttattttacaaactattggtaaaattgggactgcaggtggaactggaacggttattgaatatgcaggaagtgttattgaaaacttaagtatagaacaacgtatgacaatttgtaatatgtcaattgaagctggagctagagcaggattaattgcgccagatgaaaagactattaaatatttaaaaaataaacctatgtctcccaaaaaaactaattgggatcaagctgtggaatattggtctaaacttaaatctgaccaagacgcaaaatttgataaagaagttgaaataaaaggaaatgatattagtccaatggtaacatggggaacttctcctcaagatgtagttcctattactggaacagtacctgatccagaaaaagaaaaaaatgaagatagaaaaaaatctatgaaaagatctttaaattatatgggactagaaccaaatacaaaaataacagatataaaaatagatagaatttttattggaagttgcactaatggaagaatagaagatcttagagaggcaagtaaaattattaaaggaaaaaaagttgctaagcatgtaagtgcaatgattgttccaggttcaggcctagtaaaacagcaagccgaagaagaaaaaatagacaaaatttttaaagaagcaggttttgaatggagagagccaggttgttctatgtgcttggctatgaatgcagataaacttaatccaaaagaaagatgtgcatctacatcaaacagaaatttcgagggtcgacaaggaagaggaggcagaactcatttagtaagtccagcaatggcagccgccgcagctattgatggtcatttaacagatgttagaaagtttagc

SEQ ID NO: 283469 - DNA, 586 bp, Unknown
  Bacterial polypeptide expressing nucleotide sequence isolated from the Sargasso Sea
catggaccgcatcaacgtcgataccgatcagatcattccgaaacagtttcttaaaaaaatcgaacgaaccggttttggcaaacaccttttccacgactggcgttatctcaacgacgagggaaccaagctcaacccggactttatcctcaacgagccacgctatcagggagcagaaattctgttggcacgagacaattttggctgcggatccagccgtgaacatgcgccatgggccttgttggactatggattccgctgcatcattagtccgagtttcgccgatatcttcttcaacaattgcaggaagaacgggattctgctggtggtgttgaacgagtcccaggtacaggccctttttgaagaggtcactgccaacgtaggctgccagttgaaagtggacctgcagcagaaaacggtcagttctctggcaggattgaattattccttcgaaatcgatgatttcgccagacagtgcctgctgggaggaatggatgacatcggctggactcttcagtttgaggaccgcatcggtcgtttcgagcaggaatccgcatcccaaaccccctggctcagcctttccgcctga

SEQ ID NO: 283470 - DNA, 766 bp, Unknown
  Bacterial polypeptide expressing nucleotide sequence isolated from the Sargasso Sea
tgtttcagatggggttgggcccaaagatattattttaggaatcatcagaaaaattggaacaggtggaggtgcaggacatgtaattgaatacgttggtgatgttattaaaaacatgagcatggagaatagaatgacaatttgcaatatgtcaatcgagggtggagcaagagcaggaatgattgctccagatgaaactactttcaattatttaaaagagaaaaactatgctcccaaagactctgattggaatgatgcagtacatgaatggagtaatcttttttctgacgatgatgctagctttgataaagttgtaacaataaatgccgaggagcttgaaccgtcagtgtcatggggtacaaatccatcacaagttatattcataaatgacgaaattcctcatcctgataattttcaagacgcatcagataaagaagcagcaattagagctttggagtacatggatttagagcccggaataaaaattaatgaaatcaatttagatagggtgtttataggcagttgtaccaatggtcgtattgaagatttaagagaggcggcccaagtagtaaagggcaaaaaagtatcagagactgttggtgctatggttgttcctggatcaacacttgtaaaaaatcaggctgaggaagaaggattagacaaaatttttattgatgcaggttttgattggagagaagcaggatgttcaatgtgtctgggtatgaatccagatatattaagtccaggtgaacgctgtgcttctacttca

SEQ ID NO: 283471 - DNA, 700 bp, Unknown
  Bacterial polypeptide expressing nucleotide sequence isolated from the Sargasso Sea
atgtcaaaaaccttatatgataagatatgggaaaaccatcttgttcacaaacaagatgatggtacatctttaatttatgtcgaccgacatttaattcacgaagttacaagcccacaagcttttgagggattaagattacaaaaaagaaaagtaagaagaccagaattaactttagctgttccagatcataatgtgcctacaacagatagatctaaaggaatagatgatgaggagtcaaaaatacaagttgatacattgagaaacaattgtgaggaatttaatattgagctatttgatgttaatgataagagacaaggcattgttcacataattggtccagagcaaggttttactcaaccaggtacagtaattgtttgtggtgatagccatacagcaacacatggagcttttggcgcgttagcttttggtattggaacttcagaagtagaacacgttttagctacacagacattaattcaaaaaaaatctaaaaatttaagaattaatgttaatggaaaattaccaataggtgtaacggctaaagatgtaatcttaaaaattattggaacaatagggacagctggaggtacaggctatgttatagaatttgctggcgaagtaatcagaaatctaagtatcgaggaaagaatgacagtttgtaatatgactattgaagctggtgcgcgagcaggcttaatcg

SEQ ID NO: 283472 - DNA, 481 bp, Unknown
  Bacterial polypeptide expressing nucleotide sequence isolated from the Sargasso Sea
atgtttgaaaaaatctggaatgctcatcttgttcatgagcaggaaggcaactcaattgtctatatagaccgccatctggtacatgaagtaacttcgcctcaggcatttgaaggattaagaatatctggtaggtcagtgcttcatccagaattaacatacgcggtacctgatcataatgtccccaccaaaaatcaggacaaaccaattgaagatccaattgcagctctacaggtagaaactttgagaaataactgcaaagaatttggtataactctatttgatttgggggacgagcgttcaggaattgtacatgtgattggtccagaacaggggctgacgctaccttggtcaactatagtctgtggtgattctcatacagctactcatggggcttttggtgcactggcttttggtataggaacttctgaagtagagcatgtactggccactcagactttgcagcagaagaaaccaaaaacca

SEQ ID NO: 283473 - DNA, 926 bp, Unknown
  Bacterial polypeptide expressing nucleotide sequence isolated from the Sargasso Sea
tggagcctttggagctttagcatttggaatcggaacatcagaagttgaacacgttttagcaacacaaacactagttcagaagaaagcaaaaaattttagaataaatgttaatggtaaacttccgttaggtgtcacttcaaaagatgtaattcttcagataattggaaaaattggtactgctggtggaacaggttgtgtaattgaatatacaggagatttaataagatcattgagcgttgagcaaagaatgacgatctgcaacatgacaattgaaggtggagcaagagcaggattgattgcaccagatgaaaaaatatttaaatatttaaaaggtaaacctatgtcacctaagggtgaaaattgggaaaaagctttgaattattggaatggtctaaagactgacagagaggcaaattttgacaaggaaataaatttaaatgcatcagaaattttgccaatgataacatggggaacttctccacaagatgttatcacaattgatggaaaagttcctaatccacaaagcgagacagatgaggacagaaagaattcaattgaaagatcactgaaatacatggggctaaaacctgatatgtcagcaacagatataaagattgataaggtgtttatcggaagctgtacaaacggaagaattgaggatttaagagaggcagctaaaattttaaaagataaaaaaatatcatctcatgtaaatgcaatggtagttccagggtctgggttagttaaagaacaagctgaacaagagggattagataaaatttttattagttcaggatttgagtggagggagccaggctgttctatgtgtttagccatgaatgctgataagcttaagcctgaggaaagatgtgcctctacttcaaatagaaattttgaaggaagacaaggtagagggggcagaactc

SEQ ID NO: 283474 - DNA, 598 bp, Unknown
  Bacterial polypeptide expressing nucleotide sequence isolated from the Sargasso Sea
atggcttacgataaattcaatattctaaatagctcagctgttccacttaatatcgacaatgttgacacagatcaaataatccctgcaagatttttgaaagcaactgagagaaaagggtttggtgaaaatctatttaaagattggagatataactcagatgacactcccatagattcatttcctctaaacaataagatctacaatggaaagatacttgttgcaggcaaaaattttggctgtggatcttcaagagaacatgcagtttgggcaatatacgattatgggttcagagctgtagtatcaagtttctttgctgatatatttaaaaataactgtttgaatattggtgttcttcctattcaagtttctgaagaatttttaatagatattttttcccaaatcgattcaaatccaaaaagtaattttgaggtaaacttagaaattcaagaatttaagattattgaaactgaaaagtctgaaaaatttaatattagctcctacaaaaagagtaatatgtcaaatggttttgatgatatagattatcttataaataaaaagcaagaaatatctaaatttgccaataattctccatattaat

SEQ ID NO: 283475 - DNA, 863 bp, Unknown
  Bacterial polypeptide expressing nucleotide sequence isolated from the Sargasso Sea
cttacctatgattgatgaaacttcatcaacacaaatcaaaactttagaaaaaaattgtggagattttggtataaagctatttggaattaatgatcctaatcaaggaattgttcacgtaataggtccacaattaggaattaccttacctggaagtacaatagtatgcggtgatagtcacacctctacacaaggagcatttggtgcatttgcatttggaattggaactagtgaggttgaacatactcttgcaactcaaacactttggcttgaaaaacctaaaacgtttgaaattttagcaacgggaaagcgtaaaaactcatttgcagtaacatctaaggacataattctaagtattatcaaacaaattggaactgatggaggcacgggtcatgtgttagaatatcgtggtgatgcaattagtgatttgtctatggaacaacgaatgaccatttgtaacatgtctattgaagcaggttcaagagctggattaattgctcctgatgagaaaacttttgattatctcaataacagaaaatatactccaaaaaattatgatgatctggttgatgattggaaaaataatctcatgactgatgctaattcaaaatttgataaaacttttacaattgatgtagaaaaaattgaaccgcaagtgagctggggaacaaaccctgcaatggtttctgatgtaacaagtacagttcctactcctgaggaatttggtaacaataatgaaatacaaattgaaagtgcaaaaaaagcattatcatatatggacttgaaacctgatactccaattgtagatattccaattgatagagttttcattggttcatgtacaaatgcacgtttagaagattgaa

SEQ ID NO: 283476 - DNA, 747 bp, Unknown
  Bacterial polypeptide expressing nucleotide sequence isolated from the Sargasso Sea
tttgtaatatgagcattgaagctggtgctcgcgctggattaattagcccagatcaaacaacttttaattacataaaaggcagaccttatgcccctggaactgaacactgggatcaagcagtagaatactggtcatctcttccctcagataatgatgcaaattacgatcatgaaatagttatagatagttcagaaattgacccaatggtgacatggggaactagccctgaggacgttgtgtcagtgaaaggcacggtgccaaatccaagtagtgctaaaacagaaaataaaaagaaaagtattgaaagatcacttgagtatatgggtcttaagcccggaacaaaaattacagacataaaattagataaaatatttattggctcttgcacaaatggtcgaattgaggatttaagaaaagttgcatctattgttaaggacaaaaagattgcttcacacgttcaagcaatgatagtaccaggatcaggcttagttaaaaaacaagcagaagaagaaggaatagatataattttaaaagatgctggctttgaatggagagaggctggatgttcaatgtgccttggtatgaatcccgatcaattaaaaccaggtgaaaggtgcgcatcaacttctaatagaaattttgaaggtagacaaggccgaggtggtagaactcatttaatgagtcctgagctcgctgcggcatctgctattactggaaacatttcagatataagagattttacataaa

SEQ ID NO: 283477 - DNA, 574 bp, Unknown
  Bacterial polypeptide expressing nucleotide sequence isolated from the Sargasso Sea
aatgcccaatactctttacgataaaatttggatcgatcacttagtagatcaacaagatgatggaaccgctttactatttgttgatagacatttagttcatgaagttactagtccccaggcttttgagggattaagaaattctaaacgcaaggtaagacatccaaacttaactcttgctgttgcagatcataacgttcctacaacagataggtccaaaggtatttctgacaaagagtcaaagattcaggttgaaactttagaagctaattgtaaagaatttggtgttcaactttttggaatgaatgataagagacaaggtattgttcatgttactggtcctgaacagggatttactcaaccaggtaccgttatagtttgtggtgatagtcatactgctactcatggtgcatttggtgctttggcgtttggaattggaacttcagaagtagaacatgttttagcaacacaaacattagttcaaaaaaaagcaaagaattttagaattaacgtaaatggtaaactaccaataggcgttacatctaaagatgtaattcttcaaattattggtaaaatt

SEQ ID NO: 283478 - DNA, 824 bp, Unknown
  Bacterial polypeptide expressing nucleotide sequence isolated from the Sargasso Sea
tctgcttaagaaaaaatcattaaatatgaatattatggttgatggaaaaatgccggagtatttttattcaaaggatttagcgctattgataattagtaaaatcggtactgcaggtggtacaggttatgctattgaatatacgggcaatgcaattaaaaatctttctatggaagcaagaatgacattatgtaatatgactattgaagcaggagctacaactggattaattgcagtagataataagactattgaatatgtaaaaaataagccgttcagtcctaaaggcgaagattttgagatagcaaaaaaaaattggcaaaatttagtttcagacataggttctatttatgataaaactattaatattgatataaacaaatcaagcccaatgataacctggggtacttctcctgaaatggctgttggtgttgatgaaaatttacctgatttaaacgatgaaaaattttcttctaaaaaacaagatctacaaaatgcattttcttatatgggtttaaaggaaaaacaaaacgtaaattcaattaaattagataaaatttttataggttcatgtacaaattcaagaatagaggatttaagaatcgttgctgatattgtaaagaataaaaaaattgcaaaaaatattaaaagcgcaattattgttccaggatctggcctgataaaagaaaaagctgagaatgaagggcttgataaaatttttactaaatctggttttgaatggagaagtccaggatgctctatgtgtttaggaatgaatgatgataaattaaatgagtatgaaagatgtgcatctacttcaaatagaa

SEQ ID NO: 283479 - DNA, 451 bp, Unknown
  Bacterial polypeptide expressing nucleotide sequence isolated from the Sargasso Sea
atgtcaaaaacactctacgataaaatttgggatgaccaccttgttcatgaagacaatgatggaacagctttactttatgttgatagacatcttgttcatgaggtcactagtccccaagcttttgaaggattaagaattcaaggcagaaaagttagaaaaccaaaacttactttagccgttcctgatcacaatgtcccaactactgatagatcaaaaggtatatctgataagcaatctaaaattcaagttgatactttaagaaataattgtaaagaatttggaataaatttatttgatgttaatgacaagcgacaagggatagtccatattattggaccggagcaaggttttacacaaccagggacagtaattgtatgtggagatagccacacagctacccacggagctttcggttctcttgcatttggaataggcacttctgaagtggagc

SEQ ID NO: 283480 - DNA, 867 bp, Unknown
  Bacterial polypeptide expressing nucleotide sequence isolated from the Sargasso Sea
tgcatttggagctttagctttcggtattggtacatctgaagtagagcatgttttggctactcaaactttagttcaaaaaaaagcaaaaaattttagaattaacgtaaatggtaaacttccaatcggcgttacatcaaaagatgtaatattacaaataataggaaaaattggcacagcaggtggcacaggacatgttattgaatacggaggaagcttaatttcatctttaagcgttgagcagagaatgactatttgcaacatgagtatcgaagggggagcacgcgcaggtcttataaaaccagatcaaaaaatttttgattatttaaacggtaagccaaaatcaccaacaggaaaaaattgggatcttgctatggaatattggaaaaacttaaaaacagatccaaatgcaaaatttgacaaagagattaatttaaccggcgaagaaattagtccaatggtcacttgggggacgtctccacaagatgtagttactattaatggaaaagttccagatccaaattatgaaaaaaataatgataaaaaaaaatctattgaaaggtcattaaaatatatgggattgaatccgggtatttcagtaaaaaatataaaaatagacaaagtttttattggaagttgcacaaatggaagaattgaagacctaagagaagcagcaaaaatattaaaaggtaaaaaaatagcatctcatgtaaatgcaatggttgttcctggatcaggcttagtaaaagaacaagcggaacaagaaggtttagacaaaatatatattgattctggttttgaatggagagagccaggttgttcaatgtgtctagccatgaatgcagataaattaaaaccagaagaaagatg

SEQ ID NO: 283481 - DNA, 884 bp, Unknown
  Bacterial polypeptide expressing nucleotide sequence isolated from the Sargasso Sea
catggaggtgacaagcccccaagcttttgaaggattaagaaattctaacagaaaagttagacatccaaatttaactttagcagttgcagatcataatgttccaacaactgacagatcaaaaggtatttcagatgaagagtcaaaaattcaagtagatactttagcggcaaattgtaaagaatttggtgttcagttatttggtatggatgataagaggcaaggtatcgttcatattataggacctgaacaaggttttactcaaccaggtacagttattgtttgtggagatagtcataccgcaacgcatggagcatttggtgctttagcatttggaataggaacttcagaagttgaacatgttttagcaacccaaacactagttcagaagaaagctaaaaattttagaattaatgttaacggtgaacttcctttaggagttacttctaaagatgtaatacttcaaataattggaaaaataggtacagcaggtggaacaggatctgttgtggaatatgctggagatttaataagatctttaagtgttgagcaaagaatgactatttgcaatatgacaatcgaaggtggtgcaagagcaggattaattgcaccagatgaaaaaatttttgaatatttaaaaggaaaaccaatgtcaccaaaaagtgaaaattgggataaagctttgaactattgggaaactttaaaaacagactctgatgctagttttgacaaagaaattagccttaatgcaaatgaaattttacctatgattacatggggtacgtcaccacaagatgtaataacaattgatggaaaagttccaaatccaaataatgagactgacgaagataaaaaaaattcaattgaaagagctttaaagtatatgg

SEQ ID NO: 283482 - DNA, 713 bp, Unknown
  Bacterial polypeptide expressing nucleotide sequence isolated from the Sargasso Sea
tatgacaatttgtaatatgtcaatagaagctggagctagggctggattaatagctcccgatcaaaaaaccattcaatacttaaaggatagacctatgtctcccaaaaaatcaaattgggataaagctgtagaatattggtctaaacttcagtctgacacagaagctaaatttgataaagaagttgagataaagggaaatgaaattaatccaatggtaacatggggaacatcaccacaagatgttgtatcaattacaggagctgttccggatccagaaaatgaaaaagatgaagatagaaaatcttccatgaatagatcactaaattatatgggacttaaagcgaatacaaagatgactgatattaaaattgataaaatttttattggaagctgtactaatggcagaataggagatttaagagatgcggcaaaaattataaaaggaaaaaaaatatctaaacatgtgagcgctatggttgtcccaggctctggtttagttaaagagcaagctgaacaagaaggaatagataagatttttaaggatgctggttttgattggagagagccaggatgttcaatgtgtttagcgatgaatgcagataaacttaatccaaaagaaagatgtgcatctacatcaaatagaaattttgagggtcgtcaaggacgaggtggcagaacacatttagtaagcccagcaatggccgccgccgccg

SEQ ID NO: 283483 - DNA, 508 bp, Unknown
  Bacterial polypeptide expressing nucleotide sequence isolated from the Sargasso Sea
atggtaattgatttcaatgaaaagattccatcgagctcaattttttctgctgaaaaaagaaaaagcttagatctagctaaaaattatatgggattgtcagataatcaggaattgagcgatttagatttcgataaagtattcattggatcatgtactaactctcgaattgaagatctaagagaagccgcagaagttttaaaaggtcaaaaggtttctgaaaatatccaagaagccattgttgttccaggatctggaatggttaaagagcaagctgagaaggagggaattcataaaatattcattgatgctggatttcagtggagggcaccgggttgttctatgtgcttaggcatgaatccagaccaattaagcccatatgaaagatgtgcttcaacttcaaataggaattttgagggtcggcaaggtaacttaggtagaacgcatttaatgagcccaaagatggctgctctaaccgcaataaacggaaggattgtaaaagagatttaag

SEQ ID NO: 283484 - DNA, 793 bp, Unknown
  Bacterial polypeptide expressing nucleotide sequence isolated from the Sargasso Sea
gaagtggagcatgtattagctactcaaactttaattcaaaaaaaatctaaaaattttagagtaaatgtgaacggaagtttaccggcaggagttacatcaaaggatgttatccttaaaataatcggaacaatcggaactgcaggtggaacaggttatgtaattgaatttgctggtgaagtaataagaaatttaagcgtagaacaacgtatgactatatgcaatatgactatagaagctggtgccagagcaggattaatatctccagataataaaactattgagtactttaaagatagaccgatgtctccaaaaggtgagaactggacgaaagcagttgcacattggaaaaaacttttttctgatagcgatgcaaagtttgataaggaagtaaacattgatgcaaaagacattgaaccattagttacatggggaacatctccgcaggacgtctccccaattactggagaggtgccagatccagaaaaagaaaaagataaagatagaagaacagcaatgtacagatccttagaatacatgggtttaaaacctaaaatgaaaatctctgatataaaagtagataagatctttattggcagttgtacaaatggaagaatagaagatctaaggctggctgcaaaactattaaaaggaaagaaaatagcaagcgatgtaagcgcaatggttgttccaggatcgggattagttaaaaaacaagccgaagaagaaggtattgataaagtttttaaaaatgcaggatttgaatggagagaacccaggatgttctatgtgttta

SEQ ID NO: 283485 - DNA, 382 bp, Unknown
  Bacterial polypeptide expressing nucleotide sequence isolated from the Sargasso Sea
aaagtcttcattggtgcctgcaccaatggccggattgaagacttgcgcgcagcagccaaaatagcgtcagggcggaaagtggccgaaaacatcacgcaggcgttggtggtgcccggctcgggtcttgtaaaagtccaggctgaggccgagggtttggatcagatctttacggaggcaggtttcgagtggcgggagccgggttgttccatgtgtttagcgatgaacgcggaccgactcgagcctggagagcgctgtgcggcgacctcaaaccgcaacttcgaagggcggcagggttacggcggccggactcatctcgtttcaccgtcgatggctgcggcggccgccatcgcgggacgttttgtggatccgaatcagctttaag

SEQ ID NO: 283486 - DNA, 352 bp, Unknown
  Bacterial polypeptide expressing nucleotide sequence isolated from the Sargasso Sea
aatggagaagtttgtcaattacagcagcgtggtgatcccaatcgaccggagtaatgtggataccgacgcactcatccccaaacagttcctgaaatctgtcgaaaagtctgggttcggcgacaatcttttcgacgagtggcgctatctcgatcagggggagccgggtcaggattgcagcgggcgacctctcaatacagattttgtgttgaataaaaatggttataagggcggtcgaattcttctggcccgagagaattttggctgtggatcctctcgggagcatgcggtttgggcgctccgggattttggtatccggacagtgatagcgggaagttttgccgatatttttttc

SEQ ID NO: 283487 - DNA, 851 bp, Unknown
  Bacterial polypeptide expressing nucleotide sequence isolated from the Sargasso Sea
tgatagacatttaatacatgaagtaacctctccgcaagcttttgaaggtttaaagatagccggcagagagccatggagaatatcttcaaatatcgctacccctgatcataatgttcctacaactgatcgggaaaagggcattgaaggcatacaagatgaagtagcgaaacttcaagtaaaaactcttgataagaactgttctgacttaggcattcttcaatttgatattttagataaaaggcaaggcattgttcacgtagttgggccagaacaaggagttactttacctggcatgactttagtttgtggagattcacatacatcaactcatggagctttagctactcttgctatgggtataggaacttcggaagttgaacatgtattagctactcaatgtctaaaagcttccaaattaagaaacatgaaagttgtaattgacggggaattgtctcctggagtcacccccaaggacgtcactttggctgtaattggaaaaataggaactgcaggcggcacaggctttgcaattgaatattccggacctgtgatagaggcaatgagcattgaaggcaggatgactgtatgcaatatgtctattgaagcaggagcaagggtgggtttagttgccttcgataatattactgaagaatatgtaaaaaatagaccctttacccctaaaggagatgaatgggaattagctttatctcaatggaaagaattaagaagtgatgatgatgcgcattttgaagaaattatttacatagatggatctactcttaagccacaggttacttggggcacttctccagagatggttatagatgttgatggagaaattcctgaagcta

SEQ ID NO: 283488 - DNA, 702 bp, Unknown
  Bacterial polypeptide expressing nucleotide sequence isolated from the Sargasso Sea
ggagcaaagaactttatacgataaaatatgggatgcccattgcgttaaatcaaataaggatgggttcgatcttctttatatcgataggcactatatccatgaggtcacatcgcctcaagcttttgaagggctaagactttctgaaagaaaaacatggagaagttctactaattttgctgttccagatcataatatacctacgaaagatagggaaatgggtatagacgatccagtttctaaaatacaagttgatactcttgaggataattgcaatgactttaatgttaaaaaatttggtatgaatgaccctgatcaaggaatagttcatattataggtccagaacaaggtttgacgttgcctggcatgacaatagtttgtggagattcccatacttccacacatggcgcatttggcacattagcatttggaattggtacctcagaggtagagcatgtccttgctactcagtgcttaattcaaaaacgatccaaaaccatgcttataaatgtagatggtgagctatcaaatggaataacagcgaaggatctgattttatttatcattggaaaaatcgggactgatggcggtactggttattccattgaattcggaggcactgctatcagatctttatcgatggaaggtagaatgaccgtatgtaatatgaccattgaggctggtgcaagagcaggtttaatcgg

SEQ ID NO: 283489 - DNA, 781 bp, Unknown
  Bacterial polypeptide expressing nucleotide sequence isolated from the Sargasso Sea
gagcaaggaattacgcaacctggtatgactatagtttgtggagatagccatactgcaacccatggagcttttggctctttagcatttggaattggaacgagtgaagtagagcatgttttagctactcaaactcttattcaaaaacctgcgaaaaatatgcttattttaattaaaggaaatatatctccaggtattacttccaaagacattattcttcatattattggtaaaattggcactgctggagggacaggttatgttattgaatatgctggagaggcaattaaagatttaagcgttgaagctcgtatgactatttgtaatatgagtatagaagctggagctagagcaggattaatagcccctgatgaaaaaacttttgaatatataaaaggaagaccctatgcacctaaagataaagattgggataacgcaatttctttttggagaacgcttccttcagacgtaggcgctaaatatgataaagaaattattattcaagcaaaagatattttgcctcaagttacttggggaacaagccctcaagatgttgttcctcttaacggtgcggttcctgatcctagtaaaatagaagatgaaaataagagaaaagcagtgatgcgttctttagaatatatgggcttagaacctaatcaaaaaattcaagatattaaaattgacagagtatttattgggtcttgtacaaatggaagaattgaagatttaagagatgttgcaaaaattgttaaaggaaaaaaagtcaaagttgatgctatgatag

SEQ ID NO: 283490 - DNA, 850 bp, Unknown
  Bacterial polypeptide expressing nucleotide sequence isolated from the Sargasso Sea
attaagaaattctaatagaaaagtaagacagccaaatttaactcttgctgtagctgaccataatgttccaactactgatagatcaaaaggtatttctgataatgagtctaaattacaggtggatactttagaaaataattgcaaagaatttggaatccaaatatttgggatgagcgataaaagacaagggatagttcatattataggtcccgaacagggatttacccaaccaggaacaattatagtttgtggagatagtcatacagcaactcatggtgcatttggatctttagcttttggtataggaacttccgaggttgaacatgtattggctactcaaacgttggtacaaaaaaaatcaaaaaattttagaattaatattaatggtaatctttctttaggagtaacatcaaaagatgtaattcttcaaataattggaaaaattggaactgcaggcggaacaggatatgtaattgagtatgcaggaaatttaatttcgtcacttagcgtagagcaaagaatgactatttgtaatatgacaattgaaggaggtgctagagcaggattaattcaaccagatcaaaaaatatttgactatttaaaaggaaaaccaatgtctccaaaaaatgaaaattgggaaaaagcaattgattattggggtaaacttaaatctgacaatggtgcaaattttgacaaagaaataaatttagagggaaaagacataaaaccaatggttacttggggaacttctccacaagacgttgtgactatagacggaaaagttcccaacccggataatgaaaaagatcctgataaaaaaagttcaatagaaagatcattaaagtatatg

SEQ ID NO: 283491 - DNA, 442 bp, Unknown
  Bacterial polypeptide expressing nucleotide sequence isolated from the Sargasso Sea
catggaaaaattcactaatcttaaaggtatagctgctccttttaactttataaatgttgatactgacaaaataatacctaaacaattcttaaaaactattaagagaacaggtttgggtaaacatttattcgatgagatgagatttaatgacgatggcaccgaaaagaaagactttgtattaaacgaagaaccttatagatctagcaatattattgttgcgggagataactttggatgtggctcaagcagagagcatgcaccttgggcgttatctgattttggtataaaatgtattatatcaacttcatttgcagatattttttacaacaattccttcaaaaacggtcttctacctattaaagtaacccccgaacaaagagaagctttaatggctgattcttatgataaagaaaaccctgaactagaaatagattaccatcac

SEQ ID NO: 283492 - DNA, 451 bp, Unknown
  Bacterial polypeptide expressing nucleotide sequence isolated from the Sargasso Sea
tcatactcttctgcactaacgtatatggaacttagtcctggtactaaaattagagatataaagttagataaaatttttattggttcttgcacaaatagtagaatagaagatctaagggctgcagcagaaattgttaaaaataaaaaaattagtacatccattaaactagctatggttgtgccgggttcaggaccaataaaaaggctggctgaaaaagagggactggatgaaatttttcttaaagctggttttgagtggagagatccaggctgttctatgtgtttagcgatgaatgccgataaactagatcctggcgaaagatgcgcttcaacatctaatagaaattttgaaggtagacaaggacagggagggcgtactcatcttgtaagcccagccatggcagctgcagctgcagtagctggtcatttcacagatattgaaagcgtgtaat

SEQ ID NO: 283493 - DNA, 532 bp, Unknown
  Bacterial polypeptide expressing nucleotide sequence isolated from the Sargasso Sea
atggaaaaatataaaacattcacaggaattgtagcaccgcttgataaaaataatattgatactgatgccataataccaaaacagtatctcaaatcaatttctaggactggcttcggactcaatctgtttgatgaatggagatatctagacactggtcaaccggggcaagatcattcaaaacgaaaaataaatactgatttcattctaaataagaaaccgtatagccatgcatctattttacttactggaagcaatttcggttgtggttctagcagggagcatgccgcttgggctataaaagattttggaataaatgctataattgctaaaagttttgctgacattttttataataattgttttaaaaatggaatattgccaattgttctaaatgaaaaagatataagagcaatatttaaagaatgtttagaaaaaaaagaatataaattaaaaattgacctaataaatcagattgttaacaataatgctgataatgaaatttattttgacatagatccgtaccaaaaagatg

SEQ ID NO: 283494 - DNA, 482 bp, Unknown
  Bacterial polypeptide expressing nucleotide sequence isolated from the Sargasso Sea
aggccaagataatgacagtaggccaacaaatgacagtttcgttcttaatcaagataagtataagggagctgatatattgataagtaaaaagaactttggatgtggttctagtagagagcatgctgtgtggtctctactagactacggcatcaaggttgtgattgctgaaagtttcgctgatattttctacaacaactgctttaataatggcttactaccagtgcaacttcctgaagaagtaattgcgaaattatttgttctttccgaggaaagtaaagagatagaaattgatttaattgagcaaataatttcttgtgaaggaaataagttaacgagtttcgatatcgatccattcagaaagcaatgtatcttagagggtttagatgagattggacttagtttaaaacatgctgatgcaattaaagaatatgaactaaatagagccaaaatcgttccttggatctttagtacttatgaataag

SEQ ID NO: 283495 - DNA, 890 bp, Unknown
  Bacterial polypeptide expressing nucleotide sequence isolated from the Sargasso Sea
attgcctggtggggactcccatacatccacccacggggccttcggggccattgccttcggaattggcaccagccaggttcgtgatgtactcgccagtcagaccctggcgatgaacaagctgcgggtccgtcgcatccgtgttgatggccagctggcggatggagtgagtgcgaaggatctgatccttcatgtgattcgtgtgctcggcgtcaaaggcggagtcgggtatgcctatgaattcgccgggacggccatcgaggctctctccatggaggagcggatgacggtctgcaatatggcgatcgagggtggtgcccgctgcggttatgtcaatccggatcaggtcacctttgattatctgaagggccgcgttcatgccccttcagatgaatcgtggcaacgcgcggtggcctggtggcgcggactggccagcgatggcgatgcagttgtggatgacgaaatggtgttcaacgccgcgatgattgctcccaccgttacctggggaatcacccctggccaggggcttgggatcgatgagcgaattccggcgttggaggagttggaccccggagaacgccccatcgctgaagaggcttatcggtatatggatttgcatcccgggacggccattgccggagttcctgtcgatgtttgcttcatcggcagctgcaccaacggtcgtctcggcgatctgcgtgcggcggcggctgtcgcccagggccggcatgtggcttcgggaattaaggcgttcgtcgttcctggatcggaacaggtggcgcgggatgcggaggccgaaggcctcgatcgggtgtttcgtgcggccggatttgaatggagagagccaggttgctccatgtgcctggcgatgaaccccgatcgactggaaggcc

SEQ ID NO: 283496 - DNA, 842 bp, Unknown
  Bacterial polypeptide expressing nucleotide sequence isolated from the Sargasso Sea
acaagatgatggcacttcacttttatatgttgatagacatcttgtgcacgaagtaacaagtcctcaagcttttgagggcttgagattaaataaaagaaaagttagaagacccaattttactttggctgtagcagatcataatgttcctacaaccgatcgaactaaaggaataaatgataaacaatcaaaattacaagtagatacacttagaaagaactgtaaagagttcggcgttcctttatttgatatgaatgataaaagacagggtatagttcacattattggacctgaacaaggatttactcaaccaggaacaataattgtttgtggagatagccatacagctacacatggtgcttttggagcacttgcttttggtattggaacctcagaagttgaacatgttttagctactcaaactttaattcaaaaaaaatctaaaaaccttttattgaaaattgatggaaaattaccaattggtgttactgctaaagatgtgattttgaagattattggtacaattggtaccgcaggaggcactggctttgtaattgagtattcaggtgatgttattaaaaactttagtatggaagaaagaatgaccgtttgcaatatgacaattgaaggtggagcaagagcaggtttaatcgagcctgacgagaagacattcaaatatttagagaatagaccactttctccaaaagaaaataattggaaaaaagctttagattattggagcaccctaaaatccgataaagattgttactttgataaagaaataaacttaagtggaaaagaagtagccccacaagttacatggggaacatccccacaagatgttt

SEQ ID NO: 283497 - DNA, 703 bp, Unknown
  Bacterial polypeptide expressing nucleotide sequence isolated from the Sargasso Sea
tttgccaaaaggggttacagccaaagacgtaattttaaaaattataggcacaataggaactgcaggtggtaccggatatgtagtcgaatttgctggcgatgtaattaaaagcttaagcatggaagaaagaatgactgtttgcaatatgactatcgaggcgggcgcaagagcaggtctaattgcacctgatgaaaaaacgttcaattatttagaaggtaaaactatgtcaccaaaaggtgaaaattggacaaaagctgtagagttctggaagactttatattctgacaaagattgtaaatttgataaagagataaatatcgatgggaaaaacatagagccattagtcacttggggaacatctcctcaagatgtatcaccagtcactggagtagtgcctgatcctgaagatgagaggaacgaagatagaaaaatggctatgaaaagatctctcgattacatgggtttaaaagcaaatacgaaaatttcagagattaaaatcgataaaatttttataggcagttgtactaatggaagaattgaggatttaagattagccgcagaacttttaaaaggcaaaaaaatagctgaaaatgttagtgcgatggtcgtccccggttctggattagtaaaagagcaggcagagaaagagggaattgataaaatttttaaagaagcagggttgagtgagagaaccaggttgctc

SEQ ID NO: 283498 - DNA, 391 bp, Unknown
  Bacterial polypeptide expressing nucleotide sequence isolated from the Sargasso Sea
aatgtctaagaccttatatgataaaatttgggatgaacatcttgtacatgagcaagacgatggcacttctttactttatgtagacagacatttagttcatgaagtaactagccctcaagcatttgaaggattaagaaactctaaaaggcaagtaagacaaccaaatttaactttagctgtagctgatcataatgtaccaacatcagatagatctaaaggaattgcagatgtggagtcaaaactgcaagtagaaactttagaaaaaaattgtaaagaatttggtattaaactttttggaatgaatgataaaagacaaggcattgtccacattattggacctgagcaaggatttacacaaccaggtagtattatagtctgcggagatagtcat

SEQ ID NO: 283499 - DNA, 570 bp, Unknown
  Bacterial polypeptide expressing nucleotide sequence isolated from the Sargasso Sea
aatgggaaaaacattatttgataaagtttgggattcacatgtggtaaaaaaaattgaaaaaggacctgatgttttatttattgatagacacatggttcatgaagttacaagtcccgttgcttttttaggattaaaaagtagagatatcaaagttctatttcctgaaaaaacatttgcaacagctgatcacaacactccaacaagaaatcaacatcttccggttaaagattatttatcttcaaagcaactaaaagcattggaagaaaatgctgaacatcatggaatttcatattggggtttaggtcatgaaaaaaatggtatagtacatgtcattggacctgaacatggtatcaccctccctggtgcaactattgtttgtggcgattcgcacacatcaacacatggtgcctttggggctatagcttttggtataggaacatcggaagttgaaatggttttatcaactcaatgcgttatgcagcctaaaccaaagaaaatgagaattaatataaatggtcaacttaatgaatctgtaactccaaaagatgtagcattattcattatttctaa

SEQ ID NO: 283500 - DNA, 735 bp, Unknown
  Bacterial polypeptide expressing nucleotide sequence isolated from the Sargasso Sea
aggtacagtaattgtttgcggagatagtcatactgctacgcatggagcttttggggcgttagcttttggtataggaacttctgaagtagaacatgtattagcaactcaaacattactccaaaaaaaatcaaaaaacttaagagtgaatgtaacaggtaaattaccaacaggagtaacctcaaaagatgtaattttacaaacaattggaaaaattggaactgcaggaggcacaggaatggtcattgagtatgcaggaaatgttatagaaaatttaaatatagaacaaagaatgacaatatgtaatatgtcaattgaggctggtgcacgagctgggttaattgctccagatgaaaaaactattcattatctaaaagataaacctatgtctcctaaaaaaaaaaactgggaaaaagcagttgaatactggagcaaacttaaatctgataatggtgcaaaatttgataaagaagtggagattacgggagacaatataaatccaatggtaacatgggggacttcgccgcaagatgttgtttcagtaactggttttgttcctgatccagaaaaagaaaaggatgaagatagaaaacaatctatgattagatctttaaactatatgggtcttaagccaaatacaaaaataacagatataaaaattgacagaatttttattggcagttgtacaaatggtagaataggagacttgagagatgcagcaaaaattattaaaggaaa

SEQ ID NO: 283501 - DNA, 634 bp, Unknown
  Bacterial polypeptide expressing nucleotide sequence isolated from the Sargasso Sea
agctttgaactattgggaaactttaaaaacagactctgatgctagttttgataaagaaattagccttaatgcaaatgaaattttacctatgattacatggggtacgtcaccgcaagatgtaataacaattgatggaaaagttccaaatccaaataatgagaatgataaagataaaaaaaattcaattgaaagagctttaaagtatatgggtttaaaacctgacatggcagccacagatataaaaatagataaagtatttattggtagttgtactaatggcagaatagaagatttgagagaagcagcaaaaatcgtaaaagataaaaaagtatcatcgcatgttaatgctatagtagttccaggctcaggcttagttaaagaacaagcagagcaagaaggactagataaaatttttgttagctcagggtttgaatggagagaaccaggttgctctatgtgtttagcgatgaatgccgataaattaaaaccagaagaaagatgcgcctctacatcaaatagaaattttgagggaagacaaggacgaggtggtagaactcatctagttagtccaggaatggctgcagcagctgcaatttcaggtaatttagatgatgtcagaaagtatcaaaattaa

SEQ ID NO: 283502 - DNA, 875 bp, Unknown
  Bacterial polypeptide expressing nucleotide sequence isolated from the Sargasso Sea
gactctcatactgcgactcatggagcttttggtgcactggcttttggaattggaacttccgaagtagagcatgtgctggtcacacagaccttgcagcaaaagaaaccaaaaaccatgcttgttgaggtcgagggtatgcttccaaaaaatgtaaccccaaaagatattattcttgcaatcataggaaaaataggcactgctgggggtactggttacgtaattgagtatgcaggagatgcaattcgaggcatgtcaatggaagggcgcatgaccctttgtaatatgacaattgaagcaggtgcacgtgcaggtatggttgctcctgatgaaacaacatttgaatatcttaaggacaggcctttttctcctaaaggcgatgactttgataaggcagtatcagtttggaaacaactgccaagtgaagaatttgctgaatttgatcttactgtaaacatcaatgcgggtgatgtattgcctcaggtaacatggggaacaagcccgggcatggtaacagatataaacagcagagtccctgaccccgagaagataaaaaatcattccgagaggaaatctgtggaaaacgccttgaaatatatggatctcaaggcaaacctccctattaataaaataagcattgatcgtgtgtttattggttcgtgcacaaattcacgcatagaagatcttcgttctgtcgcggaatttgtaaaagggcgcaaagtaagcgataacgtctctgccatgattgttcctgggagcggtttaatcaagcaacaggcagagcaggaaggactggatgaaatatttattgcagctggctttgaatggcgtcaaccagggtgttccatgtgccttgcgatgaatgatgatatactgaa

SEQ ID NO: 283503 - DNA, 646 bp, Unknown
  Bacterial polypeptide expressing nucleotide sequence isolated from the Sargasso Sea
atgcaggctttcgacacgcacgtaggtttggtcgcaccgcttgatcgagtaaacgttgatactgatcagattatccctaagcagtttctaaaatcgattaagcggacgggttttggtgattatttgtttgatgcttggcgatttgatgatccaggcgaactagggatgactcctaatgaacgagttataaatcgtgcttttgtgttgaaccaacctcgttatcagggggcgagtattttattagcgagaaacaacttcggttgcggttcttccagagagcatgcagtttggtcgattatggaattcggctttaaagtagtcgttgctgagagctttgccgatatattttatgggaattgctttaaaaatggattattgccggttcgattgccgccagatgttatagacaggctcttcgagctatcttcagatggtcttgagttgtcagtagatttacgcaaccaaacggtgactgaagacgctggcgaggttctttctttcgatattgaccagggaatgaaaacaaaattgttagaaggacaagatgaaataagtctttcgttgaacgaaagagagaaaatcctgctcttcgagcaagggcataaaaaacgacagccctggttatttgataggaagtctggctaat

SEQ ID NO: 283504 - DNA, 418 bp, Unknown
  Bacterial polypeptide expressing nucleotide sequence isolated from the Sargasso Sea
atgagtactccaaagacattatacgataaaatatggaatgatcatttagtttcagaaaatgaagatggaacttcaattatttatattgacagacatcttgttcatgaagttacaagtccccaagcatttgaagggctaaaaattgcgaacagatcagttagaaaacctaattttacattagccactgctgatcacaatattcctacaacaaatagagatgagggaatatcagatccagagtctaagttacaggtagatactcttgaagagaattgtaaggagcacggaattacttttctttctatgtctgataaaagacagggcatagtccatattatcggaccggagcaaggtttcacacaaccaggaatgactatcgtttgtggtgatagccatacttcaacacacggtgccttcg

SEQ ID NO: 283505 - DNA, 923 bp, Unknown
  Bacterial polypeptide expressing nucleotide sequence isolated from the Sargasso Sea
agaaaagttcatcgctccaaataaaacaattgcagttcctgatcacaacgtggccacaacaaccaatagattaactaactttggtagtgaagaaggccgtatacaactagaaacgctcgataaaaatgcacgggattttggtattcactattatcccgttgatgatattagacagggaatagttcatatcattggacctgagcaaggttggaccttgcctggcatgactattgtttgtggtgatagtcatacggcaacccatggagcctttggtgcattggcacacggcattggaacatccgaagtagaacatgttcttgcgactcaaacacttattcaaaagaagtccaaaaatatgaaagtagaggtatcaggtgttcttggtaatggtgtcacagctaaggacatcacactaacaatcatcggaaagacaggcaccgctggcggcactggatatgtaatagaatattgtggaagcgctattaaaagcctttcaatggaaggaaggatgacagtatgcaatatggctattgagggtggggccagagcgggattgattgcgcccgacgaaaagacaatagattatgttagagggaggccacgttcaccaacaggcgaaaaatgggaaaaggctgtcgaattttggaaaacgctatattctgattcagatgccgagttcgagaaaaagcttttcctaaaggcggaggatattgctccagtcgtaacatggggcactagcccagaagatgtcctacccattacggattttgtacctagtcccgaaaactttcaaggaagcaagatagaagcggctaacagatctcttgaatatatgggtttaaggccaggccagaaattacaggatatagaggtagatgccgtttttattggctcttgcacaaacggacgaattgaggactcaa

SEQ ID NO: 283506 - DNA, 224 bp, Unknown
  Bacterial polypeptide expressing nucleotide sequence isolated from the Sargasso Sea
aatgtctaaaactctatatgataagatatgggaaaaccatcttgttcatgaacaaagtgatggaacatcattaatttatgtagatagacacttagtccatgaagttacaagcccccaagctttcgaaggtctcagattacaaaaaagaaaagttagacgaccagaattaacacttgcagtgcctgatcataatgttcctacaactgataggtctaaaggcataa

SEQ ID NO: 283507 - DNA, 478 bp, Unknown
  Bacterial polypeptide expressing nucleotide sequence isolated from the Sargasso Sea
atgaaaaaaaataatccaaaaacattattcgataaaatttggttacaccaccttgttgatcaacaagatgatggcacatgtcttttgtacattgaccgtcatttagttcatgaagttacaagtcctcaagcgtttgaaggtttaagaaattcaaatcgtaaagttagaagaccggggagtacttttgctgttgcagaccacaatgttcctacttcagatagaacgaaaggaattgaaaataaagaaagtagaatacaagttgaaacgttagaaaaaaattgtaatgattttgatgtaactctttttcctctcttagatagtagacagggtatagttcatattgttggtccagaacaaggtattactcaacctggaatgaccattgtttgtggagatagtcacactgcaactcatggtgcatttggcgcattagcttttggtataggaactagtgaagtagaacatgtgttagcaactc

SEQ ID NO: 283508 - DNA, 781 bp, Unknown
  Bacterial polypeptide expressing nucleotide sequence isolated from the Sargasso Sea
acgctcggggtcaaaggcggcgtcggccatgcctacgaattcgctggacccgcgatcgaggccctctcgatggaagagcggatgaccatctgcaacatggccatcgaaggcggggcccgctgcggctatgtcaaccctgacgccaccacattcgcatacctaaaagggcgcccgcatgcccctactggtgaagcctgggagcgagccgtgcagtggtggcagagcctggccagcggagccgctgctgtttttgacgatgaggtgcgctttgatgccgccgctatcgccccgaccgtcacctggggcatcaccccaggacagggcatcggcgtcgacgaagcggtgccgacgctggagcagacaccagaagaggatcgccccctggcccaggaggcctaccgctacatggacctgcaaccaggccagcagatcgccggtgtgcccgtggatgtctgcttcatcggcagctgcaccaacggccggctcagcgatctgcgcgcagccgctgaagtggccgttggacgccaggtggccgatggcatcaaagccttcgtggtgccaggatcagaacaggtggccgccgccgcagaagcggagggccttgatgcggtgttcaaggccgcgggatttgagtggcgcgaacctggttgttcgatgtgtctggcgatgaaccccgaccggctggaggggcgccagatcagcgccagctccagcaaccgcaacttcaaaggccgccagggctcagccagtggacgcaccttgctgatgagtccagcgatgg

SEQ ID NO: 283509 - DNA, 817 bp, Unknown
  Bacterial polypeptide expressing nucleotide sequence isolated from the Sargasso Sea
gcagatcataatgttccaacgactttaagagatcaaggtataaattctataaaagataagatagcaaaattacaggtcgaaacattagaaaaaaatttaagtgaaaataatataaaatatattccactgacatctaaaaatcaggggattgttcatataataggtccagaacaaggttttaccattcctggaaccactattgtatgtggagactctcatacatcaacgcacggagcttttggatccttagcatttggtattggaacatccgaagttgaacatgttttagctacgcaaacattagtgcaaactaagccaaagaatatgagaataatcattaatggaaaactgaaaaaaaatgtaacatctaaagatataattttaaaagttataagcgaaataggtacagctgcaggaacaggacatgttatcgaattttctggttcaactatattagatatgactatggaagaaagaatgaccttatgtaacatgtctattgaggcaggggcaaaagcaggacttattgcccctgataacaaaacttttgattatctttatggacttccttttgcgcccaaggaaaaaaattgggaattagctattgaatattggaaaaaattagttactgataaaggagccatatttgatcaagagtattccttcaacattgaagaattgaaaccttttgtaacctggggaacgagtcctgagaatggaattgctataaatgaaaagataccagatccaaaacagtataataatttggaaaaaagacaatctatagaaaaatcttttaattatatggggctaaaag

SEQ ID NO: 283510 - DNA, 328 bp, Unknown
  Bacterial polypeptide expressing nucleotide sequence isolated from the Sargasso Sea
atgcctaaaactatatacgataaaatatggaatgatcaccttgttcatcaacaagaagatgggacttcacttttatttgttgatagacatttaattcatgaagttactagtccacaagcatttgaaggtttaagaaattctaatagaaaagttagacaaccttctttaactttagcagtagcagatcacaatgttccaacaacggatagatcagtgcctattactgacaaagattcaaaaatacaaattgagacactagaaaaaaactgtgcagaatttggaataaatctttttggaatgaacgataaaagacaaggaatagttcata

SEQ ID NO: 283511 - DNA, 910 bp, Unknown
  Bacterial polypeptide expressing nucleotide sequence isolated from the Sargasso Sea
aacttcagaagttgaacatgttctagcaacacaaacattaattcaaaaaaaatctaaaaatcttcttcttaaagttgatggtaaattacctattggagtcactgccaaagatgtaattttaaaaattataggaacgataggaactgctggcgggacaggatttgtaatcgaatactctggagaagttattaaaaattttagcatggaagaacgaatgactatttgcaacatgacaatcgagggcggagcaagagctggtttaattcaacctgatgaaaaaacatttaaatatttacaaaacagaccaatgtcaccaaaaaatgaaaaatggacaaaagccttagagtattggggcagactaaaatcagatgaaggatgtaattttgacaaggaagttataattaaaggcgaggaagtagcaccccaagttacttggggtacttcacctcaagatgtggtccctgttaatggttctgttccagatccaaaaaatgaaaaaaatcaagatagaagaatcgcaatggaaagatctttagactatatgggactaaaaccaaacacaaaaatgacagaaattaaaattgacaaagtttttataggaagttgtacaaatggaagaattcaagatctaagagaggctgcaaaattattaaaagataaaaaaattgcaaaacatgtaaatgctatggttgtcccaggctctggtttagttaaaaatcaagctgagcaggaaggtttagacaaaatttttaaaaactcaggttttgaatggcgagaacctgggtgttcaatgtgtttaggaatgaatgaggaccagttaaaaccaaaagaaagatgtgcgtctacatcaaatagaaattttgagggtagacaaggaagaggaggcagaactcatcttgttagtccagct

SEQ ID NO: 283512 - DNA, 325 bp, Unknown
  Bacterial polypeptide expressing nucleotide sequence isolated from the Sargasso Sea
tatgagtgcgccaaaaactttgtatgataaaatatgggataaccatatcgtttccattaatgatgatggaactacaatactttatattgaccgacatcttgtccacgaggtaaccagtccacaagcctttgagggattgcgaatgagcggtagaaaagttagaagacctgaatttactctggctacagcagaccataatgtgcccaccatggatagggataagggcatagcagacccagactcaaaattacaagttgaaacattagagaggaacgctagggaaaacaatattacttacttaccgatgtcagataaagcggcaaag

SEQ ID NO: 283513 - DNA, 619 bp, Unknown
  Bacterial polypeptide expressing nucleotide sequence isolated from the Sargasso Sea
gatgaacaatccaaataataaaacattatttgataaaatttggtctcatcatcttgtccaccaacaagaagatggtacttgtctaatttatattgatcgtcatttagttcacgaggtaacaagtcctcaagcatttgagggtttgagagacaacaatagaaaagtacatcgtccagagagtacctttgctgttgccgaccataatgttcctacctccgatagatctaaaggtattgataatgaagaaagtagaatacaagtagaaacactagaaaataactgtaaagaatttggagttactttatttcctcttctagacaaacgacaaggtattgttcatatagtcggtcctgaacaaggtattacacagccaggaatgactattgtatgtggagacagtcacactgccacacatggtgcttttggtgcacttgcttttggaataggcacgagtgaagtagaacatgttttagctagtcagactcttattcaacaacctgcaaaaaatatgaagattgctgttaatggaaaattaaaatctggggttacggcaaaagatattattcttcatattataggtgtaattggtacagctggcggaacaggttatgtcattgaa

SEQ ID NO: 283514 - DNA, 466 bp, Unknown
  Bacterial polypeptide expressing nucleotide sequence isolated from the Sargasso Sea
atggggaaaacgctatttgataaaatttgggatgaacatgtggttgttcaagatatagataaaccgtcattgttgtatattgatttacatttaattcatgaagtgacatcaccacaagcatttgatggtcttcgagagaacaatcgaaaagttagaagaccagaacttactattgctacagtagatcataacgtacctaccaaagatagacacttaccgatagcagaccaaatttcaagaacacaaattgagtatttagatagaaatgttaaagaatttggtattacctattatggaatgaatagtgccgggcaaggtattgttcatgtgattgggccagaacaaggatatactcaaccaggcaaaacaattgtttgcggtgactctcacacatctactcatggagcttttggggcactagcctttggtatcggaacttctgaagtagaacatgtactagccacac

SEQ ID NO: 283515 - DNA, 301 bp, Unknown
  Bacterial polypeptide expressing nucleotide sequence isolated from the Sargasso Sea
gggaattggaacatctgaagtggagcatgttcttgcaactcaaagtttaaaagtaaggaagcttaaaaatatgagaataaattttgaggggtcgatacaagaaggagtgtcctcaaaagatattattttatatctaattaggaaaataggaactggaggtggaacaggatatgcagttgaatttgcgggatcatatatacgaaatatctctatggaagccagaatgacaatatgcaatatgtctattgaagcaggagctaaagtaggattagtgtctgttgacgaaaaaactattgaataa

SEQ ID NO: 283516 - DNA, 241 bp, Unknown
  Bacterial polypeptide expressing nucleotide sequence isolated from the Sargasso Sea
tctaatttatattgatcgtcatttagttcatgaggtaacaagccctcaagcatttgagggtttgagagacaataacagaaaagtatatcgtcctaaaagtacttttgctgttgccgatcataatgttcctacttccgatagatctaaaggtattgataatgaagaaagtagaatacaagtagaaacactagaaaataactgtaaagaatttggagttactctatttccccttctagataaa

SEQ ID NO: 283517 - DNA, 643 bp, Unknown
  Bacterial polypeptide expressing nucleotide sequence isolated from the Sargasso Sea
atggaataaagctttagaacattggcaaagtttaaaaactgacgatgacgcaagctttgataaagaagtaagtttgcaagccaacgaaattttgccaatgataacttggggaacttcacctcaagatgtaattacaattgacggcaaagttccaaatccgagtcaagaaaaagacgaggaccgaaaaaattccatagagagatcattaagatatatgggtcttaaacctgatatgtcagctagagatattaagatagataaagtttttataggtagttgtacaaatggtagaattgaggatttaagagaagcggcaaagattttgaaagataaaaagatagcttcacatgttcatgcaatggttgttccaggatctggattggtaaagcaacaagcggaacaagagggattagataaaatctttgtaaattcaggatttgaatggagagaaccaggttgctcaatgtgtttagccatgaatgctgacaaattgaaacccgaagaaagatgtgcctctacctcaaataggaattttgagggaagacaaggacgaggtggaaggactcatttagttagtcctggaatggctgcagccgcagcaatatcaggaagtcttgatgatgtgagaaagtatcaaaattaa

SEQ ID NO: 283518 - DNA, 796 bp, Unknown
  Bacterial polypeptide expressing nucleotide sequence isolated from the Sargasso Sea
tgtaattgaatacgctggtgatgcaattcaatcattaagtatggaaggtagaatgactatttgtaacatgagtattgaagctggagctagagcaggcttaattgctcctgatgaaaaaacttttaattatatcaagggtagaccatatgctcctaaaggtgaagattgggataaagcactagctttctggaagtcactgccatcagatcaaaatgcaagctatgataaagaaataaatataatcgctgaagatattacacctcaaataacatggggaacaagccctcaagatgttgcgcctataaatggtaaagttccaaaccctgagactataaacgattctaatagaagaaaagcagttgagcgatcacttgaatatatgggcttagagcctaatcaagaaattgaaaaaataaaaattgataaagtatttattggctcttgtacaaacggaagaattgaagatctaagagaggttgcaagagttgtagaaggaaaaaaagtatctgttgaggcaatgatagtccctggatcaggtttagtcaaagaacaagctgagagtgagggattagataaaatttttattgaagctggttttgattggagagagcctggatgctcaatgtgtttagctatgaacccagatcaattaaaaccaaaggaaaggtgcgcatcaacttctaatagaaattttgaaggtagacaaggcagggaaggaaggacacatttagtaagtccatcagtagcagcagcatcagctatcaaaggaacttttgctcaagaaagtgatttataa

SEQ ID NO: 283519 - DNA, 400 bp, Unknown
  Bacterial polypeptide expressing nucleotide sequence isolated from the Sargasso Sea
aatgactgaaacattatttgagaaaatttggaattctcatgttgtagttgaaagagaaaatgaaccttcattaatttacattgatcgtcatctaattcatgaagtaacctctccacaagcttttgatggattacgagttaacaatagaaaagttcgtcgtcctgatctaactgttgccacaattgatcataatgtacctactactgatagaagcttacctatgattgatgaaacttcatcaacacaaatcaaaactttagaaaaaaattgtgaagattttggtataaagctatttggaattaatgatcctaatcaaggaattgttcacgtaataggtccacaattaggaattaccttacctggaagtacaatagtatgcggtgatagtcacacctctaca

SEQ ID NO: 283520 - DNA, 478 bp, Unknown
  Bacterial polypeptide expressing nucleotide sequence isolated from the Sargasso Sea
ggtaatgtaataaaatatgaacaagataacattgacacagatgtcattattcctggaacgtatctaaaaattcatgattataatgaattggcaacacatgcaatggaaggattagatcctgatttcccatcaaaagtaaaggacggtgattttattgtcgctggaaaaaattttggttgtggttcatcaagagaacatgctccaattgcattatctacatgcggaattaaagccgtcattgctgtatcttttgcaagaattttctatagaaattccgttgatggagcatttttgttaccaattgaagtagatgaagagacttacaaaaaaatctccaattctgatagcttagaaataaacattgaaacaaacgagattaaaaacatcacaaaaaatgaaacttactcgatgaaacctttctcagaaatcatagcacaaattatttctgcaggcggtcttttcaaatataaaaagtgaa

SEQ ID NO: 283521 - DNA, 700 bp, Unknown
  Bacterial polypeptide expressing nucleotide sequence isolated from the Sargasso Sea
gatgaaaaaatatttaaatatcttgagggcaaacctatgtcaccaaaaggaaaaaattgggaaaatgctttaggatattggagaaatttaaagtcagatgatggagcaaaattcgataaagaagttaatttaaaagcggaagaaattttaccaatgataacttgggggacttctccacaagatgtaatcacgatagatggcaagattcccaaccctcaaaatgaaaaaaatgaagataagaaaaattcattagaaagagcgctaaattatatgggcttaaaacctaatatggctgcaaaagatattaaaatagataaagtttttataggaagctgcactaatggtagaattgaagacctaagagaggctgcgaaaattctgaaagacaaaaaaatagcctcccacgttcatgcgatggttgttcctggatcgggtttagtaaaagagcaagcggagcaggaaggattggataaaatatttgttaactcaggttttgaatggagggaaccaggttgttcaatgtgcttagcaatgaatgctgacaaattaaaacctgaggaaagatgtgcatctacttcaaatagaaattttgagggaagacaaggtagaggtggaagaacacaccttgttagtccaggaatggccgctgctgcagcaatatctggtagtcttgatgatgtgagaaagtaccaaaattaga

SEQ ID NO: 283522 - DNA, 379 bp, Unknown
  Bacterial polypeptide expressing nucleotide sequence isolated from the Sargasso Sea
tttataggtagttgcacaaatggacgtattgaggacttaagagaggctgcaaagattttaaaagataaaaaaatagcaggccatgtaaatgcgatggtggtaccaggctcagggttagtaaaagaacaagcggaacaagagggattagataaaatatttattaactcaggctttgaatggagagagcccggttgttcaatgtgtttggcaatgaatgcagataaattaaaaccagaggaaagatgtgcatccacatcaaatagaaattttgagggtcgtcaaggtagaggtggcagaactcatcttgtaagtcctgcaatggcagctgcagcagctgtgtccggtaatttggacgatgtgagaaaatatacaaattaat

SEQ ID NO: 283523 - DNA, 387 bp, Unknown
  Bacterial polypeptide expressing nucleotide sequence isolated from the Sargasso Sea
aatgaaaaaatttaaaaatctaaaaagcattcccgcttatcttccaatagtaaatattgatacagatatgattattccaaaacagtttttaaaaactataaaaagaactggtttagggaaaagcttattttttgaaatgcgatacgaccatgacggaaaagaaataaaagattttatattgaataatgaaccttacaataattcaaaaattttaattgcaggaaaaaattttggttgcgggtcatctagggagcacgccccctgggcgctgctagattttggaataacttgtgtaataagttctagttatgcagatattttttataataattgctttaaaaatggaatattaccaatcacaatatcagaggaaaaaattaaagaatt

SEQ ID NO: 283524 - DNA, 607 bp, Unknown
  Bacterial polypeptide expressing nucleotide sequence isolated from the Sargasso Sea
atgaaaaaatttacatctattaaaagtataccagcttatcttccaatagttaatattgatacggatatgattattcctaaacaatttctaaaaactattaaaagaactggattaggcaaaaacttattttatgaaatgagatatgatcaaagtggaaatttaattaaagattttgttttaaataatgatccatataataattctaaaattttaatcactggtaaaaattttggttgtggttcatctagagaacatgcaccgtgggcacttatggattttggaattacttgtgtaatcagttcaagttatgcagatatattttataataattgttttaaaaatggaattttgccaataaaaatttctgaagaagaaattaaagaaatttctgaatattcaaaaagaaaagaggaaatagctgtagatttattaggacaaaaaattatctttggaaataaagaagttaagtttgacatagatgaatttaagaaaaaatgtttgatagaaggattggatgatattgcattatcacttgaaaaatctgataaaataaattcttttgaaaaaaaaataaggacttcaaaaccttggatatttaatgattaaa

SEQ ID NO: 283525 - DNA, 931 bp, Unknown
  Bacterial polypeptide expressing nucleotide sequence isolated from the Sargasso Sea
tcaggcttttgaaggtttaaggaaatcaaatagaaaagtgagacatccagaattaactttagctgttgcagaccacaatgttcctacaactgatagatcagaaggaatatcggatcaagagtcaaaaatacaagtagaagctctcgacacaaattgcaaagaatttggaataaatatttttggaatgaatgataaaagacaaggaattgttcatattatagggcctgagcaaggttttactcaaccaggaacaataattgtatgtggcgatagccacacagcaacacatggagcatttgggtcattagcttttggaattggaacttcagaggttgaacatgttttagctacacaaactttagtgcaaaaaaaatctaaaaatttaaggataaatgtaaatggctctttgccgattggagttacttctaaagatgttattttacaaataataggaaaaataggaacagctggtggaaccggttatgtaattgaatactcaggaaatttaatttcatctttaagcgtagaaaatagaatgactatatgcaacatgaccattgaagctggagcaagagcaggattgatccagcctgatcaaaaagtatttgactatttaaaaaataaaccgatgtctccaaaaaatgaaaattgggataaagcaattcaatattggaatactctcaagtcagatcatggagcaaaatttgataaagaagtaattatcgagggaaacgaaataattccaatggtaacttggggtacatcaccccaagatgttataactattgatggaaaagttcctaatccagataaagagaaagatccagacaaaaaaaattcaatagaaagatctttaaaatatatggggttaaaaccaaatattttagcaaagaatattaaaatagataaaagtttcataggaagttgtact

SEQ ID NO: 283526 - DNA, 427 bp, Unknown
  Bacterial polypeptide expressing nucleotide sequence isolated from the Sargasso Sea
gggtctaaaaccaaacacaaaaatagcagatataaaagtagatagaattttcattggtagttgtacaaacggaagaattggagatttaagagaagctgcaaaaattttaaaaggaagaaaaattgctgcacatataaatgcaatggttgttcccggctctggtcttgtaaaacaacaggcagaagaagaaaaaatagataaaatttttaaagatgcaggttttgattggagagaacctggttgttccatgtgtcttgctatgaatgatgacaaacttaaccctaaggaaagatgtgcctccacatctaatagaaattttgaaggtcgacagggtcgtggaggaagaacccatttagttagtccagcaatggctgcagccgcagctatagatggtcatttaacagatgttagaaagtttaataattaa

SEQ ID NO: 283527 - DNA, 355 bp, Unknown
  Bacterial polypeptide expressing nucleotide sequence isolated from the Sargasso Sea
tatgaaaaaatttaatattttaaaaggaatcccagctagcttaccaatgatgaatattgatacagatatgattattccgaaacaatttttaaaaaccattaaaagaacaggactcggtaaaagtttattctttgagatgcgttatgatgataacggcaaaaaattaaaaaactttgtattaaataataagccttacgataattcaccaattttaataacaggaaaaaattttggttgcggttcatcaagagagcatgctccatgggcgttactcgattttggtattaaatgcataataagcccaagttttgcagatatattttacaacaattgttttaaaaatggaatgctacca

SEQ ID NO: 283528 - DNA, 706 bp, Unknown
  Bacterial polypeptide expressing nucleotide sequence isolated from the Sargasso Sea
agcaccagatgaaaaaatatttaaatatttagaaggaaaaccaatgtcgccaaaaggcgaaaaatggaataaagctttagaacaatggcaaagtttaaaaactgatgatgatgcaagctttgataaagaggtaagtttgcaggctaacgaaattttgccaatgataacttggggaacttcaccacaagatgtaattacaattgacggtaaagttccaaatccaagtgaagaaaaagacgaggaccgtaaaaattccatagaaagatccttaaaatatatgggtcttaaacctgatatgtcagccagagatatcaaaatagataaagtttttataggtagttgtacgaatggtagaattgaggatctaagagaagcagcaaagattttaaaagataaaaagatagcttcccatgttcatgcaatggtagttccaggatctggattggtaaaacaacaagcagaacaagagggattagataaaatctttgttaattcaggatttgaatggagagaaccaggttgctcaatgtgtttagccatgaatgcagataagttgaaacctgaagaaagatgtgcctctacctcaaataggaattttgaaggaagacaaggaagaggtggaagaactcatttagttagtcctggaatggctgcagccgctgcaatatcaggaagtcttgatgatgtgagaaagtatcaaaattaa

SEQ ID NO: 283529 - DNA, 232 bp, Unknown
  Bacterial polypeptide expressing nucleotide sequence isolated from the Sargasso Sea
tatgagtactccaaagacattatatgataaaatatggaaggatcatttagtttcagaaaatgaagatggaacatcaatcatttatattgacagacatcttgttcatgaagttacaagtccccaagcatttgaagggctaaaaattgcaaacagatctgttagaaaacctaattttacattagccactgctgatcacaatattcccacaacaaatagagatgagggaatatca

SEQ ID NO: 283530 - DNA, 825 bp, Unknown
  Bacterial polypeptide expressing nucleotide sequence isolated from the Sargasso Sea
ccgcaggaggaactgtttacgtagttgaatatgctggaagcgttataagcaacttaagtatggaagaaagaatgacagtttgcaacatgactattgaggctggagcaagagctggactgatagcgcccgatgaaaaaacttttaaatatttgaaaggtagaactatgtctcctaaaggagaaaattggatcaaagcagttaaattttggaaaactttatattctgataaaaattgtaaatttgataaagaaattaatattaatggagaagatattgaaccattagtaacttggggaacttctcctcaagatgtttctccaattactggcttggtgccagatccagaaaaagagaaaaacgaagatagaaaaatggctatgaagaggtctcttgattacatgggtttaaaagctaatactaaaatgaaggatataaaaatagataaaatttttattggcagctgtaccaatggaagaattgaagatcttagagtagctgcagatcttttaagaggaaaaaaaattgcaaaaaatattagtgcaatggtggttcccggatcaggtttagtaaagctacaagctgaaaaagagggattagacaaaatatttaaagacgcgggatttgaatggagagaaccaggatgttcaatgtgtcttggtatgaatcctgatcaactgaaaccaaaagaaagatgtgcatctacatctaataggaactttgaaggtagacaaggcagaggaggcaggacacatttagtaagtccaggaatggcaattgctgctgcaattaatggtcatctttctgatgtgagggagatcaagtaat

SEQ ID NO: 283531 - DNA, 614 bp, Unknown
  Bacterial polypeptide expressing nucleotide sequence isolated from the Sargasso Sea
attttggaaatctcttccatctgatgagggcgcaaaatatgatgaagaaattttaattaatgctgaagatatttcaccacaaattacttggggtacaagcccacaagacgttgttgctataaatggaatagtaccaaatcctcaagaagaaagtaatccaaatagaaagaaggctatggagcgttctcttgaatatatgggtttagaacccaaacaagaaatacaaaaaattaaaattgataaagtgtttataggctcatgtactaatggaagaattgaggatttaagagaagttgctaaagttgtagaaggcaaaaaagtttctgtagactcaatgattgttcctggttcaggtttagttaaaaaacaagctgaagaagaaggtttagataaaatttttattgaagctggatttgattggagagagccaggctgctccatgtgtttagctatgaatccagatcaattaaaaccgcaagaaagatgtgcatcaacatcaaatagaaattttgaaggcagacaaggtagagaaggtagaacacatcttgttagtcctgcaatagctgctgcctctgcaatcaaaggttcttttgcaacagcagaggatttataaa

SEQ ID NO: 283532 - DNA, 757 bp, Unknown
  Bacterial polypeptide expressing nucleotide sequence isolated from the Sargasso Sea
atgaagaccttatacgacaaactctgggaggagcatcacgtaacccaactcgattcgggtgagtcactcctatatatcgataggcattatttacatgaagtaacatcacctcaggcatttgaaggattatcaaaaaaaaatttaaagccatggcggctagatgcaaatatagctactcctgatcacaatgttcctacaacaagaggaaatgactttaaatctgaacaaataaaagatgaaatttcaaagatacaggtagttgagcttgataaaaattgtaatacttttggtataaaacaatttgatattaaatcatcaaagcaagggattgttcatgtaataggaccagaattaggttataccttaccaggcatgacaatagtatgtggtgactctcatacctctactcatggagcattaggttgcttggcaatgggtattgggacatctgaagtggagcatgttcttgctactcagtgcctaaaagtatcgaaacttaaaaatatgattgttaaatttgaaggtatgccagccgataatgtgacatcaaaagatattgttttatattttattgggcttattggaacagcaggtggaacaggttatgcaatagaatttgctggcaattatattaaggatatttctatagaaagcagaatgactatttgcaacatggctattgaagctggagcaaaggttggattaattgcacctgatgaaacgacaatagagtatgtaagagaaaaatcttcctaga

SEQ ID NO: 283533 - DNA, 559 bp, Unknown
  Bacterial polypeptide expressing nucleotide sequence isolated from the Sargasso Sea
atgaaacctaaaactttatttgataaaatttgggacagtcatttagttgaaaaacaagatgacggtacttgccttatttacattgatagacatcttgttcatgaagtgactagcccgcaagcttttgagggactaagaaatactggcagagttgtgagaaaaccaagtcatacttttgctgttgctgatcataatgtacctacaagtgatagatccaacggtataaagaacaaagaaagtagaattcaagtcgaaacgttagagaaaaactgcaaagaattcaaggttaacttttttcctttaatggataagagacaaggaattgttcatatagttggtcccgaacaaggaataacacaacctggcatgactattgtttgtggtgatagtcatactgcaacgcatggggcatttggggctctggcattcggtattggaacaagtgaagttgagcatgttttagcaactcaaacattgatccaaaaaccagcaaaaaatatgcgaatcagcgttatcggaagtgtgagccctagcattacttccaaggacatcatttgaa

SEQ ID NO: 283534 - DNA, 853 bp, Unknown
  Bacterial polypeptide expressing nucleotide sequence isolated from the Sargasso Sea
atgtctaaaactctatacgataagatatgggaaaaccatcttgttcatgaacaaagcgatggaacatcattaatttatgttgacaggcatctagtccatgaagttactagtccccaagcttttgaaggacttagattacaaaaaagaaaagtcagacgaccagaattaacccttgcagtgcctgatcacaatgttcctacaactgatagatcaaaagggataaatgatgaggattcaagaattcaagtagaaacattaagaaaaaactgtaaagactttggagtagaactttttgatgttaatgataagcgtcaaggtatagttcacattataggaccagaacaaggtttcacccaaccaggaacagtaattgtatgcggcgatagccatactgctacacacggagcatttggtgcactagcttttggaataggaacatctgaagttgaacatgttcttgctacacaaactttaatgcaaaagaaatcaaaaaatttaagaataaacgttaatggcaatttaccaaagggagttactgcaaaagatgtaatcttaaaaattattggtacgattggaactgcaggaggaactggatatgtagttgaatttgctggtaatgttatcaaaagtttaagtatggaagagagaatgactgtttgtaatatgaccattgaagctggtgcaagagcagggttaattgcgccagatgaaaaaacatttaattatttaaaaggtaaaacgatgtcgccaaaaggagacaactggactaaagccgtagaattttggaagactttgtattcagataaagactgcagatttgataaggaaataaatattgatggtaaaaacatag

SEQ ID NO: 283535 - DNA, 482 bp, Unknown
  Bacterial polypeptide expressing nucleotide sequence isolated from the Sargasso Sea
aatgcaaaaatttaataaattaaaaagtatcccagcttatttaccaattgtaaatattgatacagatatgataattccaaaacagtttttaaaaactatcaaaagaactggtcttggaaaaaatttattttttgaaatgagatatgatgatcaaggtaaagaaataaatgattttgtattaaacaaagatccatttaatcaatctaaaattttaattgctggaaaaaactttggatgtggttcatcaagagaacatgctccttgggctttattagattttggaattacttgtgttataagttcaagttatgcagatattttttttagcaattgttttaaaaatggaattttgcctataatccttgaagaagaaaaaataaaagagctatccgaatacgcaaatagacaagaagaaatttctattgatttgaatgaagaaaaaatagtttatggaaacaatgagctaaaatttgaagttgatc

SEQ ID NO: 283536 - DNA, 331 bp, Unknown
  Bacterial polypeptide expressing nucleotide sequence isolated from the Sargasso Sea
agcaaagatcttaaaggataaaaaagtatcatcgcatgttaatgctatagtagttcctggctctggcttagttaaagaacaagcagagcaagaaggactagataaaatttttgttagctcagggtttgaatggagagaaccaggttgttctatgtgtttagcgatgaatgcagataaattaaagccagaagaaagatgtgcctctacatcaaatagaaattttgagggaagacaaggtagaggtggtagaacccatctagtaagtccaggaatggctgctgcagctgcaatttcaggtaatttagatgatgtcagaaagtatcaaaattaa

SEQ ID NO: 283537 - DNA, 648 bp, Unknown
  Bacterial polypeptide expressing nucleotide sequence isolated from the Sargasso Sea
aatgccccaaactctttacgacaaaatttggaaagaacatatagttcatcaacaaaatgatggtacaactttattatacgttgatagacatcttatacacgaagtcacaagcccccaagcatttgaaggtttaagattatcaaatagaaaagttagaaagccaaatcttacattggctgttgctgatcataatgttccaaccacgaatagatcggaaggaattcatgataaagaatcaaaaattcaagttgaagagctagaaaaaaattgtaaagaatttggaataaaactttttggaatgaacgataagagacaagggattgttcatataataggacccgaacaaggctttacgcaacctggtacggtaatagtatgtggagatagccataccgcaacgcacggagcttttggagctttggcttttggaatcggcacatcagaagttgaacatgttttagcaacacaaaccttaatacaaaaaaaatctaaaaacttgagaattaatgtaattggtaacttgccaattggagtgacttcaaaagatgtaattttgcaaactataggaaagataggtactgcaggtggaactggatttgttattgaatacgcgggcccgggtatagaaaatttaagcattgaacaacg

SEQ ID NO: 283538 - DNA, 434 bp, Unknown
  Bacterial polypeptide expressing nucleotide sequence isolated from the Sargasso Sea
aatgcctgaaagtctttacgataaaatttggaatgaacatcttgttcatcagcaagaggatggaacctctttgctttttgtagatagacatttaatacacgaagtcacaagccctcaagcatttgagggacttagaaactcgaaaagaaaagttagacagccaaaattaactttagctgtagcagatcataatgtccctactactgatagatcaaaaggaattttagatgtagaatctaaactacaagtagatactctagattcaaattgcaaagagtttggaataaatttatttggtatgaatgataaaaggcagggaatagttcatattattggaccagaacaaggatttactcaaccaggcacaattattgtttgtggagatagtcatacagctacacatggtgcatttggagctttagcttttggaatag

SEQ ID NO: 283539 - DNA, 412 bp, Unknown
  Bacterial polypeptide expressing nucleotide sequence isolated from the Sargasso Sea
ttgagtcaagataccttatttgataaagtttgggatttacacaaagtttcaagacttccaggtggatctgatcaaatttttattggtcttcatcttatacatgaagtgacaagtcctcaagcatttggcgctttaaaagacaaaaaattaaaagttaaattccctgatagaactgttgctaccgttgatcatattgtgccaacagacaatcagagtaggcctttcaaagataatcttgcggaacaaatgatagaaacacttgagaagaattgcctagagcataaaataagattttttaatattggtagtggtaatcaaggaatagttcatgtagtagcaccggaactaggcctaactcagccaggaatgacaatagcttgcggagattcacatacttcaactcatggagctt

SEQ ID NO: 283540 - DNA, 207 bp, Unknown
  Bacterial polypeptide expressing nucleotide sequence isolated from the Sargasso Sea
aatgcctcaaacactttacgataaaatttggaatcagcatctagtacatcaacaagaagatggaacgtctttgctatttgtagataggcatttaattcacgaggttacaagtccacaagcttttgaaggtctaagaagtagcaatagaaaagtaagacagcctaagttaacacttgcagttgctgatcataatgtgccaacaactga

SEQ ID NO: 283541 - DNA, 941 bp, Unknown
  Bacterial polypeptide expressing nucleotide sequence isolated from the Sargasso Sea
aaaaaactgtaaagactttggagtagaactttttgatgttaatgataagcgtcaaggtatagttcatattataggacctgaacaaggtttcactcagccaggtacggtaattgtgtgcggggatagccatactgctacacacggagctttcggtgcattagcttttggaataggaacatctgaagttgaacacgttcttgctacgcaaactttaatgcaaaagaaatcaaaaaatttaagaataaatgtgaatggcaatttaccaaagggagtaactgcaaaagatgtaatcttaaagattatcggtacaattggaactgcaggcggaactggatacgtagttgaatttgctggtgatgtaattaaaagtttaagtatggaagagagaatgactgtttgtaatatgaccatcgaggcaggtgcaagggcaggattaatcgcaccagatgaaaaaacatttagttatttaaaaggtaaaacgatgtcgccaaaaggtgaaaattggactaaagctgtagaattttggaagactttgtattcagacaaagactgcaaatttgacaaagagataaatattaatggcaaaaatatagaaccactggttacttggggcacttcacctcaagatgtatcaccagttactggtgttgtgccagatccagaaaatgaaaagaacgaagatagaaaaatggccatgaaaagatctcttgattatatgggtttaaaagcaaacactaaaatttcagatataaaaatcgacaagatttttataggaagctgtacaaatggaagaatagaggatttaagattggctgcagatcttcttaaaggcaaaaaaattgcccaaaatgtcagtgctatggtagttccaggatctggattggttaaagagcaagctgaaaaagagggaattgataaaatattaaagaagcaggcttgaa

SEQ ID NO: 283542 - DNA, 805 bp, Unknown
  Bacterial polypeptide expressing nucleotide sequence isolated from the Sargasso Sea
aattgagtatgctggcaacttaatatccggattaagtgttgagcaaagaatgacaatttgtaatatgactatcgaaggtggagctagagctggattaattcagccagacgaaaaaattttcgagtatttaaaaaataaaccaatgtctccaaaaaatgaaaattgggaaaaagctattgaatattggaccaaactaaaaacagattcagatgcaaaatttgataaagaggtagttttagaaggcccagaaataaaacctatggtaacttggggtacatcaccgcaagatgttgttgaaatagatggacaagttccaaatccagataatgagaaggatgaagatagaagaagttcaatagagagatcgcttaattatatgggattaaagccaaatacaaaaatacaagatataaaaattgataaagtttttataggtagctgcacgaatggaagaattgaagatttaagagatgctgcaaaaattttaaaagataaaaaaatagcaaatcatgttgatgctatgatcgttccaggttcagggctagttaaggaacaagcagagcaagagggtttagatcaaatatttataaaatcaggatttgaatggagagagccaggatgttcaatgtgccttgccatgaatgctgataaactaaaaccagaagagagatgtgcctctacttcaaatcgtaattttgaaggaagacaaggacgaggtggcagaactcatttagtaagtccagcaatggcagcggcagcagctatttcaggaaatttagacgatgtcagaaagtataaaaattaa

SEQ ID NO: 283543 - DNA, 538 bp, Unknown
  Bacterial polypeptide expressing nucleotide sequence isolated from the Sargasso Sea
aatgccaaatacactttacgacaaaatctggaatgatcacttagttgaccaacaatcagatggtacagctctattatttgtagataggcatcttgtacacgaggtaactagccctcaagcatttgagggtcttagaaattctaatcgaaaagtaagacatccaaaattaactttggctgttgcagatcataatgtaccgactactgatagaacaaatggtatagcagataaagagtcaaaaattcaggtcgatactctagaaaaaaattgtaaagaatttgaagtacagctttttggaatggatgataaaagacaaggaattgttcatattattggaccagaacaaggatttactcaaccaggcacagtaatcgtttgtggagatagtcatacagcaacacatggtgcgtttggagctttagcatttgggattggtacatcagaagtagaacacgttttagcaacacaaacattagttcaaaagaaagctaaaaattttagaattaaagttaatggaaaactgccaataggagtaaca

SEQ ID NO: 283544 - DNA, 328 bp, Unknown
  Bacterial polypeptide expressing nucleotide sequence isolated from the Sargasso Sea
cgctgctgcaatcatagaaggtaagaaagtaaataaaaatgttagagctcaagtgatgcctgggtctactttaacaaaaattcaagctgaaaaagaaggtattgatgaaatatttagatctgctggatttgaatggagagaatcaggttgttcaatgtgtttaggtatgaatccagatataattgcaccaggagaaagatgtgcttcaacttcaaacagaaattttgaaggaaggcaaggaaagggcggaagaactcacttagtaagccctgaaatggcagcagctgctgctatagaaggacattttgttgatgttcgagattggtag

SEQ ID NO: 283545 - DNA, 742 bp, Unknown
  Bacterial polypeptide expressing nucleotide sequence isolated from the Sargasso Sea
agcatttggtatagggacttcagaagttgagcatgttctagcaacacaaacactacttcaaaaaaagccaaaaacaatgtcaattgaagctgttggaaatttgccctttggagtaacaccaaaagacttaatactttcaattattggcaagattggagttgatggcggtactgggcatgcaattgaatttaggggggatgcatttgaaaatatgtccatggaaggaaggatgacggtttgcaatatgactatagaaggtggaggccgagcaggaatgattgcgcctgatgaaaaaacaatagaatttgttcaaggaaaaaaattcacacctacaggaaaaaattttgatcagcttctagaaatatggaaagaattaaaaactgatgatggtgctaaatttgatactgaaattaaaattgattgctcatcacttgagccgcatgtatcttggggaactaatcctggtcaagttgtgagtgtaaattcttcagtgccagacccaaatgatttcgacacacctgagaaaaaatctaatgctgaaagtgctttagagtatatgggtcttgaagcaggtcaaaaaatttctgacgtcaaaatagatagagtatttattggttcatgcacaaatggacgcctagaagatttaagagcagccgcaaaaataatcgatggaaaaaaggtaagtaaaaaacgtgaatgcaatggttgttccggggtcaggtattgtaaaaatgttagctga

SEQ ID NO: 283546 - DNA, 814 bp, Unknown
  Bacterial polypeptide expressing nucleotide sequence isolated from the Sargasso Sea
ctttttgtagatagacatttaatccacgaagtaacaagtccacaagcttttgaggggttaagaacatcaaaaagaaaagttagacaacctaaattaacactagctgttgccgatcataatgttccaacaactgatagatcaaaaggaatatctgacgaagactctaggatacaagtagagactttagataaaaactgcaaagagtttgatattcaattgtttggcatgaatgataaaaggcaaggtattgttcatataattggtccagaacaagggtttactcaacctggaaatataattgtttgtggagatagccatacagctactcacggtgcatttggtgctctggcatttggaataggaacttctgaagtagagcatgttttggcaacacaaacattggtacaaaagaaatcaaaaaattttagaataagtgttaatggcgaattatcaattggcgtaactgcaaaagatgtaattttacaaattattggaaaaataggaactgctggtggaacaggatatgtaatagagtatgcaggaaatttaatatctggattaagtgttgaacaaagaatgacaatttgtaatatgactattgaaggaggagctagagctggattaattcagccagatgaaaagatatttgaatatttaaaaaataaaccaatgtctccaaaaaatgataattgggaaaaagccattgaatattggagtaaactaaaaacagatcctgatgcaaaatttgataaagaaattgttttagagggccaagaaataaaacccatggtaacttggggaacatcgccccaag

SEQ ID NO: 283547 - DNA, 778 bp, Unknown
  Bacterial polypeptide expressing nucleotide sequence isolated from the Sargasso Sea
atgttattttacaaaataattggaaaaataggaacagctggagggactggatgtgtattagagtatgctggttcagttatttcagacctatctgtggaacagagaatgacgatttgtaatatgtcaatcgagggtggtgctagagctggtcttattcaacctgatgaaaaaatttttaattacttaaaaggaagaccaatgtccccaaaaaatgaaaattggaataaagctttagagtattggaactcacttaaaactgataatgatgctaaatttgataaagagatcaatttaaatggagaggatattgctccaatggtaacttggggaacttctccagaagatgttgtaacaataaatggaaaaataccgaaccctgataatgagaaaaatgaagataaaaaaaattcaattaatagatctttaaaatatatgggtctaaaaccagatgttaaagttcaggatataaaaattgataaagtttttattggaagttgtaccaatggaagaatagaagacttacgagaggctgctcaaattttaaaaaataaaaaaaaggctgcacatgtgcatggtatggttgttccaggatctggactagtaaaagaacaagctgaacaggaaggtttagataaaatattcattgagtctggatttgaatggagagagcctggctgctcaatgtgcttagcaatgaatgctgataaattaaaaccacaagagagatgcgcatctacttcaaatagaaactttgagggaagacaaggaagaggtggtc

SEQ ID NO: 283548 - DNA, 654 bp, Unknown
  Bacterial polypeptide expressing nucleotide sequence isolated from the Sargasso Sea
aaggaaaagattggacaaagcttgttgaatattggaaaagtttaattacggacgaaggtgctaaatttgataaagaaatcaatttaaaagccagtgaaattttacctatgataacttggggaacatctccacaggatgtaattacaattgacgagaaagtaccaaatccagaaaatgagacagatgaagataaaaaaaattctttagaaagggctcttaattatatgggtctaaaaccaaatatggcagcaaaagacattaagatagataaagtttttattggaagttgtacaaatggtcgaatagaagatttaagagaagctgcaaaaattctaaaagataaaaaaatagcctcacatgtccatgcaatggtggttccaggctctggtttagtgaaagaacaagcagagcaagaaggactagataaaatttttgtaaattcaggttttgaatggagagaaccaggttgttctatgtgtttggcaatgaatgcggataaattaaagcctgaggagagatgtgcctcaacatcaaatagaaattttgaaggaagacaaggcagaggcggtagaactcatttagtaagtcctggtatggcagctgcagctgcaatatctggaaatcttgatgatgtaagaaagtatcaaaattaac

SEQ ID NO: 283549 - DNA, 265 bp, Unknown
  Bacterial polypeptide expressing nucleotide sequence isolated from the Sargasso Sea
atgcaaaaattcaatacattaaagagtatcccagcttacctaccaatagttaatattgatacagatatgataattccaaaacaatttttaaaaacgataaaaagaacaggcttaggtaaaaatttattttttgaaatgagatatgacgataaaggtaaagaaattaatgattttgttttaaatcagaagccctttaataactcaaaaattttaattgctggtaaaaattttggatgtggttcctcgagagaacatgctccgtggg

SEQ ID NO: 283550 - DNA, 446 bp, Unknown
  Bacterial polypeptide expressing nucleotide sequence isolated from the Sargasso Sea
cgaacgcgccctggagtacatggatctcacccccggcacaccgctgcgggacgtcgccgtcgacacggtgttcatcgggtcgtgcaccaacggtcgcatcgaggatctgcgggttgccgcggacatccttcaaggccgtaaggtcaaagagggaatgcgcctgatggttgtgccgggctcagctagggttcgtctgcaggcggaatctgagggcttggaccaggtgttcttggaggccggtggtgaatggcgcggagccgggtgctcgatgtgcctgggaatgaaccccgacaagctcacgcccggcgagcgaagcgcgtctacgtccaacagaaacttcgagggacgacagggccctggagggcgcacacacctggtttctccggcggttgccgcgtcgaccgcagtgaccgggcacctgtcgtcacccgcggatctggcgtagg

SEQ ID NO: 283551 - DNA, 462 bp, Unknown
  Bacterial polypeptide expressing nucleotide sequence isolated from the Sargasso Sea
ttaccgaagatggatcggatagggaagattttgtccttaacaaacctgcatataaagatgcggaaattcttattgctggtgaaaattttgggtgtggttcgtcacgcgagcacgctccttgggccttactcgattatggtattaaatgtataatagcacccagttttgctgatattttcttcaataatagttcaaaaaatggcattctgttgataaaattacctcaagaagaggttgaccaattaatggaagatgctggcagaggcgcaaatgcgaaggtctcggttgatttggaagctcaggaaataatcagcccggatggtcgtcgtgtaacatttgagtttgatgcattcaaaaaacactgtctacttaacggtttagatgatattggactgacacttcagaaagctgataaaattaaaaactttgaagcaggtcaaagagtatcccaaccttggtagc

SEQ ID NO: 283552 - DNA, 742 bp, Unknown
  Bacterial polypeptide expressing nucleotide sequence isolated from the Sargasso Sea
tattgttcacattattggacctgaacaaggttttactcaaccaggaacaattattgtttgtggcgacagccatactgctacccatggagcttttggtgcacttgcttttggaataggaacgtctgaggttgaacatgttttagctactcaaactctattacaaaaaaaatctaaaaattttttacttaaggtaaatggaaaaataccattaggggtaactgctaaagatgttattttaaaaatcattggtactataggaacagctggaggaactggttttgttattgagtattctggagatgttattagaaactttagcatggaagagagaatgactgtttgcaacatgactattgaagggggggctagagcaggattgatacaacctgatgagaagactttcaaatatttagagaacagacctttgtctccaaaaaaagataattggaataaagctttagattattggaacaatttaaaatctgataacgattgtaaatttgataaagtaatagttctaaatggcgatgaagttgttccacaagttacttggggtacatctccacaagatgttgttccagttaatggatcagttccggatccaaaaaaagaaaaagataatgacagacgtgtggctatggaaagatcattagattatatgggcttaaaaccgaatacaaaaatgacagacattaaaattgacaaagtttttattggaagctgcactaatggaagaattcag

SEQ ID NO: 283553 - DNA, 378 bp, Unknown
  Bacterial polypeptide expressing nucleotide sequence isolated from the Sargasso Sea
aatggaaaaattttttaaattaaaaagtataccttcgtatttatcattacaaaatattgatactgatatgataattccaaaacaattcttaaaaacaattaaaagaacaggtttaggaaaaagtttattttatgaaatgcgttatgatgaaaaaggaaaaataattgaagattttatattaaataaagagccatataataaatcaaaaatcttattagctggtaaaaattttggctgtggttcgtccagagaacatgccccttgggcattatcagattttggaataaaatgtattattagctctagttttgctgacatattttataacaattgttttaaaaatggaattttaccaataaaaataggtgaagaaactgt

SEQ ID NO: 283554 - DNA, 433 bp, Unknown
  Bacterial polypeptide expressing nucleotide sequence isolated from the Sargasso Sea
gagtacttaaaatcaattaaaaaatttggtttcgaagattatttatttgatggttggagatatcatgacgacggaagattaggtataaaaaaagaagaaagagaaatcaatgaggacttcattctaaacaaaattcctttcaacgaatctaaaatacttttagcaagagataattttggttgtgggtcatcaagagagcatgcagtttgggctctaagagattttggtataaaagcagttatcgcttcttcttttggagatattttttataacaactgttttaaaaatcgtgttcttccaatccagcttaagaaaaatcaaattgaggaattgtttaaaacagtacaagatgaaattgtagaattttcaatagatcttcaagaaagaattattactaatggtgataaagaattcagttttgttgtcggtgatc

SEQ ID NO: 283555 - DNA, 421 bp, Unknown
  Bacterial polypeptide expressing nucleotide sequence isolated from the Sargasso Sea
tatgaaatctaatagcgagggattaatcataaatggagttgttgcatatattgatagagataatattgatactgatcaaattatccctacggaatatttaaaatctattaaaaagtttggctttgaagattatctttttgatggttggagatataaagatgatggaaagttaggtgtcacgaaagatgaaagagcgatcgatgaaaaatttatacttaataaaaaacctttcaatgaatcgaaaatacttttaactcgagataattttggatgtggctcatcaagagaacatgcagtttgggctctgcgagattttggtataaaagctgtaatagcatcctcttttggggatattttttataataattcttttaaaaatggtgatttgccaattaagttagaaaaaaaagagatagacttc

SEQ ID NO: 283556 - DNA, 394 bp, Unknown
  Bacterial polypeptide expressing nucleotide sequence isolated from the Sargasso Sea
ttaacattcgataaagttttcataggatcttgtactaattctagaattgaagatttaagacaggctgctgaaatagttaagggtaaaactattgcatcaaatatttcagaagctattgttgtgcccggatctggtcttgttaaagaacaagcagaaaatgaaggattagataagatttttactgacgcaggttttatttggagagatcctggatgctcaatgtgtcttggaatgaatccagatcaactaaaaccttatgaaagatgtgcgtcaacctcaaatagaaactttgaaggaagacagggatacctaggtaggactcatttgatgagtccaattatggcagcctatacagcaattaatggaactataggagacccttatgaaatctaat

SEQ ID NO: 283557 - DNA, 496 bp, Unknown
  Bacterial polypeptide expressing nucleotide sequence isolated from the Sargasso Sea
gttcctgatccaaaaaaagaaaaaaataatgatagacgtatagcgatggagagatcattagattatatgggcttaaaaccaaacactaaaatgacagatattaaaatagataaagtatttattggaagttgtacgaacggaagaattcaagatttaagggaggcggctaaacttttaaaagataaaaaaatagcggaacatgtaaacgctatggtagtaccaggctcggggcttgtaaaaatacaagccgaacaggaaggtttagataaagttttcaaggagtcaggttttgaatggagggagccaggttgttcaatgtgccttggtatgaacgaggatcaattaaaaccaagagaaagatgtgcatcgacttcaaacagaaattttgagggaagacaaggtcgtgggggaagaacacacctagtaagtccagccatggcagcagcagcagctatcgaaggtcatttatcagatgtgagaaagtttaacatttagc

SEQ ID NO: 283558 - DNA, 331 bp, Unknown
  Bacterial polypeptide expressing nucleotide sequence isolated from the Sargasso Sea
atggaaaaatttacaaaaataaaaagtatacccgcatatattccattaatgaatattgatactgacaaaattattcctaaacaatttttaaaaactataaaaagatctggtttgggaaaaagtttattttatgagatgcggtttgatgaaaaaggaaatccaataaaaggttttattttagaccaaaaaccatttaataattcaaaaatacttttaacaggaaaaaattttggttgtggttcatctagagagcacgctccatgggctttactagatttcggaattaaagtaattgttagcgaaagttttgcagacattttttataacaatt

SEQ ID NO: 283559 - DNA, 943 bp, Unknown
  Bacterial polypeptide expressing nucleotide sequence isolated from the Sargasso Sea
actcaacctggcaccgtaattgtttgcggagatagtcataccgcaacccatggagcatttggtgctttagcttttggcataggaacctcagaagttgaacatgttttagctacacaaacattaattcaaaaaaaatcaaaaaatcttagagtaaatgttattggaaaattaccaacaggagtcacatcaaaagatgtaattttacaaacaattggaaaaataggtacagctggaggaaccggtatggttattgaatatgctggttcagttatagaaaatcttaatatagagcagcgaatgacaatttgtaacatgtcaatagaggccggagcacgcgcgggattaattgctcccgatgaaaaaactataaaatatttaaaagataaaccattttcgccaaagaagaacaattgggataaagctgtggagtattggtctaaacttaaatctgacacgggagcgaaatttgatcgtgaagtagaaattaggggagatgatattagtccaatggttacatggggaacgtctcctcaagacgttgtttctgttactgggcacgtcccagatccagaaaaagaaaaagatgaaagcaaaaaagaatctatgaatagatcactaaattatatgggattaaaaccaaatacaaaaatgaccgatattaaagttgatagaattttcattggaagttgcactaatggaaggataggagatttaagagaagctgctaaaattttaaaaggaaaaaaagttgcggaacatgtaaatgctatggtggtacctggatcaggactagtaaaacaacaagcagaagaggagggaatagataaaatatttaaggattcaggttttgaatggagagaacctggctgctcaatgtgtttagcaatgaatgctgataaacttaatccaaaagagagatgtgcgtctacatccaatagaaatt

SEQ ID NO: 283560 - DNA, 724 bp, Unknown
  Bacterial polypeptide expressing nucleotide sequence isolated from the Sargasso Sea
ggaattgtccatgttattggtccagaattgggaataactcaacctggaatgaccattgtttgcggtgatagtcacacctctactcatggtgcgtttggtgctatagcttttggaataggaacaagtcaagtagctcaggtcttagccagccagtgtttacttttaaataaaccaaaaaaaatgaggattaatgtgaacggtgtcttgaataaaaatgttacgcctaaagatgttattctttacattatatcaaaactaggaactaatggaggaactggtttctttgttgaatatgctggtgatgtttttgaaaaaatgtcaatggaaggtagaatgacagtttgtaatatgagtattgaaatgggtgcaagaggaggaattattgcacctgatgatgtaacatacaaatatttagaaggaaaagatttctcacctaaagaagatgaatttaaatcaaaagtttcaatttggaaaaaattaaaaagtgatgaaaacgcaatatttgattcagagtttacatttaatgctaatgatatttttcccatgcttacatatggaacaaatccaggaatgggaataaagtataacgatagaataccaaaacacagtaattcctcagatttaaatgctcttaaatatatgggttttaaatctggtgaaagtttgataggaaaaaaaatcaattatgtttttataggaagttgtacaaattctagaatagaag

SEQ ID NO: 283561 - DNA, 396 bp, Unknown
  Bacterial polypeptide expressing nucleotide sequence isolated from the Sargasso Sea
gttcgaggggttgacgatttcagatcgtaaactttggagaaaagacgctaatcttgctacacctgatcacaatgtacccactgataatcgtagtttggggataaaggggataacggatcccattgctttagagcaggtcacgacacttgatgagaattgcgagcggtttgaggttgagcagttcgatatcctggatgagagacaaggcatagtgcatgttgttggtcccgagcaaggtgccacacttcctggtatgacgattgtttgtggggattctcatacttctacacatggcgctttcggagcattagctcaagggattggcacttctgaagtggagcacgtaatggcaacgcagtgccttgttcaaaagaaggcgaacaattttgacttgtc

SEQ ID NO: 283562 - DNA, 451 bp, Unknown
  Bacterial polypeptide expressing nucleotide sequence isolated from the Sargasso Sea
atgcaggctttcgacacgcacgtaggtttggtcgcaccgcttgatcgagtaaacgttgatactgatcagattattcctaagcagtttcttaaatcgattaagcggacgggttttggtgattatttgtttgatgcttggcgatttgatgatccaggcgaactagggatgactcccaatgaaagagttataaatcatgattttgtgttgaaccaaccgcgttatcagggcgcaagtattttactagctagaaacaacttcggttgtggttcttccagagagcacgcggtttggtcgattatggaattcggctttaaagtcgttattgctgagagctttgccgatatattttatgggaattgctttaaaaatggattattgccggttcaattgccgccagatgttatagacaggctcttcgagctatcttcagatggtcttgagtgtcaataga

SEQ ID NO: 283563 - DNA, 548 bp, Unknown
  Bacterial polypeptide expressing nucleotide sequence isolated from the Sargasso Sea
caaaccacaagttacatggggtacttcacctgagatggtattgaattatgatgaatcaattccaacagtatttgatgccaaagatgaaaacaagaagaatgttgagttggcaagagactatatgggcattgaaaatgaaaaaaaattatctgatttaacattcgataaagtcttcataggatcttgtacaaattctagaattgaagatttaagacaggctgctgaaatagttaagggtaaaactattgcatcaaatatttcagaagctattgttgtgcccgggtctggccttgttaaagaacaagcagaaaatgaaggattagataaagtttttactgatgcaggttttatttggagagatcctggatgttcaatgtgtctcggaatgaatccagatcaactcaaaccttatgaaagatgtgcgtcaacctcaaatagaaactttgaaggaagacagggatacctaggtaggactcatttgatgagtccaattatggcagcctatacagcaattaatggaactataggagacccgtatgaaatctaac

SEQ ID NO: 283564 - DNA, 397 bp, Unknown
  Bacterial polypeptide expressing nucleotide sequence isolated from the Sargasso Sea
atgaaatctaacagcgagggattaatcatagatggagttgttgcatatatagatagagataatattgacactgatcaaattatccctacggaatatttaaaatctattaaaaagtttggctttgaagattatctttttgatggttggagatataaagatgatggaaagttaggtattacaaaagatgaaagattgattgatgaaaactttatacttaataaaaatcctttcaatgaatcgaaaatacttttaactcgagataattttggatgtggctcatctagagaacatgcagtttgggcgctgcgagattttggtataaaagctgtaatagcatcctcttttggggatattttttataataattcttttaaaaatggtgtattgccaaattaag

SEQ ID NO: 283565 - DNA, 928 bp, Unknown
  Bacterial polypeptide expressing nucleotide sequence isolated from the Sargasso Sea
taaagaatttggagttactttatttcctcttctagataaacgacaaggtattgttcatatagtcggtcctgaacaaggcattacacagccaggaatgactattgtatgtggagatagtcacactgccacacacggtgcttttggagcacttgcttttggaataggtacaagtgaagtagaacatgttttagctagtcaaactcttatccaacaacctgcaaaaaatatgaagatttccattaatggaaaattaaaatctggggttacagcaaaagatattattcttcatattataggtgtaattggtacagctggtggaacaggttatgttattgaatatactggcgaagcaattctttcacttagtatggaaggacgtatgacaatatgtaatatgagtatagaagctggagcaagagctggactaatagcacctgatcaaaaaacctttgattatattaaaggtagaccatatgcacctaaaggtaaagaatgggaaaaggctattgaattttggaagtcattaccttccgatgagaatgcagaatatgataaagaaataaatattaatgctgaagacattgctcctcaaattacatggggaactagccctcaggatgttgttccaattaatggaaaggttcctaacccttcatctgttgaagatgttaatagaaaaaaatcaattgagcgatcacttgaatatatgggtttagaaccagatcaagaaataaatgaaattaaaattgataaggtttttattggatcatgcacaaatggtagaattgaagatctaagagaagttgcaagagtagttaaaggaaaaaaagttagtgttgattcaatgattgttcctggatcaggtctagtgaaagaacaagcagagagtgaaggattagataaaatttttattgaagctggctttgat

SEQ ID NO: 283566 - DNA, 717 bp, Unknown
  Bacterial polypeptide expressing nucleotide sequence isolated from the Sargasso Sea
gatgataaaaaataatcctaaaacactttttgataaaatttggtcacaccatcttgttgataagcaagaagatggaacatgtcttttatatattgatcgccaccttgttcacgaggtaacaagtcctcaagcatttgaaggattaagaaattctaatcgtaaggttagaagacctgaaagtacatttgctgtcgctgatcacaatgtaccaacttcggacagaactaaaggtattgaaaacaaagaaagcagaatacaagttgaaacacttgaaaaaaattgtgatgattttaatgtaacgctttttccactattagatagtagacagggaatagtccatatagttgggcctgagcagggtattactcaacctggaatgacaatagtttgcggggatagtcatacagcaactcatggtgcatttggtgcgctagcttttggtattggtactagtgaagtagagcatgtacttgcaacacaaacattgattcaaaaccctgcaaaaaatatgcgcattcttgttaatggcaaattgaacttaggtgttactgctaaagatattatcttaaccataattggaaagattggaactgctggaggcacaggttatgtaattgaatatgcaggtgaagttatttcaaatctatcaatggaaggtaggatgactattttgtatatgagtataagagctggagctagggcaggattaatagcacc

SEQ ID NO: 283567 - DNA, 604 bp, Unknown
  Bacterial polypeptide expressing nucleotide sequence isolated from the Sargasso Sea
atggataaatttatagttttaaaaggaattgctgcgccgttaccaatgataaatgttgataccgatatgataataccaaagcagtttttaaaaacaattaaacgctctggacttggaaaaaatttatttcatgaactacgctacgatatgcaaggaaatataaaaaatgattttgtattaaactgggatccttacaaacaagcatcaatccttataaccggagataattttggttgtggttcaagcagagagcatgcaccttggtcgcttttggattttggatttaaatgtattattgctccaagctttgctgatattttctacaacaattgttttaaaaatggcattcttccaattcgacttaatcaagaaaaagttgatatattaatggaagaagcgaaaaataaaaataatctaattgtggatctcgaagatcaaaaaattttttgtgcggatgaaagttcaattgattttgatatcgattcttttagaaaaaaatgtttattagacggtcttgatgatattggtttaactttacaaaaaaaagaattaatttcccaatacgaagacaatcttaaatcatctcatccttggatactataag

SEQ ID NO: 283568 - DNA, 298 bp, Unknown
  Bacterial polypeptide expressing nucleotide sequence isolated from the Sargasso Sea
aaagtttctgtagatgcaatgatcgtcccgggatcaggtttagttaaagagcaggcagaaaatgaaggtttagataaaatatttatagaagctggttttgattggagagagcctggatgctctatgtgtttagcaatgaatcccgatcaattaaaacctaaagaaagatgtgcatctacatcaaatagaaattttgagggtaggcaaggaagagaaggcagaacacatcttgtaagtcctgttgttgcagctgcttctgcaataaaaggaacttttgctcaggagactgatttataat

SEQ ID NO: 283569 - DNA, 679 bp, Unknown
  Bacterial polypeptide expressing nucleotide sequence isolated from the Sargasso Sea
ccccatgcccccgagggtgaggcctggaatcgtgccgtcgcctggtggagctccctggccactgatgccaacgcaacggtcgacgatgaggttgagtttgatgccgctgcgattccacccacggtgacctggggcattaccccgggccagggactggggatcgatgaaacggtgccaagccttgatcagctggatccaggcgagcgtcctattgctgaggaggcctaccgctacatggatctccagccgggaacggctatcgccggggttcctgtggatgtctgtttcatcggcagctgcaccaatggtcgtctcagcgatctgcgtgctgctgccgatgtggcctgtggtcgccaggtagctgaaggcatcaaggcgtttgtggttcccggttcggagcaggtggcgaaagctgctgaagcagaagggctggatgaagtgttccgtgccgcaggttttgagtggcgggagcccggctgctcgatgtgtctggcaatgaatccggatcggctggaggggcgtcagatcagcgccagctccagcaaccgaaatttcaagggtcggcagggatcggccagtggccggacgttgttgatgagtcctgccatggtggctgcagctgccgttaatggtcgtgtgaccgatgtccgtactttgatttctccgtccgcatcgtgat

SEQ ID NO: 283570 - DNA, 673 bp, Unknown
  Bacterial polypeptide expressing nucleotide sequence isolated from the Sargasso Sea
tcaaaagatgtaattcttcagataattggaaaaattggtacagctggtggtacaggttgtgtaatagaatatgctggagatttaataagatcattgagcgttgagcaaagaatgacaatttgcaatatgacaattgaaggtggagcaagagcaggattgattgcaccagatgaaaaaatatttgagtatttaaaaggcaaacctatgtcaccgaagggtcaaaattgggaaaaagctctaaattactggagtggtctaaagactgacaaagatgcaaattttgataaggaaataaatttaaatgcagcggaaattttgccaatgataacatggggaacttcgccgcaagatgttatcacaatcgatggaaaagttcctaatccacaaactgaaaaagatgaagataaaaagaattcaattgaaagatcattgaaatacatgggactaaaacctgatatgtcagcaactgatataaaaatcgataaagtatttataggaagttgtacaaacggaagaattgaggatttaagagaggcagcaaaaattttaaaagataaaaaaatatcatcacacgttaatgcaatggtagttccaggatctgggttagttaaagaacaagctgagcaagagggattagataagattttcatcagttcagggtttgagtggagag

SEQ ID NO: 283571 - DNA, 506 bp, Unknown
  Bacterial polypeptide expressing nucleotide sequence isolated from the Sargasso Sea
aatggaaccatttgtgactttaaaaagtattcctgcaccattaccaatgattaatgttgatacagatatgataattccaaaacaatttcttaaaactattaaaagatctggtctaggtaaaaatctatttcatgaattaagatatgatattcaaggcaatataaaaaatgattttattttgaattgggatccttataaaagttcaaaaattttaattgctggtgcaaattttggatgtggatcaagcagagaacacgcaccatggtcacttttagattttggttttaaatctataattgccccaagttttgctgatattttttataacaattgttttaaaaatggaattttaccaattaaacttgatcaaacaaaagttgatttacttatgaatgaagcagaagaaaaaaatgaaataactgtaaatttggagaaacaaataataattcaccaagaacatgaaactataaattttgaaatagataaatttcgtaagaaatgtctta

SEQ ID NO: 283572 - DNA, 280 bp, Unknown
  Bacterial polypeptide expressing nucleotide sequence isolated from the Sargasso Sea
catgattgttcctggttcaggtttggtaaaaaaacaagctgaagaagaaggtttagataaaatttttattgaagctggttttgattggcgtgaacctggctgttcaatgtgtttagctatgaatcctgatcaattaaaaccaaaagaaagatgtgcttcaacatcaaatagaaattttgagggtagacaaggcagagagggaagaacgcatttagttagccctgctattgctgctgcttctgcaattaaaggctctttttctactgttgaggatttataa

SEQ ID NO: 283573 - DNA, 242 bp, Unknown
  Bacterial polypeptide expressing nucleotide sequence isolated from the Sargasso Sea
gatgacaataaataatcctaaaactctttttgataaaatttgggaacatcatcttgttgatagacaagaagatggaacttgtcttatatatattgatagacaccttgttcatgaagttacgagccctcaagcatttgaaggtttaagaaataataatcgtaaagttagaagacccgaaagtacttttgctgtagctgatcacaatgttccaacctcagatagatctaaaggtatagaaaata

SEQ ID NO: 283574 - DNA, 391 bp, Unknown
  Bacterial polypeptide expressing nucleotide sequence isolated from the Sargasso Sea
aattgcaggtgctaattttggatgtggatcaagtagagaacatgcaccttgtttacttttagattttggttttaaatcaattatagctcctatttttgcagatatattttataacaattgttttaagaacggaatcttaccaattaatcttgatcaaatcagcgttgatttacttatgaaagaagcagatgaaaaaaaacaaataacagtaaatttagaaaaacaaattataatttataaacaagataaagcaataagttttgaaatagatgagtttcgaaaaaaatgtcttattgaaggtttagatgatattggtcttacactaaaaaaaaataatcaaattgatattcatgaagaaaaaatccatgaaattcagccttggatagtttga

SEQ ID NO: 283575 - DNA, 967 bp, Unknown
  Bacterial polypeptide expressing nucleotide sequence isolated from the Sargasso Sea
atgacggcacatcttttactttttgtagatagacatttgattcatgaggtgacaagcccccaagcttttgaaggattaagaaattctaatagaaaagttagacacccaaatttaactttagcagttgcagatcataatgttccaacaactgacagatcaaaaggtatttcagatgaagagtcaaaaattcaagtagatactttagaggaaaattgtaaagaattcggtgttcagttatttggtatggatgataagaggcaaggtatcgttcatatcataggacctgaacaaggttttactcaaccaggtacagttattgtttgtggagacagtcataccgcaacgcatggagcatttggtgctttagcatttggaataggaacttcagaagttgaacatgttttagcaacccaaacactagttcagaagaaggctaaaaattttagaattaatgttaatggtgaacttcctttaggagttacttctaaagatgtaatacttcaaataattggaaaaataggtacagcaggtggcacaggatctgttgtggaatatgctggagatttaataagatctttaagtgttgagcaaagaatgactatttgcaatatgacaattgaaggtggtgcaagagcaggattaattgcaccagatgaaaaaatttttgaatatttaaaaggaaaaccaatgtcaccaaaaagtgaaaattgggataaagctttgaactattgggaaactttaaaaacagactctgatgctagttttgataaagaaattagccttaatgcaaatgaaattttacccatgattacatggggtacgtcaccacaagatgtaataacaattgatggaaaagttccaaatccaaataatgagactgatgaagataaaaaaaattcaattgaaagagctttaaagtatatgggtttaaaacctgacatggcagccacagatataaaaaaataga

SEQ ID NO: 283576 - DNA, 640 bp, Unknown
  Bacterial polypeptide expressing nucleotide sequence isolated from the Sargasso Sea
atgcatagtacgctttatgacaaactctggaatgagcattttgtgacttcttttgattcaggtgagtcattaatttatattgatagacattatttgcatgaagtcacctcaccacaagcatttgaaggtttgataaaaaaaaatatcaaaccttggagagttgatgcaaatattgctactcctgatcacaatgtgcccacccttagagcaaaaagttttgcaatagaatcaattgatgatgaaatttctaaaattcaagtaaaagaactagacaaaaattgtgacctctttggcattaaacaatttgatattaaatctttaaatcaaggaattgttcatgttataggtccggaattgggttatacacttcctggaatgactattgtttgtggggattcgcacacttcaacacatggagcatttggatgtctagcaatgggtattggcacttcagaagttgagcatgttttagcaactcaatgtttaaaaatatcaaaacttaaaaatatgagagtaaattttgaaggtattccatctcctgacattacctcaaaagacgttattctttttcttattagaacaattggtgtatctggtgggaatggccatgccatcgaatttgcgggctcatatatgaaaa

SEQ ID NO: 283577 - DNA, 841 bp, Unknown
  Bacterial polypeptide expressing nucleotide sequence isolated from the Sargasso Sea
atgtctaaaactctatacgataagatatgggaaaaccatcttgttcatgaacaaagcgatggaacgtcgttaatttatgtcgatagacatttagtccatgaagttacaagtccccaagcttttgaaggacttagattacaaaaaagaaaagttagaagaccagaattaactcttgcagtgcctgatcacaatgttcctacaactgacaggtcaaaaggtataaatgatgaggactctagaattcaagtagaaacattaagaaaaaactgtaaagattttggagtagaactttttgacgttaatgataagcgtcaagggatagtccatattataggacctgaacaaggtttcactcagccaggtacagtgattgtatgcggcgacagccatactgctacacacggagcattcggtgcattagcttttggaataggaacatctgaagttgaacacgttcttgctacacaaactttaatgcaaaagaaatcaaaaaatttaagaataaacgttaatggcaatttgcctaagggagttactgcaaaagatgtaattttaaaaattatcggcacgattggaactgcaggcggaaccggatacgtagttgaatttgccggcgatgtaattaaaagtttaagcatggaagaaagaatgactgtttgtaacatgaccattgaagcaggtgcgagagcgggattaatcgcaccagatgagaaaacatacagttatttaaaaggtaaaactatgtcaccaaaaggtgaaaattggactaaagctgaagaattttggaagactttgtattcagataaagactgcaaatttgataaagaaggtaaatattgat

SEQ ID NO: 283578 - DNA, 690 bp, Unknown
  Bacterial polypeptide expressing nucleotide sequence isolated from the Sargasso Sea
aatgcctaaaacaatatacgataaaatatggaatgaacatcttgttcaccaacaaagcgatggtacatcattactttttgttgatagacacttaattcacgaagttacaagtccacaagcttttgagggtttaagaaattcgaacagaaaagttagacaaccaaaactaacattagcagtggcagatcacaatgtacctacaactgatagatctaaaggcatttctgataaggaatcaaaattgcaagtagatacattagaaaaaaattgtaaagaatttggagttcaactatttggtatgaacgataaacgtcaaggtattgttcatataattggacctgagcaaggatttactcaacctggaacaattatagtttgtggggatagtcataccgcaactcatggagcttttggttcattagcttttggtattggaacttcagaggttgagcatgtattagcaactcaaacattagtacaaaaaaaatctaaaaattttagaattaatgttaatggaaaactttctgttggagtaacatctaaagatgtaatattgcaaataattggtaaaataggaacagcaggcggaacaggatatgtaattgagtatgctggaaacgtaatatcttcattaagtgttgaacaaagaatgacaatttgcaacatgacaattgaaggtggtgcaagagc

SEQ ID NO: 283579 - DNA, 355 bp, Unknown
  Bacterial polypeptide expressing nucleotide sequence isolated from the Sargasso Sea
aatgaataaatttatatcaataaaaagtattccagcttatctacctatcgtcaatatagatacagacatgataattcctaaacagtttttaaaaaccataaaaagaactggactaggaaaaaatttattttttgaaatgagatatgatcaaagtggtaaagagatagatgactttattttaaataatagtccgtataataattctaaaattttaattgcaggaaagaattttggatgtggctcttctagagaacatgctccttgggctttaatggattttggaataacttgtgtaattagttcaagttatgcagatatattttataataactgttttaagaatgggattctccca

SEQ ID NO: 283580 - DNA, 574 bp, Unknown
  Bacterial polypeptide expressing nucleotide sequence isolated from the Sargasso Sea
aatgaaaaaatttacaataatcaaaagcatacctgtatatctgccaatagttaacattgatactgatatgattattcccaaacagtttttaaaaacaataaaaagaactggtttaggtaagaatttattttatgaaatgagatatgatcaaaagggaaataaaataaatgattttatattaaacaatgatccatatgataaatctaaaatattagttgcaggaaaaaattttggttgtggttcttcaagagagcatgctccttgggcacttttagattttggaattacgtgtgtaattagttcaagttttgcagatattttttataataattgttttaaaaatggaattctacctataactataagtgaagatgaaataaaagaaatttcagaatattcaaatagaaaagaagaaatctcagtaaacttatctgatcaaaaaataatatttggaaataaagaaattagttttgatatcgacaaatttaaaaagaaatgcttaatggaaggtttagatgatattgcattatctttagaaaaaatagataatattgtttcatttgaaaaagaataa

SEQ ID NO: 283581 - DNA, 340 bp, Unknown
  Bacterial polypeptide expressing nucleotide sequence isolated from the Sargasso Sea
aagagaagcggcaaaaattttaaaagataagaaaatagcaaaacatgttaatgctatgattgttccaggttcagggctagttaaagaacaagcagagcaagaaggtttagatcaaatatttataaaatctggatttgaatggagggagcctggatgctcaatgtgccttgccatgaatgcagataagctaaaaccagaagaaagatgtgcctctacttcaaatcgtaattttgaaggaagacaaggacgtggtggtagaactcatttagtaagtccagcaatggcagcagcagcagctatttctggaaatttagatgatgttagaaagtatcaaaattaa

SEQ ID NO: 283582 - DNA, 766 bp, Unknown
  Bacterial polypeptide expressing nucleotide sequence isolated from the Sargasso Sea
gagcaaagaatgactattggtaatatgtcaattgaagcaggctcaagagctggtttgattgctcctgatcataaaacatttgattatatcaataacagagaatacaccccagaaaattatgatgacttggttgacacttggaaaaattctctaatgtctgatgcaaatgcaaaatttgataaaagttttacaattgatgtagaaaaaattgaaccacaagtaagttggggaacaaaccctgcaatggtttcagatgtaacaggaacagtacctacccctgaagaatttggtttgaataatgaaattcaagttaaaagtgcaaaaaaggcactagcatacatgaacttagaacctgaaactccgattgtagaaatttctattgatagagttttcattggttcttgtactaacgctagattggaagacttgaaggatgccgcagaaattgtgaaaggcaaaaaagttaatcctgatgtcaacgcaatggtagtgccaggttctcaaatggtcaaatatgaagctgaaaaattaggattagacaaaatattcaaggatgcaaattttgaatggcgagaatctggttgtagtatgtgtcttggaatgaaccctgatattttaaaatctggagaacgttgcgctagtacatctaatagaaattttgagggtcgacagggttctggtgggcgaacacatcttgtcagtcctgttatggctgcagcttctgcaattgctggacattttgttgacgtaagggatgtgtgttaga

SEQ ID NO: 283583 - DNA, 703 bp, Unknown
  Bacterial polypeptide expressing nucleotide sequence isolated from the Sargasso Sea
agctccagatgataaaactatagagtattttaaagatagaccgatgtctccaaaaggtgagaattggacgaaagcagttgcacattggaaaaaacttttttctgatagtgatgcaaagtttgataaagaagtaaatattgatgcaaaagatattgaaccattagttacatggggaacatcaccgcaagacgtctctccaattactggagaggtaccagatccagaaaaagaaaaagataaagacagaagaacagctatgtacagatcactagaatacatgggtttaaaacctaaaatgaaaatctctgacattaaagtagacaagatcttcatcggaagttgtacaaatggaagaatagaagatttaaggctagctgcaaaactattaaaaggaaaaaaaatagcaagcgatgtaagtgcaatggttgttccaggatcgggattagttaaaaaacaagccgaggaagaaggtattgataaagtttttaaaaatgcaggatttgaatggagagaaccaggatgctctatgtgtttaggaatgaatgaagatcagctttcatcaaaagaaagatgtgcatcaacttcaaatagaaattttgaaggcagacaaggaagaggcggcagaactcatcttgtaagcccaggaatggctgtggccgcagcaataaagggctatttagctgacgtaagagaaattaattaa

SEQ ID NO: 283584 - DNA, 352 bp, Unknown
  Bacterial polypeptide expressing nucleotide sequence isolated from the Sargasso Sea
aatacaagatctaagagaagctgcaaaacttcttaaagataaaaaaattgcagaacacgtaaatgcaatggttgttcctggttcaggtttagtaaaaaatcaagctgaacaagaaggtttagataaaatttttaaagactctggttttgaatggagagagccaggttgttcaatgtgtcttggtatgaacgaagaccagctaaaaccaaaagaaagatgtgcctccacttcaaacaggaacttcgaaggtagacaaggaagagggggaagaacacatcttgtaagtcctgcaatggccgcagccgcagcaatagaaggccatttatctgatgtaagaaaatttggaaattaa

SEQ ID NO: 283585 - DNA, 455 bp, Unknown
  Bacterial polypeptide expressing nucleotide sequence isolated from the Sargasso Sea
tatgaaaaaatttgaaaatattaaaagtattccggcgtatcttccattaatgaacattgatacggataaaatcataccaaaacagtttttgaaaactatcaaaagatctggtcttggaaaaagcttattttatgaaatgagatatgatgaaaaaggtattcctattcaaggatttattttagataatgatccatacaaaaactcaaaaatattaattactggaaaaaattttggctgtggttcctcaagagagcatgcaccctgggcgttactagattttggaattaaagtaatagtaagcgaaagttttgccgacattttttacaacaattgttttaagaatggtattcttccgattgttgctaatgataatataattaacgaattatctgaatattcaaaaagaaaagaaaatattgaaattaaacttttagaacaagaaattatttatggaa

SEQ ID NO: 283586 - DNA, 691 bp, Unknown
  Bacterial polypeptide expressing nucleotide sequence isolated from the Sargasso Sea
ctcctatatatcgataggcattatttacatgaggtaacatcacctcaggcatttgaaggattatcaaaaaaaaacttaaagccatggcggctagaagcaaatatagctactcctgatcacaatgttcctacaacacgaggaaatgactttaaatctgaacaaataaaagatgaaatttcaaagatacaggtagttgagcttgataaaaattgtaatacttttggtataaaacaatttgatattaaatcatcaaagcaagggattgttcatgtaataggtccggaattaggctataccttaccaggcatgacaatagtatgtggtgactctcatacctctactcatggagcattaggttgcttggcaatgggtattgggacatctgaagtggagcatgttcttgctactcagtgcctaaaagtgtcgaaacttaaaaatatgattgttaaatttgaaggtatgcctgccgataatgttacatcaaaagatattgttttatattttattgggcttattggaacagcaggtggaacaggttatgcaatagaatttgctggcaattatattaaggatatttctatagaaagcagaatgactatttgcaacatggctattgaagctggagcaaaggttggattaattgcacctgatgaaacgacaatagagtatgtaagagaaaaatctttcttag

SEQ ID NO: 283587 - DNA, 679 bp, Unknown
  Bacterial polypeptide expressing nucleotide sequence isolated from the Sargasso Sea
taaaatatggaatgatcatttagtgtcagaaaatgaagatggaacatcaatcatttatattgacagacatcttgttcatgaagttacaagtccccaagcatttgaagggctgaaaattgcaaacagatcagttagaaaacctaattttacattagccactgctgatcacaatatccctacaacaaatagagatgagggaatatcagatccagagtctaagttacaggtagatactcttgaagagaattgtaaggagcacggaattacttttctttctatgtctgataaaaggcagggcatagtccatattatcggaccggaacaaggtttcacacaaccaggaatgactatcgtttgtggtgatagccatacttcaacacacggtgctttcggtgctcttgcatggggaattggaacttctgaagtagaacatgttcttgcaactcaaacattggtacaaactaaagctaagaatatgcaaattaatatacaaggtgaactgccactgggtgtcacagcaaaagatattgttttaaagattattcaaacaattggaactgctggaggcactgggtatgttattgaatacacaggtgatgcgatcaaatccctaacaatggagggaagaatgactgtctgtaacatgtcaattgaagcaggagcaagagctggtttaatc

SEQ ID NO: 283588 - DNA, 484 bp, Unknown
  Bacterial polypeptide expressing nucleotide sequence isolated from the Sargasso Sea
ttgattggcaatgtaattaaatatgaacaggacaatattgatactgatgtaatcataccgggaacttatcttaaaattcatgattacaatgaattggcaactcatgcaatggaaggaattgatcctgatttcccatctaaagtaaaagaaggtgattttattgttgcaggaaaaaactttggttgcggttcatctagagaacatgcaccaattgccttatcgacctgcgggataaaagcagtaattgccacttcttttgcacgaattttctatcgtaattctgtagatggtgcatttttactcccaatcgaaattgatgatgaaacatatcagaaaatatctaactctgatcaattagaggtaaacattgaaaaaaatgaaataaaaaacatcacaaaaaatgaagtatattccatgaaacctttctctgaaatcatcgcaaaaatcattgctgccggtggtcttttcaaatacaaaaagtgaa

SEQ ID NO: 283589 - DNA, 607 bp, Unknown
  Bacterial polypeptide expressing nucleotide sequence isolated from the Sargasso Sea
aatgcaaaaatttagtaaattaaaaggtattccagcttatttaccaatagtaaacattgatacggatatgattatcccaaaacaatttttaaagactattaaaagaactgggcttggaaaaaatttattttttgagatgagatatgatgatcaaggaaaagagattaatgattttgttttaaatcaaagaccatacaataattcaaatattttaattgctggtaaaaattttggatgtggttcttctagagagcacgcaccttgggctttattagattttggaataacttgtgtaattagttcaagttatgctgatatattttatagcaattgttttaagaatggaattttaccaataattattgaagaagaaaaaattaaagaattatctgaatatgctaatagaaaagaagaaatctctgttgatttaaatgaagaaaaaattgtttatggaaataatgaaattaaatttcaaatagatccatttaagaaaaaatgtttgcttgaagggttagatgacattgctctatcactaaaaaaatcagacaaaattgaaaattttgaaaaaaatttgaagatacaaaaaccttggatttttaatgattaa

SEQ ID NO: 283590 - DNA, 353 bp, Unknown
  Bacterial polypeptide expressing nucleotide sequence isolated from the Sargasso Sea
aatagaagatttacgatcagccgccaaaattattaaaggaagaaaggtttctaataatgtaaatgctatggttgttccaggatctatgattgtaaaaatccaagctgaaaaagaaggtttagatgaaatatttaaggattctggtttcgaatggagagaagcaggttgctctatgtgtttaggtatgaatcctgacattttaattcctggagaaagatgtgcatctacatctaatagaaattttgaaggtagacaaggtaaaggcggaagaactcatttagtaagccctgaaatggctgctgcagccgcaataaaaggtcatttcacagatataagaaactggaatatataga

SEQ ID NO: 283591 - DNA, 460 bp, Unknown
  Bacterial polypeptide expressing nucleotide sequence isolated from the Sargasso Sea
ttggaaccgtttaaaaaatttactggattagtagctcccttagatagatcaaatgtagatactgatcaaattattccaaagcaatttttgaagagagttgaaagaactggatttggcaaatttgctttttttgattggagatatcttgaaggtgaaatacctaacccagacttcattctaaattctcctcgttatttaggatcagaaatattagtagcaggaagtaattttggatcaggatcttctagagaacatgctccatgggctttactagagtatggatttaaagttttgatttccactagttttgcggatatttttaaaaataattgttttcaaaatggtatattgccaatagtactggattcagccggagtaagtcatattatgtctaactctttgtctgcagatcaagagggttatatggttacggttgatttagaaaatcaaattgtaactg

SEQ ID NO: 283592 - DNA, 783 bp, Unknown
  Bacterial polypeptide expressing nucleotide sequence isolated from the Sargasso Sea
tggcgtcgagatatttggtatggacgataaaagacaaggcattgtccatattataggacctgaacaaggttttacacagcctggaaatattattgtttgtggtgatagtcataccgctactcatggagcatttggagctttagcttttggtattggaacatcagaagtagaacacgttttagcaacacaaactttagttcaaaaaaaatcaaaaaactttagaattagcgtaaatggctcattacctattggcgtaacatcaaaggatgtcatcttgcagataattggaaaaataggaacagctggtggtactggttatgtgattgagtatgctggtaaccttatatctaatctaagtgttgaacaaagaatgacaatttgcaacatgacgattgaaggtggagcaagagcaggactaatacaaccagatgaaaggattttccaatatttaaaaggtaaaccaatgtcaccaaaaggagaaaactgggaaaaagctttagaacattggcataccttaaaatctgataaggatgcaaattttgataaagaattaacgttagatggatctcaaattaaaccaatggtaacttggggaacatctcctcaggatgtagttgaaatagatggtaaagtccccaatcctgaaaatgaaactgacccagatagaaaaaattcaataaatagatcattaaattatatgggattaaaacccaatacgaacattcaagatattaagattgataaagtttttataggaagctgcactaacgggagaatagaaga

SEQ ID NO: 283593 - DNA, 610 bp, Unknown
  Bacterial polypeptide expressing nucleotide sequence isolated from the Sargasso Sea
gaagaaatttaattcacttaaaagtattccagcatatttaccaattgtaaatatagatacagatatgatcattccaaaacaattcttaaaaacaattaagagaacaggacttggaaaaaatttattttttgaaatgagatatgatgaaaaaggaaatattataaaagattttgcgcttaataaagaaccttataataaatcaaaaatattaataacaggaaaaaattttggatgtggctcttcgagagaacatgctccttgggcattattagattttggaattacttgtataattagttcaagttacgcagacatattttacaataattgttttaaaaatggaattttaccaataactttaaatgatgaattgattaagcaactttcagaatatgcactaagaaaagaagaaatatttatagaccttaaagatgaaaaaatattatttggaaataacgaagttacttttgaaattgatccctttaaaaaaaaatgtttattagagggtttagatgatattgctttatcactaaaaaaatctgaaaaaatattttcttttgaaaaaaaattaaaaaacgaaaaaccatggatatttaatgatcacagttaa

SEQ ID NO: 283594 - DNA, 388 bp, Unknown
  Bacterial polypeptide expressing nucleotide sequence isolated from the Sargasso Sea
aaaaattttggatgcggttcatcgagagagcatgcaccatgggcattatctgactttggcatcaaatgcgttattagttcaagctttgctgatatattttataacaactgttttaaaaatggaatattaccaattaaaatagatgaacaaattgttatagaattgtctgagtattcaaaaagaaaagaagagatagatattgatctagaaaagcaacagataaagtacggaaataaaatttcaaaatttgagatcgattcatttaaaaagaaatgtttgattgaaggtctagatgatattgcactatcattagagaaaatatcacaaatagataattttgaaaaaaaaattaaagaaaattcaccttggttattaaaaaatgattaaa

SEQ ID NO: 283595 - DNA, 594 bp, Unknown
  Bacterial polypeptide expressing nucleotide sequence isolated from the Sargasso Sea
aatggatgataaaaggcaaggtatagttcatatcatagggcctgagcagggtttcactcaaccaggcacagttattgtttgtggagatagccatacagcaacacacggcgcatttggtgctttagcatttggaataggaacatcagaggttgagcatgttttggcaactcaaactttagttcagaagaaagctaaaaattttagaatcaatgttaatggtgaacttcctttaggagttacttctaaagatgtaatacttcaaataattggaaaaataggaacagcaggtgggacaggctgtgtcgtggaatatgctggagatttaatacgatctttaagcgttgagcaaaggatgactatttgtaatatgacaattgaaggtggcgcaagagcaggattaattgcaccagatgaaaaaatttttgaatacctaaaaggaaaaccaatgtctccaaaaggagaaaattgggacaaagctttgaattattgggaaactttaaaaacagacacaggagcgagttttgataaagaaattagtcttaatgcaaatgaaattttacctatgattacatggggtacgtcgccacaagatgt

SEQ ID NO: 283596 - DNA, 654 bp, Unknown
  Bacterial polypeptide expressing nucleotide sequence isolated from the Sargasso Sea
aatgaccatatgtaatatgacgattgaggggggtgctagagcaggtttaatagcaccagacgagaagatatttaaatatttaaacgaaaaacctatgtcacctaaaggtgaagaatggagcaaagccatagaacaatggcaaaccctaaagactgataataatgcaatttttgataaagaagtcagtctaaaagctgatgaaattttgcctatgattacgtggggcacatcaccccaagatgtaattacaattgatggcaaagttccaaacccaaatcaagaaaaagaccaagatcgaaaaaattctatcgagagatcattgaaatacatgggtcttaaacctgatatgttagcaagggatattaaaatagataaagtttttattggaagttgcacaaatggtagaattgaagacttaagagaagcagcaaaaattttaaaagataaaaaaattgcctctcatgtccatgcgatggttgttcctggatctgggctagttaaacaacaggcagagcaggaaggattagataaaatcttcgttaattccggttttgagtggagagagcctggttgctcaatgtgtttagctatgaatgcagataagcttaaacccgaggaaagatgtgcctctacctcaaatagaaatttcgaggg

SEQ ID NO: 283597 - DNA, 412 bp, Unknown
  Bacterial polypeptide expressing nucleotide sequence isolated from the Sargasso Sea
catggcagccacagatataaaaatagataaagtatttattggtagttgtactaatggcagaatagaagatttgagagaagcagcaaaaatcgtaaaagataaaaaagtatcatcgcatgttaatgctatagtagttccaggctcaggcttagttaaagaacaagcagagcaagaaggactagataaaatttttgttagctcagggtttgaatggagagaaccaggttgctctatgtgtttagcgatgaatgccgataaattaaaaccagaagaaagatgcgcctctacatcaaatagaaattttgagggaagacaaggacgaggtggtagaactcatctagttagtccaggaatggctgcggcagctgcaatttcaggtaatttagatgatgtcagaaagtaccaaaattaa

SEQ ID NO: 283598 - DNA, 310 bp, Unknown
  Bacterial polypeptide expressing nucleotide sequence isolated from the Sargasso Sea
aatgcaaaaatttaataaattaaaaagtatcccagcttatttaccaattgtaaatattgatacagatatgataattccaaagcagtttttaaaaactatcaaaagaactggcctaggaaaaaatttattttttgaaatgagatatgatgatcaaggtaaagaaataaatgattttgtcttaaacaaagatccatttaatcaatctaaaattttaattgctggaaaaaactttggatgtggttcatcaagagaacatgctccttgggcactattagattttggtattacatgtgtaataagctcaagttat

SEQ ID NO: 283599 - DNA, 600 bp, Unknown
  Bacterial polypeptide expressing nucleotide sequence isolated from the Sargasso Sea
aatgtctaaaactctatacgataagatatgggaaaaccatcttgttcataaacaaagtgatggaacatcattaatttatgttgataggcatctagtccatgaagttactagtccccaagcttttgaaggacttagattacaaaaaaggaaagtaagacgaccagaattaacacttgcagtgcctgatcataatgttcctacaactgacaggtcaaaaggcataaatgatgaggactctagaatacaagtccaaacattgagaaaaaattgcaaagactttggagtagaactttttgatgttaatgataagcgtcaaggtatagtccatattataggacccgaacaaggtttcactcagccaggaacagtgatagtatgtggcgatagccatactgcaacacatggagcattcggagcattagcttttggaataggaacatctgaagttgaacatgttcttgctacacaaactttaatgcaaaaaaaatcaaaaaatttaagaataaacgttaatggtaatttaccaaagggagttactgctaaagatgtaattttaaaaattataggcacgattggaactgcgggcggaaccggatacgt

SEQ ID NO: 283600 - DNA, 264 bp, Unknown
  Bacterial polypeptide expressing nucleotide sequence isolated from the Sargasso Sea
aatgaagactttatacgacaaactctgggaagagcatcacgtcacccaactcgattcgggagagtcacttttatatattgatagacattatttgcatgaggtcacatctcctcaggcatttgagggactaattaagaaaaatttaaagccctggaggcttaatgccaacattgctactcctgaccataatgtacctacgacaagaggtaataattttaattctgaatcaataactgatgaaatttcaaagattcaagtagttga

SEQ ID NO: 283601 - DNA, 389 bp, Unknown
  Bacterial polypeptide expressing nucleotide sequence isolated from the Sargasso Sea
tatgtttgaaaagatctggaatgcccatcttgttcatgagcaggaaggaaactcgatcgtttatattgaccggcaccttgtgcatgaagtaacttctcctcaggcttttgatggattacgtatgtctggtaggtctgtacttcaccctgaattaacttacgcagtccctgatcataacgttccaaccaaaaatcaagacaaaccaattgaagatccaattgcagcattgcaggttgaaactttgcgaaacaattgcaaagaattcggaataactctatttgatttgggagacgagcgttctggaattgtacatgtaattggtcctgaacaaggactaactctaccatggtcaaccatagtctgtggagattctcacactgcgactcatg

SEQ ID NO: 283602 - DNA, 601 bp, Unknown
  Bacterial polypeptide expressing nucleotide sequence isolated from the Sargasso Sea
atgtctaaaactctatacgataagatatgggaaaaccatcttgttcatgaacagagcgatgggacttcattaatttatgttgatagacatttagttcatgaagttaccagcccccaagcttttgaagggctcagattacataaaagaaaagtaagaagaccagaattaactctcgcagtgcctgaccacaatgttcccacaactgatagatctaaaggtattaatgatgaagattcaagaatacaagttgaaacattaagaaaaaactgcaaagactttggagtagaactttttgatgttaatgataagcgtcagggcatagtccatattataggaccagaacaaggttttacacagccaggtacagtaatagtatgcggagatagccatactgctacacacggagcattcggtgcattagcttttggaatagggacatctgaagttgaacatgttcttgctacccagactttaatgcaaaagaaatcaaaaaatttgagaataaatgtaaatggcaacttaccaaaaggagttacagcaaaagatgtaattttaaaaattattggtacgattggaactgcgggaggaactggatacgtag

SEQ ID NO: 283603 - DNA, 385 bp, Unknown
  Bacterial polypeptide expressing nucleotide sequence isolated from the Sargasso Sea
tgataattttggttgtggttctagcagagagcacgccccatgggcattagctgattttggaataaaatgtgtaatttctacatcttttgcagatatattttataataactcattcaaaaacggtttgttacccattatagttactaaagatcaaagggacgcattattacacgatgcaaaagatattgaaaaccctgaattggaaattgatttagaatctcaagagataagaagaccaaatggagcaacaattaaatttgatttagattctttcagaaaaaaatgtttaatggaaggtttagatgatataggaattactctaaaaaaagaaaaaaacattgaagaattcgagaatttgatgagtgagaaacgaccttggttgtaa

SEQ ID NO: 283604 - DNA, 514 bp, Unknown
  Bacterial polypeptide expressing nucleotide sequence isolated from the Sargasso Sea
gttccagttaatggatcagttcccgatccaaaaaaagaaaaagataatgacagacgtgaagctatggaaagatcattagattatatgggtttaaaaccaaatactaaaatgacagatattaaaatagacaaagtctttattgggagttgtactaatggaagaattcaggacttaagagaagcagccaaacttcttaaggataaaaaaatagcggaacacgtaaacgccatggttgttcctggatcagggcttgtaaaaattcaggctgagcaagagggtttggataaagtatttaaagactctggttttgagtggagagaaccaggctgttcaatgtgtcttggtatgaatgaggatcaattaaaaccaagagaaagatgtgcatcaacatcaaatagaaactttgaaggaaggcaaggtcgtggggggaggacacatttagtaagcccagcaatggcagcggtagcagctattgaaggtcacttatcagatgttagaaaatttaataattaaa

SEQ ID NO: 283605 - DNA, 332 bp, Unknown
  Bacterial polypeptide expressing nucleotide sequence isolated from the Sargasso Sea
aatggaaaaatttacaaaaataaaaagtgtacccgcatatattcctttaatgaatatagatactgataaaattattcctaaacaattcttaaaaacaataaaaagatcaggtttaggtaaaagtttattttatgaaatgaggtttgatgaaaaaggaaatccaatagagggtttcattttagaccaggaacctttcaatagttctaaaatcttaataacgggaaagaattttggttgtggttcatcaagggaacacgctccttgggctttattagattttggaattagagttatcatcagtgaaagttttgctgatatattttataataatt

SEQ ID NO: 283606 - DNA, 714 bp, Unknown
  Bacterial polypeptide expressing nucleotide sequence isolated from the Sargasso Sea
gattgattgcgccagatgaaaaaatatttgagtatttaaaaggcaaacctatgtcacctaagggtgaaaattgggaaaaagcattgaattattggaatggtctaaagaccgatagagaggcaaattttgataaggaaataaatttaaatgcagcagaaattttgccaatgataacatggggaacttctccacaagatgttattacaattgatggaaaagttcctaatccacaaagcgagacagatgaggacagaaaaaattcaattgaaagatcactgaaatatatgggactaaaacctgatatgtcagcaacagatataaagattgataaggtgtttatcggaagctgcacaaacggaagaattgaggatttaagagaggcagctaaaattttaaaagataaaaaaatatcatctcatgtcaatgcaatggtagttccagggtctggattagttaaagaacaagctgaacaagagggattagataagatttttataagttcaggatttgagtggagggagccaggttgctctatgtgtttagccatgaatgctgataaactcaagccagaggaaagatgtgcctccacttcaaatagaaattttgaaggaagacaaggtagaggcggaagaactcatttagtgagtccaggaatggcagctgcagcggcaatttcaggaaaccttgacgatgttagaaagtatcaaaattaaa

SEQ ID NO: 283607 - DNA, 763 bp, Unknown
  Bacterial polypeptide expressing nucleotide sequence isolated from the Sargasso Sea
gatggaagggagaatgaccctctgcaacatgactatcgaggcaggtgccagggctggaatagtcgctcccgatgaaaaaaccttcgagtacatgaatggccgggattacgctccccagggcgaggcattcgaaaaagcagtcgaggcatggaaaaagctgccttccgatgagggtgcagtctttgacgaaacggtaaaattggcggccgatgaggtttttccccaggtgacctggggaaccaatcccggaatggtgaccgacatcaacggcaaggttcctgatccctcaggcatcagcgatccggctgaaagagagtccatccagcgtgctttggaatacatgggactagaagccaatgtgcccgtgaaggatatccagattgatcgggttttcattggttcctgtactaattcaagaattgaggatttgcgtgccgtggcaggatttgtcaaggggaaaaaggtcagcggaagtgtttctgcgatgattgtccccggaagcggactggttaagcaacaggctgaatccgagggattgaacaccatcttcgaaaatgccggatttgaatggcgtgaaccgggatgctcgatgtgcctggcaatgaacgatgatgtgctgaaacccggagaacgctgtgcctccaccagcaaccgtaatttcgagggccgtcagggtaagggcagtaggacccatctcgtcagcccgatcatggctgccgcagctgcgattgcaggaaattttgcagaccccagaaccctctag

SEQ ID NO: 283608 - DNA, 382 bp, Unknown
  Bacterial polypeptide expressing nucleotide sequence isolated from the Sargasso Sea
ggatagagtttttattggtagctgcaccaatggaagaatcgaagatttaagagaagctgcagaagtagtcaaagggaaaaaagtttcggaaacaattggcgcaatgattgttcctgggtcaacactcgttaaaaaacaagcggaagaggaaggattagacaaaatattcattgaagctggttttgactggagagaagcaggttgctcaatgtgtttaggaatgaatccagacattttaagtcccggtgaaagatgtgcctcaacatcaaatagaaactatgaaggtagacagggtgctggaggtagaactcacttagtaagtccaaaaatggcagctgcagcagctctatatggaaaatttgttgatattaggaatctgtaa

SEQ ID NO: 283609 - DNA, 664 bp, Unknown
  Bacterial polypeptide expressing nucleotide sequence isolated from the Sargasso Sea
aatgtcaccaaaaaaagaaaattgggatagagcaatggagtattgggaaaaacttaaatcagatagtgatgcagaatttgataaagaagtaacaattaatggcaaagaaataataccaatggtaacttggggaacatcccctcaagatgtagttacgattgatggtaaggtgccagaccctaaaaatgaaaaaaatttagataggaaaagttcaatagaaagatctttaaaatatatgggattaaaaccaaatactttagttaaagatatcaaaatagataaagtatttataggaagctgtacaaatggaagaatagaagatttaagagacgcagctaaagttgttaaagacaaaaaaattgctgatcatgtaagtgctatagttgtcccgggatcaggcctcgtaaaagaacaagcagaacatgagggattagataagatatttaaaaaatctggttttgaatggagagagccaggttgttcaatgtgtttagcaatgaatgctgacaaattaaaacctgaagaaagatgtgcatcaacatcaaatagaaattttgagggaagacaaggcagaggtggaagaactcatttagtaagtcctgcaatggctgcaacagcggcaatttcaggaaatcttgatgatgttagaaagttcgtaaattaa

SEQ ID NO: 283610 - DNA, 445 bp, Unknown
  Bacterial polypeptide expressing nucleotide sequence isolated from the Sargasso Sea
atgaatcaaaataataaacctaaaactttatttgataaaatatggaataatcatcttgtagatgagcaagatgatggaacatctttaatttacattgatagacatctagttcatgaagttactagcccccaagcttttgaaggtttaagaaattctaatagaattgtaagacgtcctgaaagtacatttgcagttgcagatcataatgttccaacatcagatcgttctaaaggaattgaaaatttagaaagcagaattcaagttgagacgttggaaaaaaattgtaaagattttaacataacactttttccacttttagataaaagacaaggaatagttcatattgttggtcctgagcagggtataactcaacctggtatgactatagtttgtggagatagtcacactgcaactcatggagcttttggcgctttagccttcggaa

SEQ ID NO: 283611 - DNA, 502 bp, Unknown
  Bacterial polypeptide expressing nucleotide sequence isolated from the Sargasso Sea
atgagcaaaataaataaacctaaaactttatttgataagatttggtcaaaccatcttgtgcataaacaagatgatggaacttgtttaatttatatagatcgacatctaatacacgaagtaacaagtcctcaagcttttgaagggctaagaaattcgaatagaattgtaagaagaccagagtcaacatttgctgtcgcagaccacaatgttccaacaactgacagaagtaaagtaattgaagataaagagagtagggtacaggtagaagttcttgaaaaaaactgtaaagattttaacataactttttttccattaactgataaaaggcaaggtattgtgcacattattggacctgagcaaggcataacacaacccggcatgactatagtttgtggagatagtcatacagctacccatggtgcttttggtgccttagcatttggtattggtactagcgaagttgagcacgtactagcaacgcaaactttaattcaaaacccag

SEQ ID NO: 283612 - DNA, 651 bp, Unknown
  Bacterial polypeptide expressing nucleotide sequence isolated from the Sargasso Sea
atgcccctaagggtaaagattgggaaaatgcagtagctttttggaaatctcttccatcagatgaaactgcaatatatgataaagaaattattatagatggccagagtatagtgcctcaagttacttggggaacaagccctcaagatgttgctcctattgatggcaatgtacctgatcctaatgatttcaaagataaaaatagaagcaatgccataaaacgttctttggactatatgggccttgaaccaaatcaaaaaattagagatattaagattgatagagtttttattggatcttgcaccaatggtagaattgaagatttaagagaggtagctaaagtagttaagggaaaaaaagtaattgtagatgccatgattgttccaggatctggattagtaaaagaacaagctgaaaaagaaggtttagataaaattttgatagaagctggatttgattggcgtgaaccaggatgctcaatgtgtctagcaatgaatccagatcaattaaatcctaaagaaagatgtgcttcaacttccaacagaaactttgaaggcagacaagggcgcgaaggtagaactcatttagttagtccaggtatagcagcagcctcagcaattaaaggcactttcagtagagctgaagatttataaa

SEQ ID NO: 283613 - DNA, 626 bp, Unknown
  Bacterial polypeptide expressing nucleotide sequence isolated from the Sargasso Sea
aatgtcaaaaactctatacgataagatatgggaaaaccatcttgtacacgagcagaatgatggcactacattaatttatgtagatcgtcatttagttcacgaagttacaagtccccaagcttttgagggactgagattgcaaaaaagaaaagttagaagaccagaattaactttagctgttcctgaccataatgttcctacaactgatagaacaaaaggtattgatgatgaggagtcaagaatacaggtagagacattgagaagtaattgcaaggagtttggtgttaagctttttgatgttaacgacaaacgtcaaggtatcgttcacattataggtcctgagcaaggattcactcaacctgggactgttatagtgtgtggagatagtcatactgctactcacggtgcgttcggtgctttagcatttggtattggaacttcagaggttgagcatgtacttgctacccaaactttaattcaaaaaaaatctaaaaattttagaataaatgtaaacggagaattacccaaaggtgttacagctaaagacgtaattcttaaaattataggaacaataggcacagctggtgggactggatatgttgtagaatttgccggtgctgttatac

SEQ ID NO: 283614 - DNA, 602 bp, Unknown
  Bacterial polypeptide expressing nucleotide sequence isolated from the Sargasso Sea
cttgagcaaccaaggcccaaaaacactttttgataaaatctggtctgagcatcttgtcggtcaaagagaagatgggactaatcttttatatattgatcgtcatttagttcatgaagtaactagccctcaagctttcgaaggattaaaactatccaatcgtcccgttcatagaccagaggctacgatagctgtcgcagaccataatgttcctactataaatagacaaaatattgaggacccacaaagtaaaattcaggtcgaaactctagcaaaaaacactaaagagcatggaattcaatattttgatttaatggaccaaagacaaggtattgttcatatcattggtcctgagcagggaattacccaaccgggcatgacaattgtctgtggagacagtcacacctctactcatggagctttcggagctctcgcttttggtatcggaacaagtgaagttgagcacgttctggctacgcaaacaattgttcaaaatcctgcaaaaaatatgagaatttcggtaaatggtgaacttccctttggggtaaattctaaagatttaatcttgtacataattggaaaaattggaacagctgggggaactg

SEQ ID NO: 283615 - DNA, 486 bp, Unknown
  Bacterial polypeptide expressing nucleotide sequence isolated from the Sargasso Sea
aatgcctaatacactttacgacaaaatctggaatgatcatttagttgatcaacaatctgatggcacagctttattatttgttgatagacatcttgtacatgaagtaactagcccacaagcatttgagggtcttagaaattctaaccgaagagtaagacatccaaaattaactttggcagttgcagatcataatgttccaactacagatagaactaatggtattgcagatcaagagtctaaaattcaggtcgatactttagaaaaaaattgtgaagaatttggagtacagctttttgggatggatgataaaagacaaggaattgttcacataattggaccagaacaaggatttactcaacctggaactgtaattgtttgtggagacagtcacacagctacacatggtgcgtttggagccttagcatttggaattggtacatctgaagtagaacatgttttagcaacacaaacattagttcaaaaaaa

SEQ ID NO: 283616 - DNA, 440 bp, Unknown
  Bacterial polypeptide expressing nucleotide sequence isolated from the Sargasso Sea
aatgtctaaaactctatacgataagatatgggaaaaccatcttgttcatgaacagagcgatggaacgtcattaatttatgtcgatagacatttagtccatgaagttacaagtcctcaagcatttgaaggactcagattacaaaaaagaaaagtcagaagaccagaattaactcttgcagtgcctgatcacaacgttcctacaactgataggtcaaaaggtataaatgatgaggactctagaattcaagtagaaacattaagaaaaaactgtaaagactttggagtagaactttttgatgtaaatgataaacgccaaggcatagtccatattataggacctgaacaaggtttcactcagccaggcacagtaattgtatgcggcgatagccatactgctacacacggagcattcggtgcattagcttttggaataggaacat

SEQ ID NO: 283617 - DNA, 871 bp, Unknown
  Bacterial polypeptide expressing nucleotide sequence isolated from the Sargasso Sea
cgaaggggcattatccacgtcgtaggaccagaacaaggtatcacccaacccggtatgattattgtttgtggagattcacatacatcaacccacggggcacttggtgctcttgcctttgggatcggcgcctcagatgtcagccatgtgcttgcaactcagactttatggcaaccaaaaccaaaatcaatgaggataaccgttaccggtaaacgcccaatcggcgtaacagcgaaagatatagtcctttcaattattcacaaaattggagctgcaggaggaagcgggcatgttattgaatatactggacaaggtatagaggatctgtccattgaggaaagattaaccgtttgcaatatgtcaatagaagctggggcacgggcgggaatgattgcacccgatacaaaaacttttaaatacctaaatgataggccctatgcacccgaaggatcagactgggatagggccgaagaattttggaggactctctcgagcgatagagacgcttcatttgaaaaggaagcgaccgttgatacgactcaaatggaacccatggttacatggggaaccagcccggaagatgtattaccaattggagggagcgttcctgacccgtctctagaaaccgacacaaaaaaacaagcgtcattaaaacgtaaaatggattatatgggactaattcctgggcagataatttctgatatcaaggtagaccgcgtatttatcgggtcctgcacaaacagccgaattgaggatttacgggaagcagctaccgtattcaatggcagaaaagccaaaatcccaacactgatagttcccggctcaggactcatcaagagccaagcagaacaagaaggcctagataaaatattta

SEQ ID NO: 283618 - DNA, 933 bp, Unknown
  Bacterial polypeptide expressing nucleotide sequence isolated from the Sargasso Sea
aagaaatcaaaaaatttaagaataaacgttaatggcaatttgcctaagggagttactgcaaaagatgtaattttaaaaattattggcacgattggaactgcaggcggaaccggatacgtagttgaatttgccggtgatgtaattaaaagtttaagcatggaagaaagaatgactgtttgtaatatgaccattgaagcaggtgcgagagcagggttaatcgcaccagatgagaaaacatttagctatttaaaaggtaaaactatgtcaccaaaaggtgaaaattggactaaagctgtagaattttggaagactttgtattcagataaagactgcaaatttgataaagaggtaaatattgatggcaaaaatatagaaccacttgttacttgggggacttcacctcaagatgtatcaccagttactggtgttgtgccagatccagaaaatgaaaagaacgaagatagaaaaatggctatgaaaagatctcttgattatatggggttaaaagcaaacactaaaatctcagatataaaaattgataaaatttttataggaagctgtacaaatggaagaatagaggatttaagattagctgcagatcttttaaaaggcaaaaaaattgccaaaaatgtaagcgctatggtcgttccaggatctggattagttaaagagcaagccgaaaaagagggaattgacaggatatttaaagaagcaggctttgaatggagagagcctggctgttcaatgtgtttgggcatgaatccagatcaattaaaacctaaagaaagatgtgcttcaacatcaaatagaaactttgaaggtaggcaaggtcgtggaggtagaacacatttagtcagtccagggatggctatcgcagcagcaatcaaaggacatctaactgatgtcagagaatataatatggaaaagtttaac

SEQ ID NO: 283619 - DNA, 784 bp, Unknown
  Bacterial polypeptide expressing nucleotide sequence isolated from the Sargasso Sea
gccaaggatctgatccttcacgtgatccgaaccctcggggtcaagggcggtgtcggtttcgcttacgagttcgctggccccgcggtggaggcgctgtcgatggaggagcggatgaccctctgcaacatggcgatcgagggcggagcccgttgcggttacgtcaaccccgatcaagtcacctttgactatctcaacggtcgagcaggggccccctccggagaggcctgggatcgggctgtgacctggtggcgcagcctggtgacggatgcggacgccgtggtggatgacgaggcggtgtttgatgcggccaccatcgcccccaccgtgacctggggcatcacgccggggcaggggctgggcatcgatgaatgtgttccggggcttgagcagctggagcccggtgagcggcccattgccgaggaggcctatcgctacatggatctgcagcccggcaccgccattgccggggtaccggtggatgtctgcttcatcggcagttgcaccaacggccgcatcagtgatctgcgggcggcggcggctgtggcccgtggtcgccgtgtcgccgatggcatcaaggcgtttgtggtgccgggttccgagcaggtggcgaaggctgcggaagcggagggactcgatcgcgtgtttctggacgctggcttcgagtggcgtgagcccggttgctcgatgtgtctcgcgatgaaccccgaccgcctggagggccgccagatcagtgccagctccagcaatcgcaacttcaagggtcggcagggttccgccagcggac

SEQ ID NO: 283620 - DNA, 808 bp, Unknown
  Bacterial polypeptide expressing nucleotide sequence isolated from the Sargasso Sea
aatagcaaaaggaatgtaagacatccaaacttaactcttgctgttgttgatcacaacatacctacaactgatagatctaaaggaattgatgacaacgactcaagaattcaagtagaaacacttgaaaaaaattgcaaagactttgatatcaaactttttggaatgaatgataaaagacaaggaatagttcatatagtagggcccgagcaaggctttactcaaccaggaacagttattgtttgcggagacagtcacactgcaacccacggcgcttttggggctttagcgtttggaataggaacctcagaagttgaacacgttttagctacacaaactcttgttcagaaaaaagcaaaaaattttagaataaatgttagtggaaagcttcctttaggagtgacttcaaaagatgtaattctccaaattattggcaaaataggaacagctggaggaacgggatgtgtattagaatatgctggttcagtcatatcaaatctttctgtcgaacagagaatgactatttgtaatatgtctatagagggtggagcaagagcaggattaatccaacccgatgaaaagatttttaattatctaaaagatagaccaatgtctccaaaaaaagaaaactgggaaaaagctcttgattattggagtaaattaaaaagtgatagtgacgcagaatttgataaagaaattaatttaaaaggtgatgaaatagcgcctatggttacatggggaacttcgcctgaggacgtagtttcaattaatggaaaaatccctaatccagaaaatgaaaaaaaatattgat

SEQ ID NO: 283621 - DNA, 877 bp, Unknown
  Bacterial polypeptide expressing nucleotide sequence isolated from the Sargasso Sea
gatgaacaatccaaataataaaacattatttgataaaatttggtctcatcatcttgtccaccaacaagaagatggtacttgtctaatttatattgatcgtcatttagttcacgaggtaacaagcccccaagcatttgagggtttgagagacaataacagaaaagtgcatcgaccagagagcacttttgctgttgccgaccataatgttcctacttccgatagatctaaaggtattgataatgaagaaagtagaatacaagtagaaacgctagaagataactgtaaagaatttggagttactttatttcctcttctagataaacgacaaggtattgttcatatagtcggtcctgaacaaggcattacacagccaggaatgactattgtatgtggagatagtcacactgccacacacggtgcttttggagcacttgcttttggaataggtacaagtgaagtagaacatgttttagctagtcaaactcttatccaacaacctgcaaaaaatatgaagatttccattaatggaaaattaaaatctggggttacagcaaaagatattattcttcatattataggtgtaattggtacagctggtggaacaggttatgttattgaatatactggcgaagcaattctttcacttagtatggaaggacgtatgacaatatgtaatatgagcatagaagctggagcaagagctggactaatagcacctgatcaaaaaacctttgattatattaaaggtagaccatatgcacctaaaggtgaagaatgggaaaaggctattgaattttggaagtcattaccttccgatgagaatgcagaatatgataaagaaataaatattaatgctgaagacattgctcctcaaatt

SEQ ID NO: 283622 - DNA, 601 bp, Unknown
  Bacterial polypeptide expressing nucleotide sequence isolated from the Sargasso Sea
aatggataaatttaaaaatattaaaagtatacctgcttacatttcgttaatgaatatcgatacagataagataatacctaaacaatttttaaaaactattaaaagatcaggtttaggtaaaaatttattctatgaattgagatttgatgagaaaggaaagccaatttcaggatttattttagataatgatccgtacaataagtctaaaatcttaataactggaaaaaattttggatgcggatcttctagagaacatgctccgtgggcattactggattttggtattagagtgattattagtgaaagttttgctgatattttttacaataattgtttcaaaaacgctattttgccaatagttgcagatcaaaatattataaacgaattgtcagaatattcttccagaaaagagaatattgaggttagtttaactgaacaagaaattctatatggaaataaatcttttaagttcgaattagatccattcaaaaaaaaatgtttactagaagggctagatgatattgcattatccctcaataaagctgagagtatcaaaagttttgaaaacaaaatgactcaagataaaccttggatattataa

SEQ ID NO: 283623 - DNA, 766 bp, Unknown
  Bacterial polypeptide expressing nucleotide sequence isolated from the Sargasso Sea
gatgtaattttacaaataattgggaaaattggaacagctggaggtacaggctgtgttgtggagtatgcaggtgatttaatcagatcacttagtgttgagcaacgtatgaccatatgtaatatgactatagaaggtggagctagagcagggttaattgcacctgatgaaaagatatttgaatatttaaaaggaaaaccaatgtcaccaaatggtgaaaaatgggaaaaagctctagaatactggaaaagtttaaaatcagatgataatgcaaattttgataaagaaattacattgcaagccaatgaaattttacccatgataacttggggaacatcacctcaagatgtaattacaattgatggcaaagttccaaacccaaataaagaaaaagatgaagataaaaaaaattcgttagaaagggctcttaaatatatgggtttaaaaccagatatggcagcaaaagatattaaaatagataaagtttttattggtagttgcactaatggaagaattgaggatttaagagaggcagcaaaaattttaaaagataaaaaaatagcttcacatgttcatgcaatggtagtaccaggatctggcttagtcaaagaacaagcagagcaagagggtttagataagatatttgttagttctggtttcgaatggagagaaccaggatgttcaatgtgtttagctatgaacgctgataaactaaagcctgaggaaagatgtgcatctacgtctaatagaaattttgagggaagacaag

SEQ ID NO: 283624 - DNA, 913 bp, Unknown
  Bacterial polypeptide expressing nucleotide sequence isolated from the Sargasso Sea
atttgaaggcttaagaaattcaaacagaaaagtaagacaccctaaactaacgcttgctgttgcagatcataatgttccaacaactgataggtcaaaaggtattgaagatgaggactcgagaattcaagttgaaactttgaataaaaactgtaaggaatttggtgtcgagatatttggaatggacgataaaagacaaggtattgtccatattataggacccgaacaaggttttactcagcctggaaatattattgtttgtggtgatagtcatactgcaactcatggagcatttggagctttagcttttggtataggaacttctgaagtagaacacgttttagcaacacaaactttagttcagaaaaaatctaaaaactttagaattagcgtaaatggttcattacctattggcgtaacatcaaaggatgtcatcctgcagataattggaaaaataggaacggctggtggtactggttatgtgattgagtatgccggtaatcttatatctaatctaagtgttgaacaaagaatgacgatttgcaacatgacgattgaaggtggggcaagagcaggactaattcaaccagatgaaaagatatttcaatatttaaaaggtaaaccaatgtcaccaaaaggagaaaactgggaaaaagctttggaatattggcataaattgaaatctgacaatgatgcaaactttgataaagaattaacgttagatggatctcaaattaaaccaatggtaacttggggaacatctccccaggacgtggttgaaatagacggtaaagttcccaatcctgagagtgaaactgacccagatagaaaaaattcaattaacagatcattaaattatatgggatttaaacaaatacgaatattccagatattaagattgataaagtttttatag

SEQ ID NO: 283625 - DNA, 343 bp, Unknown
  Bacterial polypeptide expressing nucleotide sequence isolated from the Sargasso Sea
aatgccaaaaaccttatacgataaaatttgggatgatcaccttgtgcaccaacaggatgacggtacatctttactttatgttgatagacatttagtacatgaggttactagtccccaggcatttgagggtttacgtattaacaaaagaaaagtcagaaaacctaaactaactttagctgtagcagatcataatgtaccaactactgatagatcaaagggcatcaatgacgaggactcaaaaatacaggtagatacacttagaaaaaactgtaaagagtttaatgttccattatttgatatgaacgataagagacaaggtatagtccatataattgggacctga

SEQ ID NO: 283626 - DNA, 484 bp, Unknown
  Bacterial polypeptide expressing nucleotide sequence isolated from the Sargasso Sea
attgattggtaatgtaataaaatatgaacaagataacattgacacagatgtcattattcctggaacgtatctaaaaattcatgattataatgaattggcaacacatgcaatggaaggactagatcctgatttcccgtcaaaagtaaaggacggcgattttattgtcgctggaaaaaattttgggtgtggttcatcaagagaacatgctccaattgcattatctacatgcggaattaaagccgtcatcgctgtatcttttgcaagaattttctatagaaattctgttgatggagcatttttgttaccaattgaagtagatgaagagacttacaaaaaaatctccaattctgatagcttagaaataaacattgaaacgaacgagattaaaaacatcacaaaaaatgaaacttactcgatgaaacctttttcagaaatcatagcacaaattatttctgcaggcggtcttttcaaatataaaaagtga

SEQ ID NO: 283627 - DNA, 258 bp, Unknown
  Bacterial polypeptide expressing nucleotide sequence isolated from the Sargasso Sea
aatgactgaaacattatttgagaaaatttggaattctcatgttgtagttgaaagagaaaatgaaccttcattaatttacattgatcgtcatctaattcatgaagtaacctccccgcaggcttttgatggattacgagttaacaatagaaaagttcgccgccctgatctaactgttgccacaattgatcataatgtacctactactgatagaagcttacctatgattgatgaaacttcatcaacacaaatcaaaacttt

SEQ ID NO: 283628 - DNA, 443 bp, Unknown
  Bacterial polypeptide expressing nucleotide sequence isolated from the Sargasso Sea
aatggcttacgataaatttaacattctaaacacctcagctgttccacttaatatcgataatgtagatacagatcaaataatcccagcaagatttttgaaagcaactgaaagaaaagggtttggtgaaaatctttttaaggattggagatataatcccgatgacactactattgattcatttcctttaaacaataaaatctacaatggaaagatacttgttgcaggcaaaaattttggatgtggatcttcaagagagcatgcagtttgggcaatatatgattacgggttcagagctgtggtatcaagtttttttgctgatatatttaaaaataactgtttgaatattggtgttctccctgttcaagtttctgaggaatttttaatagatattttttcccaaattgatacagatccaaaaagtaattttgagataaacctagaaa

SEQ ID NO: 283629 - DNA, 607 bp, Unknown
  Bacterial polypeptide expressing nucleotide sequence isolated from the Sargasso Sea
atgaaaaaatttacatcagttaaaagcattccagcatatcttccaattgtcaatatagatacagatatgattattccaaaacaatttttaaaaactattaaaagaacaggtcttggtaaaaatttattttttgaaatgagatatgatcaaagtggaaatttaattgaagattttacattaaataaagatccatatgataattctaaaattttaattactggtaaaaattttggctgcggttcatcaagagaacatgctccatgggcactgttagatttcggaattacatgtataatcagttcaagttatgcagatattttttataataattgctttaaaaatggaattttgccaataaaaatttcagaagaagaaataaaagaaatttcagaatattctaaaagaaaagaagaaatttcggttaatttaatagaacaaaaaatagttttcggaaataaagaaattaaatttgaaattgatcaattcaaaaagaaatgtttgactgaaggtttggatgatatcgctttatcactagaaaaatccgacaaaataatttcttttgaaaaaagagtaaaatcttcaaaaccttggatatttaatgattaaa

SEQ ID NO: 283630 - DNA, 631 bp, Unknown
  Bacterial polypeptide expressing nucleotide sequence isolated from the Sargasso Sea
atgaaagattttattgaaggcattgtagctccaattgatagagataatattgatactgatcagattattccaacagaatatttaaaatctattaaaaaatttggatacgaggattatctttttgatggctggagatataaagatcagggtcgtcttggaatgaaaaaagctgacagaaaaatcaataaagaattcattcttaacaattcgccttatgatgaatcaaaagttttgcttacaagagataattttggatgcggctcaagtagagagcatgcagtttgggctctcagagactttggtattgaagttattatagcaagctcatttggcgatatttttttcaataattgtttcaaaaatggtgttttaccattaacgctcaaaaaaactgaaattgaagaactattttcattgtctatgaataatccaataaccatttcagtgaatataaaagataaagttatactctttaaagataagctctctatagattttgatcttgatgataatttagctgaaagaatcatttatggccttgatgagatcgatattacccttaaagattcagaattaattaagaaatttgaggaaaatagaaaagaaaacaacccgtggattttcgaatgaa

SEQ ID NO: 283631 - DNA, 598 bp, Unknown
  Bacterial polypeptide expressing nucleotide sequence isolated from the Sargasso Sea
atggaaaaatttaataaaataaaaagcatacctgcctatattccgttaatgaatattgatacagacaagattattcctaaacagtttttaaaaacaattaaaagatcaggtttgggtaaaagtctattttatgagatgaggtttgatgagaagggaaacccaataaaaggtttcattttagaccaggaaccatttaataattcaaaaattttaataacaggtaaaaattttggttgtggttcatcaagagaacacgctccatgggctttactcgattttggaattagggttattatcagcaaaagctttgcggatatcttttataataattgttttaaaaatggaatacttccaattgttgcaaaagatgaaatcgtaaacgaacttaaagattactcttcaagaaaagaaaatattgaaattaagcttagtgaacaagaaattgtttatgggaacaaaacatttaaatttgaacttgattcttttaaaaagaaatgtctattagaaggtttagacgatatagccttatctctcaaaaaagtaaaaaatattgaaaattttgagaataaaatgtctcaaaataaaccttggttataaa

SEQ ID NO: 283632 - DNA, 574 bp, Unknown
  Bacterial polypeptide expressing nucleotide sequence isolated from the Sargasso Sea
aatggaaaagtttataaatataaaaagtataccagcgtatcttccaataatgaacatagatacagataaaattattcctaagcaatttttgaaaactattaagagatctggtttaggaaaaagtttgttttatgaaatgagatacgatgaaaaaggcaatcctatcagaggatttattttagataatgatccatataaaaattcaaaaatactaataactggaaaaaattttggatgtggttcttcgagagaacatgctccatgggcactacttgattttggtattaaagttattgtgagcgaaagttttgctgatattttttataataattgttttaagaacgggattcttccaattgttgcaaatgaaaatattattaaagaattgtccgaatattctgttagaaaagaaaatgttgagattaaacttgctgaacaagagattatttatgggaacaagtcttataaatttgaattagactcatttaaaaagaaatgtcttattgaaggattggacgatattgcactatcacttgaaaaaataaaaagtatagatagttttgagatgaagata

SEQ ID NO: 283633 - DNA, 784 bp, Unknown
  Bacterial polypeptide expressing nucleotide sequence isolated from the Sargasso Sea
ttgagtcaagataccttatttgataaagtttgggatttacataaagtttcaagtcttcctggaggatctgatcagatatttattggtcttcatcttatccatgaagtgacgagtccccaagcatttggtgctttaaaggacaaaaacttaaaagtaaaattccctgaaagaactgttgctactgttgatcatatcgtgccaacagataatcagagcaggcctttcaaagataatcttgctgaacagatgattgaaacacttgagaaaaattgcttggaacacaaaataagattttttaatattggtagtggtaatcaaggcatagtgcatgtagtagccccagaattaggtttaactcagccaggcatgacaatcgcttgcggagactctcatacttctactcatggagcttttgggtcaattgcttttgggataggtacaagtcaagtaagagatgttcttgctacccaaacaatagcgatgaacaaattgaaagtgaggcagatttggtgtgacaacaaattatctaagggtgtttacgctaaggatttagtacttcatattattaataaacttggtgtaaaggcaggatctggtttcgcatatgaattcgcagggcctgcgatagatgaattatcaatggaagaaaggatgacgatatgcaatatgtctattgaaggtggcgctaggtgcggctacattaaccctgatgaaaagacctttagttacattaaaaataaattatgtgctccaaaaaataagcattgggataaagccctcaagt

SEQ ID NO: 283634 - DNA, 510 bp, Unknown
  Bacterial polypeptide expressing nucleotide sequence isolated from the Sargasso Sea
gaactggccttgggaaaggtttgtttcatgaattgcgtactgattcctcgggaaagaatacgggtgagtttgttttagatcgacctccttataacaatgctaaaataatcattgccggacctaactttggatgcggttcatcaagggagcacgctccatgggctcttcaagactttggtgtcaaggtagtaatttcttcttcttatgctgatattttttataacaatagttttaaaaatggaatgttattaattcagctatcaccggaacaggttgatgagcttatggcagttgcaaatgattccgagaaccctgaattatcgattgatttggaaaaacaagaaatacttgctccaaacggtgtgtcctatagtttcgatttagagccctttttgaagcagtgtctgttagaaggcctagatgatatagggttaacgttacaaaaagatgagaaaatatccagttttgaagacaaacagcgtattggacaaccctggaattataaatagt

SEQ ID NO: 283635 - DNA, 673 bp, Unknown
  Bacterial polypeptide expressing nucleotide sequence isolated from the Sargasso Sea
atggccaaaaccttatatcagaagatttaccaaagccatgtggtggctccggtcaatggcagcaccgacttgttgtttgtcgaccgtcatttaatacatgaagtcaccagccctcaggcttttgctggtttgcgtcaggccggccgcacagtacgccgtcctgatttaacttatgccactatggaccataatgtctcgactcagctgcgcagcatagatgcagcgggggaaacctcccgcaaacagctggaagctctggcagccaactgcaaagaatttaatgtgcctttgctggatttaatgcacccagatcagggcatagtgcacgtgattggccctgagttgggtttaacccaacccggtatgattattgtgtgtggtgattcccatacctccactcatggtgcttttggcgcaatcgcctttggtattggtacgtccgaagtagaacatgtgctggcgacccaaaccttgcagcagcaagtggcgaaaaccttaaaagtagaagtcacaggttctttatcaccttttgttacgccaaaagatgtgattatggcggtgataggccagttgggcactgctggtggtaatggttatgtggctgaattttgtggctctgctattcgtggcatgagcatggaaggccgtatgacgctgtgtaatatgagcattg

SEQ ID NO: 283636 - DNA, 441 bp, Unknown
  Bacterial polypeptide expressing nucleotide sequence isolated from the Sargasso Sea
tatgtcggctccaaaaactttatttgataaaatctggaatgcgcatgttgtgcatcaacaagatgatggtacgtgcctgatttacatcgatcggcatcttgttcatgaggtcaccagtccgcaggcctttgagggtcttcgaaataatcatagggtggtgcgcgcacccaatcgtacgctcgccgttgccgatcacaatattccaacgacagaccgctcggttggtattgaagacgaagaaagccgcattcaggttgaagcgctggaaaaaaatgcggctgactttggtgttccctattttgcaatggatgatatccgtcaaggcattgtacatgttattggtccagaacaaggatttacccttcctggcatgacgattgtctgcggcgattcgcacactgcaacgcatggggcgtttggcgccctcgcttttggcattgg

SEQ ID NO: 283637 - DNA, 598 bp, Unknown
  Bacterial polypeptide expressing nucleotide sequence isolated from the Sargasso Sea
aatggaaaaatttaaaaacatcaacagcataccagcctatttacccgagataaacattgatactgataagattattccaaaacaattcttaaaaacgatcaaaagaactgggttaggaaaaaatcttttctttgaaatgagatatgatgataaaggaaacttaatcaaagatttcattttaaataatgagccatattcaaattcacaaatattaataaccggaaagaactttggatgtggatcatcaagagagcacgctccttgggcacttttggattttggcatcagatgtattataagctcaagtttcgcagatattttctataataattgttttaaaaacggaattttgccaattaaaattgaagaaaatagcattcgtgaaatatccgagtattcgaaaagaaaagaaaaaattgaagtcaatctacaaaatcaggaaataaaatttggaaacaagataaagaaatttgaaattgataaatttaaaaagaaatgtctcctagaaggattagatgatatagctttatcactagaaaatattaaaaaaatagaaaattttgaaaaaaatattctcagtaaaaaatcctggatataa

SEQ ID NO: 283638 - DNA, 502 bp, Unknown
  Bacterial polypeptide expressing nucleotide sequence isolated from the Sargasso Sea
tatggaaaagtttaacaatttaagatcaataccatcatatctatcattgcaaaatattgatacagatatgattattccaaagcaatttttaaaaactattaaaagaacaggtttaggaaaaagtctattttatgaaatgcgttatgatgaaaatgggaaaaagaatgtcgattttattctaaataaagaaccttacaataaatcaaaaattcttttagcaggaaaaaattttggatgtggttcatctagagaacacgctccatgggctctattagattttggtataaagtgtgtaatcagtgctagctttgcagatattttttacaataattgttttaaaaatggaattcttccaattaagattgatgataaaatcgtggttgaactagctgaatattccaacaggaaagaggaaattggaattagtttagagaagcaagaaataaaatatggaaataaagttgcaaattttgagctagatccatttaaaaagaatgtttga

SEQ ID NO: 283639 - DNA, 298 bp, Unknown
  Bacterial polypeptide expressing nucleotide sequence isolated from the Sargasso Sea
tgccgaaaatgtaagcgctatggtcgttccaggatctggattggtcaaagagcaagctgaaaaagaaggaattgacaaaatattcaaagaagcaggctttgaatggagagagcctggttgttcaatgtgcttaggtatgaatccagatcaattaaagcctaaagaaagatgtgcttcaacatcaaatagaaactttgaaggtaggcaaggtcgtggaggcagaacacatttagtcagtccggggatggccatcgcagcagcaattaaagggtacctaactgatgtaagagaaatgtaa

SEQ ID NO: 283640 - DNA, 387 bp, Unknown
  Bacterial polypeptide expressing nucleotide sequence isolated from the Sargasso Sea
ataaggtttttataggtagctgcacgaatggaagaattgaagatataagagaagcggcaaaaattttaaaagacaaaaagatagcaaaacatgttaatgctatgatcgttccaggttcagggttagttaaagagcaagccgagcaagaaggcttagatcaaatatttataaaatctggatttgaatggagagaacctggatgctcgatgtgtcttgctatgaatgctgataaattaaaaccagaggaaagatgtgcttctacttcaaatcgaaattttgaaggaagacaggggcgtggtggtagaactcatctagtaagtccagcaatggctgcagcagcagctatttcaggaaatttagatgatgtgaggaagtatcaaaattaaa

SEQ ID NO: 283641 - DNA, 430 bp, Unknown
  Bacterial polypeptide expressing nucleotide sequence isolated from the Sargasso Sea
atgaaaaaatttacaatagttaaaagtataccctcatatcttccaatagttaatattgatactgatatgattattcctaaacagtttttaaaaacaataaaaagaactggcctaggtaagaatttattttatgaaatgaggtatgatcaaaaaggaaataaaataaacgattttatacttaataatgatccgtacaataaatctaaaatattaattgcaggaaaaaattttggatgtggttcttcaagagaacatgctccgtgggcacttttagattttggaataacttgtgtaattagcccaagttttgcagatattttttataataattgttttaaaaacggaattttacctattactctaagtgaagaagaaattaaagaaatttcagagtattcaaatagaaaagaagaaatttcagttaattagt

SEQ ID NO: 283642 - DNA, 598 bp, Unknown
  Bacterial polypeptide expressing nucleotide sequence isolated from the Sargasso Sea
atgtcattcacactatacgataagctatggaatcttcatgaggtctctcaaagagaagatggcacctatcttttatatatagatagacatttgattcacgaagttacatcccctcaagcatttgaaggattgaaattagctggccgtaagccttggagaatatcagctaatattgcaacacctgatcataatgttcccacaactgacagggacaagggaatagctggtataaatgatgaagtatcaaaacttcaagtggttactttagatgataattgtaaagagcatgaaatactgcagtttgatattcatgataaacgccagggcatagttcatgtggttgggcctgaacaaggattgactttacccggcatgacaattgtttgtggagattctcacacctctactcatggggcattggcgacactttcaatgggtattggtacttccgaagtggaacatgttttagctactcaatgtttgaaaacatcaaaactaaaaaatatgagagttaacatttcaggcgagctacaaaaaggtgtcactccgaaggatgttacattggcggttattggaaaaattggaaccgcaggaggaa

SEQ ID NO: 283643 - DNA, 698 bp, Unknown
  Bacterial polypeptide expressing nucleotide sequence isolated from the Sargasso Sea
aatggaaaaattcataactttaaaaggtattgcagccccactccctatgatcaacgttgatacagatatgatcataccaaaacaatttttaaaaacaattaaacgttctggtttgggaaaaaatctttttcatgaattaagatttgatatacaaggtaacataaaaaatgattttgtcttaaattgggatccttataaaaaagcaactattcttattgcaggcgataactttggttgtggctcaagtagagaacatgcgccgtggtctttattagattttggatttaaatgtattattgccccaagctttgctgatattttttataataattgttttaaaaatgggattcttcctattcgcttagatcaagaaaaagtgaatatattaatgacagaagcaaaaaataaaaatcaattaaccataaatcttgatcaacaaaaaataattttagcaggtgaaaatgttattgagtttaatattgatccttttagaaaaaaatgtttggtagaaggtctggatgatattggtttaactcttcaaaaaaaagataaaatttctaaatatgaagaaagtatcaagtcctcccatccttggatatataaaatgagtaataaaaaagttcttattttacctggtgacggtattggtaatgaggttatggctgaagttctcaaaattattgattggatggagaaaa

SEQ ID NO: 283644 - DNA, 277 bp, Unknown
  Bacterial polypeptide expressing nucleotide sequence isolated from the Sargasso Sea
gattgttcctggatcaggtctagtgaaagacaagcagagagtgaaggattagataaaatttttattgaagctggctttgattggagagaaccaggatgttcaatgtgtttagctatgaatccagaccaattaaaaccaagagaaagatgtgcttcaacatcaaatagaaattttgaaggaagacagggtagagagggtagaacacatttggttagtccagttgttgctgctgcttctgcaattaaaggctcgtttgctcaggagactgatttataat

SEQ ID NO: 283645 - DNA, 577 bp, Unknown
  Bacterial polypeptide expressing nucleotide sequence isolated from the Sargasso Sea
atagttttaaatggcgaagatgtcgttccacaagttacttggggcacatctccacaagatgttgttccagttaatggatcagttccagatccaaaaaaagaaaaagatagtgacagacgtgtggctatggaaagatcattagattatatgggtttaaaaccaaataccaaaatgacagatattaaaatagacaaagtctttattggaagctgtactaatggaagaattcaggacttaagggaagcagccaaacttcttaaagataaaaaaatagcaggacatgtaaatgccatggttgttccgggatcaggtcttgtaaaaattcaagctgagcaagaaggtttggataaagtatttaaagactctggttttgagtggagagaaccaggttgttcaatgtgtctaggcatgaatgaagatcaattaaaaccaagagaaagatgtgcatcaacatcaaatagaaattttgaaggaaggcaaggtcgagggggaagaacacatctagtaagcccagcaatggcagcagtagcagctattgaaggtcgtttatcagatgttagaaaatttaataattaat

SEQ ID NO: 283646 - DNA, 502 bp, Unknown
  Bacterial polypeptide expressing nucleotide sequence isolated from the Sargasso Sea
atggaatcctttttaactttaaatagtattgccgctccattacctatgattaatgtggatacagatatgataattccaaaacaatttttaaaaactattaagaggtcaggattaggtaaaaatttatttcatgaattaagatttgatattcaaggtaatataaaaaatgattttgttttaaattgggatccttacaaaaattcaaaaatcttaattgcaggtgctaattttggatgtggttctagtagagagcatgccccttggtcgcttttagattttggtttcaaatctattatcgctcctagttttgcagatatattttataataattgttttaaaaatggaattttacctgtcaaacttgatcaaaataacgttgatatacttatgaaagaagcagaagacaaacaagaaataatagtaaatttagaaaagcaaattataatttatcaagaagataaaactataaattttgaaatagatgaatttagaaaaaaatgtc

SEQ ID NO: 283647 - DNA, 386 bp, Unknown
  Bacterial polypeptide expressing nucleotide sequence isolated from the Sargasso Sea
aataaaaattgataaagtatttattggctcatgtaccaatggcagaatagaagatttgcgtgaagttgcaaaagtagtacaaggtaaaaaagtatctgtagactcaatgattgttccaggatcaggtttagtaaaaaaacaagctgaggacgaagggttagataaaatttttattgaagctggttttgattggcgtgaaccaggttgttctatgtgtctagcaatgaatccagatcaattaaaaccaaaagaaagatgcgcctcaacttcaaatagaaattttgaaggtaggcagggtagagaaggaagaacacatctagtaagtccagcaattgcggccgcttcagcaattaaaggctctttttctacagttgaggatttataga

SEQ ID NO: 283648 - DNA, 771 bp, Unknown
  Bacterial polypeptide expressing nucleotide sequence isolated from the Sargasso Sea
attgaatataccggcgacgttattcattcacttagtatggaaggacgtatgactatatgtaatatgagtatagaagctggagcaagagctggactaatagcacctgatcaaaaaacatttgactacattaaaggtagaccatatgcacctaaaggtgaagaatgggaaaaagctattgaattttggaagtccttaccttctgatgatgatgcaaaatatgataaagaaataaatattgatgctgaagacattacccctcaaattacttggggaactagtcctcaagatgttgtcccaattaatggaaaggttccaaatccttcatctgttgaagatgttaatagaaaaaaatcaattgagcgatcacttgaatatatgggtttagaaccagatcaagaaataactaaaattaaaattgataaagtttttattggatcatgtacaaacggtagaattgaggatctaagagaagttgcaagagtagttaaaggaaaaaaagtcagtgttgactcaatgattgttcctggatctggtttagtaaaagaacaagcagagagtgaaggattagataaaatttttattgaagctggctttgattggagagagcctggatgctcaatgtgtctagctatgaatccagatcaattaaaacctagagaaagatgtgcttcaacatcaaatagaaattttgaaggaaggcaaggtagagaaggcagaacacatttagttagtccagttgttgctgctgcatccgcaattaaaggctcattt

SEQ ID NO: 283649 - DNA, 610 bp, Unknown
  Bacterial polypeptide expressing nucleotide sequence isolated from the Sargasso Sea
attgagtcaagataccttatttgataaagtttgggatttacacaaagtttcaagtcttcccggtggttcagatcaaatttttattggtcttcacctcatccatgaagtgacaagtcctcaagcatttggttctttaaaagacaaaaacttaaaagtaaaattccctaatagaactgttgccacagttgatcatattgtgccaacagataatcagagcaggcctttcaaagataatcttgcggaacaaatgattagcacattagagaagaattgcttaaaacataaaataagattttataatattggtagtggtcaccaaggaatagtgcatgtagtagctccagaattggggctaacgcaaccaggaatgacaatcgcttgtggagattcacatacctcaactcatggagcctttgggtcaattgcttttggaataggtacaagccaagtaagagacgttcttgctacccaaaccatagccatgaacaaattaaaggtaaggcaaatttggtgtgagaatgaattatctaatggggtttatgctaaggatttagtacttcatattattaataaacttggtgtgatggctgggggtgggttttgcatatga

SEQ ID NO: 283650 - DNA, 900 bp, Unknown
  Bacterial polypeptide expressing nucleotide sequence isolated from the Sargasso Sea
ctttttattgacagacactttattcatgaagttacaagcccagttgcatttgtcggattaaaaaataggggtcttaaagtaatgtttcctgataaaacttatgctactgctgaccataatacaccaactctaaatcagcatctaccaattaaggataaactatcagctatgcaggtaaaagcactagaaaaaaactgtattgaacatggtatagatttttggggacttggtcacgttaagaatggtattgttcatgttattggtccagaaaatggtataactcagccaggacttacaattgtttgtggtgattcacatacctctactcatggggcatttggagctatagcatttggtataggaacctctgaagttgaaatggtacttgcttgtcaatctataatgcagcagaagcccttaaaaatgagaataaatattgatgggtatctaaattcacatgttacacctaaggatgttgctatatacattatatcaaaactctcttcctctggtgctactggatattttgtagaatattcaggagaagtttttaaaaatatgagtatggagggtagaatgactgtctgtaatcttagtattgaaatgggtgcaagaggtggaatgattgccccagatgataaaacttttgaatatattaaaggcagagagtatgcccctaaaggagatgattggaaaaaagcccaatcctattggagatctttaaagactgataatgatgcaatttttgataaagaatttaactttaaagcaagcgatattgaacctatgattacttatggaactaatccaggtatggctattccaatttctaaaatcattccaagttccaattcagactcagaatcatcatatcaaaaggcactcgattatatggaattt

SEQ ID NO: 283651 - DNA, 607 bp, Unknown
  Bacterial polypeptide expressing nucleotide sequence isolated from the Sargasso Sea
atcagatgagaatgcaaaatttgataaagagataagtttaaaagctgaagaaattttaccaatggttacttgggggacctcaccccaagatgtaatcaccattgaagaaaaagttccaaaccctcaaaatgaaaaagatgaagatagaaaaaattctattgaaagagctttaaattatatgggattaaaaccaaatatggcagcgaaagatattaaaatagataaagtgtttattggaagctgtacaaacggaagaatagaggatttaagagaagcagcaaaaattttaaaagataagaaaatagcttctcatgttcatgcgatggttgttcctggatcaggattagttaaagaacaggcagagcaagagggattggacaaaatttttgtcaattctggttttgaatggagagagccgggttgttcaatgtgtttagctatgaatgctgataaattaaaaccagaggaaagatgtgcatcaacatcgaatagaaactttgaaggtaggcaaggaagaggtggtagaactcatttagtaagtccagcaatggcagctgctgcagctatatctggaagtatagatgatgttagaaaatatcaaaattga

SEQ ID NO: 283652 - DNA, 559 bp, Unknown
  Bacterial polypeptide expressing nucleotide sequence isolated from the Sargasso Sea
atgccgcatacactttacgataaaatttggaatgatcatttagttcatgaacaagatgacggtacagcattattatttgttgatagacatttaattcatgaggtaacaagtccacaggcttttgagggtttacgaaattcaaatagaaaagtgagacagccatctctaactttagccgtagcagatcataacgtgccaactacagatagatcaaaaggaatatcagaccgagaatcaaaaattcaagtagaaactttagaggcaaattgtaaggaatttggaataaaactttttggaatgaatgataagaggcaaggaattgtacacgtaacaggtccagagcaaggatttacacaaccaggaacagtaatagtttgtggagacagtcacacagccactcatggcgcatttggttcactagcttttggtatcggaacttcagaagtggaacatgttcttgcaacacaaacattagttcagaaaaaagcaaaaaattttagaataaatgttaatggaaaacttccattaggagtaacatcaaaagaatgttattttacaa

SEQ ID NO: 283653 - DNA, 606 bp, Unknown
  Bacterial polypeptide expressing nucleotide sequence isolated from the Sargasso Sea
tgcaaaaatttaattcattaaaaagtattcctgcgtatctaccaatagtaaatattgatactgatatgataattcctaaacagtttttaaaaacaattaaaagaactgggcttggaaaaaatttattttttgaaattaggtatgatgaaaatggaaaaaaaattaaagattttattcttaataaggaaccttataataaatcaaagattttaattactggaaaaaattttggatgtggatcatcaagagaacatgcgccctgggcattattagattttggaatcacatgtgttataagcactagttatgcagatatattctataacaattgttttaaaaatggaattttaccaatagttttaaaagaagaaaaaattaaagagctttcagaatattcaaaaagaaaacaagaaatatcaattgatttaaatgaagaaaaaattttttttggaaataaagaaattaaatttaaaattgattcttttaagaaaaagtgtttattagaaggtcttgacgatatcgctctttctttagaaaaagaagaaagcatttcttcttttgaaaagagtctgcaaaatcagaaaccgtggatatttaatgattaaa

SEQ ID NO: 283654 - DNA, 607 bp, Unknown
  Bacterial polypeptide expressing nucleotide sequence isolated from the Sargasso Sea
aatgcaaaagtttatttctctaaaaagcattccagcatatttacctattgtaaatatagacacagacatgattataccaaagcagtttttaaaaactattaaaagaacaggtttaggaaaaaatcttttttttgaattaagatatgatgaaacaggaaaagaaatttcagactttatcttaaacaaaaaaccattttgtaattccaacatattaatctcaggaaaaaattttgggtgtggttcttcaagggaacacgcaccttgggcactattagattttggaattacttgtattattagttctagttatgctgacattttttataataactgttttaaaaatggaattttaccaattgttttaaatgaggataaaattaaggatttatcagaatactctaatagaaaagaggagatctcagtcaacttagcggatcaaaaaattatatatggaaacaacgaaattttatttgagatagacccatttaaaaaaaaatgtttattagagggtctagatgacattgccttatctcttgaaaaatctgataaaataaaatccttcgaaaataaaattaaaaatcaaagaccctggatatttaatgattaa

SEQ ID NO: 283655 - DNA, 835 bp, Unknown
  Bacterial polypeptide expressing nucleotide sequence isolated from the Sargasso Sea
attattcggtgcactagcttttggtataggaacttcagaagtagaacatgttttagctacacaaacactagcaatggaaaaacccaaaacaatgaaagttgaagtaattggagatgtagctgagggtgtggggccaaaagatataattttaggaataatcagaaaaattggtactggtggcggagccggacatgtcattgaatatgtaggtgacgttattcaaaatatgagtatggaaaacagaatgactgtctgcaatatgtctattgaaggaggagctagagctggaatgattgcaccagataaagtaactttcaattatctaaaagaaaaaaattatgctccaaaaggttctgtttgggatgatgcaattgctgaatgggaaaatttatattctgatgaagatgctgtgtttgataaagtcgtaacaataaaagctgatgaacttgaaccatctatatcatggggaacaaatccttctcaggtaatttttgtgaatgacaccattcctcatccaaatgattttaatgaagaatctgaaaaagaagcggcatcaagagctttagaatatatggatttgaaacccggagaaaaaattagtgaaattaaattggatagagtttttattggtagctgcactaatggaagaatcgaagatttaagagaagctgcagaagtagtgaaagggaaaaaagtttctgaaacaattggcgcaatgattgttcctgggtcaacacttgttaaaaaacaagcagaggaagaaggattagacaaaatttttattgaagctggttttgactggagagaagcaggttgctcaatgtgtttaggaatg

SEQ ID NO: 283656 - DNA, 248 bp, Unknown
  Bacterial polypeptide expressing nucleotide sequence isolated from the Sargasso Sea
catggccggcaagactctttacgacaaactctgggatcagcacgtggtgaaaacccgtgaagatggcacagcgttgatatacatcgatcgtcagcttctgcacgaagtgacgtctccacaggcgtttgaaggtctgcgtattgcaggtcgcaagccatggcgcttagacgctaacctggcgacacctgaccataacgttccgaccaccgtacttgagcgtaaatcaggtatcgaaggtattcaggacc

SEQ ID NO: 283657 - DNA, 447 bp, Unknown
  Bacterial polypeptide expressing nucleotide sequence isolated from the Sargasso Sea
aaagatcattagattatatgggtttaaaaccaaatactaaaatgacagacatcaaaatagacaaagtgtttattggaagttgcactaatggaagaatccaggacttaagagaagcagctaaacttcttaaggataaaaaaatagcaggacatgtaaatgcaatggttgttccaggatcaggtcttgtaaaaattcaagctgaacaagaaggtttagataaagtatttaaagactctggttttgagtggagagaaccaggttgctcaatgtgtcttggtatgaatgaagatcagttgaaaccaagagaaagatgtgcatcaacatcaaatagaaactttgaaggaagacaaggtcgtgggggaagaacacatctagtaagcccagcaatggcagcagtagcagctattgaaggacacttatcagatgttagaaaatttaataattaat

SEQ ID NO: 283658 - DNA, 469 bp, Unknown
  Bacterial polypeptide expressing nucleotide sequence isolated from the Sargasso Sea
atggaaaaatttacaaaaataaaaagtatacccgcatatatttccttaatgaatatagatactgataaaattattcctaaacaattcttaaaaacaatcaagagatcaggtttaggcaaaagtttattttatgaaatgaggtttgatgaaaaaggaaatccaataaagggtttcattttagaccaggaacctttcaataattcaaaaatcttaataacaggaaaaaattttggttgtggttcatcaagagaacacgctccttgggctttattagattttggaattagagttatcatcagtgaaagttttgctgatatattttataataattgttttaaaaacgggatacttccaattgttgcaaaaaatgaaacaattaatgagcttaaagactattctgtaagaaaagaaagtatcgaggttaaacttgaggagcaggaaattgtttatggaaacaaaaacttttaaa

SEQ ID NO: 283659 - DNA, 607 bp, Unknown
  Bacterial polypeptide expressing nucleotide sequence isolated from the Sargasso Sea
atgcaaaaatttaataaattaaaaagtatcccagcttatttaccaattgtaaatattgatacagatatgataattccaaaacagtttttaaaaactatcaaaagaactggtcttggaaaaaatttgttttttgaaatgagatatgatgatcaaggcaaagaaataaatgattttgtgttaaacaaagatccatttaatcaatcaaaaattttaattgctggaaaaaactttggatgtggctcatcaagagaacatgctccttgggctttattagattttggaattacttgtgtaataagttcaagttatgcagatattttttttagcaattgttttaaaaatggaattttgcctataatccttgaagaagaaaaaataaaagagctatctgaatacgcaaatagacaagaagaaatctctattgatttgaatgaagaaaaaatagtttatggaaataatgagctaaaatttgaagttgatccatttaagaaaaaatgtttgttagaagggcttgatgatatcgctttatcactaaaaaaatcagaaaaaatagaaaagtttgaaacaaatttaaaaaacgaaaagccttgggtatttaatgattaaa

SEQ ID NO: 283660 - DNA, 473 bp, Unknown
  Bacterial polypeptide expressing nucleotide sequence isolated from the Sargasso Sea
aatgctacaaacactttacgataaaatctggaaagaacatttagttcatcaacaagaagatggtacagctttattatttgttgatagacatttaatacatgaggtcacaagtccacaagcttttgagggtctaagaaattcaaaaaggactgtaagacaaccaagtctaactctcgccgtagcagatcataatgttccaacaacagatagaagcaaaggaatagacgatatagagtcaaaaatacaagttgatactttagaatctaactgtgaggaatttggaattaaactctttgggatgaatgataaaagacaaggcatcgttcatataattggtccagaacaaggttttactcaacctggaacagtaattgtttgtggcgacagtcatacagcgacgcacggagcattcggagctttagcttttggtattggtacttctgaggttgaacatgtattagcaactcaaactt

SEQ ID NO: 283661 - DNA, 850 bp, Unknown
  Bacterial polypeptide expressing nucleotide sequence isolated from the Sargasso Sea
attttatcaattattgggtgaaatcggaactgctggcggtactgggcatgtaattgaatacactggtcaggctattagagatctttcaatggaaggcagaatgactgtttgtaatatgactattgaagcaggagctagagcaggtttaatagcgccggatgaaaaaacttttgaatatgtcagaggaagaccaatggcgcctaaatcagacaactgggaaaaagcagttaattactggatgtctttaccctctgatgagtctgcgtcttacgatagagaaagagttattcacgctgataacattgcccctcaagtcacatggggaacaagtccagaggacgttatagctattgataagttagtgcctgacccaaaaaatgaggcggatcaagcaaaaaaagacgcaatggaaagagctataggttatatgggcctaacacctggaatgaggatgactgatattgaaataaataaagtttttattgggtcttgcacaaacgcaagaatagaagacttaagaaaagcggcaaaaataactgaaggacataaaatttcagatggtataaaggcaatagtagtccctggatcaggacttgtaaaactgcaagcagaagaagaagggctggacaaaatcttcatttcagctggctgggaatggagagaacctggatgctcaatgtgtattgggatgaatccagataaagttgaagctaaagaaagatgtgcttccacttcaaatcgaaactttgaaggacgccaaggagataacgcaagaacacacttagttagccctgctatggcagcagcagcagctataacaggcaaactgacagatgtaagaaaattttaa

SEQ ID NO: 283662 - DNA, 465 bp, Unknown
  Bacterial polypeptide expressing nucleotide sequence isolated from the Sargasso Sea
aatgccaaatacactttacgataaaatttggaatgaccacttagttgatcagcaaactgatggtacagctttattatttgttgatagacatcttgttcacgaagtaactagtcctcaagcttttgaaggtcttagaaattctaatcgaaaagtaaggcatccaaatttaacattagctgttgcagatcataacgttccaacgactgatagaacaaatggtatagcagaccaagagtctaaaattcaggtggatacattggaaaaaaactgtcaagaatttggtatacaactatttggtatgaatgataaaaggcaaggaattgtccatataattggacctgagcaaggatttacccaaccaggtacagtaattgtttgtggagatagtcatacagctacacatggtgcatttggagctttagcatttggaattggaacgtcagaggttgaacatgttctagcaac

SEQ ID NO: 283663 - DNA, 904 bp, Unknown
  Bacterial polypeptide expressing nucleotide sequence isolated from the Sargasso Sea
acaaaaggaattgaaaataaagaaagtagaattcaagtagaaactcttgaaaaaaattgcaaagattttgaagttactctttttcctcttttggatagcagacaaggtatagttcatattgttggtccagaacaaggtattactcaacctggaatgacaattgtttgtggtgatagccatacagcaactcatggagcatttggtgcattagcttttggtataggaactagtgaggtagagcatgttcttgcaactcaaacattaatccaaaaacctgcaaaaaatatgagaattgaagttaatggtaaacttaatttaggtgttacagctaaagatattattctccatattataggacaaattggaactgcaggaggtaccggttatgtaattgaatatgctggtgaatcaatttctaacctttcaatggaaggaagaatgacaatttgtaatatgagtattgaggctggagcaagagctggcttaattgcaccagataataaaacttttgagtatattaaaggtaggccttatgctccaaaaggagaaaattgggataaggccctagacttttggaaatcacttccatctgacgaaggtgctaagtacgataaagaaatcataattaaagccgaagacatttatcctcaaattacatggggcacaagccctcaagatgttgtttcaattaatggcaaggttccaaatccaaatgaagagagtaatcttaatagaaaaaaagcaatggaacgctcacttgaatatatgggattagaacctcaacaagaaatacaaaaaataaaaattgataaagtatttataggctcatgcactaatgggagaatagaggatttaagggaagttgctaaagttgttcaaggaaaaaaaataaaagtagattcaa

SEQ ID NO: 283664 - DNA, 656 bp, Unknown
  Bacterial polypeptide expressing nucleotide sequence isolated from the Sargasso Sea
gatgaacaaaaatcccaaaactttatttgaaaaaatatgggaaaaacatgtcgtagacgaacaagatgggcaacccactttgttatatgtagatctccatatgatacatgaagtaacttccccgcaagcatttgaaggtcttaggttagccaatagaaaagttagaagaccagatttaactgtaggggtagccgatcatgcaataccaacttgggcaggaagaaattctatttctgacccgattgcaaaacaacaagtcgaaactttaactaaaaactgtaaagaattcggagtaactctttatgacatgtaccataaaaaccaggggattgttcatgtaattggacctgatttaggattaacacaacctggtaaaataatagtgtgtggagatagtcacacttctacaaatggtgctttcggtgcttttgctatgggaataggaacatctgaagttgaacatgtactagctacgcaaacattaaggcaatttaaaccaaagaccatgaatatacatattgatggggccttgccaaaaggtgtaacagcaaaagatctaatacttggaataataaaaaatataggaataagtggtgccgtaggacatgcaattgaatacacaggagaagcactgactaatctaagtatggaaggga

SEQ ID NO: 283665 - DNA, 528 bp, Unknown
  Bacterial polypeptide expressing nucleotide sequence isolated from the Sargasso Sea
aacagttcttaaaaaccataaaaagaacagggttaggaaaaaatttattttttgaattgagatatgatgaaaagggtaatgaaattaaagattttatccttaatcaagagccatataatagttcaaaaatattgatatccggaaaaaattttggctgcggatcttcgagagaacatgctccttgggcattattagattttggaataacctgcgttataagttcaagttatgcagatattttttataacaactgctttaaaaatggaatattgccaattattttaaatgaagaaaatataaaagaactatcagaatactctaatagaaaagaagaaatatctattgatttaagagaacaaaagattatttatggaaacaatgaagttggatttgacattgatccatttaaaaaaaaatgtttattagaaggattagatgacattgctctttctttagaaaaatcagatgaaattaattcttttgaaaaagaattaaaaaataaaaaaccatggatatttaatgattaag

SEQ ID NO: 283666 - DNA, 757 bp, Unknown
  Bacterial polypeptide expressing nucleotide sequence isolated from the Sargasso Sea
atgtctacaacattatacgataaaatttggaacgatcatctagttgatcaacaagatgatggtacatctttactttttgtagataggcatttaattcatgaggtgacaagcccccaagcttttgaaggattaagaaattctaatagaaaagttagacacccaaatttaactttagcagttgcagatcataatgttccaacaactgacagatcaaaaggtatttcagatgaagagtcaaaaattcaagtagatactttagaggcaaattgtaaagaatttggtgttcagttatttggtatggatgataagaggcaaggtatcgttcatattataggacctgagcagggttttactcaaccaggtacagttattgtttgtggagacagtcataccgcaacgcatggagcatttggtgctttagcatttggaataggaacttcagaagttgaacatgttttagcaacccaaacactagttcagaagaaagctaaaaattttagaattaatgttaacggtgaacttcctttaggagttacttctaaagatgtaatacttcaaataattggaaaaataggtacagcaggtggaacaggatctgttgtggaatatgctggagatttaataagatctttaagtgttgagcaaagaatgactatttgcaatatgacaatcgaaggtggtgcaagagcaggattaattgcaccagatgaaaaaatttttgaatatttaaaaggaaaaccaatgtcaccaaaaagga

SEQ ID NO: 283667 - DNA, 382 bp, Unknown
  Bacterial polypeptide expressing nucleotide sequence isolated from the Sargasso Sea
atgaaacaaaccttgtacgataaaatatggaatgatcactgcgttttagataatgatgatcactcatcgcttatatatattgatcgccacttaattcatgaggtcacctctccgcaagcattcgatggattggacatcaaaaaaagagatatttggaataaaaaatcaattatggcaacaacagaccataatgttccgactattaacagagatcaaggaatcaccgatccagtttctaaaatccagatagaggctcttcgagaaaattgtaaaaaacataacatagagctttatgatttagataatcttaagcaaggtattgttcatgtaatagggccagaacttggaatgactcagccaggcatgactatagtatgtggtg

SEQ ID NO: 283668 - DNA, 811 bp, Unknown
  Bacterial polypeptide expressing nucleotide sequence isolated from the Sargasso Sea
aatgtctaatacactttacgataaaatttggaacgaccatctggttgatcaacaagatgacggtacatctttagtttttgtagatagacatttaattcatgaagtgactagccctcaagctttcgaaggactaagaaattctaaaagaaaagtaagacatccaaacttaacattagcagtagcagatcataatgttccaacgactgatagatcaaaaggtatttctgataaagagtcaaaaattcaagtagatactttagaggcaaattgtaaagaatttggtgttcagttatttggtatggacgataaaaggcaaggtattgtccatataataggacctgagcaaggttttactcaaccgggtacagttattgtttgtggagatagtcataccgcaacacatggagcgtttggtgctttagcatttggaatagggacctctgaagttgaacacgtattagctactcaaacattagttcagaagaaagcaaaaaattttagaataaatgtcaatggtgaacttcctctaggtgttacctctaaagatgtaatacttcaaataattggaaaaataggtactgcaggtggaacaggatgtgttgtagaatatggtggagatctaataaaatctttgagcgttgaacaaagaatgactatttgtaatatgacaattgaaggtggtgcaagagcgggattaatcgcaccagatgaaaaaatttttgaatatctaaaaggaaaaccaatgactccaaacggagaaaaatgggacaaagctctaaattattgggaaactctaaaaacagacccagat

SEQ ID NO: 283669 - DNA, 910 bp, Unknown
  Bacterial polypeptide expressing nucleotide sequence isolated from the Sargasso Sea
atagggacttcagaagttgaacatgtattagcaactcaaacactagttcagaaaaaagctaaaaatttcagaattaatgttaatggtgaacttcctttaggagttacttctaaggatgtaatacttcaaataatcggaagaattggaacagcaggtggaacaggttgtgttgtagaatatgcaggaaatttaataagatctttaagtgttgagcaaagaatgactatttgcaatatgacaattgaaggtggcgcaagagcaggcttaatcgcaccagatgaaaaaatttttgaatatttaaaaggaaaaccaatgtctccaaaaggagaaaattgggacaaagctgtaaactactgggaaactttaaaaacagattctaacgcaagttttgataaggaaattagtcttaatgcaaatgaaattttacctatgattacttggggcacatcaccacaagatgtaataacaattgatggaaaagttccaaatccaaataatgagaatgatcaagataaaaaaaattcgattgaaagagctttaaactatatgggcttaaaacctgatatggccgccacagatataaaaatagataaagtatttattggaagttgcactaatggaagaattgaagatttaagagaagcagcaaaaattttaaaagataaaaaagtatcatcccacgttaatgctatcgtagttccaggttctggtttagttaaagaacaagctgaacaagaaggactagataaaatttttgttaaatcaggttttgaatggagagaaccaggttgttctatgtgtttagcaatgaatgcagacaaattaaaaccggaagaaagatgtgcatctacttcaaatagaaactttgaaggtagacaaggacgaggcgggagaactcatttagtagccc

SEQ ID NO: 283670 - DNA, 625 bp, Unknown
  Bacterial polypeptide expressing nucleotide sequence isolated from the Sargasso Sea
aatggaaaaatttaataaactcagcggtcacgcaataccactacgtataacaaatgtagatactgatatgattattccaaaacagttcttaaaaacaatcaagcgaactggacttggggagtttttattctatgaattaagatatgatcaagatggaaacaaaattagttcttttgcccttaaccaagagcagtataaaggtgctagtatacttatagctggcaaaaattttggctgcggatcttctcgtgaacatgctccatggtctatagctgactatggaattaaatgtataattgcaccaagttatgccgacattttttataacaattgtttcaaaaatggtattttgcccataatccttgatgaagcaacggtttcaagattacaggatacatctgatagtacattaaattttaatatagatttagaaaaacaaaatataactttcttagaaaataatgaaaaaaaagaaattagttttgaaatcgatccagctaaaaagaaatgtttgcttgaaggactagatgacattggtctgactttaaataaatcagcttctattggacactttgaagaaggtcaagagaatgaaattccttggttatatggaaacaaaatttaa

SEQ ID NO: 283671 - DNA, 373 bp, Unknown
  Bacterial polypeptide expressing nucleotide sequence isolated from the Sargasso Sea
ttttctcggctcttgtacaatggtagaatagaagacctaagagctgtgtcacaaatcgcaaaaggccgaaaagttgaaaaaggtgttcatgctatgattgttcctggctctggtttggttaaagagcaagcagaaaaagaagggttggataagatttttattgaagcaggttttgattggagagatccaggatgttcaatgtgcttagctatgaatgctgataagttacagcctcaagaaaggtgcgcttcaacatctaatcgaaattttgaaggcagacaaggtagaggcggcagaacccatttaatgagtcctcaaatggcagcagcggcggcaatcagaggcaagcttactgattttagagatctttaat

SEQ ID NO: 283672 - DNA, 328 bp, Unknown
  Bacterial polypeptide expressing nucleotide sequence isolated from the Sargasso Sea
atgcctcaaactatatacgataaaatatggaatgatcaccttgttcatcaacaagaggatggaacttcacttttatttgttgatagacatttaattcatgaggttactagtccacaagcatttgaaggtttaagaaattctaatagaaaagttagacaaccttctttaactttagcagtggcagatcacaatgttccaacaacggatagatcagtgcctattaccgacgaagattcaaaaatacaaatcgagacattagaaaaaaactgtgcagaatttggaataaatctttttggaatgaacgataaaagacaaggaatagttcata

SEQ ID NO: 283673 - DNA, 517 bp, Unknown
  Bacterial polypeptide expressing nucleotide sequence isolated from the Sargasso Sea
agtccacaagatgttgtttcaataaacggaaaagtgccaaaccctaaagaagaaaacaatccaaacagaaaaaaagctatggagcgttcacttgaatatatgggcctagaacccgagcaagaaattcaaaaaattaaaattgataaagtttttataggttcttgcactaatggaagaatagaggatttacgagaagttgctaaagttgtgaaaggaaaaaaagtttctgtagactcaatgatagttccgggttcaggtttagtaaaaaaacaagctgaacaagaagggctagataaaatttttattgaagcaggatttgattggagagagcccggttgttctatgtgtttagcaatgaatccagatcaattaaaacctcaagaaagatgtgcatcaacatcaaatagaaattttgaaggtagacaaggtagagaaggtagaacacatttagttagtcctgcaatagctgctgcatctgctataaaaggttcatttgcaactatagaggatttataat

SEQ ID NO: 283674 - DNA, 894 bp, Unknown
  Bacterial polypeptide expressing nucleotide sequence isolated from the Sargasso Sea
tggagcatttggttctttagcatttggaattggaacctcagaagttgagcatgttctatctacacaaactttaattcaaaagcctgctaaaaacttcctaataaagtttactaataaattaggtaaaggtgtaacagcaaaagatgtaatattgtacctaatcggtcagattggaacagcaggcggtacaggttatgttttagaatatgcaggtgaaataatagatgatatgagtatggaagaaagaatgactatctgcaacatgtcaatagaagctggtgctcgtgctggacttatagctccagacgaaaaaacttttgattatctttacaacaaaccactagcaccaaaagggaaagattgggatatggctgttaaatgttggctaaaacttaaaagtgatccagatgcaaaatacgaaaaaacacttctaattgatgcctcaaaaattgaaccacaagttacatggggtacgagtccagaagatgttctaactataaactcaacaattccaaatccagaacagtacactaatagcgaaaaaaaaaaatcagtcataagatctctaaaatacatggatctaaaacctggacaaaaacttaccgatgttgagattgacaaagtattcatcggttcttgtaccaatggtagaatagaggaccttagaaaggcttcaaaaattttaaaaggaaataaaataaatccaaatgtaaaagcttttgttgttccggggtctggcttagtaaaaaaacaagctgaagctgagggattagacaaaatattcaagtcatcgggatttgagtggcgggaacctggatgctcaatgtgtttggcaatgaatgcggataaactcaaaccatacgaacgatgtgcttcaacctcaaatagaaattt

SEQ ID NO: 283675 - DNA, 574 bp, Unknown
  Bacterial polypeptide expressing nucleotide sequence isolated from the Sargasso Sea
tatgaaacaaaccctgtacgataaaatatggaatgatcactgcattttagataacgatgatcaatcatcgcttatatatattgatcgccacttaattcatgaggtcacttctccacaagcatttgatggattggaaatcaaaaaaagagatatatggaataaaaaatcaattatggcaacaacagaccataatgttccaactattaacagagaccaaggaatcaccgacccagtttctaaaatccagatagaggctcttcgagaaaattgtaaaaaacataatatagagctttatgatttagataatcttaagcaaggtattgttcatgtgatagggccagaacttggaatgactcagccaggcatgactatagtctgcggtgattcacatacatcaacacatggtgctcttgcatcactctcatttggaataggtacaagtgatgtcgagcatgtacttgctacacaatgccttaatcttacaaaagagaaaaactttaatatagaagtaaatggcgtgctccatccttacattacatcaaaggatttaattttgtatataattggaagtata

SEQ ID NO: 283676 - DNA, 544 bp, Unknown
  Bacterial polypeptide expressing nucleotide sequence isolated from the Sargasso Sea
ataacatggggaacttctccacaagatgttattacaattgatggaaaagttcctaatccacaaagcgagacagatgaggatagaaagaattcaattgaaagatcactaaaatacatgggactaaaacctaatatgtcagcaacagatataaagattgataaggtgtttattggaagctgtacaaatggaagaattgaggatttaagagaggcagctgaaattttaaaagataaaaaaatatcatcccatgtcaatgcaatggtagttccaggatccgggttagttaaagaacaagctgaacaagagggattagacaagatttttatcaattcaggatttgagtggagagagccaggttgctctatgtgtttagcaatgaatgctgacaaactaaagccagaagaaagatgcgcttctacttcaaatagaaattttgaaggtagacaaggtagaggtggaagaactcatttggtcagtccaggaatggcagctgcagctgcaatttcaggaaacctggatgatgttagaaagtatcaaaattaaa

SEQ ID NO: 283677 - DNA, 328 bp, Unknown
  Bacterial polypeptide expressing nucleotide sequence isolated from the Sargasso Sea
atgcaaaagtttaatatattaaaaagcatccccgcatatttaccaatagtaaatattgatactgatatgattattcctaagcaatttttaaaaactattaaaagaactggacttggaaaaaacctattttttgaaatgagatatgatgatcatggaaaagagattgataattttgttcttaataaggatccattcaaaaaatccaaaattttgattgctggaaaaaactttggatgtggctcatcaagagaacatgctccttgggcacttctagattttggaattacttgtgtaatcagctcaagttacgcagatattttttatagta

SEQ ID NO: 283678 - DNA, 816 bp, Unknown
  Bacterial polypeptide expressing nucleotide sequence isolated from the Sargasso Sea
agatggaacatctttattatttgtagatagacatttaattcatgaggtgaccagcccccaagcatttgagggattaagaaattctaacagaaaagtcaggcatccaaaattaacacttgctgttgcagatcacaatgttcctactactgacagatcagagggaattgcggatgaagattcaagaattcaagttgaaactttgaataagaattgtaaagaatttggagtagagttattcggaatggatgacaaacgacaaggtattgttcatatcattgggccagagcaagggtttacacaacctggtaatattattgtttgtggtgatagtcataccgcaacacatggtgcatttggagctttagcatttggaattggaacgtctgaagtagaacatgttttagcaacacaaactttagttcaaaagaaatcaaaaaattttaggataagtgttaatgggtcgttacctattggggtaacatcaaaagatgtaattttacaaatcattggaaaaataggtactgcaggaggtacaggttacgtaatcgagtatgctggaaatcttatttctgatctaagtgttgagcagagaatgacaatttgcaatatgactattgaaggtggtgctagagcaggacttatacaaccagatgagaaaatatttaagtatttaaagggaaaaccaatgtcaccaaagggagaaaactgggatcaagccttagaatattggcacacattgaagtctgataaagatgcaaactttgacaaagagttaacattagatggttctcaaataaaaccaatggtaacctgggg

SEQ ID NO: 283679 - DNA, 565 bp, Unknown
  Bacterial polypeptide expressing nucleotide sequence isolated from the Sargasso Sea
atggaaaaatttaataatttaaaatcaataccatcatatttatcattacaaaatattgatactgatatgattatccctaagcaatttttaaaaactattaaaagaacaggtttaggaaaaagtctgttctacgaaatgcgatatgatgaaaacggaaacaaaatttcagattttattcttaacaaggaaccatataacacatctaaaattcttttggctggcaaaaattttggttgtggttcatctagagaacatgctccatgggctttatctgattttggtattaaaagtgtaataagccctagctttgcagatattttttacaataattgttttaaaaatggaattcttccaattaagatcgacgaaaaaattgtcgttgagttagctgagtattgtaagaggaaagaagaaattgaaataagtttagaaaagcaagaaataaaatacggaaataaagctgcaaagtttgaactagatccttttaaaaagaaatgtttgatggaaggactagatgatatagctctatcaatggaaaaaatttctaaaatagacgactatgaaa

SEQ ID NO: 283680 - DNA, 262 bp, Unknown
  Bacterial polypeptide expressing nucleotide sequence isolated from the Sargasso Sea
ggattagttaaagagcaggcagaaaaagagggattagataaaatttttaaaaacgcaggctttgagtggagagaacccggttgctctatgtgtttaggaatgaatccagaccaattaaagccgaaagaaagatgcgcatcaacatcaaatagaaatttcgaaggcagacaaggtcgtggtggaagaacacatctagttagtccaggtatggctattgcagcagcaattaaagggcggttaacagacgtaagagaaatataga

SEQ ID NO: 283681 - DNA, 610 bp, Unknown
  Bacterial polypeptide expressing nucleotide sequence isolated from the Sargasso Sea
aatgtctaaaactctatacgataagatatgggaaaaccatcttgttcatgaacagagcgatggaacgtcattaatttatgttgatagacatctagtccatgaggttaccagcccccaagcttttgaagggctcaggttacaaaaaagaaaagttagacgaccagaattaactcttgcagtacctgaccacaatgtacctactactgacaggtcaaaaggtataaatgatgaggactcaagaattcaagtcgaaacattaagaaaaaactgtaaagactttggagtggaactttttgatgttaatgacaagcgtcaaggcatagtccatattattggaccagaacaaggtttcacccagccaggaacggtaatagtgtgtggtgatagccatactgcaacacacggagcattcggtgcgttagcttttggaataggaacatctgaagttgaacatgtccttgccacacaaactttaatgcaaaagaaatcaaaaaatttaagaataaacgttaatggtaatttgcctaagggagttactgcaaaagatgtaattttaaaaattattggcacgattggaactgcaggtggaactggatacgtagttgaattt

SEQ ID NO: 283682 - DNA, 607 bp, Unknown
  Bacterial polypeptide expressing nucleotide sequence isolated from the Sargasso Sea
aatgcaaaaatttaataaattgaagagtattccggcttatcttccaatagttaatattgatacggatatgataattccaaaacaatttctaaaaacaataaaaagaacgggacttggaaaaaatttgttttttgaaatgcgatatgacgataaaggaaaagagatcaatgattttgtgttaaacaatgatccttacaaacagtcaaaaattttaattgcaggaaaaaattttgggtgtggatcatcaagagaacatgctccttgggcactattagattttggtattacttgtgtaataagctcaagttatgcagatattttttatagcaattgttttaaaaatggaattttacctattatccttgaagaagaaaaaataaaagagctgtctgagtatgcaaatagaaaagaagaaatttatattgatttaaatgaagaaaaaatagtttatggaaataatgagctaaagtttgagattgatccttttaaaaaaaaatgtttgcttgagggactggatgatattgctttatcattaaaaaaatcagaaaaaatagaaaaatttgaaaataatctaaaaaacgaaaaaccttgggtgtttaatgattaa

SEQ ID NO: 283683 - DNA, 790 bp, Unknown
  Bacterial polypeptide expressing nucleotide sequence isolated from the Sargasso Sea
cacggggccttcggcgccatcgcgttcggaatcggcacgtctcaggtgagagacgtcctcgccacgcagtgtctggccatggacccgctcaaggttcggcaggtcagagtcaacggcttgctcggcaagggtgtgtatgcgaaggacgtcatccttaacatcatccggcagctcggtgtcaagggcggtgttggatacgcttacgagttcgcaggcgcagcgatcgagaacttgacaatggaagaacgcatgaccgtctgcaacatggccatcgaaggtggcgctcgtgcaggttacatcaacccggacgataagacatacgagtatctgaagggccgaaagtatgccccccagggagacgcgttcgatcgagctgtcgactggtggaaatcgatggcctcggacgaggacgcccattacgacgatatctacgatctcgacggctcttctctcgagcccactgtcacttggggcatcaccccgggtcagtcgctctacgtgacggaacaggtgccggctcctgccgacctgaacgaagaggaccgcgatgtggcgaacgaggcctacgcatacatgggcctccaaccaggtcaacctatcgccggaacgcctatcgacgtagcgtttatcggttcctgcacgaatagccgcatctccgacctccgcgaagccgcaaaggtcgttcaaggccataaggtttcgagcaaggtcaagccgctcgtcgtgccgggttcgcgggagatcctgaagacagctgaagcggagggccttcacgaaatctcgaagaagc

SEQ ID NO: 283684 - DNA, 805 bp, Unknown
  Bacterial polypeptide expressing nucleotide sequence isolated from the Sargasso Sea
gtagagacacttgaaaaaaattgtaaagattttggtgtagacttatttggaatgacagacaaaagacagggaatagttcatattgttggacctgaacaaggttttacacaacctggcactgtaattgtatgtggtgatagtcatacagctacacatggagcttttggcgcattagcttttggaataggcacatctgaagtagagcatgttttagcaacacaaaccttggttcaaaaaaaggcaaaaaattttagaattaatgtaaatggaaatttggcacttggtgttacttctaaagatgtaattttacaaataattggaaaaattggaactgcaggcggcacagggtgtgtaattgaatatgcaggttctttaatttcaaatttatcagttgagcaaagaatgactatttgtaatatgacaatcgaaggtggtgctagagctggactaattcagccagatgaaaaaatttttaaatatttaaaaggaagaccaatgtctccaaaaaatgaaaattgggaaaaggctttaaaatactggagcaatttaaaaactgactccgatgctaaatttgataaagaaataaatcttgatggaaaagatattattccaatggttacttggggcacttccccagaagatgttgttcctattgatggaaaaattccaaatccagaaaatgaaaataatttagataaaaaaaactctatttatagatctctaaaatatatgggacttaaaccaggcacacccgttaaggataaaaaaattgataaagtttttattggaagttgtacaaatggaa

SEQ ID NO: 283685 - DNA, 518 bp, Unknown
  Bacterial polypeptide expressing nucleotide sequence isolated from the Sargasso Sea
aacaattaaaagaacaggtttaggaaaaagtttattttatgaaatgcgttatgatgaaaaaggaaaaataattgaagattttatattaaataaagagccatataataaatcaaaaatcttattagctggtaaaaattttggctgtggttcgtccagagaacatgccccttgggcattatcagattttggaataaaatgtattattagctctagttttgctgacatattttataacaattgttttaaaaatggaattttaccaataaaaataggtgaagaaactgttttagaattatctgattattcaaaaagacatgaagaaattgaagtaaatctagagaaacaagaaatattttttgggaacaaagtggttaaatttgagatagataaatttaaaaaaaagtgcttgatcgatggtttagatgatattggattatcgatgaaaaaagtaaatcacattgataactatgaaaaaaaaattaatgtaaacaaaccttggattttaaagaatgactaaa

SEQ ID NO: 283686 - DNA, 269 bp, Unknown
  Bacterial polypeptide expressing nucleotide sequence isolated from the Sargasso Sea
aatgtcaaaaaccttatacgataaaatttgggaagaacatcttgtacatcaacaagaagatgggacttctttactttatgttgataggcacttgatacatgaggttactagtccgcaggcttttgagggtttaagaataaataaaagaaaagttagaaagcccaacctaactcttgcagtcgcagatcataatgttccaacaacagatcggtccaaaggtattaatgatcaagagtcaaaaatacaagtggacacactaagaaaaaatt

SEQ ID NO: 283687 - DNA, 883 bp, Unknown
  Bacterial polypeptide expressing nucleotide sequence isolated from the Sargasso Sea
tgccttatttatattgatcgccatctagttcatgaggttactagtccacaagcatttgaaggtttaaggaattcaaatcgtaaagttagaagaccagaaagtacttttgcagttgccgatcacaatgttccaacttcagacagaactaaaggaattaaaaataaagaaagtagaatacaagttgaaacacttgaaaaaaattgtaaagaatttgaaataactctttttcctcttttagatagcagacaaggcattgttcatatagttgggccagaacaaggcataactcaaccaggaatgactatagtatgcggtgatagccataccgcaactcatggagcatttggtgcactagcatttgggatcggaactagtgaggttgaacatgtgcttgcaacacagacattaattcagaagcctgcaaaaaacatgcgcataatagtaaatggtgaattaaaatcgggtgttacagctaaagatgttattcttcatataataggacagataggtactgcaggtggaacaggatatgtaattgaatatgccggtgaagctatttcaaatctttctatggaagggagaatgacgatttgtaatatgagtattgaggctggagcaagagcaggtttaattgcccctgatgaaactacttttgagtatataaaagggagaccatatgctccatctgaagataactgggaaaaagcgttaaaattttggaaatccctaccatcagacgatggagctaaatatgataaagaaataataattaatgctgaagatattgctccacaaattacctggggaacaagtcctcaagatgtggtcgctattgatggtactgttccaaatcctaatgaagaaagtaatcccaatagaaaaa

SEQ ID NO: 283688 - DNA, 760 bp, Unknown
  Bacterial polypeptide expressing nucleotide sequence isolated from the Sargasso Sea
aatgtcacaaacaatttacgataaaatttggaatgatcatctggttcatgaacaaaaagatggaacgtccttgctttttgtggataggcatttgatccatgaggttacaagtccacaagctttcgaaggactaagaacatctaacagaaaagttagacaaccaaaattaacacttgctgttgctgatcataatgttccaacaaccgatagatcaaaaggtatatcagacgaagattctagaatacaagtagaaactttagataaaaactgcaaagagtttaatatccaactctttggtatgaatgataaaagacaaggtattgttcatataattggtccagaacaaggatttactcaacctggaaatataattgtttgcggagatagccatacggctacccatggtgcattcggtgctttggcatttggaataggaacttctgaagtggagcatgttttagcaacacaaacattggtgcaaaagaaatcaaaaaattttagaataagtgttaacggtgaattatcaattggtgttactgcaaaagatgtaattttacaaattattggaaaaataggaactgcaggtggaacaggatatgtaattgagtatgcaggaaatttaatatctggattaagtgttgagcaaagaatgacaatttgcaatatgactatcgagggaggagccagagctggattaattcaaccagacgaaaaaatatatgaatatttaaaaaataaaccaatgtctccaaaaaagaaa

SEQ ID NO: 283689 - DNA, 463 bp, Unknown
  Bacterial polypeptide expressing nucleotide sequence isolated from the Sargasso Sea
tgaaaatggaaaaattaataaaaattttattttaaataatgaaccttacaataaatcaaagatcttgttagcaggaaaaaactttggatgtggatcatcacgagaacacgctccttgggctcttttagattttggaattaagtgtgtgattagctctagttttgctgatatcttttataataattgtttcaaaaacggaattttaccaattaaaattgatgataaagtagttctagagcttgccgaatactcaaaaaggaaagaagaaattgaaataaatttagataagcaagtaataaagtatggaaataaagttgcaaagtttgaagtagatacttttaaaaaaaaatgtttgcaagaaggtttagatgatattgccttatcaatggagaaaatatcccaaatcgacaattttgaaaaaaaacttattcaagaaaagccttggcttttaaaaaatgattaa

SEQ ID NO: 283690 - DNA, 899 bp, Unknown
  Bacterial polypeptide expressing nucleotide sequence isolated from the Sargasso Sea
gatgggtcgcaaagtactcgatcctgcgcgcgtcttcgcggtgatggaccatatcgtcgacactcgaacaggacgcggtgacggaacgctgatgaagggcggcgaaggcttcatcaccgagacccgcaaggcctgcgccgaggccggcatcacactgttcgacgtcaacgaccgcgatcagggcattgtccatgtgatttcgcccgaacagggcattgtactgcccggcgccacgcttgtcgcgcccgacagccacacctgcacgcaaggcgcgtttggcgcgatggcgtgggggatcggttcttcggaggccgagcacgcgatggtcaccggcaccctcaggctggataagcccaagactatgcgcgtgcgttttaccggagagctggcgcgaggcgtgacggccaaggacatgatcctcaccctgatcgccgcgcatggagcgggcggcggcgctggatacgcggtggagtttgcgggcgaggcgacccgcgcgctcgacatggaagcgcggatgacgctgtgcaatatggcgaccgagttcagcgccatgacgggcctgatcgcgccggatgcaaagaccttcgaatatctcgcaggccgtccctatgcccctgcagacttcgacgatccctattgggccagcatctccagcgatgcggatgcgcgctttgaccaggagattgaaatcgacgcctccgccatcgcgccgatggtgagctgggggaccagccccgaacacacaatcggcgtgaccggcatcgtgcccggggggccgcaacgcgcgcacgactattcggggcttagcgctggcaccactatcgctggcacaccgatcaacgcggcctttatcggcagctgcaccaacagccgcctgtccgacctgcgccgcgccgccg

SEQ ID NO: 283691 - DNA, 380 bp, Unknown
  Bacterial polypeptide expressing nucleotide sequence isolated from the Sargasso Sea
tatgtctgaacaaggttttacacaacacacaggcattgctgcgccgcttgatcaggccaatgtcgataccgaccaaattattccaaaacagtttctaactggcgtaacacgtgctggctacggcaaacatttgtttcacgactggcgttatttggatttagaagagaaagagccaaacccagcgttcgcgctgaataagcctgagcacaaaggtgcgagtctgttgctagctcgcgaaaactttggttgtggatcaagccgagaacacgcgccgtgggcacttgccgactttggatttaaaacggttattgccaccagctttgctgatattttttacggcaactgcattaataatcagctagtgcctgtggcattatcaa

SEQ ID NO: 283692 - DNA, 952 bp, Unknown
  Bacterial polypeptide expressing nucleotide sequence isolated from the Sargasso Sea
gtaatagggccagagcaaggagcatgtttacctggtatgacgatagtttgtggtgattctcacacatctactaatggagctttaggcgcattagcatttggtattggcacctctgacgtagagcatgtgcttgcaacacagtgtttggtcttaaaaaaagataagaatatgctcgttaatataatggggcgaacaggtaagggtatttctgcaaaagatattatacttaatattattagaaaaataggaactgctggcggtactggttatgccattgagtttgctggagatgtaatccgttccctgtcgatggaaggacgtatgaccatttgtaacatgagtatcgaggctggttcacgttttggtctcattgcagtagataaaacaactatagattatgttgaaaataggccatattcaccaacaaatgatgaatgggtgaacgcagttaacatttgggaaaaacttaagagtgatagtgatgcgcactttgataaggttgtcgaaattgacgcatcaaaaattgaaccgcaagtaacatggggcacgtcacccgaaatggttgtgtcaattaacaacactattcctgatcctgccgaaactaagaattctgtaaaaagtgaaggctataaaaatgcattaagttatatgaatctaaagccgggaatgaaatttaatcagataaaaattgataaagtgtttatcggttcttgcacaaattcgcgaattgaggatttacgtgaggctgctgatattgtcaaaggaaagaaagtttccaaagacgttaagttagcaatggtagttccaggatcaggtttgattaaaagacaagctgaagatgaaggattggctaaaatttttattgattccgggtttgaatggcgagaacctggttgttcaatgtgtttagggatgaatccggatcaactacaatccggcgaaagatgcgcat

SEQ ID NO: 283693 - DNA, 676 bp, Unknown
  Bacterial polypeptide expressing nucleotide sequence isolated from the Sargasso Sea
aatgtctaaaacaatctacgataaaatttggaatgagcatcttgttcatacgcaagaagatggaacttccttattatttgtagatagacatctaattcatgaagttactagtccacaagcatttgaaggcttaagaaactcaaagagacatgtgagacaaccaaaactaaccttagctgttgctgatcataatgttcctacaacagatagatctaagggaatttctgataaagagtcaaaaatacaagtagatactttagaagctaattgtaaagaatttggaatacaattatttggcatgaaagataaaagacaaggaatagttcatataattggtcctgaacaaggttttactcaacccggaacaatcattgtttgtggagatagtcatacggcaactcacggtgcttttggagccttagcttttgggattggaacttcagaagtagagcatgtattagcaactcaaacattggttcaaaaaaaatcaaaaaattttaggattaatgttaatggagaactatcggttggagtaacttccaaagatgtaattctacaaataattgggaaaataggaaccgctggtggaactggatacgtaattgaatatgctggaaatttaatttcttcgctaagtgtagaacaaagaatgaccatatgtaacatgacaatagaa

SEQ ID NO: 283694 - DNA, 863 bp, Unknown
  Bacterial polypeptide expressing nucleotide sequence isolated from the Sargasso Sea
actgctacgcatggagcttttggggcgcttgcttttggtataggaacctctgattttgaacatgttttagcaactcaaactttaatacaaaaaaaatcaaaaaattttctcttaaaggttaatggaaaacttccagtaggagttacagcgaaagatgtaatactaaaaattataggcacaataggaactgctggagggactggttttgttatagagttttcgggtgatattattaaagatttaagtatggaagaaagaatgactatttgtaatatgacaattgaaggaggagcaagagcaggcttaatccaaccagacgagaagactttcaagtatttaaaagataaaccaatgtctccaaaaaatgagaaatggaaaaaggctctagactattggagcactttgaaatctgatgctaattgtaaatttgataaagaggttattattgatggaaaagatattgtcccacaggttacatggggaacttcaccacaggatgtagttcctgttaacagcttggtacctgatccaaataaagaaaagaacaaggataggcgtattgctatggaaagatctttagattacatgggtttaaaacctaatacgaaaataaccgatataaagattgataaagtttttattgggagttgtacgaatggaagaattcaagatttaagagaagcagctaaactactaaaagataaaaagatagcaaaccatgttcatgcaatggtagttccaggatctggattggtgaaagatcaagcagaacaagagggtttagataaaatttttaaagactctggttttgaatggagagagccgggctgctcaatgtgtcttggaatgaatgaagatcaatt

SEQ ID NO: 283695 - DNA, 584 bp, Unknown
  Bacterial polypeptide expressing nucleotide sequence isolated from the Sargasso Sea
aagtattcctgcttatctaccgattgttaatatcgatactgatatgataattcctaaacagtttcttaaaacaattaaaagaactggtcttggaaaaagtttattttttgaaatgagatatgatgaaaatgaaatagaggtaaatgatttcattttaaataaagagccttataaaaattcaaaaattttaatagcaggaaaaaactttggttgcggatcatcaagagaacacgcaccttgggctctattggattttggaataacatgcgtaattagttcaagttatgcagatatattttataataattgctttaaaaatggaattttacctataacactaagtgaggaaaaaattaaagagttatcagaatattctatacgtaaagaagagatttcaatagatttaaaggcacaaaaaatcagatacggcaataacgaaattcaatttgagattgatgatttcaaaaaaaaatgtttattagagggatatgacgacattgcactgtcactaaaacaaagttcaaaaattgaaaaatttgaaaatcatataaagacaagtaaaccctggatattcaatgattaaa

SEQ ID NO: 283696 - DNA, 628 bp, Unknown
  Bacterial polypeptide expressing nucleotide sequence isolated from the Sargasso Sea
agaatattggagcaatcttaaatctgacgaaggggttaattttgataaagaaataagtttagatggaaaggatattaaaccaatggtcacttggggaacttcacctcaagatgtagttacaatagatggaaaagttccaaatccaaaaaatgaaaccgatccagataaaaaaaactcaatcgaaagatctttaaaatatatgggtttaaattctgatgttttagttcaagaaattaaaattgataaggtttttattggtagttgcacaaatggtagaatagaagatttaagagaagctgcaaaaatactgaaagacaagaaaattgcaaatcatgttagtgcgatggttgttccaggttctgggttagttaaagaaaaagctgagcaagaaggtttagataaaatttttataaattcaggttttgagtggagagagccaggatgttcaatgtgcttagcgatgaatgctgataaattaaaaccaggagaaagatgcgcctctacttcaaatagaaactttgaaggtagacaaggcagaggtggaagaacacatttagtcagtccaggtatggcagcagcagcagcaatttctggaaatttagatgatgtaagaaagtatcaaaattaa

SEQ ID NO: 283697 - DNA, 296 bp, Unknown
  Bacterial polypeptide expressing nucleotide sequence isolated from the Sargasso Sea
catgtctacaacattatacgataaaatttggaacgatcatctagtcgatcaacaagatgatggtacttctttactttttgtagatagacatttaattcatgaagtgacaagcccccaagcttttgaaggattaagaaattctaatagaaaagttagacacccaaatttaactctagcagttgcagatcataatgttccaacaaccgacagatcaaaaggtatttcagatgaacagtcaaaaattcaagtagatactttagaggcaaattgcaaagaatttggggttcagttatttg

SEQ ID NO: 283698 - DNA, 610 bp, Unknown
  Bacterial polypeptide expressing nucleotide sequence isolated from the Sargasso Sea
atggaaaaatttaaaaatttcaaaagtatccctgcctacctacccttaatgaatattgatacggatatgattattcctaaacaatttttaaaaacaattaaaagaacaggtttaggtaaaaatttattctacgaaatgagatacgatgaaaaagaaaatttaattaaagattttgttttaaataaaaaacctttctctaactccaaaattcttttaacaggtaaaaattttggttgtggttcttctagagaacatgctccatgggcattgcttgattttggtttcagatgtattattagcccgagttttgcagatatattttacaacaactgttttaaaaatggaatcttgccaataaaaataactgaaaaaaaaattttagcaatttcagaatattcaaaaagaaaagaagcaattaatattgatttagaaaaacaagaaataaaatatggaaataatatagagaagtttgagttagataaatttaagaaaaaatgtttgttagaaggcttagatgatattagtttatcgcttaaaaaaatagaacatataaaaaaatatgaaaacagaattgaaaaagaaaaaacgtggttaagaaataatgaataaa

SEQ ID NO: 283699 - DNA, 771 bp, Unknown
  Bacterial polypeptide expressing nucleotide sequence isolated from the Sargasso Sea
gaacatgtactagctacacaatgtctgcgacaaagtaaacccaaaacaatggaagttagagtagatgggacattaccttttggggttacagctaaggatataatcttaggagtaattggacaaattggtgttgatggtgctgtagggcatgttattgaatacacaggtgaagctatccgctctttatctatggaaggtagaatgactgtatgtaatatgtccatcgaggcgggcggccgagcaggaatgattgccccagatgaaactacatatgaatatctaaaagggcgacctcactgtcctaaaggcagaaattttgataaggctatagaaaaatgggatcaatataaaagtgatcctgatgctgaatacgataaagtggtaataatcaatgctgaagatttagctccttttgttacttggggaactaatccaggaatggttgcaaaaataacagattctgtgcctaatcctgattcttttgaattagaaagccaacagttagctggacagaaagccttagaatatatgcaattaaatgcaggaaccccgataactgacataccattagacagggtttttattggatcatgtactaattctcggatcgaagatttacgagcagcagcagaagtcgttaaaggttataaagttagcgaaacagttaatgctatggtagttcctgggtcatttaaagttaaggaaaaagccgaaaaagagggattggatagaatttttaaagaatcaggatttgaatggcgtgatgccgga

SEQ ID NO: 283700 - DNA, 631 bp, Unknown
  Bacterial polypeptide expressing nucleotide sequence isolated from the Sargasso Sea
atgaaagattttattgaaggcatcgtagctccaattgatagagataatatagatactgatcagattatcccaacagaatatttaaaatctattaaaaaatttggatacgaggattatctttttgatggctggagatataaagatcagggtcgtcttggaatgaaaaaggatgaaagaaaaatcaatcatgagttcattcttaacaattcgccttatgatgaatctaaagttttgcttacaagagataattttggatgcggctcaagtagagagcatgcagtttgggctctcagagactttggtattgaagttgttatagcaagctcatttggcgatattttttataataattgtttcaaaaatggtgttttgccattaaagctcaaaaaaactgaaatcgaagaactattttcattgtctacagataatccagtaactatttcagtaaatataaaagataaagttatgctttttaaagataagctctctattgattttgatcttgatgataatttagctgaaagaatcatttatggccttgatgagatcgatattactcttaaagattcagaattaattaagaaatttgaagaacatagaaaagaaaataacccgtggattttcgaatgaa

SEQ ID NO: 283701 - DNA, 339 bp, Unknown
  Bacterial polypeptide expressing nucleotide sequence isolated from the Sargasso Sea
catggaggaatcagtgggtcgcactctggccgaaaaggtgtggcacaaccacgtcgtcaggtctgccgaaggtgaaccggatctgctgtacatcgatctgcatctggtgcacgaggtgaccagtcctcaagccttcgacggtcttcgaggtgccggccgaccggtgcgtcgtccagatctcacggtggccacggaagatcacaacattccgaccattgatgtggacaagccgattgccgatccggtgtcgcgagcgcaagtcgaagcgctgcgaacgaactgcgcagagttcggtgtcccgctgtattcgctcgggaacgtcaagcagggcattgtgca

SEQ ID NO: 283702 - DNA, 766 bp, Unknown
  Bacterial polypeptide expressing nucleotide sequence isolated from the Sargasso Sea
gagcagagaatgacaatttgtaatatgacaattgaaggaggagcgagagcaggattgatagctcctgacgaaaaaatatttcattatttagaaggtagaccaatgtcaccaaaaggtgataattgggataaagctctagaaaattggaagagtttaaaaacagatgatggcgcaaaatttgataaagaagttaatctaaaagcagaggaaattttaccaatgataacatggggaacctctccacaagatgtcattacgatcgatgaaaaagttcctaatcctcaaaatgaaaaagatgaagataaaaaaaattctttagaaagagcactaaattatatgggtttaaaacccaatatggcggcaaaggatatcaaaattgacaaggtatttattggaagttgtacgaatggaagaattgaggatttaagagaggctgcgaaaattcttaaagataaaaaaattgcatctcatgttcatgcaatggttgttcctggctctggtctagtaaaagaacaagcagagcaagaggggttagataaaatatttgttaattctggttttgagtggagagaaccaggttgttcgatgtgtcttgctatgaatgctgataaacttaaacctgaagaaagatgtgcatctacctcaaacagaaattttgagggtagacaaggtagaggtggaagaactcatttagtaagtccaggaatggcagctgcagctgcaatatctggtagtcttgatgatgtgagaaagtatcaaaattaga

SEQ ID NO: 283703 - DNA, 289 bp, Unknown
  Bacterial polypeptide expressing nucleotide sequence isolated from the Sargasso Sea
aatgtcgaaaacactatacgataagatatgggaaaaccatcttgttcacgagcagagtgatggcacatcattaatttatgttgatagacatttagttcatgaagttacaagtccgcaagcatttgagggacttagattacagaaaagaaatgtaagaagaccagaattgaccctcgcagtaccagaccacaacgttcctacaactgatagatcaaaaggtattaatgatgaagactccagaatacaagttgaaacattgagaaaaaattgtaaagactttggggtacaa

SEQ ID NO: 283704 - DNA, 600 bp, Unknown
  Bacterial polypeptide expressing nucleotide sequence isolated from the Sargasso Sea
agtttaagaccctagaaggcatagcggctccaatgcctttaattaatattgatactgatatgttaatacccaagcagtttctaaaaactataaaaagaacgggtctcggtaagaaccttttttttgaaatgcgatatgatcaaaatggaaacgaaattaaagactttattttaaacagagaacattactcaaaagcctccattatagttggaggagcgaattttggttgtggttcatcaagagaacatgcaccctgggctcttttagattttggaatcaagtgtataatatcaataagctttgctgatatattttttaacaattgctttaagaacggcatactgccaataattgtatctgaggacatgcacaaaagcctcttgctggacgcagatactgtaaaaacgtcatatatgaaaattgatcttgaaaatcaaaaaattgttcgtagcaatggagatcaattagactttgaagttgatgaatttaaaaaatattgtttgttaaatggcttagacgatattgggttaacactaaagaactccgataaaataacagacttcgaaaaagattattcagataaatttagctgggcttgaa

SEQ ID NO: 283705 - DNA, 841 bp, Unknown
  Bacterial polypeptide expressing nucleotide sequence isolated from the Sargasso Sea
cactgccggaggaagcggctatgcaattgaatttgccgggagtacctttgcttcaatgtcaatcgaagggcgaatgactgtctgcaatatggccatcgaggcaggatctagagttggtttaatgggtgttgatgataagaccattgactacattaagggccgtcaatttgctcccaaagccgctctttgggagcaagcgaaagcttattggaaaacgttggttagtgattctgatgcagcgtttgattcagaagtccgaattcacgcagataccatagcacctcaagttagttggggaacgtctcccgagatggtatccgcggtttctgataatgttcccctgatatctaaccagacaacttcagagcagaaacaaactttgcgacgggccttggactatatgggccttcaggaggggcagtccatctcatccatattgattgacagagtatttataggttcgtgcactaactctaggattgaggatatgcgtgccgctgccgcaatagcaaagggtcgtaaaaaggcagattcggtgaaacaggttttagttgtacccggttcccagatggtgaaaagtcaagccgaggcggaaggattacatgagattttcttaaatgctggcatggagtggcgtgagcccgggtgctccatgtgtctagccatgaattcagataagcttggttcaggagagcattgcgcctctacttcaaatcggaattttgagggtcgccaagggatcggtggcaggacccatcttatgagcccggccatggcagcagcagcagcagtatctggccacattacagacgtaagagaattgctctctggagtgggctaa

SEQ ID NO: 283706 - DNA, 355 bp, Unknown; identical to SEQ ID NO: 283579
  Bacterial polypeptide expressing nucleotide sequence isolated from the Sargasso Sea

SEQ ID NO: 283707 - DNA, 832 bp, Unknown
  Bacterial polypeptide expressing nucleotide sequence isolated from the Sargasso Sea
tttaatgtcacaaacaatttacgataaaatatggaatgaacatttggttcatgaacaagaagatggaacttcccttctttttgtggatagacatttaatccatgaagttacaagcccacaagctttcgaaggattaagaacatcaaaaagaaaagtcagacatccaaaattaactcttgctgtagcagatcataatgttccaacaactgatagatcaaaagggatatcagatgaggactctagaatacaagtagaaacgctcgataaaaattgtaaagaatttggaatagaattgtttggtatggatgataaaaggcaaggcattgttcatataattggacccgaacaaggatttactcaacctggaaatataattgtatgtggagatagtcatacagctacccatggagcatttggtgcattggcatttggaataggaacatctgaagtcgaacatgttttggcaacccaaactttagtacaaaagaaatctaaaaattttagaataagcgtaaacggtaaattatcaatcggggttactgcgaaagatgtaattttacaaattatcggaaaaataggaacagcaggtggaacaggatatgtaattgagtattcaggaaacttaatatctggtttaagtgttgaacaaagaatgacaatttgcaatatgaccattgaaggtggagctagagctgggttaattcagccagatgaaaaaatatttgaatatttaaaaaataaaccaatgtctccaaaaaatgaaaattgggaaaaagcagttgaatattggagcaaaaaaaaaacagactctgatgcaaaatttgacaaagaa

SEQ ID NO: 283708 - DNA, 619 bp, Unknown
  Bacterial polypeptide expressing nucleotide sequence isolated from the Sargasso Sea
ggtagaattttggaaatctcttccatctgatgagggcgcaaaatatgatgaagaaattttaattaatgctgaagatatttcaccacaaattacatggggcacaagcccacaagacgttgttgctataaatggtatagtaccaaatcctctagaagagagtaatccaaatagaaagaaggctatggaacgttctcttgaatatatgggcttagaacccaaacaagaaatacaaaaaattaaaattgacaaagtgtttattggttcttgcactaatggaagaattgaggatttaagagaagttgctaaagttgtagaaggcaaaaaagtttctgtagactcaatgatcgttcctggttcaggtctagttaaaaaacaagctgaagaagaaggtttagataaaatttttattgaagcaggatttgattggagagagccaggttgttccatgtgtttagctatgaatccagaccaactaaaaccacaagaaagatgtgcatcaacatcaaatagaaattttgaaggtagacaaggtagagaaggtagaacacatcttgttagccctgcaatagctgctgcatctgcaatcaaaggtttttttgcaacagtagaggatttataa

SEQ ID NO: 283709 - DNA, 369 bp, Unknown
  Bacterial polypeptide expressing nucleotide sequence isolated from the Sargasso Sea
aatgcccaacactctttatgataaaatttggaatgatcacttagttgatcaacaagctgatggtacagctttattatttgttgacagacatttggtccacgaggtaactagcccacaagcatttgaaggattaagaaattcaaataggaaagttagacaaccgaaattaactcttgcagttgcagatcataacgttcctacaacagataggtcaaaaggtatatcggatcaagagtccaagattcaagttgatacattagatacaaattgtaaggagtttggtatccagctgtttggaatgaatgataaaagacaaggtatagttcatataattggccccgagcaaggttttactcaaccaggtacagt

SEQ ID NO: 283710 - DNA, 693 bp, Unknown
  Bacterial polypeptide expressing nucleotide sequence isolated from the Sargasso Sea
gtaatattacaaataattggaaaaattggtacggctggcggcactggttatgtaattgaatatgctggaaacttaatttctaatttaagtgtcgaacaaagaatgacgatttgcaatatgacaattgaaggtggagcaagggctggattaatagagccagatgaaaaagtttttaattatttaaaaggtaaaccaatgtctccaaagaattcaaattgggacaaagcattagaatactggagtaaattaaagtctgatggtgatgcagtttttgacaaagaaatcagtcttgagggcaaagatattaaaccaatggtaacttggggaacttcgcctcaggatgtagtagatattgatggaagtgttcctgatcctgaaaatgagctaaacgaagacagaaaaaattctattaatagatcattaaaatatatgggtttaaagccgaaaactaaaataaaagatattagaattgataaagtttttattggaagttgcacaaatggaagaatcgaagatctaagagaagctgcgaaaatcttaaaagataaaaaaattgcttctcatgtaaatgcaatgatagttcctggttcaggattagtaaaacaacaagcagagcaagaaggtttagatgtaatatttaaaaattctggatttgaatggcgtgagccaggttgttcaatgtgtttagctatg

SEQ ID NO: 283711 - DNA, 882 bp, Unknown
  Bacterial polypeptide expressing nucleotide sequence isolated from the Sargasso Sea
aaaaaacggatgaacaatccaaataataaaacattatttgataaaatttggtctcatcatcttgtccaccaacaagaagatggtacttgtctaatttatattgatcgtcatttagttcacgaggtaacaagcccccaagcatttgagggtttgagagacaataacagaaaagtgcatcgaccagagagcacttttgctgttgccgaccataatgttcctacttccgatagatctaaaggtattgataatgaagaaagtagaatacaagtagaaacgctagaagataactgtaaagaatttggagttactttatttcctcttctagataaacgacaaggtattgttcatatagtcggtcctgaacaaggcattacacagccaggaatgactattgtatgtggagatagtcacactgccacacacggtgcttttggagcacttgcttttggaataggtacaagtgaagtagaacatgttttagctagtcaaactcttatccaacaacctgcaaaaaatatgaagatttccattaatggaaaattaaaatctggggttacagcaaaagatattattcttcatattataggtgtaattggtacagctggtggaacaggttatgttattgaatatactggcgaagcaattctttcacttagtatggaaggacgtatgacaatatgtaatatgagcatagaagctggagcaagagctggactaatagcacctgatcaaaaaacctttgattatattaaaggtagaccatatgcacctaaaggtgaagaatgggaaaaggctattgaattttggaagtcattaccttccgatgagaatgcagaatatgataaagaaataaatattaatgctgaagacattgctcctcaa

SEQ ID NO: 283712 - DNA, 646 bp, Unknown
  Bacterial polypeptide expressing nucleotide sequence isolated from the Sargasso Sea
atgcctaaaacactatacgataaaatctggaatgatcatctagttgataaacaacatgatggaacatctctgctatttgttgatcgtcaccttgttcatgaagttacaagcccccaggcatttgaaggcttaagaaatacaaatagaaaagttagacatccagaacttactttggctgttgccgatcataacgttccaacatcagacagatctaaggggatttctgatttagattcaaaaattcaagttgagaccttagagtcaaattgtaaggagtttggaattgatttatttggcatgagagacaaaagacaaggtatagttcacataattggtcctgagcagggctttacacaaccaggcacactaattgtatgtggtgatagccacacggctactcatggagcatttggttcgcttgcatttggtataggaacttctgaagttgaacacgttttagcaacgcaaacgttaatgcaaaaaaaatctaaaaattttaggattaatgttagcggtaatttatctcttggagtaacatcaaaggatgtaattcttcagattattggaaagataggaacagcaggaggaactggatatgtaattgaatatgcaggaaatcttatttcctctttaagtgtagaacaaa

SEQ ID NO: 283713 - DNA, 577 bp, Unknown
  Bacterial polypeptide expressing nucleotide sequence isolated from the Sargasso Sea
tccagcataccttccaatagttaacattgataccgatatgataattccaaaacagtttttaaaaacaattaaaagaactggtctcggaaaaggattattttttgaaatgagatatgaccaaagtggaaatacaataaataattttattttgaataatgatccatataataaatctaaaatattaattgcaggaaaaaattttggttgcggatcttcaagagaacatgctccttgggcacttttagattttggaataacatgtgtaattagttcaagctttgcagatattttttataataattgttttaaaaatggaattttaccgattactctaatcgaagaagaaataaaagaaatttcagaatattcaaacagaaaagaggaaatctcagtaaatttatttaatcaaaaaattatatttggaaataaagaaattaattttgaaattgatgaatttaaaaaaagatgcttaattgaaggtttagatgatattgctttatcattagagaaatctgaaaaaattataaattttgaaagtaaaataaaatctacaaaaccatggatttttaatgattaa

SEQ ID NO: 283714 - DNA, 327 bp, Unknown
  Bacterial polypeptide expressing nucleotide sequence isolated from the Sargasso Sea
tatcaaaaattgccgatggtaggaaagttgcagaacatgtgaatgctataatagttccaggatccggactggtgaaaaaacaagctgaaaaagagggcttagataaaattttcattcaatcaggatttgaatggagagatccaggctgctcaatgtgtcttgctatgaatgcagataagcttaagccaaaagaaaggtgcgcttctacatcgaatagaaattttgaaggcagacaaggtcgaggaggaagaactcacttaatgagtccagcaatggcagcagctgcagctatcaaaggtaaattgtcagattgtagagaattttaat

SEQ ID NO: 283715 - DNA, 262 bp, Unknown
  Bacterial polypeptide expressing nucleotide sequence isolated from the Sargasso Sea
aatggaaaaatttaaaactataaaaagtaatgcaataccgttaccgatggtgaatgttgatactgatatgatcattcctaaacagtttttaaaaaccattaaaagaactggtttaggtaaaaatcttttttatgaattaagatatgatgaaaatgataaagaaataaagtcttttgttttaaatcaagatgaatacaaagattcgcaaatcttaataacaggaaaaaactttggctgtgggtcatcaagggaacacgcgcct

SEQ ID NO: 283716 - DNA, 841 bp, Unknown
  Bacterial polypeptide expressing nucleotide sequence isolated from the Sargasso Sea
gataaaatttgggatgaccatcttgtctttcaacaagatgatggtacctcactattatatgtggatagacatttagtacatgaagtaactagcccacaagcttttgaaggtcttaggttaaataaaagaaaagtgagaaaacctaattttactttagcagtagctgatcataacgtgcccacaacagatagaacaaaaggaattcacgatcaacagtcgaaaattcaagttgatacacttagaaaaaattgtaaagaatttggagttcctttatttgacatgaatgataagagacaaggtattgtccacattattggacctgaacaaggttttactcaaccaggaacaattattgtttgtggagacagtcacactgctactcatggggcttttggtgcactagctttcgggattggaacatctgaggtagaacatgttttagctactcaaactctattacaaaaaaaatctaaaaactttttacttaaagtagatggaaaaataccattaggggtaacggctaaagatgtaatcttaaaaattataggaactattggaacagctggaggaactggatttgtaattgagtactctggagatgttattaaaaactttactatggaagagagaatgactgtttgcaatatgactattgaaggtggagctagagcaggattaatacaacctgacgagaaaaccttcaaatatttagagaacagacctttatctccaaaaaaagataattggaaaaaagctttagattattggagcaatttaaaatctgacaaagattgtaaatttgataaagaaatagttttaaatggcgaagatgttgttccac

SEQ ID NO: 283717 - DNA, 355 bp, Unknown
  Bacterial polypeptide expressing nucleotide sequence isolated from the Sargasso Sea
atggcagaaaatcgaaccttatatgacaagatttgggataatcatctcattcactctgaaaacgatacgtctctgatatatatcgataggcatttagttcacgaggtaaccagtccccaggcttttgagggattaagagaagctggaagaaaagtccatgctccaaacaaaacaattgcagttcctgatcataacgtggccaccacatcgaatcggttaaccaactttggaagcgaagaaggccgtattcaattagaaacgctagataaaaatgctcgagattttggtattcattattaccctgttgatgatattaggcaaggaatagtacatatcattgggcctgagcaaggat

SEQ ID NO: 283718 - DNA, 590 bp, Unknown
  Bacterial polypeptide expressing nucleotide sequence isolated from the Sargasso Sea
attaaagagtattccggcttatcttccaattgttaacgttgatacggatatgataattccaaaacaatttttaaaaacaataaaaagaactggcctaggtaaaaatcttttttttgaaatgagatatgatgaaaatggaaaaaaaattgatggctttatattaaataaggaaccgtttaacaaatcaaatattttaataacaggaaaaaattttggttgtggatcttcaagagaacatgcgccttgggctcttttagattttggcattacttgtgttattagtcaaagttatgcagatatattttataacaattgttttaaaaatggaattttgccaataactatttcagaagaagaaataaaagagttatctgagtattcaacaagaaaagaagagataagtataatgttggaagatcaaaagatattatttggaaacaaagaaataaaatttgaaattgatcagtttaaaaaaaaatgtttaatggaaggtttagatgatatagctctatcacttgaacaaaaaaagaaaattgaaacatttgaaattaatttaaaatcaaataaaccatggatttttaatgattaaa

SEQ ID NO: 283719 - DNA, 588 bp, Unknown
  Bacterial polypeptide expressing nucleotide sequence isolated from the Sargasso Sea
ctttaaaaggtattgcagcccccctccctatgatcaatgttgatacagatatgatcataccaaaacaatttttaaaaacaattaaacgttctggtttgggaaaaaatctttttcatgaattaagatttgatattcaaggtaacataaaaaatgattttgtcttaaattgggacccttataaaaaagcaactattcttatcgcaggtgataactttggctgtggttcaagcagagaacatgcgccttggtctttattagattttggatttaagtgtattgttgccccaagttttgctgatattttttataataattgttttaaaaatggcattcttcctattcgcttaaatcaagaaaaagtgaatatattaatgacagaagcaaaaaataaaaatcaattaaccataaatcttgatgagcaaataatcattttagaagatgaaaatgccattgagtttgatattgatccctttagaaaaaaatgtttgatagaaggccttgatgatattggtttaacacttcaaaaaaaagataaaatttctaaatatgaagaaagtattaagtcatctcatccttggataatataaa

SEQ ID NO: 283720 - DNA, 586 bp, Unknown
  Bacterial polypeptide expressing nucleotide sequence isolated from the Sargasso Sea
aatgtcaaaaaccttatacgataaaatttgggaagcgcatcttgtacatcaacaggaagacggaacgtctttgctctatgttgatagacatctagttcatgaagtaactagcccccaggcttttgagggtttaagaattaacagaagaaaagttagaaagccaaatttaacattagcagttgctgatcataatgtcccaacgtctgatcgatctaaaggaattggagaccaagagtccaaaatacaagttgatactttaagaaataattgtaaggaatttggagttccactatttgatatgaatgataaaagacaagggatagttcacattataggaccggagcaaggatttacccaacctggaactgttatagtttgtggtgatagtcataccgctacacacggagcatttggtgcacttgcttttggtattggaacctctgaagttgaacacgttttagctacacagacccttattcaaaaaaaatctaaaaattttcttttaagagttgatggaaaaatacctgtaggagttacagctaaagatgtaatattaaaaatttattggaaccataggcacagctgg

SEQ ID NO: 283721 - DNA, 484 bp, Unknown
  Bacterial polypeptide expressing nucleotide sequence isolated from the Sargasso Sea
aatggatccattcgtaacattagcaagtatcccggcaccgctaccaatgattaacgttgatacagatatgatcataccaaagcaatttcttaaaactattaagagatctggtctaggtattaatttatttcatgagttaagatatgatatgcaaggtaatataaaaaataattttgttttaaattgggatccatataaaaattcaaaaattttaataactggggctaattttggatgtggatcaagtagagagcatgcgccatggtcacttttggattttggctttaaatcaattatagctccaagttttgcagatatattttataacaattgttttaaaaatggaattttacctattaaacttgatcaaacaaaagttgatttacttatgaaagaagctgagggaaaaaatgaaataactgtaaatttagaaaagcaaacaatcatttatcaagaaaatataaatatagattttgaaatagat

SEQ ID NO: 283722 - DNA, 383 bp, Unknown
  Bacterial polypeptide expressing nucleotide sequence isolated from the Sargasso Sea
aaaaatagataaagtttttattggttcgtgtacaaatggtagaatagaggatttacgtgaagtcgctaaagttgttaaaggtaaaaaagtttctgtagattccatgattgttcccggttcaggtttggttaaaaaacaggcagagagtgaaggtttagataaaatttttattgaagctggatttgattggagagaaccaggttgctctatgtgtttagccatgaatcctgatcaactaaaaccaaaagagagatgtgcttcaacttcaaatagaaattttgaaggacggcaaggacgagaaggtagaacccatttagtaagtcctgcaattgctgcagcttctgctataaaaggttctttttcttctgtagaggatttataaa

SEQ ID NO: 283723 - DNA, 451 bp, Unknown
  Bacterial polypeptide expressing nucleotide sequence isolated from the Sargasso Sea
ggcaatatcaaaaatgattttatactaaactgggatccctataagtctgcttgtatattaattgctggagaaaactttggttgtggatcaagtcgtgaacatgcaccatggtcattattagattttggaattaaatgtattatagcaccaagttatgcggatatattttataataattgttttaaaaatggtgtactgcccattcgtttagatcaaagcaaagttgatttgttaatgaaagaagcggaagataaaaaactaatttctgtcaacttagaagaacagcttatttcaagtgaaaatatgaaatcaataaattttgaaattgatccttttagaaaaaagtgtttacttgagggattagatgatattgcattaactttaaaaaaatcagataaaattgaatcttttgaaaacaatcttcacgactctcttccgtggattgtttaaa

SEQ ID NO: 283724 - DNA, 394 bp, Unknown
  Bacterial polypeptide expressing nucleotide sequence isolated from the Sargasso Sea
atgtcacaaacaatttacgataaaatttggaatgatcatttggttcatgaacaaaaagatggaacatcccttctttatgttgatagacatttaatccatgaagttacaagcccccaagcattcgaaggactgaggacatcgaacagaaaagttagacaaccaaagttaacacttgctgttgccgatcataatgttccaacaaccgatagatcacaaggaatatcggatgaagactctcggatacaagtagaaactttagataaaaactgcaaagagtttgatattcaattatttggtatgaatgataaaagacaaggcattgttcatataattggtccagaacaaggatttactcaacctggaaatataattgtttgtggagatagccatactg

SEQ ID NO: 283725 - DNA, 445 bp, Unknown
  Bacterial polypeptide expressing nucleotide sequence isolated from the Sargasso Sea
atgtctaaaacactttacgataaaatttggaatgaacatctagttcaccaacaagaagatggaacctcattattatttgttgatagacatttaatacatgaagttacaagtccccaagcatttgaaggattaagaaattctaaaagaaaagtaagacaaccaggtcttaccttagctgttgcagatcacaatgttccaacaacagatagatcaaaaggaatttctgatgaggagtcaaaaattcaagtcgatacactagacgctaattgtaaagaatttggtattcaaatttttggaatgaatgacaaaagacaaggtattgtgcatataattggtcctgaacaaggttttactcagccgggtacaataattgtatgtggagatagtcatacagcaacgcatggagcgtttggagcattagcctttggaattggaacttcccgag

SEQ ID NO: 283726 - DNA, 598 bp, Unknown
  Bacterial polypeptide expressing nucleotide sequence isolated from the Sargasso Sea
atgtcattcaccctatacgataagctatggaatcttcatgaggtctctagaagagaagacggcacctatctcttatatatagatagacatttgattcatgaagttacatcccctcaagcatttgaaggattgaaatcagctggtcgcaagccttggagaatatcagctaatattgcaacacctgatcataatgttcccacaactgacagggacaagggaatagctggtataaatgatgaagtatcaaaacttcaagtggttacgttagatgataattgtaaagagcatgaaatactacagtttgatattcatgataaacgccagggcatagttcatgtggttggacctgaacaaggattaactttacccggcatgacaattgtttgtggagattctcacacctctactcatggggcattagcgacactttcaatgggtattggtacttccgaagtggaacatgttttagctactcaatgtttgaaaacctcaaaactaaaaaatatgagggttaacatttcaggtgagttgcaagaaggtgttactccgaaggacgttacattggcagttattggaagaattgggaccgcaggaggaa

SEQ ID NO: 283727 - DNA, 680 bp, Unknown
  Bacterial polypeptide expressing nucleotide sequence isolated from the Sargasso Sea
ttatgcatatatggagggccgagcgtacgctcctaagggctctctctgggatgaagcttacgaatactggcagacgttaccgaccgacgaagaagctgtatttgataacgaaattacgctcgacgtagaggaattagtaccgattgtcacctggggtaccaatcctggaatggcccagcctattactggagccattccctcccctgacgccgccgaaaacgaagacgagcgtcgcgagattcaaactgcactggattacatgggtcttcagccgggacaaggaatggaagaaattgaaattgagcgtgtctttataggctcatgcacaaattctcgaattgaggatctccgagctgccgccgatgtcgcagctaaagggaaggccaaggtagagtcttgggtcgtccccggctcccaatccatcaaacgccaagcggaaattgagggactcgacagagtattcacagaagccggtttccaatggcgtgagcccggctgctccctctgtacaacgctcaacggtgatttgctaaaagatgggcagcgttgcgtttccacttcgaaccggaattttaaaggccgacaaggcccgaacggcagaactcaccttgcgagcccggccatggccgcggcagcggcgatcacaggcaagctaacagacgttcgtacgcttggctaag

SEQ ID NO: 283728 - DNA, 527 bp, Unknown
  Bacterial polypeptide expressing nucleotide sequence isolated from the Sargasso Sea
tatggaacctttttcaaaaattacaagtaaaatcactccatttgacaaagcaaatgttgacacagatcaaattattccaaaacaattccttaaattaattactaaatctggatttgggaaatttcttttttatgattggagatttgatcaaaatggaaatccaaaaaatgatttcatattgaatgatcctacatatcagaattctcaaattctagtaacaaatgaaaactttggttgtggttcatcaagagaacatgcggtttgggcactcaaagattttggatttagggtgatcatagcgccttcttttgcagatattttcttcagtaattgcttcaaaaatggcgttttaccaataattttagatgtttctcaagttgaaagattacttaaagttcaagattctattgaattagatttgaattcacaaaaaattacttttggaaatgaatctatagactttgaaattgatcctcatagaaaaattagattaatggaaggattagatgatattgacctcactttga

SEQ ID NO: 283729 - DNA, 220 bp, Unknown
  Bacterial polypeptide expressing nucleotide sequence isolated from the Sargasso Sea
ttcaaagatgcaaattttgaatggcgagaatctggttgtagtatgtgtcttggaatgaaccctgacatattaaagccaggagaacgttgtgcaagtacatcaaatagaaactttgagggtcgacaaggttctggcggtcgtacacatcttgttagtcctgttatggctgccgcttctgcaattgctggacactttgttgatgtgagggaatggtgttgat

SEQ ID NO: 283730 - DNA, 577 bp, Unknown
  Bacterial polypeptide expressing nucleotide sequence isolated from the Sargasso Sea
atggaagcatttgaaacactttctggaaaagctgtgccgcttgacataataaatgtagatacagatcagattattccaaaacaatttttaaaaaaaatagatcgtgctggatttggaattcatctttttcatgattggcgttacttggatgactcaggtaccaagaaaaatctggattttgtcttgaattttcagcgttttaaaggttcagaaattttgttgactcgaaaaaatttcggttgtggatcaagccgtgagcatgctccttgggctttgtacgattacggaatcagatgcattttagctcccagttttgcagatattttttataacaattgtaggaaaaacggaattttagctgtagttttgggggaagatgaaatacaggccttatttgaagaagttgaagcaaacgaaggatgtttactgacagtagatcttcctaggcagaatgttacctctcccgaaggcaaagagttctcttttgagattgattcttttgcaaaaaactgtctgcttgaaggattagacgatatcggatggacgatgcagtttgaagataaaattcatagctaga

SEQ ID NO: 283731 - DNA, 293 bp, Unknown
  Bacterial polypeptide expressing nucleotide sequence isolated from the Sargasso Sea
tgaagtctctgccatgattgttcctgggagcggtttgatcaagcaacaagcagagcaggaaggattggatgaaatatttattgcagcaggctttgaatggcgacaaccagggtgttcaatgtgcctggcgatgaatgatgatatattgaaacctggtgagcgttgtgcttcgacaagtaatagaaactttgaaggccgtcagggtaagggaggccgtacccatctagtaagcccattgatggccgctgctgcagctgtagcggggcattttgtcgatccaaggagctactaga

SEQ ID NO: 283732 - DNA, 524 bp, Unknown
  Bacterial polypeptide expressing nucleotide sequence isolated from the Sargasso Sea
aatgtctaaaactttatacgataaaatctgggatgatcatcttgtgtatacacaagatgatggaacatctttactttatgttgacagacatttagttcatgaagttactagcccacaagcatttgaaggattgagaaactctaatagaaaagtaagacaaccaaatctgacattagctgttgcagaccacaacgttccaacatctgatagatctaaaggaatttctgatgaagagtctaagcttcaagtagaaactttagaaaaaaactgtgatgaatttggaattaagctttttggaatgaatgacaaaagacaagggatagtccatataattggacctgagcaaggtttcactcaaccaggaagtataattgtttgtggagatagtcacacagcaacacacggagcttttggatctcttgcttttggcataggaacttctgaagtagagcacgtattagctacacaaactttagttcaaaaaaaatcaaaaaactttcgtattaaagtggatggaaagtttg

SEQ ID NO: 283733 - DNA, 538 bp, Unknown
  Bacterial polypeptide expressing nucleotide sequence isolated from the Sargasso Sea
aatgaaaaaatttgtagtagaagaaggtctagtcatgcccctggatagggcgaacgtagatacagatttcataatacctaaacaatttctaaaatcgattaagcgctctggcttcggagtcaacctttttgatgaacaccgttacttggataaaggcgtgcctgatgcggacaatagcaatcggcctctgaatccggatttcgtgttgaatcaagcacgatatcaagaatgtaaaatacttttagcaaggaagaactttggctgtgggtcttcgcgagagcatgcgccatgggctctcgatgattatggatttagagtaattttagccccaagttttgcggacatatttttcaataattgctttaaaaatggacttttacccgttgtattaaaagcagaaataattgaatttctattccaagaagttgagacctctcctggtttttccttgaaagttgatttggaaagacagcttataacccctgtaactggcaacgacattccatttgaggttgatgggtttagaaagcattgtcta

SEQ ID NO: 283734 - DNA, 663 bp, Unknown
  Bacterial polypeptide expressing nucleotide sequence isolated from the Sargasso Sea
gatgataataaataatcctaaaactctttttgataaaatttgggaacatcatcttgttgatagacaagaagatggaacttgtcttatatatattgatagacaccttgttcatgaagttacaagccctcaagcatttgaaggtttgagaaataataaccgtaaagttagaaggcctcaaagtacttttgctgtagctgatcataatgtcccgacttcagatagatctaaaggtatagaaaataaagaaagtagaattcaggttgaaacactagaaaaaaattgcaaagattttgatgttacactttttccattattagatagtagacaaggtatagttcatatagttggaccagaacaaggtattactcagccaggtatgacaatagtttgtggtgatagtcatacagcaacacatggagcatttggtgccttagcttttggtatcggcacaagtgaagttgagcatgtattagctactcagaccttaattcaaaaacctgcaaagaatatgcgaatttctgttgaaggtaaattaaacttaggtgttacagcaaaagatattatccttcatatcataggaaagataggaacagctggtggaactggttatgttatagaatatggtggtaatgcaatttcctctctttctatggaaggaagaat

SEQ ID NO: 283735 - DNA, 448 bp, Unknown
  Bacterial polypeptide expressing nucleotide sequence isolated from the Sargasso Sea
caacaataaaagaaaagttagacaacctaataatacttttgctgttgctgatcataatgtaccaacttcagatcgatcaaaaggtatagaaaatctagaaagcagaattcaagttgaaacccttgaacaaaattgtaaaaattttaatattactatttttcctctattagacaaaagacaaggtattgttcatattgttggtccagaacaaggtattacgcaaccaggaatgacaattgtttgtggagatagtcatacagcaactcatggcgcatttggatccttagcatttggcataggtacaagtgaagttgagcatgtattagcaacccagacattaatacaaaagccagctaaaaacatgcttattaaaattgataacgatgtagtatctggtgtaacggcaaaagatattattttacatattataggccatattggtactgca

SEQ ID NO: 283736 - DNA, 595 bp, Unknown
  Bacterial polypeptide expressing nucleotide sequence isolated from the Sargasso Sea
aatgaatagcccaaaaacgctttttgacaaggtttgggaaaatcatatagttcacaaaggggatggtaatcagtgtttgctttacatagacagacatctagtacatgaagtaaccagtcctcaagcgtttgaaggtcttagagtgaacggaagaaatgtaagaagacccgacctaaccctaggagttgctgatcataatgttcctacgacttcaagagaaaagggaattaattctattaaagacaaaatagcaaagcttcaggttgatacattagaaaagaatttagcagaaagtaagattaaatatatccctttaacttcaaaaaatcaaggaatagtacatattatagggccagaattaggttttacacttcccggtactacagtggtttgtggagactcacatacttctactcatggagcattcggatccttggcttttggaataggaacatctgaagttgaacatgtccttgccacgcaaactttgttacaaaaaaaaccaaaaaatctaaaaattacaataaatggaagtttaaaaaaaaatgttacctctaaagatattattttaaaaataattagcgaaattggtaca

SEQ ID NO: 283737 - DNA, 424 bp, Unknown
  Bacterial polypeptide expressing nucleotide sequence isolated from the Sargasso Sea
aatgaacattattcaaaggcctcaattatagttggaggagctaatttcggttgtggttcttcgagagaacatgcgccttgggctttaaaggattttggtattaaatgcataatatcaacaagttttgcagacatattttttaataattgcttcaagaatggaatactgccgataattgtatctggagagatacaccaaagccttctaaaggacgcagaaacggaaagaacatctcatatgaaaattgatctcgaaaaccagaagattattcgtaacaatgccgaccaagtagacttcgaagttgatgaatttaagaaatattgcttattaaacggcttagacgatatcgggttaacacttaaaaatactgataaaataagcagctttgagaaaaaatattctgataaatttagctgggcttaaa

SEQ ID NO: 283738 - DNA, 386 bp, Unknown
  Bacterial polypeptide expressing nucleotide sequence isolated from the Sargasso Sea
aatgtctactaccctttacgataaaatttggaacgatcatctcgttgatcaacaagaggatggaacagctttattgtttgtcgatagacacttaattcatgaagttactagtccacaagcttttgaaggtttaagaaattcaaatagaaaagttcgtcatcctaatttaactctagctgttgctgatcataatgttccgacaacagatagaactaaaggtatatcagatgaggactccaaaatacaagttgatacattagaatcaaattgcaaggaatttggcgtacagctttttggtatggatgataaacgacaagggattgttcatattattggaccagaacaaggctttactcaaccaggacagttattgtatgcggagacag

SEQ ID NO: 283739 - DNA, 891 bp, Unknown
  Bacterial polypeptide expressing nucleotide sequence isolated from the Sargasso Sea
aaccatcttgtaaatcaacaagaggatggtacatcattactttatgttgatagacatttagttcatgaggtaactagcccacaagcatttgaaggtttacgaaattcaagcagaatagttaggcaacccagtttaactttagctgttgctgaccataatgtacccacaacagacagaactaaaggtatagccgatgaagactctagaatacaagtagaaacactagaaaaaaattgtaaagagtttggaattaaattatttggcatgaatgataaaagacaaggaattgttcatattataggacctgaacaaggattcactcaacctggcacagttattgtttgtggtgatagtcatacagcaacacacggagcatttggagctcttgcttttggaatcggaacttccgaagtagaacatgttttagcaacccaaactttggttcaaaaaaaatcgaaaaatttaagaataaatgtaaatggaaaattaccaatcggagtaacatcaaaagatgtaattttacaaataataggaaaaataggaacggcaggtggaactggttatgtgatagaatactctggtgacttagtatcatctttaagtgtagagcaaagaatgactatatgcaatatgacaatagaaggtggagcaagggcaggattaatcaagccagatgaaaagatttttaaatatttaaaaggaagaccactatcaccaaaaaatgagaattgggataaagctctaaactattggaataagctatactcagataatgaggcgatttttgataaagaagtaacgctagatggcaaagacatcaaacccatggttacatgggggacatctcctcaagatgtggtgccaatcgacggaaaggttccaaatcctaaa

SEQ ID NO: 283740 - DNA, 517 bp, Unknown
  Bacterial polypeptide expressing nucleotide sequence isolated from the Sargasso Sea
tatgagtactccaaagacattatacgataaaatatggaatgatcatttagtgtcagaaaatgaagatggaacatcaatcatttatattgacagacatcttgttcatgaagttacaagtccccaagcatttgaagggctaaaaattgcaaacagaccagttagaaaacctaattttacattagccactgctgatcacaatattcctacaacaaatagagatgagggaatatcagatccagagtctaagttacaggtagatactcttgaagagaattgtaaggattacggaattacttttctttctatgtctgataaaagacagggcatagtccatattatcggaccggagcaaggattcacacaaccaggaatgactatcgtttgtggtgatagccatacttcaacacacggtgcgttcggtgctcttgcatggggaattggaacttctgaagtagaacatgttcttgcaactcaaacattggtacaaactaaagctaagaatatgcaaattaatata

SEQ ID NO: 283741 - DNA, 526 bp, Unknown
  Bacterial polypeptide expressing nucleotide sequence isolated from the Sargasso Sea
aatggaaaaatttttaaccctaaagggcatagctgctcctttacctatgatcaatgtagatactgacatgattattccaaaacaatttttaaaaacaataaaacgttctggtttgggcaaaaacctgtttcatgaattacgttatgacttacaaggtaatattaaaaatgattttgtattaaattgggacccatataaatcagcaaaaatattaataacaggagcaaattttggttgtggctctagtcgcgaacatgcaccctggtctttattagattttggttttaagtgtataattgcacctagctttgcagatattttctataataattgttttaaaaatggaatcttaccaataaaattagaacaaacaataattgatactttgttaattgaagctgaaaacaaaaatacacttactgttaatttagaagatcaaaaaattgttcttaataataacgaggaatataattttgatatagatgtatttagaaagaaatgttctaatagaaggattagacgacat

SEQ ID NO: 283742 - DNA, 314 bp, Unknown
  Bacterial polypeptide expressing nucleotide sequence isolated from the Sargasso Sea
agttgtaaaaggaaaaaaagtatccattgacgcaatgattgttccaggttcaggacttgttaaaaaccaagctgaagaagaaggtttagataaaatttttattgaagctggttttgattggagagagcctggttgttctatgtgtttagcaatgaatccagatcaattgaaaccaaaagaaagatgtgcttcaacatctaatagaaactttgaaggaaggcaggggcgagaaggtagaactcatttagtcagtcctgctgttgcagcagcttcagctataaaaggattttttacaattgcagaggaattgtaaa

SEQ ID NO: 283743 - DNA, 412 bp, Unknown
  Bacterial polypeptide expressing nucleotide sequence isolated from the Sargasso Sea
atgcctagaactttatacgacaaaatttggaatgaacatttagttcatcagcaagatgatggtacctctttattatttgtggatagacatttaatacacgaggtaacaagcccacaagcattcgaagggcttagaaattcaaaaagaaaagtgagacaaccaaaattaacacttgctgtagttgatcataatattcctacaactgataggtctaaaggaattgatgatatcgactctaaaattcaggtagaaacattagaaaaaaattgtaaagaatttggtatcaaactatttggaatggacgataaaagacaaggtattgttcatatagtagggcccgaacaaggtttcacgcaaccaggcacagtaattgtctgtggcgatagccacactgctactcatggtgcatttg

SEQ ID NO: 283744 - DNA, 526 bp, Unknown
  Bacterial polypeptide expressing nucleotide sequence isolated from the Sargasso Sea
acatcacctcaagacactatttctattgagggctatgttccagacccacaaaaagaaaaaaataacgaaaaaaaactctcaatgatacgttctcttgaatatatgggacttaaaccaaatacaaaaatcaccgacataaaagtagatagaatttttattggaagttgtactaatggacgtattgaagatttaagagatgcagctaaaattttgaaaaataaaacgatagctaaacatataaatgctatggttgttccgggatcaggtttagtcaaaaagcaagccgaacaagagggaattgataaaatatttataaattctggttttgaatggagagaaccagggtgctcaatgtgtttagcaatgaacgctgacaaattaaatccaaaagaaaggtgtgcatccacttcaaacagaaattttgaaggacgtcaaggtcgtggaggaagaactcatctagttagtcctgctatggctgcagcggcagctataaaaggctttttagcagatgttagaaaattttaaa

SEQ ID NO: 283745 - DNA, 406 bp, Unknown
  Bacterial polypeptide expressing nucleotide sequence isolated from the Sargasso Sea
aatggaaaaatttgaaaaattatcaagcataccagcatatctacctatgataaatgtagacactgatatgataattcctaaacaatttttaaaaactataaagaggactggacttggaaagaatttattttttgaaatgagatataatgatgatggaaacaaaattcaaaattttattttaaacaaaaaaccttatgataagtcgaaaattttaattgctggaaaaaattttggatgtggttcttcgagagaacatgctccatgggcgttactagattttggaattaaatgtgtaataagctcaagtttcgctgatatattttataataattgtttcaaaaatggtatgttgccaataattttagatgaagaaaaaattcaaatgttggcaaaatctgcagatcaa

SEQ ID NO: 283746 - DNA, 729 bp, Unknown
  Bacterial polypeptide expressing nucleotide sequence isolated from the Sargasso Sea
aatgtcaaaaactttatacgataaaatctgggaagaacatttagtacatcagcaagaagatggcacatctttgttatttgtcgatagacatttaatacatgaggttactagtccccaagcttttgaaggtttaagaaattctaataggaaagttagaaatcccgaattaacacttgcagttgcagatcataatgttccaactacaaatagatctaaaggtattgcagatgaggagtctaaaatccaagttgatacactaggtaggaattgtaaggagtttggaattaaactttttggaatgtctgacaaaagacagggcatagtccatattattggaccagagcaaggatttacacagcctgggaacataattgtttgtggagatagtcatacagcaactcatggagcttttggcgcattagcttttggaataggtacttcagaagttgagcatgtattggcaacccaaacgttggttcaaaaaaaatcaaaaaatttaagaattagcgtaaatggtaaattaccaatcggagtaacctctaaagatgtaattttacaaataataggaaaaattggaactgctggcggtacaggttatgtcattgaatatgctggagatgttatctcatcattgacagtggaaaatagaatgacaatttgcaacatgacaatcgaaggcggagcaagagcaggattgatagctcctgacgaaaagatatttagatattt

SEQ ID NO: 283747 - DNA, 606 bp, Unknown
  Bacterial polypeptide expressing nucleotide sequence isolated from the Sargasso Sea
ggtaaacttcctgtaggagttactgctaaggatgtaatactgaaaattattggaactataggtacagctggaggaacaggttttgttatagagtttgcaggaaatgttattaaaaatttaagcatggaggaaagaatgacagtttgtaatatgactattgaaggtggagcaagagcaggtttaattgaacctgatgaaaaaacttttcaatacttagaaaagaaacctatgtctccaaaaaaagataaatggaataaagctatagattattggagtaaacttaaatctgataatggaagcaaatttgataaagaagttacaataaatggaaatgaagttgtacctcaggtcacgtggggaacttctccacaagatgtagttccagtaaatggttcagttccagatccgaataaagaaaaagacaaggacagacaagaatctatgaaaagatctttagagtatatgggtttaaaggctaatacaaaaataactgatataaaaattgataaggtttttattggaagttgtacaaatggaagaatacaagatctaagagaggctgctaaacttcttaaagacaagaagattgcgaaacatgtaaatgca

SEQ ID NO: 283748 - DNA, 790 bp, Unknown
  Bacterial polypeptide expressing nucleotide sequence isolated from the Sargasso Sea
cgcttgcggagattctcatacttcaactcatggagcttttgggtcaattgcttttgggataggtacaagtcaagtaagagacgttcttgctacccaaaccatagccatgaacaaattgaaagtaaggcagatttggtgtgataataaattatctaagggtgtttatgctaaggatttagtacttcatatcattaatgaacttggtgtaaaagcaggagtaggtttcgcatatgaattcgcaggacctgcgatagatgaattatcaatggaagaaaggatgacgatatgcaatatgtctattgaaggaggagcaagatgcggttacatcaaccctgatgaaaagacatttagttatattaaagataaattatgtgcacctaaaaatgagcattgggataaagcactagcatggtggaaatcattaaaaagcaatgaaaatgctatttatgacgatttaattaaaatagatgcttcaaaaatagaaccaaccgttacatgggggattactcccggccaaagtataggcattaatcaaaaaattcctcttttagatgaattgtccccgaatgacaaattagtttctgaagaggcttatgaatatatgagtttcaaacaagggcaatatatcaaagatactccagttgatgtttgtttcataggtagctgcacaaatggaagaatcagtgacttgagaattgcagctaaagtattaaaagacaaaaaagtatctaagaatgtaaaagcatttgtagtccctggctcagaaagagttgccaatgaagcaaaacaa

SEQ ID NO: 283749 - DNA, 475 bp, Unknown
  Bacterial polypeptide expressing nucleotide sequence isolated from the Sargasso Sea
aggtgatgatcacagtcaaagaaaaaaaaatcccgatttttttttatatcaaaaaaaaaataagaacgctaaaattttagttgtaggtgataattttggttgcggatcatcaagagagcatgcagtttgggctttgatggattatgggtttgaagttgtaatctcaacgagctttgcagatattttttataataattgctttaaaaacggacttttgccaatttttgttgataaagaagatatacaaaatattataacaaatattgaaaaaaacaataatgagtttatagtaaatttgaaaaaccaatcaattatttgtgatgatttcaaaatcatttttgaaattgatagcagacgaaaagaagttcttttagaaggaatcgatgatatatcagaaactttaaagttaagcgataaaataaaagaatatgaaaacaaaaaatctctaaaaactccgtggttatttaatgattaa

SEQ ID NO: 283750 - DNA, 421 bp, Unknown
  Bacterial polypeptide expressing nucleotide sequence isolated from the Sargasso Sea
aactccatttaacaactctaagatcttaattgctggaacaaactttggctgcggatcttcacgagaacatgcgccatgggcattacttgattttggaataacttgcgttatcagttccagttatgcagatattttctttaataattgttttaaaaatggaattttaccaatcgtacttccagaggctaaaataaaagaactttctgaatattcaaaaagaaaagaagagattattgttaatcttgagaaacaaaaaattaattttggaaatagtgaaattgactttgaagtagatcaatttaaaaaaaagtgcttaattgaagggttggatgatattgctctttcattagaaaagaatccaaaaattactgaatttgaaaaaaaactatcatcagataagccatggatatttaatgattaa

SEQ ID NO: 283751 - DNA, 559 bp, Unknown
  Bacterial polypeptide expressing nucleotide sequence isolated from the Sargasso Sea
catgattaatgttgatactgacatgattataccaaagcaatttttgaaaactatcaagaggtcaggtttaggaaaaaatttatttcacgaattgagatatgatatacaaggtaacataaagaataattttgttttaaactgggatccgtataaaacctcaacaatcttaattgctggtgcaaactttggatgtgggtcaagtagagaacatgcaccttggtcacttttagattttggttttcgatcaataattgcgcctagttttgctgatatattttacaacaattgttttaaaaatgggattttaccaattaaacttgatcaagaaaaagttgatctactaatggaagaagcggaagaaaaaaaagaaatatcagttaatttagaaaaacaaatcatagtttatcaaaataaaaaaaatatagactttgaaattgatgaatttcgaaaaaaatgtctcattgagggcttagacgatattggacttactttgcaaaagaataataaaatagatattcacgaagaaaaaattcacagtatacaaccgtggatagtctaa

SEQ ID NO: 283752 - DNA, 445 bp, Unknown
  Bacterial polypeptide expressing nucleotide sequence isolated from the Sargasso Sea
aatgaaaagatccctcgagtacatgggtcttaaagcgaacactaaaatttcagatattaaaatagataaaatttttataggtagttgcacaaatggaagaattgaagatctaagagtagcagcagaacttttgaaaggcaaaaaaattgctaacaatgtaagtgcgatggttgttcctggatcaggactagttaaggaacaagcagaaaaagagggacttgatagaatttttaaagaggctggatttgaatggagagagcctggttgttctatgtgcttaggaatgaatccagaccaattgaagccaagggagagatgcgcctcaacatctaacaggaattttgagggtagacaaggaagaggaggcagaactcatttagttagccctggaatggctattgctgctgcaattaatggtcatttagcagatgtgagagagatataa

SEQ ID NO: 283753 - DNA, 383 bp, Unknown
  Bacterial polypeptide expressing nucleotide sequence isolated from the Sargasso Sea
aatggaaaaattttctaatttaaaatcgataccatcttatttatcacttcagaacattgatactgatatgattattccgaagcaattcttaaaaactattaaaaggacaggattaggtaaaagcttattctatgaaatgagatatgatgaaaatggaaaaataaacaatgattttattttaaataataaaccttataacaaatcaaggatattattagcgggaaaaaatttcggatgcggatcatcacgagaacacgctccttgggctttgttagattttggtatcaagtgtgtgattagctctagctttgcggacattttttataataattgtttcaaaaatggaattttaccaattaaaattgatgataaaatagttttag

SEQ ID NO: 283754 - DNA, 439 bp, Unknown
  Bacterial polypeptide expressing nucleotide sequence isolated from the Sargasso Sea
atgaaatctaatagcgatggattaattattaatggaatcgttagttatatcgatagagataatatagatacagatcaaataatcccaacagaatatttaaaatcaataaagaagtttggttatgaagattatttatttgatggttggagatataaagacgatggaaagctaggagttaaaaaagaagaacgagatataaataaagatttcattctcaataacaaaccatttagtgagtctaaaattcttctaacaagagacaactttggatgtggttcttctagagagcatgctgtatgggccttaagagactttggcatcaaagcggttatagcatcctcatttggagatattttttacaataattgttttaagaatggagtcctgccaatctatttagaaaaaaatcaaattgaaaaactttttggtttagtaaaaa

SEQ ID NO: 283755 - DNA, 604 bp, Unknown
  Bacterial polypeptide expressing nucleotide sequence isolated from the Sargasso Sea
ccttccgatgagggttcagtctttgacgaaacggtgagattgacggccgatgaggtatttccccaggtgacctggggaaccaatcccggaatggtgaccgacattaacgggaaggttcctgatccctccgatatcaatgatccggccgaaaaagagtccatccagcgtgctttggaatacatgggacttgaagccaatgtgcccgtgaaggatatccagatcgaccgggttttcatcggttcctgtacgaattcaaggatcgaggacctgagggccgtggcaggttttgtcgaggggaaaaaggtcagcggaacggtttctgcgatgatcgtcccaggaagtggattggtcaagcaacaggctgaatccgagggattgaacaccatcttcgaaaatgcggggttcgagtggcgtgaaccgggatgctcgatgtgcctggcaatgaacgatgatgtgctgaaacctggagaacgctgtgcctccaccagcaaccgtaatttcgagggacgtcagggtaaaggcagccggacccatctcgtcagtccgatcatggctgcagccgccgcgatttcaggaaattttgctgaccctagaaccctctaga

SEQ ID NO: 283756 - DNA, 314 bp, Unknown
  Bacterial polypeptide expressing nucleotide sequence isolated from the Sargasso Sea
aatggaagctttcacccaacttgaagccttaacggcggtcatggaccgcatcaacgtcgataccgaccagatcattccgaaacagtttctcaaaaaaatcgaacgaaccggttttggcaaacaccttttccacgactggcgttatctcaacgacgaaggaaccgaacccaacccggactttatcctcaacgagtcgcgctatcatggagcagaaattctgttggcacgtgacaactttggctgtggatccagccgtgaacatgcgccatgggccttgttggactatgggtttcgctgcatcattggtccaagtt

SEQ ID NO: 283757 - DNA, 293 bp, Unknown
  Bacterial polypeptide expressing nucleotide sequence isolated from the Sargasso Sea
aatgcaaaaatttaataaattaaaaagtatcccagcttatttaccaattgtaaatattgatacagatatgataattccaaaacagtttttaaaaactatcaaaagaaccggtcttggaaaaaatttgttttttgaaatgagatatgatgatcaaggcaaagaaataaatgattttgtgttaaacaaagatccatttaatcaatctaaaattttaattgctggaaaaaactttggatgtggttcatcaagagaacatgctccttgggctttattagattttggaattacttgtg

SEQ ID NO: 283758 - DNA, 905 bp, Unknown
  Bacterial polypeptide expressing nucleotide sequence isolated from the Sargasso Sea
agatcacaatgttccaactacagacagatctaaagggattgatgatgaagagtctagaattcaagtagatacattaaggaaaaattgtaaagaatttggagtagagctatttgatgttggagataaaagacaaggaatagttcatataattggccctgagcaaggttttactcagccaggtacagtcatagtatgtggtgatagccatactgctactcatggcgcatttggagctttagcttttggaataggtacatcagaagtagaacatgtactagcgacacaaacactaattcaaaagaaatcaaaaaatttaagaataaatgttaatggggtattacctaaaggcgttaccgcaaaagatgttattttaaaaattattggaacaataggtaccgctggcggtactggctatgtaatagaatttgctggagacataataaaaaatttaagtatggaagaaaggatgacagtttgtaatatgaccattgaagctggagccagagcaggtttaattgctcctgatgaaaaaacttttgaatatttaaaaggcaaaacaatgtctccaattggccaaaattggaataaagctctaaaattttggaaatctttatactcagataaagattgcaaatttgataaagaaattaacattgatggaaaagaaattgagccattagtaacgtggggtacttctcctcaagatgtttcacctgtgacaggcgtagttcctgatccagatcaagaaaccaatgaggatagaaaaatggcgatgaaaagatctttagaatatatgggattaaaagcaaatactaaaatatctgatataaaaatagacaaaatatttattggtagttgcacaaatggacgaatagaagatctaagattagctgcagatctataaa

SEQ ID NO: 283759 - DNA, 604 bp, Unknown
  Bacterial polypeptide expressing nucleotide sequence isolated from the Sargasso Sea
aatggatccgtttataactttaaatagtattcctgctccattacctatgattaatgttgatacagatatgatcattccaaagcaatttcttaaaactattaagagatctgggttaggtaaaaatttatttcatgagctaagatatgatattcaaggtaatataaaaaatgactttgttttaaattgggatccatacaaaagctcaaagattttaatcgcaggtgctaattttggctgtggatcgagcagggagcatgcgccttggtcacttctagattttggcttcaaatctattatagcacctagttttgcagatatattttataataactgttttaagaatggaattttaccgattaagttagatcaatcaaaagttgatttgcttatgaaagaagcagaatataaaaatgaaataactgtagatttagataatcagattattatttatcaaaaagataaaaatatgaattttgaaatagatgagtttcgaaaaaaatgccttattgaaggattagatgatatcggtctaactcttaaaaaaaataataaaatcgatattcacgaagaaaaaattcataatatccaaccttggattatttaa

SEQ ID NO: 283760 - DNA, 810 bp, Unknown
  Bacterial polypeptide expressing nucleotide sequence isolated from the Sargasso Sea
tctacaacattatacgataaaatttggaacgatcatctagttgatcaacaagatgatggcacatctttactttttgtagatagacatttaattcatgaggtgacaagcccccaagcttttgaaggattaagaaattctaaaagaaaagttagacacccaaatttaactttagcagttgcagatcataatgttccaacaactgacagatcaaaaggtatttcagatgaagagtcaaaaattcaagtagatactttagaggcaaattgtaaagaatttggtgttcagttatttggtatggatgataagaggcaaggtatcgttcatatcataggacctgaacaaggttttactcagccaggtacagttattgtttgtggagacagtcataccgcaacgcatggagcatttggtgctttagcatttggaataggaacttcagaagttgaacatgttttagcaacccaaacactagttcagaagaaagctaaaaattttagaattaatgttaatggtgaacttcctttaggagttacttccaaagatgtaatacttcaaataattggaaaaataggtacagcaggtggaacaggatctgtcgtggaatatgctggagatttaataagatctttaagtgttgagcaaagaatgactatttgcaatatgacaattgaaggtggtgcaagagcaggattaattgcaccagatgaaaaaatttttgaatatttaaaaggaaaaccaatgtctccaaaaggtgaaaattgggataaagctttgaactattgggaaactttaaaaacagacgctgatgct

SEQ ID NO: 283761 - DNA, 730 bp, Unknown
  Bacterial polypeptide expressing nucleotide sequence isolated from the Sargasso Sea
tatgaccactcctaaaacactttatgataaaatctgggatgcacatgtggctcatgaggcagatgacggaacctgtctattatacatcgatcgccatcttgttcatgaagtgacaagcccacaggcttttgaagggttgagaatgtcaggccgtggggttcgtgcgccgaataaaacaattgccgttccagatcacaatgttccaacaactactgatagggagggaggtatagacaatgaagaaagccgtattcaagttgaagcgcttgacaaaaatgcgcgagaatttggggttcattattatcccgtatccgatatccgccaaggaattgttcacatagttgggcctgaacaaggttggacattaccgggtatgacggtcgtctgtggtgatagccatactgcaacccatggcgcttttggagcattggcacatggaattggaacatcggaagttgagcatgttttagcaactcaaactttaattcagaagaaatcaaataatatgaaagttgaaattaagggcaaactacgaccaggggttacagccaaagatatcacgctttcggtcataggagcaacggggactgctggtggcacaggttacgtaattgaatactgtggagaagctattcgcgatctttcaatggaagggagaatgactgtttgcaatatggcaattgagggaggtgctcgtgctggtttgattgcacctgatgagaaaactttg

SEQ ID NO: 283762 - DNA, 898 bp, Unknown
  Bacterial polypeptide expressing nucleotide sequence isolated from the Sargasso Sea
ttagctactcagaccttgattcaaaaacctgcaaagaatatgcgaatttctgttgaaggtaaattaaacttaggtgttacagcaaaagatattattcttcatataataggaaaaataggaacagctggtggaactggttatgttattgaatatgctggtaatgcaatttcctctctttctatggaaggaagaatgacaatctgtaatatgagtattgaagcaggtgctagagctggtttaatcgctcctgatgaaaaaacttttgaatatattaaaggtagaccgtatgctccatcagtagataattgggacaaagcggtagaattttggaaatctcttccttctgatgagggtgcaaaatatgatgaagaaattttaattaatgctgaagatatttcaccacaaatcacttggggcacaagcccacaagacgttgttgctataaatggtatagtaccaaatcctcaagaagagagtaatccaaatagaaagaaggctatggagcgttctcttgaatatatgggtttagaacccaaacaagaaatacaaaaaattaaaattgataaagtatttattggctcttgcactaatggaagaattgaggatttaagagaagttgccaaagttgtagagggaaaaaaagtttctgtagactcaatgattgttcctggttcaggtctagttaaaaaacaagctgaagaagaaggtttagataaaatttttattgaagcaggatttgattggagagagccaggttgctccatgtgtttagctatgaatccagatcaattaaaaccgcaagaaagatgtgcatcaacatcaaatagaaattttgaaggtagacaaggtagagaaggtagaacacatcttgttagtcctgcaatagctgctgcttctg

SEQ ID NO: 283763 - DNA, 262 bp, Unknown
  Bacterial polypeptide expressing nucleotide sequence isolated from the Sargasso Sea
cttgagcaaccaaggcccaaaaacactttttgataaaatctggtctgagcatcttgtcggtcaaagagaagatgggactaatcttttatatattgatcgtcatttagttcatgaagtaactagccctcaagctttcgaaggattaaaactatccaatcgtcctgttcatagaccagaggctacgatagctgttgcagaccataatgttcctactataaatagacaaaatattgaggacccacaaagtaaaattcaagtcgaa

SEQ ID NO: 283764 - DNA, 607 bp, Unknown
  Bacterial polypeptide expressing nucleotide sequence isolated from the Sargasso Sea
gatggaaaaatttaacacatttaaaggaattgcagccccttttaatattctcaacgttgatactgataaaatcattccaaaacagtttttaacaacaataaaacgaactggtttaggtaaatacgtttttgatgaaatgagatataaaaaagatggctcagaaaatcctgactttgttttaaatcaaaagccttataataatagtaacattttgattgctggtgataattttgggtgtggttcaagcagagagcatgcgccgtgggctttaaaagattttggtataaaatgtatcatatcgacttcttttgccgatattttttataataattcttttaagaatggtcttttaccaataatggtgtcaaaagatgaaagaaatgcgcttttagaagatgcaaaagacaaagaaaatcctgaaattgaaattgacttagaaaatgaagaaatcagaagacccaatggtggaaagattaaatttaaaattgatccatttaggaagaaatgcttgttagaaggattagatgatattggtttaacagaacttcatgaaagcaaaattaaattttttgaagaaagccgaagttctaaacatccttggctataa

SEQ ID NO: 283765 - DNA, 289 bp, Unknown
  Bacterial polypeptide expressing nucleotide sequence isolated from the Sargasso Sea
atgagccagatatttgcccagggactggtatgccctttagataaaaacaatgtcgatactgaccagattattccaaaacagtttttaacctcagtcagccgtgacggttttgccgaagccttgttttacgactggcgttatctggcagacggggtccctaatcctgatttcgtgttaaacgctccggagtataaaggggcttctatactgctaacgcgggcgaactttgggtgcggctccagccgtgaacatgcgccatgggctattcagcagtatggttttaatgtgg

SEQ ID NO: 283766 - DNA, 536 bp, Unknown
  Bacterial polypeptide expressing nucleotide sequence isolated from the Sargasso Sea
gcaggtgattgcagtggatcaacctgtgccagcacctgagtcatttagcgatttaattaaagctgatgctgcgcgccgtgctttaacttatatgggcattgaagcgggccagaagttaactgatctgacagtcgacgtggtgtttattggttcctgtaccaacagccggattgaagatttacgtcaggccgccgctgtagtgcaaggtaaacaagtggcctccggtgttcgtgctttgatcgtgccgggttctggccaggtcaaacgtcaggccgaagctgaaggcttagctgatatttttaaagcttctggttttgaatggcgtgaaccaggttgctcaatgtgtttaggcatgaacgatgatcgcgtagaagcaggccagcgttgtgcgtctacctcaaaccgcaactttgaaggtcgtcagggtcgtggtgcccgcacgcatttggtcagccctgccatggcagcagctgcagctattgccggtcgttttgttgatatttcgtttgttgaagtcgctggaggaacttactaat

SEQ ID NO: 283767 - DNA, 295 bp, Unknown
  Bacterial polypeptide expressing nucleotide sequence isolated from the Sargasso Sea
gatgaaaaatcctaaacctaaaactctatttgataaaatttggcatcatcaccttgttaaccaacaagaagatggaacatgccttatatatatagatcgtcatttagttcatgaagtaacaagcccacaagcatttgagggcttaagagataacaatagaaaagttcatcgtcctgaaagcacatttgccgttgctgatcataatgtcccaacatctgataggtctaaaggaattgataacgaagaaagtagaattcaagtagagacacttgaaaataattgcaaagaatttgga

SEQ ID NO: 283768 - DNA, 787 bp, Unknown
  Bacterial polypeptide expressing nucleotide sequence isolated from the Sargasso Sea
gatattattcttcatataattggagttattggtacagcaggaggaacgggctacgtatttgaatatacaggtgaagcaattcactcgttaagtatggaaggcagaatgactatttgtaacatgagcattgaagctggagccagagcaggtttaatcgctccagatgaaaaaacttttaattacattaagggtagaccatatgccccaaaaggcaaagcttgggataaagcactaactttctggaagtcactgccatcagatgaaaatgcaagttatgaaaaagaaataaatataagtgctgaagatattacccctcaaataacatggggaacaagccctcaagacgttgcacctattaatggtaaagttccaaaccctgaaactataaaagactctaatagaaggaaagcagttgagcgttcacttgaatatatgggcttagagcctaatcaagagattgaaaaaataaaaattgataaagtttttattggctcttgtacaaatgggagaattgaagatctaagagaggttgcaaaagttgttgcaggaaaaaaagtttctgttgaggcaatgatagttcctggatcaggtctggtcaaagaacaagcagagaatgaaggattagataaaatttttattgaagctggttttgattggagagagcctggatgttcaatgtgtttagctatgaaccccgatcaattaaaacctaaggaaagatgcgcatcaacttcaaatagaaattttgagggaagacaaggcagagaaggaagaacacatttagtaa

SEQ ID NO: 283769 - DNA, 625 bp, Unknown
  Bacterial polypeptide expressing nucleotide sequence isolated from the Sargasso Sea
gactggtatggttattgagtatgctggttctgtaatagaaaatcttagcatcgagcaacgtatgacaatttgcaatatgtcaatagaagcgggcgctcgtgcaggactgattgcacctgatgacaaaactattaaatatttaaaggatagacctatgtctcccaagaaaagtaactgggataaagctgttgaatattggtctaagcttaaatctgatcttgaagctcaatttgataaggaagtagaaataaagggtgacgatattagtcccatggttacttggggaacttctcctcaagacgttgttccaattacgggcattgttccagatcctgaaaaagaaaaagataatgataaaaaattatcaatgaatagatctttagattatatgggacttaaaccaaatacaaaaataacagatattaaagttgatagaatttttattggaagttgcacaaatggaagaataggagatctaagagatgtagctaatgttgtgaaaggaaaaaaggttgcgcaacatgttaatgctatgattgttccaggttctggacttgttaaaatacaagcagaagaagaaggattggataaagtgtttaaagaatcaggctttgattggagagaa

SEQ ID NO: 283770 - DNA, 374 bp, Unknown
  Bacterial polypeptide expressing nucleotide sequence isolated from the Sargasso Sea
gatgaacaatccaaataataaaacattatttgataaaatttggtctcatcatcttgtccaccaacaagaagatggtacttgtctaatttatattgatcgtcatttagttcacgaggtaacaagcccccaagcatttgagggtttgagagacaataacagaaaagtgcatcgaccagagagcacttttgctgttgccgaccataatgttcctacttccgatagatctaaaggtattgataatgaagaaagtagaatacaagtagaaacgctagaagataactgtaaagaatttggagttactttatttcctcttctagataaacgacaaggtattgttcatatagtcggtcctgaacaaggcattacacagccag

SEQ ID NO: 283771 - DNA, 435 bp, Unknown
  Bacterial polypeptide expressing nucleotide sequence isolated from the Sargasso Sea
tatgtcaaaaaccttatacgataaaatttgggatgaacatttagtacatcaacaggatgatggcacttcacttttgtatgtagatagacatctagtacacgaagttacaagtccccaagcttttgaaggcctgagattaaataaaagaaaagttagaaaacctaatttcactttagctgtagcagatcacaatgtacctaccactgatcgtacaaaaggtattaatgatcaacaatcaaaaatccaagtggatacactaagaaaaaattgtaaagaatttggagttcctttatttgatatgaacgataaaaggcaaggaatagttcatattattggaccagaacaaggttttactcaaccagggactataattgtttgtggcgatagccacacagcaactcacggggcatttggtgcacttgcttttggaatagg

SEQ ID NO: 283772 - DNA, 472 bp, Unknown
  Bacterial polypeptide expressing nucleotide sequence isolated from the Sargasso Sea
ttgagtcaagataccctatttgataaagtttgggatttacataaggtttcaactcttcctggaggatctgatcaaatatttattggtcttcatcttatccatgaagtgacaagtcctcaagcatttgaagctttaaaggataaaaacttaaaagttaaattccctgaaagaactgttgctactgttgatcatattgtgccaacagataatcagagcaggcctttcaaagataaactagctgaacagatgattgagactctggagaagaattgcttagaacataaaataagattttttaatattggcagtggtaatcaaggaatagttcatgtagtagcaccggaattagggctaactcagccaggaatgtcaatcgcttgcggagattctcatacttcaactcatggagcttttgggtcaattgcttttgggataggtacaagtcaagtaagagatgttctagctcccaaac

SEQ ID NO: 283773 - DNA, 522 bp, Unknown
  Bacterial polypeptide expressing nucleotide sequence isolated from the Sargasso Sea
aatgaagactttatacgacaaactctgggaagagcatcatgtcacccaactcgattcgggagagtcacttttatatattgatagacattatttgcatgaagtaacatctcctcaggcatttgagggactagttaagaaaaatttaaagccttggaggcttaatgccaacattgctactcctgatcataatgtacctacaacaagaggtaataattttaattctgaatcaataactgatgaaatttcaaagattcaagtagttgaattggataagaattgtaataaatttggtattaaacaatttgatattgagtcaaataaacagggtattgttcatgttataggacctgaattaggttttactattcccggaatgactattgtttgtggagattcacacacatctacacatggagctcttggttgtttagctatgggtataggaacttctgaagttgagcacgttcttgcaacccagtgcctaaaagtttctaaattaaaaaatatgaatgttagatttga

SEQ ID NO: 283774 - DNA, 912 bp, Unknown
  Bacterial polypeptide expressing nucleotide sequence isolated from the Sargasso Sea
atgttttagctagtcaaactcttattcaacaacctgcaaaaaacatgaagatttctgttaatggaaaattaaaatctggggttacagcaaaagatattattcttcatattataggtgtgattggaacagctggtggcacaggttatgttattgaatatactggcgatgttattcattcactaagtatggaaggacgtatgactgtatgtaatatgagtatagaagctggagcaagagctggactaatagcgcctgatcaaaaaacctttaattatattaaaggtagaccatatgcacctaaaggtgaagaatgggaaaaagctgttgaattttggaagtccttaccttctgatgatgatgcaaaatatgataaagaaataaatattaatgctgaagacattgctcctcaaattacttggggaactagtcctcaagatgttgtgccaattaatggaagggttcctaatcctttatctgttgaagatattaatagaaaaaaatcaattgagcgatcacttgaatatatgggtttagaaccagatcaagaaataaataaaattaaaattgataaagtttttattggatcatgtacaaacggtagaattgaggatcttagagaagttgcaagagtagttaagggaaaaaaagttagtgttgattcaatgattgttcctggatcgggtctagtgaaagaacaagcagagagtgaaggattagataaaattttcattgaagctggatttgattggagagaaccaggatgttcaatgtgtttagctatgaatccagatcaattaaaaccaagagaaagatgtgcctcaacatcaaatagaaattttgaaggaagacaaggtagagaaggaaggacacatttagttagtcccagttgttgctgctgcatctgcaattaaa

SEQ ID NO: 283775 - DNA, 724 bp, Unknown
  Bacterial polypeptide expressing nucleotide sequence isolated from the Sargasso Sea
actgctaaagatattattctccatattattggaaaaattggaactgctggtggtactggatatgttattgaatatgcaggagatgcaatttctaatctttcaatggaaggtagaatgacaatttgtaatatgagtattgaggctggagctagagctggattgatagctcctgatgataaaacatttgaatatataaaaggaagaccatatgctccttcaggggaaaattgggataaagctcttaagttttggaaatcacttccttcagatgaaggagcaaattacgataaagaaataattataaaggcagaagatatttcacctcaaattacttggggtacaagtcctcaagatgtagttgcaataaatggaaaaattcctaacccagatgaagaaaataatcttaatagaaaaaaagcaatggaacgttcacttgagtatatggggttagaacctaaacaagaaatacaaaacattaaaattgataaagtttttattggttcatgtactaatggaagaatagaagatcttcgtgaagtagcaaaagtagttaaaggtaaaaaggttactgttgactccatgattgttcctggttctggtcttgtaaaaaaacaggcagagagagagggtttagataaaatttttattgaagctggttttgattggagagagcccaggttgttctatgtgtttagctatgaatcccctgatcaaattaaaacca

SEQ ID NO: 283776 - DNA, 214 bp, Unknown
  Bacterial polypeptide expressing nucleotide sequence isolated from the Sargasso Sea
atgtctacaacattatacgataaaatttggaacgatcatctagttgatcaacaagatgacggtacatctttactttttgtagatagacatttaattcatgaggtgacaagcccccaagcttttgaaggattaagaaattctaacagaaaagttagacatgcaaatttaactttagccgttgcagatcataatgttccaacaactgacagatcaa

SEQ ID NO: 283777 - DNA, 690 bp, Unknown
  Bacterial polypeptide expressing nucleotide sequence isolated from the Sargasso Sea
aatgggaaaaacattatttgaaaaaatctgggatagacacttagttgcgtctatagatgagagtacaaatttagtatttatagatttacatcttgtacatgaagtaacatctcctcaggcgtttgacagtttgaggctagctggtagaaaagttaaacatcctgaaatgactcttgcaacggtagaccatggtgtcccaacttcaaatagactgctaggaataaaagatcctctttcaaaaattcagattgaagctttagaaaataactgtgaggaatttggagttacattatttggtattaatgatccacgtcaaggaatcgtacatgttataggaccagagcaaggaataacccaaccaggaatgacgattgtgtgtggtgatagccatacagcaactcatggagcatttggagcattagcttttggtataggaacttcagaagtagaacatgtattagctacacaaacattagcaatggaaaaacccaaaacaatgaaagttgaagtagttggagatgtatctgaaggtgtaggaccaaaagatataattttaggaataatcagaaaaattggaactggtggaggtgctggccatgttattgaatatgtaggtgatgttataaaaaaatatgagtatggaaaacagaatgactatttgcaacatgtcaatttgaggtggtgcacgtg

SEQ ID NO: 283778 - DNA, 844 bp, Unknown
  Bacterial polypeptide expressing nucleotide sequence isolated from the Sargasso Sea
agtccacaagctttcgagggtttaagaatggcgggcagaagtgttcgacatcctgataaaactctagctgtcgccgatcataatgttcctacaacagatagatctgtagaaatagaggatgaagaatcaaaaatccaaattgaggcacttaaaaataattgtgctgaatttggtattaacttcattgatatgagtgatattagacagggcattgttcacattataggtcctgaacagggttttactcttccaggctccacaattgtttgtggggatagccatacttcaactcatggagcatttggagcattagcacacggtattggaacatctgaggtagagcatgttttagcttctcagacactaatacaaaaaaaagcaaaaaattttaaagttgagatagttgggacactaaccgactctatatccgcaaaagatcttgcgctatctgtaattggagcgattggaactgcgggtggtactggctatgttattgagtacatgggtaatgcagttgaaagccttagtatggaaggtagaatgacattatgtaatcttacaatagaagctggtgctagagcagggttaattgctcctgatcaaaaaacttttgactatttaaaggatcgaccgttagctccaaaaggtgatatttgggataaagcagtcagttattggaaaactttaccaagtgatcctggagcacattatgataattcaataaaaattgatattgataacctttcaccattagtaacctggggaactagcccagaggatgtcattgatattgatggaaatataccaaaacccgaggatattgaagatgaagcaaagaagaatg

SEQ ID NO: 283779 - DNA, 701 bp, Unknown
  Bacterial polypeptide expressing nucleotide sequence isolated from the Sargasso Sea
agaccaaaaaatttttgattacttaaaaaataaacctatgtctccaaaaaaagaaaattggagcaaagcattagataattggaaaaatttaaaatcagatagcggagcaaattttgataaagaattaaatttagaagcccacgaaattatgccaatggttacatggggaacttctcctcaggatgtaattacaattgatggaaaggttcctaatccaaacgatgaaaaagatttagataaaaaaaattcaattgagagatcattaaaatatatgggtttaaaaccaaatacagccgcaaaagacattaaaattgataaagtttttattggcagttgtacaaatggaagaattgaggatttaagagaggctgcaaaaatattaaaaaataaaaaaaaagcatcccatgttgaagcaatggtggttccaggttctggcttagttaaacagcaagcagaacaagagggattagataaaatttttattaactcaggatttgaatggagagagccagggtgttcaatgtgtcttgctatgaacgctgacaaattgaaacccgaagaaagatgcgcgtctacttcaaatagaaattttgaaggaagacaaggaagaggtggaagaacacatttagtaagcccaggtatggctgcagctgccgctatttctgggagtctcgatgatgttagaaagtaccaaagttaaa

SEQ ID NO: 283780 - DNA, 334 bp, Unknown
  Bacterial polypeptide expressing nucleotide sequence isolated from the Sargasso Sea
atgtctacaacattatacgataaaatttggaacgatcatctagttgatcaacaagatgacggtacatctttactttttgtagatagacatttaattcatgaggtgacaagcccccaagcttttgaaggattaagaaattctaacagaaaagttagacacccaaatttaactttagccgttgcagatcataatgttccaacaactgacagatcaaaaggtatttcagatgaagagtcaaaaattcaagttgatacattagaggcaaattgtaaagaatttggagttcagttatttggcatggaagataaaagacaaggtatcgttcacatcatag

SEQ ID NO: 283781 - DNA, 776 bp, Unknown
  Bacterial polypeptide expressing nucleotide sequence isolated from the Sargasso Sea
agattcaagaattcaagttgatacacttaacagaaactgtgaagaatttggaattaaaatatttggcatggatgataaaagacaaggaattgttcatattatcgggccagaacaaggatttacacagcctggaacaataattgtttgtggcgatagccatactgctacacacggagcgtttggatcactagcttttggaataggtacatcagaggttgaacatgtcttagctacacaaactttagttcaaaaaaaatcaaaaaatttcagaataaatgtaaatggaagtcttccaattggagttacttcaaaagatgtgatacttcaaataattggcaaaataggtacggcaggaggaactgggtatgtaattgaatattcaggaaatttaatttcttctttgagtgttgagcagagaatgactatctgtaatatgactatagagggtggtgcaagagcaggattaattcaaccagaccaaaaaatttttaaatatttaaaaggcaagccaatgtcgccaatgggagaaaattgggagaaagcattggagtattggagcaatctaaaatcagatgatgatgcaaagtttgataaagagattagtctagagggaaaaagtataagcccaatggtcacttggggaacttctccccaagatgttgtttccattgacggcaaagttccaaatccgatgaatgagaaagatttagataaaaaaaattctattgaaagatctttaaaatatatgggtttagaacctaatacatcaattaaag

SEQ ID NO: 283782 - DNA, 646 bp, Unknown
  Bacterial polypeptide expressing nucleotide sequence isolated from the Sargasso Sea
atgagaaccgaagataatattcaaattgaaggaattatggctttcattgacagggataatattgatacagatcaaattattccaactgagtatttaaagtccataaagaaatttggttatgaagattatttgtttgatggatggaggtatttggatgaaggaaaattgggagtaccaaaaacatctcgtaaactcaataatgaatttattttgaaccaaccaatttttatgacatcaaaaatcctccttgcaagagataattttggatgcggatcttcaagagagcatgccgtttgggctcttagagattttggaattcaagttattattgcatcttcttttggagatattttttatagtaattgttttaaaaatggcttattgccaattaatctctcgaagtcagtaatagataggttatttcaactgtctgctcaagatgctcaattggtaaaagtatgtcttcaatctcgaaatatatatgtgcaaggcgaagagttttcatttaatttagaagatgacttagcagaccgtatcattaatcaatctgatgaaattgatatttctttgaaatttgctgacaagatatcatgttttgaacaagatagggtcaccaaaagaccatggattttttataatgaataaa

SEQ ID NO: 283783 - DNA, 517 bp, Unknown
  Bacterial polypeptide expressing nucleotide sequence isolated from the Sargasso Sea
gtagttacgattgatggaaaagttccaaatccaaaaaatgaatctgatccagataaaaaaaactcaatagaaagatcattaaaatatatgggtttaaattctgatattcgagttcaagatattaaaattgataaagtttttattggtagttgcacaaatggtaggattgaagatttaagggaagcagcaaaaatattgaaagataaaaaaattgcaaaacatgttaatgcgatggttgttccaggatctgggttagttaaagaaaaagctgaacaagaaggcctagataaaatttttaaaaattctggttttgaatggagagagccaggatgttccatgtgtttggcaatgaatgccgacaaattaaagccaggtgaaagatgtgcctctacttcaaatagaaattttgaaggtagacaaggaagaggtggtagaacacatttagttagcccaggaatggcagccgcagctgcaatttctggaaatttagatgatgtaagaaagtatcaaaattaat

SEQ ID NO: 283784 - DNA, 374 bp, Unknown
  Bacterial polypeptide expressing nucleotide sequence isolated from the Sargasso Sea
aatgcaaaaatttaacaaactaacaagtatacccgcgtatctaccaatagttaatattgatacagatatgataattcctaaacaatttttaaagacaataaaaagaaccggtcttggaaaaaatttgttttttgaaatgcgttatgatgatgaaggaaaagaaataaaagaatttgttttaaaccaaaaaccatttaatcagtctaaaattttaattgcaggaaaaaacttcggatgtggctcttctagagagcatgcaccttgggcgttacttgattttggtattacgtgtgtaataagtccaagttatgccgacattttttataataattgttttaaaaatggaatactgccaattaaaatcgatgaagaaa

SEQ ID NO: 283785 - DNA, 517 bp, Unknown
  Bacterial polypeptide expressing nucleotide sequence isolated from the Sargasso Sea
ataccaaaacaattcttgaaattaattacaaaatcaggatttggaaaatttctcttctatgattggagatttcatcatgatggacaaccaaaaagtgatttcgtattaaatgatttaagatatcatgattctcaaattttggttacaaatgaaaactttggatgtggttcttctagagaacatgcagtttgggcattgaaagactttggatttaatgtaataattgctccttcatttgcagatattttttatagtaattgcttcaaaaatggagttttacctataacattagattccaatcaggttaaaaaattaatccaaatagaaaataaagtacaattagatttaattactcaaacaatcacatttggagacgaatcgataaattttgaaattgatcctcacaaaaaaaatcgattgttagaaggtttggatgatattgatcttacttttaaagaaaacacaaaaattgagaattttgaaaaaaattctaaactagtttcgattttccaataat

SEQ ID NO: 283786 - DNA, 949 bp, Unknown
  Bacterial polypeptide expressing nucleotide sequence isolated from the Sargasso Sea
gaaggaccagatgttttgtttattgacaggcatatggttcacgaggttacaagtcctgttgcttttttaggtttagaaaaaagaggtttaaaagtcttgtatccaaataaaacattggcaacagcagaccacaatacacctacaattaatcaacatcttcctgttaaagatcccctttctgcaaatcaattagataccttagaaaaaaactcaaaaaaatatggagtctcatattgggggttaggtcacaaaaaaaatggaatagtacatgtcattggtccagaatatggaattacattgccaggtgcaactattgtttgcggggactctcacacttcaactcatggtgcttttggagccattgcatttggaattggcacatctgaagtcgagatggttctctcaactcaatgtattatgcaggttaaaccgaaaaaaatgaggattaatgtaaacggagaattaggtgaagctgtaaccccaaaggacgttgctctttatataatttcaaaactctctacatctggtgcaactggattttttgtagaatacgcagggacagttttttcagaaatgagtatggaaggaagaatgacagtatgtaatttaagtatcgaaatgggagctagaggtggtatgatcgctcctgacgaaaagacttttagctacataaaaaatagggagtttacaccaaaaaataaagattggacgaaagcaatggaatattggaaaaccttacattctgatccaaagtcaaaatttgataaggaattttattttaatgggaatgaaattgaacccatgataacgtatggaactaaccctggaatgggtatttcaattactaaaggtataccatcaggaaaaaatttaggtaaggcaaaaattacatataaaaaatcacttgattatatgggttatagtgaaggggaagaaatgatggaaaaaa

SEQ ID NO: 283787 - DNA, 550 bp, Unknown
  Bacterial polypeptide expressing nucleotide sequence isolated from the Sargasso Sea
aatgcaaaaatttaatcaattaaaaagtattccagcgtatttaccaatagtaaatgtcgatacagatatgatcattccaaaacaatttttaaagacaataaaaagaactggtcttggaaaaaatttattttttgaaatgagatatgatgatgaaggaaacgagataaaagattttattttaaaccagaaaccatttaataattctaaaattttaattgcaggaaaaaattttgggtgtggatcctcaagagaacatgcgccttgggcgttacttgattttggaattacatgtgtaattagttcaagttatgcagatatcttttataataactgttttaaaaatggaatattaccaattaaaattgatgaggaaaaaattaaacaaatttctgagtattctttaagaaaagaagaaattgaaatagatttaaatgagcaaaaaattatttttggtaacaacgaaattaagtttgatttagatcaattcaaaaaaaaatgtttaattgagggattagatgatattgcattatccttagaaaaatctgaaaaa

SEQ ID NO: 283788 - DNA, 220 bp, Unknown
  Bacterial polypeptide expressing nucleotide sequence isolated from the Sargasso Sea
ataaattcaggttttgagtggagagaacctggatgttctatgtgtttagcaatgaatgctgacaagttaaaaccaggtgaaaggtgtgcctctacttcaaatagaaattttgaaggtagacaaggtagaggtggaagaacacatttggtgagtcctggaatggcagccgcagctgcaatttctggaaatttagatgatgtaagaaagtatcaaaattaat

SEQ ID NO: 283789 - DNA, 511 bp, Unknown
  Bacterial polypeptide expressing nucleotide sequence isolated from the Sargasso Sea
aatgcaaaaatttaataaattaagaagtatccctgcctatttgccaatagttaatattgatacagatatgttgatacctaaacaatttctaaagacaattaaaaggactggacttggaaaaaatctattctttgaaatgagatatgatgataaaggaaatctaattaaagattttattttaaatcaagagccattcgttaaatctaaaatattaattgctggtaaaaactttggttgcgggtcatctcgtgaacatgctccgtgggctttactagattttggaattacatgtgtaataagttcaagttatgctgacattttttataataattgttttaaaaatggaattttaccaatcatattagatgatgaaaaaattaaagaattgtcacagtattcaaatagaaaagaacaaatagaaatagatctagaaaaccagaaaataatatttgggtataatgaaatcaagtttgaaatagatccttttaaaaaaaaatgcttattagagggg

SEQ ID NO: 283790 - DNA, 385 bp, Unknown
  Bacterial polypeptide expressing nucleotide sequence isolated from the Sargasso Sea
atggataagtttcattctttaaaaggtatcgcagctcctttaccaattgttaatatcgatactgatatgatcatcccaaagcaatttctcaaaacaattaaaagaactggtctcggtgtaagtttgttttatgagatgagatatgataacgatggaaacctcattaaagattttgttttgaatacatctccttttgatcagtcaaaaattttggttgctggtgataattttggttgtgggtcaagtagagagcacgccccttggtctcttaaagattttggaataaggtgcgtaatttcaacaagttttgcagatattttttataataattgctttcaaaatggaattttaccgattgttgtcagtcctgaaaaccttgatcagt

SEQ ID NO: 283791 - DNA, 320 bp, Unknown
  Bacterial polypeptide expressing nucleotide sequence isolated from the Sargasso Sea
tgttaaggacaaaaagattgcttcacacgttcaagcaatgatagtaccaggatcaggcttagttaaaaaacaagcagaagaagaaggaattgatataattttaaaagatgctggctttgaatggagagaggctggatgttcaatgtgccttggtatgaatcccgatcaattaaaaccaggtgaaaggtgcgcatcaacttctaatagaaattttgaaggtagacaaggccgaggtggtagaactcatttaatgagtcctgagctcgctgcggcatctgctattactggaaacatttcagatataagagattttacataaa

SEQ ID NO: 283792 - DNA, 844 bp, Unknown
  Bacterial polypeptide expressing nucleotide sequence isolated from the Sargasso Sea
gatactccttgaagagaattgtaaggagcacggaattacttttctctctatgtctgataaaaggcagggcatagtccatattatcggaccggagcaaggtttcacacaaccaggaatgactatcgtttgcggtgatagccatacttcaacacacggtgctttcggtgctcttgcatggggaattggaacttctgaagtagaacatgttcttgcaactcaaacattggtacaaactaaagctaagaatatgcaaattaatatacaaggtgaactgccactgggtgtcacagcaaaagatattgttttaaagattattcaaacaattggaactgctggaggcactgggtatgttattgaatacacaggtgatgcgatcaaatccctaacaatggagggaagaatgactgtctgtaacatgtcaattgaagcaggagcaagagctggtttaatcagtcctgatgaaaaaacaattgaatacttaaagggtagaccattttctccagcagaaaatgaatatcgatcagcatcagattattggttatcgctagcttctgatgaaggtgctgcttatgacaaaacagtaaatattgatgcaagcgacatcattccacaagtcacttggggcacaagtcctgaggatgtagtttcgattgatggattggttccaaaccctgaggatgaaagtgatgagacaaagaaaaaatcaatgattagagctttggaatacatgggtcttgttccgaacacaccacttaaagaggttaaagtagataaggtattcattggttcatgtactaatggacggattgaagacctgagagctgcatcaaaaattgcaaaagat

SEQ ID NO: 283793 - DNA, 671 bp, Unknown
  Bacterial polypeptide expressing nucleotide sequence isolated from the Sargasso Sea
aaaaccaatgtcaccaaaaggtgaaaaatggcacaaagctttagattattggaaaagtttaaaatcagatgaaaatgcaaaatttgaaaaagaaataagtttacaagcaaatgaaattttacctatgattacttggggaacatcaccacaggatgtaattactattgatggtaaagttccaaatccaaacacagaaaaagatgaagataaaaaaaattctttagaaagagctcttaaatatatgggtttaaaaccagatatggcagcgaaagatattaaaatagataaagttttcattggcagttgtacgaatggaagaatcgaggatttaagagaagctgcaaaaattttaaaagataaaaaaatagcctcacatgttcatgcgatggtagtcccaggatctggattagttaaagaacaagcagaacaagaaggtttagataagatatttgttagctcagggtttgaatggagagaaccaggctgttcaatgtgtttagccatgaatgcagataaactaaaaccagaggaaagatgtgcctctacgtctaatagaaattttgaaggaaggcaaggtagaggtggcagaactcatttggtgagtccaggaatggccgctgccgctgcgatttcaggaaacttagatgatgtaaggaagtatcaaaattaat

SEQ ID NO: 283794 - DNA, 445 bp, Unknown
  Bacterial polypeptide expressing nucleotide sequence isolated from the Sargasso Sea
agatctttaaaatatatgggtctaaaacctgacatggcagccacagatataaaaatagataaagtatttattggaagttgtactaatggcagaatagaagatttgagagaagcagcaaagatcttaaaagataaaaaagtatcatcgcatgttaatgctatagtagttccaggctcaggtttagttaaagaacaagcagagcaagaaggactagataaaatttttgttagctcagggtttgaatggagagaaccaggttgctctatgtgcttagcgatgaatgctgataaattaaagccagaagaaagatgtgcctctacatcaaatagaaattttgagggaagacaaggtagaggcggtagaacccatctagttagtccaggaatggctgcagcagctgcaatttcaggtaatttagatgatgtcagaaagtatcaacattaaa

SEQ ID NO: 283795 - DNA, 674 bp, Unknown
  Bacterial polypeptide expressing nucleotide sequence isolated from the Sargasso Sea
ctatactcccccaaaaaaatattttagtgatgctcaaaaatattgggagtcgttagtcagtgataccgatgctatctttgataaagaaatagatataaatgctaatgaagtattgccacaagttacttggggaacctctcctgagatgacaactaatgttaatggacaactaccagatccagatgaagaaagtgatgttaacaaaagagaatatatgaagagggcattagaatacatggatttaaagccaaaacaagaaatacaatcaattaaaatcgataaagtttttataggttcttgcacgaattcaagaatcgaagatttaagagaagcggctagagttttagagggacagaaaattaataaatcgttaaagcaagcaatagctgtcccagggtcaggacttgttaagaagcaagctgaagatgaaggcctggataaaatttttattaagtcaggtttcgaatggagagatcctgggtgttcgatgtgccttggtatgaatgatgacagtttattaccgtatgaaagatgtgcatcaacatcaaacagaaactttgaaggaagacagggcgataaaggcaggacgcatctagtaagcccttcaatggcagctgttgctgctattaaaggccactttactaatgtggtggattttgtaaatgaaaaataaa

SEQ ID NO: 283796 - DNA, 307 bp, Unknown
  Bacterial polypeptide expressing nucleotide sequence isolated from the Sargasso Sea
atgaaaaataaagtaatcaaagggcaagctattccatttactcaaagtaatattgatacggatgcaattattccaaaacaatatcttaaatcgattaagaaatccgggttcggaccttttctatttgattcattaaggtatcttgaggcgggtgatttaagcactactaataatcgtaaaattaatccagatttcatcttgaatattgatccttataaatctggaaatattatcgtggccaatgataattttggatgtggctcatctagagagcatgcagtatgggcattgaaagatttgggatgaa

SEQ ID NO: 283797 - DNA, 712 bp, Unknown
  Bacterial polypeptide expressing nucleotide sequence isolated from the Sargasso Sea
atgactcaaactatatacgataaaatatggaatgatcaccttgttcatcaacaagaagatgggacttcacttttatttgttgatagacatttaattcatgaagttactagtccacaagcatttgaaggtttaagaaattctaatagaaaagttagacaaccttctttaactttagcagtagcagatcacaatgttccaacaacggatagatcagtgcctattactgacaaagattcaaaaatacaaatcgagacactagaaaaaaactgtgcagaattcggaataaatctttttggaatgaacgataaaagacaaggaatagttcatattattggtccagaacagggatttacacaaccagggacaattattgtttgtggtgatagtcacactgctacgcacggagcatttggtgcattagcattcggaattggaacttcggaagtggaacatgtcttggcaacacagactttagttcaaaaaaaatcaaaaaattttagaataaacgttaatggatctcttcctgttggagtaacatctaaggatgtaatattacaaataatcggaaaaattggtacagctggtggaactggctatgtaattgaatatgctggaaacttaatttcgaatttaagtgtcgaacaaagaatgactatttgcaatatgacaattgaaggtggagcaagggctggacttatagaacccagatgaa

SEQ ID NO: 283798 - DNA, 265 bp, Unknown
  Bacterial polypeptide expressing nucleotide sequence isolated from the Sargasso Sea
atgcctaatactctttacgataaaatttggaatgaccacttagtacatcaacaagatgatggaacagcattattatttgttgatagacatttggttcatgaggttacaagtccacaagcttttgagggactgagaaatactcaacgaaaagtcagacacccgagattaactttagctgtagcagaccataatgtgccaacaaccgatagatcaaagggtatatcagatcatgaatctaaaattcaggtagagaccttagaggaaa

SEQ ID NO: 283799 - DNA, 763 bp, Unknown
  Bacterial polypeptide expressing nucleotide sequence isolated from the Sargasso Sea
cccacatcaaatcgctcaaaaggtattgatgatgaagaatctaggattcagatagaagcgctcgaaaaaaactgtaaggaatttggtatagagcttttcgatatgaaagataaaagacaaggaattgttcatataattggtccagagcaaggttttactcaaccgggtactgtaatagtttgcggagatagtcatactgcaacgcatggagcttttggggctcttgcttttggcataggaacctctgaagttgaacatgttctagcaactcaaactttgatacaaaaaaaatcaaaaaatcttcgtataaatgtgactggtaatttgcccacaggaattacatcaaaagatgtaattcttcaaaccattggaaaaataggaaccgctggtggaacgggcatggttattgaatatgctggatctgttatagaaaaattgaatatggaacaacgtatgacaatttgtaatatgtcgatagaagcaggtgctcgtgcaggcttaattgcaccagatgaaaaaactattcaatatttgaaaggtagaccaatgtctccacaaaaactaaattggaataaggctgtagaatattggtcgaatcttaagtcagactcagatgctacgtttgataaagaggtggaaattaaaggtggagatattaatccgatggtaacatggggaacatctccacaagacgttgtgcctgtcactggctatgttccagatccagaaaaggaaaaaaatgaagacaaaaaaaattcaatga

SEQ ID NO: 283800 - DNA, 816 bp, Unknown
  Bacterial polypeptide expressing nucleotide sequence isolated from the Sargasso Sea
gatgacaactccaagaacactttatgataagatttgggatgcccatgtggctcatgaggctgaggatggaacctgccttttatatatcgatcgccatcttgtgcacgaagtaaccagtcctcaggctttcgaaggacttagattgactgggcgaagtgtgcgtgcgccagaaaaaacaattgctgtaccagaccataatgttccaacaactatggatagagaaagcgttatagataacgaagaaagtcgtattcaagttgaagcgcttgataaaaatgcgcgagattttggagttcactactacccagtctcagatatacgccaaggtattgttcacatcgttggacctgaacaaggatggactttgcctggtatgacagttgtttgtggtgatagtcacaccgctacccatggtgcattcggggctttagcccatgggataggaacttctgaagttgaacatgttctggcaactcaaaccttaattcagaagaaatcgaaaaatatgaaggttgaaattaggggtaagttgcggcctggtgtgacagcaaaggatataacactttccgtcataggagcgacgggaactgccggtggaactgggtacgttattgaatattgtggagaagccattcgaggtctttcgatggagggcagaatgacagtttgtaatatggcgatcgaaggaggcgctcgtgcaggtttgattgctcctgacgaaaaaacttttgagtattgtaaaggccgtcctcatgctccgaagggtgctgtctgggaacaagctgtagagtattggaagtcgttgtttacagatga

SEQ ID NO: 283801 - DNA, 352 bp, Unknown
  Bacterial polypeptide expressing nucleotide sequence isolated from the Sargasso Sea
agtgacttaaggattgcagctaaagtaataaaaaacaaaaaagtatccaagaatgtcaaagcatttgtggttcccggttcagaaaaagtagccactaaagcaaaacgagagggacttgatcagatatttaaggattctggatttcaatggagagaacctggctgctcaatgtgtttagcaatgaattcagataagctaataggtaatcaacttagtgccagttctagcaatagaaatttcaagggtagacaaggatctcccagtgggagaacactgctgatgagtccagcaatggttgctgctgctgcaattaatggcaaagtcagtgacgttagagaatttattaactgat

SEQ ID NO: 283802 - DNA, 406 bp, Unknown
  Bacterial polypeptide expressing nucleotide sequence isolated from the Sargasso Sea
agatagattacaagacatatcaattgacgctgtatttatcgggtcatgtacaaatggtagaatagaagatctcagagaagtagaaaaaattgttagaggcaagagagttaaggacggcgtgcgtgccatggttgtgccaggatcagggttggtaaaaaaacaagcagaagaagaaggtatatcagaaacgcttatagaagcaggttttgactggagaatgcccggttgttcgatgtgtttggccatgaacccagatcaacttatgcctggggaaagatgtgcagctacatcaaatagaaattttgaaggtagacaaggaagaggtggaagaactcatttaatgagtcccgcaatggctgcagctgcagcaataacgggtttccttacagacgttagagatttgtaa

SEQ ID NO: 283803 - DNA, 604 bp, Unknown
  Bacterial polypeptide expressing nucleotide sequence isolated from the Sargasso Sea
aatggataagtttgtaaaaataaatggtattgccgtttctttaagaatgatcaatgttgatacagacatgattattcctaaacaatttctaaagacaattaaaagatctggattaggaaaaaatctttttcatgaattaagatatgatcttcaaggaaatataaagaatgattttattttaaattgggatccttataaatatggagtaatattaattgctggcgaaaactttggctgtggttctagtagagaacatgctccttggtctttattagattttggatttaaaagtataattgcccctagctttgctgatatattttataataattgttttaaaaatggaatattacctattcaattaagccatctagaagttgaaaatttaatgaaaaaagctgaagataagaaaaaattttctattgatttagctgctcaaataatatcagtagaagaagatgattccataaaatttgatatagatccttttagaaaaaaatgcttgttagaaggtttggatgatattggcattacattaaaaaagaaagaaaaaattgattcttatgaatcaaacttaaataattcgtatccatggataatttga

SEQ ID NO: 283804 - DNA, 739 bp, Unknown
  Bacterial polypeptide expressing nucleotide sequence isolated from the Sargasso Sea
tatttgtaatatgagtattgaagctggtgctagagctggattaatagctccacatgaaaaaacttttgaatatattaaaggtagaccatatgctccaataggaaaaaattgggataaagcagtaaagttttggaaatcacttccaactgatgaaggcgcaaagtatgatgaagaaattataattaaagctgaagatatttcaccacaaattacttggggaacaagcccacaagatgttgtttccataaacggaaaagtacccaaccctcaagaagaaagcaatcctaatagaaaaaaagctatggaacgttcacttgaatatatgggtctagaacctaaacaagaaatacaaaaaattaaaattgataaagtttttattggctcttgtactaatggaagaatagaggatttgcgagaagttgctagagttgtagaaggtaaaaaagtttctgtagactcaatgatagttcccggctcaggtctagtaaaaaaacaagctgaagaagaaggtttagataaaatttttatagaagcaggttttgattggagagagccaggctgctctatgtgtttagcaatgaatcctgatcaactaaaacctcaagaaagatgtgcatcaacatcaaacagaaattttgaaggcagacaaggtagggaaggtagaacacatcttgttagtccagcaatagctgcagcatctgctataaaaggttcttttgcaactgtagaggatttataa

SEQ ID NO: 283805 - DNA, 603 bp, Unknown
  Bacterial polypeptide expressing nucleotide sequence isolated from the Sargasso Sea
cactcccatctgatgagggtgcaaaatacgatgaagaaattataattaaagctgaagatatatcccctcaaatcacctggggaacaagtccacaagatgtcgtttcaataaacggaagagttccaaaccctcaagaagaaaataatccaaacagaaaaaaagctatggagcgttcacttgaatatatgggtctagaacctgagcaagaaattcaaaaaattaaaattgataaagtttttataggttcttgtacgaatggaagaatagaggatttacgtgaagtcgcaagagttgtagaaggaaaaaaagtttcagtagactcaatgatagttcctggttcaggtctagtaaaaaaacaagctgaacaagaaggtttagataaaatttttattgaagcaggatttgattggagagaacctggttgctctatgtgtttagcaatgaatccagatcaattaaaacctcaggaaagatgcgcctcaacatcaaatagaaattttgaaggtagacaaggtagagaaggtagaacacatcttgtgagccccgcaattgctgccgcttctgcaattaagggttcttttgcaactgtagaggatttataag

SEQ ID NO: 283806 - DNA, 604 bp, Unknown
  Bacterial polypeptide expressing nucleotide sequence isolated from the Sargasso Sea
atggaaaaattcataactttaaaaggtattgcagccccactccctatgatcaatgttgatacagatatgatcataccaaaacaatttttaaaaacaattaaacgttctggtttgggaaaaaatctttttcacgaactaagatttgacatacaaggtaacataaaaaatgattttgtcttaaattgggatccttataaaaaagcaactattcttattgcaggtgataactttggttgtggctcaagtagagaacatgcaccttggtctttattagattttggatttaagtgtattgtagctccaagctttgctgatattttttataataattgttttaaaaatggtattcttcctattcgcttagatcaaacaaaagtgaatatattaatgacagaagcaaaaaataaaaatcaattaaccataaatcttgatgaacaaaaaataattttagcagatgaaaatgttattgagtttgatattgatccttttagaaaaaaatgtttgatagaaggtctggatgatattggtttaactcttcaaaaaaaagataaaatttctaaatatgaagaaagtattaagtcctcccatccttggataatataaa

SEQ ID NO: 283807 - DNA, 874 bp, Unknown
  Bacterial polypeptide expressing nucleotide sequence isolated from the Sargasso Sea
agtacaattgtttgtggcgacagtcatacctcaactcaaggtgcttttggtgcttttgcttttggaattggaactagtgaagttgaacatactcttgcaacccagacattatggcttgaaaaaccaaaaacctttgaaattctagctactggacaaagaaaaaattcctttgctgtaacttctaaggacattattctaagtataattaaaaaaattggaactgatggtggaactggacatgtattggaatatcgtggtaatgcaataagtgacttatctatggaacaacgaatgacaatatgtaatatgtcaattgaagcgggttctcgtgctggtttaattgctcccgatactaaaacatttgattacatcaataatcgagaatacacaccaaaaaattatgatgatttagttgattcatggaaggaaaatctaatgtctgatccaaattcaaaatttgataaaagtttcacaatagatgtagaaaaaattgaaccgcaagttagttggggaacaaatcctgcgatggtatctgatgtaacaggaaaagttcccacccctgaagattatggtaaaaataatgaaattcaagttgaaagtgcaaaaaaagccttagcatacatgaacctagaacctgaaactccaattgtagaaattcccattgatagagtattcattggatcttgtacaaatgcaagattagaagatttgaaagatgcagcagaaatagtgaaaggtaaaaaagttaattctgatgtaaatgcaatggttgttccaggttcacaaatggttaaacatgaagctgaaaaattaggattggataaaatcttcaaagatgcaaattttgaatggcgagaatctggatgtagtatgt

SEQ ID NO: 283808 - DNA, 730 bp, Unknown
  Bacterial polypeptide expressing nucleotide sequence isolated from the Sargasso Sea
aatgcctaatactctttacgataaaatttggaatgaacatttagttcatcagcaagaagatgggacagctttattgtttgttgacagacacttagttcatgaagtcactagtccacaagcctttgaaggactaagaaattctaaacgtaaagtaagacacccaaaattgacattagctgttgcagatcataatgttccaacaacggataggtcaaaaggtatttcagaccatgaatctaaaattcaagttgaaactttagaggctaattgtaaagagtttggtattaaactttttggaatgagcgataagagacaaggaattgttcatgtcacagggcctgaacagggctttactcaacccggtacagttattgtctgtggtgatagtcatacagcaacacatggagcatttggtgcattagcttttggtattggaacttcagaagtagaacatgttttagcaactcaaacattagttcaaaaaaaagcgaagaattttagaataaatgtcaacggcacacttccattaggtgttacatcaaaagatgtaattcttcaaataattggaaaaattggaactgcgggaggaacaggatgtgtaatagaatatgcaggtgatctaattaaatcgcttagtgttgagaatagaatgacaatttgtaatatgacaattgaaggtggtgcaagagcaggattaattgctcctgatgaaaaaatatttaaatactag

SEQ ID NO: 283809 - DNA, 448 bp, Unknown
  Bacterial polypeptide expressing nucleotide sequence isolated from the Sargasso Sea
atcgatgaaaactttatacttaataaaaatccttttaatgaatcgaaaatacttttaactcgagataattttggatgtggctcatcaagagaacatgcggtttgggcgctgcgagattttggtataaaagctgtaatagcatcctcttttggggatattttttataataattcttttaaaaatggtgttttgccaattaagttagaaaaaaaagagataaacttcttatttgatcaaacccagcaaaaagttcttgaactctcaataaatttacaaaagaaagaaatcaactatggtaaaaaaactatttcttttaatgttgataaacatcttatagatagaattatttatggactagacgatgttgatataactttaaaggaaaaaggtaaaatctttgattttgaaaggactagaattgaagaaagaccttggatattcaaatgag

SEQ ID NO: 283810 - DNA, 406 bp, Unknown
  Bacterial polypeptide expressing nucleotide sequence isolated from the Sargasso Sea
tacaaaaattcaaaaatattaattactggaaaaaattttggctgcggatcatcaagagaacatgcaccttgggctttagttgactttggcataaaagttataattagtgagagcttcgctgatatattttataataattgttttaaaaacggtatacttcctgtagtagctgacgaaaagacaattaaagaattatctgaatattcttctagaaaacaaaatatagaagtaaaattattagaccaagtgattatttatggaaataaaagttataaatttaatcttgatcaatttaaaaagaagtgtctaattgatggactagatgatatagccttatcacttgaaaagattaaatatattgaaagttttgagagtaaaatgagtcaaaccaaaacttggatttgag

SEQ ID NO: 283811 - DNA, 386 bp, Unknown
  Bacterial polypeptide expressing nucleotide sequence isolated from the Sargasso Sea
agtaggaaaaaactttggatgtggctcttcaagagaacatgctccctgggcattattagattttggaattaaatgtgttatagggccaagttttgctgatattttttataataattgttttaagaacggcatgttgccaattattttggatgaagaaaaaattagtgaacttgcacaatattctgaaagaaaagaaaagatagagataaatctaacaaagcaagaaattttatttggtaataaaaaaatagaatttaaaattgatccatttaaaaaaaaatgtttgataaatggcctggatgatatagcaatgactttagagcagtctaaaaagatatcttcttatgaagatgaaataaaaataaataaaccttggaaaaattaaa

SEQ ID NO: 283812 - DNA, 607 bp, Unknown
  Bacterial polypeptide expressing nucleotide sequence isolated from the Sargasso Sea
aatgcaaaaatttaatacacttaaaagtattcctgcttatttgccgatagtaaatattgatacggatatgattattccaaaacaatttttaaaaactattaaaagaactggtcttggtaaaaacttattttttgaaatgagatatgatgacaatggaaatcaaattgataattttatcttaaataagcctcctttcaataaatcaaaaattttgatagcgggcaagaattttgggtgtggttcttcaagagaacatgctccttgggcgttattagactttgggatcacttgcgttataagttcgagctttgctgatattttttacagcaactgttttaaaaacggaattttgccaattattattaatgaagaaaaaattaaagagctatcagaatatgcaaatagaaaagaagaaattttcattaaccttaatgatgaaaaaattgtttatggaaatagtgagattaaatttaagatagattcatttaagaagaaatgcctattagaaggactagacgatatagctttatctttaaaaaaatcagataaaattaaaacttttgaaagtgatttgagagataaaaagccttggatttttaatgattaa

SEQ ID NO: 283813 - DNA, 652 bp, Unknown
  Bacterial polypeptide expressing nucleotide sequence isolated from the Sargasso Sea
catgaaatctaatagcgagggattaattattaatggaatcgttagttatatcgatagagataatatagatacagatcaaataatcccaacagaatatttaaaatcaataaagaagtttggttatgaagattatttatttgatggttggagatataaagatgatggaaagctaggagttaaaaaagaagaacgagatataaataaagattttattcttaataacaaaccatttagtgagtctaaaattcttctaacaagagacaactttggatgtggttcttctagagagcatgctgtatgggccttaagagactttggcatcaaagcggttatagcatcctcatttggggatattttttacaataattgttttaagaatggagtcttgccaatctatttagaaaaaaatcaaattgaaaaactttttggtttagtaaaaaaagaagttgttgaattatcaatagacctccaaaaaagaataatttttttaaacaatcaggatgaaattaattttgaggtagatgatcatctaatcgaacgaatcatatatggattagacgatattgatattactttaaaagaaaaagacaagatttctaattttcaaaaaaatagaaaaataacaagaccatggatttatgcaaatgagtaa

SEQ ID NO: 283814 - DNA, 532 bp, Unknown
  Bacterial polypeptide expressing nucleotide sequence isolated from the Sargasso Sea
atgccaagtccgcgaacactccttgataagatttgggacaatcaccttatctgctcccctgcaggtgagaatcctttgatttatatagacaggcaccttgttcatgaagtaaccagtgcacaagcatttgaaggtcttcggttagcaggccgccctgttagaaggcctgaagcaacttttgcaacacccgaccataatgtgccaacgactgatcgccggttgccaattgctgatccaatttcaaaacagcagatagatacattacgaaataactgtaaagaatttgatatccgactttttgatctagacgacgcggaccaaggtattgttcatgttatcgggccagagttgggtattactcagccggggatgacaatagtctgtggtgatagtcacacggcaactcacggggcgctaggagctcttgcctttgggattggcacgagtgaggtagagcatgttctggcaacgcaggcactccggcaatcgaaaccaaaagcattagaggtgcgggtgcagggaagcctgccta

SEQ ID NO: 283815 - DNA, 816 bp, Unknown
  Bacterial polypeptide expressing nucleotide sequence isolated from the Sargasso Sea
gggatgacaatagcttgtggagattctcatacttcaactcatggagcttttgggtccattgcttttggaataggtacaagtcaagtaagagatgttcttgcaacccaaactatagcaatgaacaaattgaaagtgaggcagatttggtgtgaaaataaattatctaagggtgtttatgctaaggatttagtacttcatattattaatgaacttggtgtaaaggcaggagtaggattcgcatatgaattcgcaggacctgcaatagatgaattatcaatggaagaaaggatgactatatgcaatatgtctattgaaggaggagcaaggtgcggctacattaaccctgatgaaaagacctttagttacattaaaaataaattatgttctccaaaaaatgagaattgggataaagcactcacatggtggaaatcattaaaaagcgataaaaattcaatttatgatcatgtagttaaattagatgcttctaacgtagaaccaaccgtaacctggggaattactcccggccaaagtataagcattaatcaacaaatccctcttttagatgacttatccccaaatgataaattagttgcaaaagaggcttatgaatatatgagtttcaagccaggacaattaataaaagatactcctgtagacgtttgtttcataggtagttgcacaaatggaagaatcagtgacttaagagttgcagctcaagtattaaaagataaaaaagtatctaagaatgtcaaagcatttgtagttccaggctcagaaaaagtggccactgaagcaaaacaagaaggtattgatcaa

SEQ ID NO: 283816 - DNA, 856 bp, Unknown
  Bacterial polypeptide expressing nucleotide sequence isolated from the Sargasso Sea
gtcaaaggtatttcagaccatgaatctaaaattcaagttgaaactttagaggctaattgtaaagagtttggtattaaactttttggaatgagcgataagagacaaggaattgttcatgttacaggacctgaacagggctttactcaacctggtacagttattgtatgtggtgatagtcatacagcaacacatggtgcatttggtgcattagcttttggtattggaacttcagaagtagaacatgttttagcaactcaaacattagttcagaaaaaagcaaagaattttagaataaatgtcaatggcacacttccattaggtgttacatcaaaagatgtaatattacagataattggaaaaattggaactgcaggaggaacaggatgtgtaatagaatatgcgggcgatctaattaaatcattaagcgttgagaatagaatgacaatttgtaatatgacaattgaaggtggtgcaagagcaggattaatagctcctgacgaaaagatattcaaatatttagagggtagaccaatgtctcctaaaggaaatgattgggataaagcaatagaaaattggaaaaatttaaatactgatgaaggtgccaaatttgataaagaggtaaacctaactgctaatgaaatttcgccaatgataacttggggaacatcacctcaagatgttattacaatagatgaaagagtaccaaatccaaaaaatgagaaagacgaggatagaaaaaattctttggaacgagccttaaattatatgggcttgaaaccagatatggcagctaaagatattaaaattgataaagttttcattgggagctgtactaatgggagaattgagatttaag

SEQ ID NO: 283817 - DNA, 514 bp, Unknown
  Bacterial polypeptide expressing nucleotide sequence isolated from the Sargasso Sea
gatgcaaaaatttgacaaattgaccggcgttgcggcgccgctggatatattgaatatcgacaccgatatgattatccccaagcagtttttgaaaactattaagcgatcaggccttggcaaaaatctgtttgatgaaatgcgttatgcccgtgacggcagcgaactgccgggttttgtgctgaacaaagccccttaccggcaggcggaaattcttgttgctggcgataattttggctgtgggtcgagccgtgagcatgcaccatgggcgctgctggattttggtattcggtgtgttatttcaacaagctttgccgatattttctataacaactgttttaaaaacgggattctacccatcgtcgtatcggcggatgagcgggatgcgttgctggccgatgccgccgacattgaaaacccggaattatcaattgatctggtgtcgcagaccatccgccggccaaatggcgtcaccatctcgtttgaggttgatgcgttccggaaaaaatgcctgctc

SEQ ID NO: 283818 - DNA, 229 bp, Unknown
  Bacterial polypeptide expressing nucleotide sequence isolated from the Sargasso Sea
cctagataaagtgtttgtagcggctggctttgaatggcgcgagccgggctgttcgatgtgtctggcgatgaatgcggacaagctggccgaaggcgagcgctgtgcgtcaacatccaaccggaattttgaaggccgccagggtcgtggtgggcggacgcatctagtcagtccacaaatggctgtggcagccgcgttggcagggtaccttgccgatgttcgcgagatttag

SEQ ID NO: 283819 - DNA, 368 bp, Unknown
  Bacterial polypeptide expressing nucleotide sequence isolated from the Sargasso Sea
tatgagtactccaaagacattatacgataaaatatggaatgatcatttagtttcagaaaatgaagatggaacatcaatcatttatattgacagacatcttgttcatgaagttacaagtccccaggcatttgaagggctaaaaattgcaaacagatcagttagaaaacctaattttacattagccactgctgatcacaatattcctacaacaaatagagatgagggaatatcagatccagagtctaagttacaggtagatactcttgaagagaattgtaaggagtatggaattacttttctttctatgtctgataaaagacagggcatagttcacattatcggaccggagcaaggtttcacacaaccag

SEQ ID NO: 283820 - DNA, 676 bp, Unknown
  Bacterial polypeptide expressing nucleotide sequence isolated from the Sargasso Sea
atgtctacaacattatacgataaaatttggaacgatcatctagttgaccaacaagatgatggtacatctttactttttgtggatagacatttaattcatgaggtgacaagcccccaagcttttgaaggattaagaaattctaacagaaaagttagacatccaaatttaactttagcagttgcagatcataatgttccaacaactgacagatcaaaaggtatttcagatgaagagtcaaaaattcaagtagatactttagaggcaaattgtaaagaattcggtgttcagttatttggtatggatgataagagacaaggtatcgttcatattataggacctgaacaaggttttactcaaccaggtacagttattgtttgtggagatagtcataccgcaacacatggagcatttggtgctttagcatttggaataggaacttcagaagttgaacatgttttagcaacccaaacactagttcagaagaaagctaaaaattttagaattaatgttaacggtgaacttcctttaggagttacttctaaagatgtaatacttcaaataattggaaaaataggtacagcaggtggaacaggatctgttgtggaatatgctggagatttaataagatctttaagtgttgagcaagagaatgactatttgcaatatgacaattgaa

SEQ ID NO: 283821 - DNA, 343 bp, Unknown
  Bacterial polypeptide expressing nucleotide sequence isolated from the Sargasso Sea
atgcctaaaactctttacgataaaatttggaaagaacatcttgtttatcaacaagatgatggaacttcgttgttatttgttgataggcacttgatacatgaggttacaagtccacaagcattcgaaggactaagaaattcaaaaagaaaagtaagacagccgacccttacattagctgttgcagatcataatgttccaacaacagatagatcgaaaggaatttctgatgaagagtcaaaaattcaagtcgatacattagacgcaaattgtaaagaatttggaattcaaatttttggaatgaatgataaaagaccagggtattgttcacataataggtcctgag

SEQ ID NO: 283822 - DNA, 517 bp, Unknown
  Bacterial polypeptide expressing nucleotide sequence isolated from the Sargasso Sea
aagtattagcattaatcaacaaatacctcttttagatgacttatccccaaatgataaattagttgctaaagaggcttatgaatatatgagtttcaagccaggacaattaataaaagatactccagtagacgtctgtttcataggtagttgcacaaatggaagaatcagtgacttaagagttgcggctaaagtattaaaaggcaaaaaagtatccaagaatgtcaaagcatttgcagttccaggttcagaaaaagtagccactgaagcaaaacaagaaggtcttgatcagatatttaaggattctggatttcagtggagagagccaggctgctcaatgtgtttagcaatgaattcagataagctaatcggtaatcaagttagtgctagttctagtaatagaaatttcaaaggtaggcagggatctcctagcggaagaacactactcatgagtccagcaatggttgctgctgctgcaattaatggcaaagtcagtgacgttcgagaatttataaactaa

SEQ ID NO: 283823 - DNA, 837 bp, Unknown
  Bacterial polypeptide expressing nucleotide sequence isolated from the Sargasso Sea
aatgtctacaacattatacgataaaatttggaaagatcatctagttgatcaacaagacgatggcacatctttactttttgttgatagacatttaattcatgaggtgacaagcccccaagcttttgaaggattaagaaattctaatagaaaagttagacacccaaatttaactttagcagttgcagatcataatgttccaacaactgacagatcaaaaggtatttcagatgaagagtcaaaaactcaagtagatactttagaggcaaattgtaaagaattcggtgttcagttatttggtatgaatgataagaggcaaggtatcgttcatatcataggacctgaacaaggttttactcaaccaggtacagttattgtttgtggagacagtcataccgcaacgcatggagcatttggtgctttagcatttggaataggaacttcagaagttgaacatgttttagcaacccaaacactagttcagaagaaagctaaaaattttagaattaatgttaatggtgaacttcctttaggagttacttctaaagatgtaatacttcaaataattggaaaaataggtacagcaggtggtacaggatctgttgtggaatatgctggagatttaataagatctttaagtgttgagcaaagaatgactatttgcaatatgacaatcgaaggtggtgcaagagcaggattaattgcaccagatgaaaaaatttttgaatatttaaaaggaaaaccaatgtcaccaaaaagtgaaaattgggataaagctttgaactattgggaaactttaaaaacagactctgatgctagttttgataaagaaatagccct

SEQ ID NO: 283824 - DNA, 739 bp, Unknown
  Bacterial polypeptide expressing nucleotide sequence isolated from the Sargasso Sea
atgcccaatactttatacgataaaatttggaatgatcaccttgtagatctacaagatgatggaacagctttgttatttgtagatcgtcatttggttcatgaggtaaccagtccccaggcatttgaaggtttaagaaactctaatcgtaaagttagacatcctaatttaacacttgcagtagcagatcataatgttccaacaactgatagatcaaaaggtatttctgataaagagtcaaagatacaagttgaaaccttagaagctaattgcaaagagtttggaattaaactttttggtatgaatgataagagacaaggaatcgtacatgttacaggtccagagcaaggctttactcaacctggaacagtaatagtatgtggtgatagccatacggcaacacacggtgcttttggttctttagcatttggaattggaacttcagaagtagaacatgttttagctactcaaacattagttcaaaaaaaagctaaaaattttagagtaaatgtaaatggcaaactccctttaggtgtaacctctaaagatgttattcttcaaataattggaaaaattggtacagcaggtggaacgggttgtgtaatagaatatgcaggtgacttaattagatcgttgagtgttgaacaaagaatgacaatttgcaacatgactatagagggtggagctagggcaggattaatagcacctgatgaaaaaatatttaaatatttaaaagacagac

SEQ ID NO: 283825 - DNA, 661 bp, Unknown
  Bacterial polypeptide expressing nucleotide sequence isolated from the Sargasso Sea
aggaagaccgtacgctccatcaggagataattgggataaagcggtagaattttggaaatctcttccatctgatgagggcgcaaaatacgatgaagaaattttaattaatgctgaagatatttcaccacaaattacatggggcacaagcccacaagacgttgttgctataaatggtatagtaccaaatcctcaagaagagagtaatcctaatagaaagaaggctatggaacgttctcttgaatatatgggtttagaacccaaacagaaaatacaaaaaattaaaattgacaaagtgtttatcggctcttgcactaatggtagaattgaggatttaagagaagttgctaaagttgtagaaggcaaaaaagtttccgtagactcaatgatcgttcctggttcaggtctagttaaaaaacaagctgaagaagaaggtttagataaaatttttattgaagcaggatttgattggagagaaccaggttgctccatgtgtttagctatgaatccagaccaactaaaacctcaagaaagatgtgcatcaacatcaaatagaaattttgaaggtagacaaggtagagaaggtagaacacatctggtaagccctgcaatagctgctgcatctgcaattaaaggttcttttgcaacagtagaggatttataa

SEQ ID NO: 283826 - DNA, 412 bp, Unknown
  Bacterial polypeptide expressing nucleotide sequence isolated from the Sargasso Sea
catggctggttttaagcaacacacaggattagttgtacctttagacgcggcaaatgtcgatacagatgcgattattccaaagcaattcttacagaaagtatctcgtttaggatttgggaaacaccttttccatgattggcgtttcctcgatgacgcaggcaaagtgcctaatccagaatttattatgaatgcacctcgctatcaaggcgcttctatcttgctggcacgtgaaaacttcggttgcggctcttcaagagaacacgctccttgggcacttgcagattatggtataaaagcaatgatagcaccgagtttcgctgatattttctacggtaattcaatcaacaatcagatggtccccgttcgtctctctgaacaagaagtcgacgaaatatttcaatttgtcgaaaat

SEQ ID NO: 283827 - DNA, 769 bp, Unknown
  Bacterial polypeptide expressing nucleotide sequence isolated from the Sargasso Sea
tgttgagcaaagaatgacaatttgtaatatgacaattgaaggtggtgcaagagcaggtttaattcagccagatgaaaaaatttttaaatatttaaaagataaaccaatgtctcctaaaaaagataattgggataaagctatggattattggagtagtttaaaatctgatagtgacgcaaattttgacaaggaaataactttagatggaaaagatatattgcctatggtgacatggggaacttcacctcaagatgttgtttctattgatggcaaagttccaaatccaaaaaatgagacaaatgaagataaaaaaaattcaattgaaagatcattaaagtatatgggcttaaaacctgatactgctattaaagaaataaagatagataaagtatttataggaagctgtacaaatggaagaattgaggatttaagagatgcagctaaaattctaaaaaatagaaaagtagcaaaccatgtttatgcaatggttgtgcctggttctggattagttaaagaacaagctgaacaagaaggattagataaaatatttaaagattcaggttttgattggagagaaccaggctgttccatgtgtttagcgatgaatgcagataaattaaaacccgaagaaagatgtgcatcgacctcaaacagaaattttgaaggtcgtcaaggaagaggcggtagaacacatttagtgagcccagcaatggctgcagctgcggctatatcaggaacattagacgatgttagaaaatacagaaattaa

SEQ ID NO: 283828 - DNA, 604 bp, Unknown
  Bacterial polypeptide expressing nucleotide sequence isolated from the Sargasso Sea
aatggaaaaatttataactttaaaaggtattgctgctccacttcctatgatcaatgttgatacagacatgatcataccaaaacaatttttaaaaacaattaaacgttctggtttaggaaaaaatctttttcatgaattaagatttgatatgcaaggtaatataaaaaatgatttcgtcttaaattgggatccttataaaaaagcaactattcttattgcaggtgacaactttggttgtggttcaagtagagaacatgctccatggtctttattagattttggatttaagtgtattgttgccccaagttttgctgatattttttataataattgttttaaaaatggcattcttcctattcatttagatcaagaaaaagtgaacatattaatgacagaagcaaaaaataaaaatcaattaactataaatcttgatgagcaaataataattttagcagatgaaaatattattgagtttgatattgacccctttagaaaaaaatgtttgatagaaggtcttgatgatattggtttaacgcttcaaaaaaaagataaaattttcaaatatgaagaaagtatccagttatctcatcctgggataatataa

SEQ ID NO: 283829 - DNA, 346 bp, Unknown
  Bacterial polypeptide expressing nucleotide sequence isolated from the Sargasso Sea
ggtagaattgaggatctaagagaagtcgcaagagtagttaaaggaaaaaaagttagtgttgattcaatgattgttcctgggtctggtttagtgaaagaacaagcagagagtgaaggattagataagatttttattgaagctggttttgattggagagaaccaggatgttcaatgtgtttagctatgaatccagatcaattaaaaccaagagaaagatgtgcatcaacatcaaatagaaattttgaaggaaggcaaggtagagaaggcagaacacatttagttagtccagttgttgctgctgcatctgcaattaaaggctcgtttgctcaagagactgatttataat

SEQ ID NO: 283830 - DNA, 757 bp, Unknown
  Bacterial polypeptide expressing nucleotide sequence isolated from the Sargasso Sea
gctgacggactgccgaaagaaatgctcagcaccctggagcgaaactgccaggagaacggcatccatctcaatggccttggcagtgcccgccaaggaatcgtgcatgtgatggcccctgagctgggcttgacccaaccaggcatgaccgtggcctgcggtgattcccacacctccacccacggagcctttggtgccattgcctttggcattggcaccagccaagtgcgcaatgtcttggccagtcagagcttgacgatgcacaagctcaaggtgcggcgcatctgggtggatggcgccctgcaatccggcgtatttgccaaggatctggtgctgcacatcatccgcaccctgggggtccaaggaggcgtgggctacgcctatgaattcgccgggccagcgatcaaagccctctcgatggaggagcggatgaccctgtgcaacatggccatcgagggcggcgcccgctgcggctacgtcaatcctgatcaaaccaccttcgattacctcaaaggccgcccccatgcccccagcggtgacgcctgggatcgcgctgtgagctggtggaagagcctggccagtggtcaagacgcttgctttgacgacgaggtgaagctcgatgccgccaccatcgcccccaccatcacctgggggatcaccccaggccaaggcattggcgtggatgaggcggtgcccaccctggagcagaccccagaggaagaccggcccctggcccacgaggcctatcgctacatggact

SEQ ID NO: 283831 - DNA, 289 bp, Unknown
  Bacterial polypeptide expressing nucleotide sequence isolated from the Sargasso Sea
aatgtcggaaagaattaaaaaaatatttgaaaaaaaaggaaagaaactcataacttttactactggtggagatccagatttagagactagttttgaaattttaaaaaaaataatagataatggtattgatataattgaaattggtatgcccttctcagacccaatggcagatggcccaactatccaagagtcaagtataagatcaattcaaaacggaacgaagattacagatatttttgaaattgtcagaaaaatacgaatattaaataataatatacctattatttta

SEQ ID NO: 283832 - DNA, 569 bp, Unknown
  Bacterial polypeptide expressing nucleotide sequence isolated from the Sargasso Sea
aaatgcggaagatgtcgtaccacaagttacttggggcacatcgccacaagatgttgttccagttaatggatcagttccagatccaaaaaaagaaaaagataatgacagacgtgtggctatggaaagatcactagattatatgggtttaaaaccaaatactaaaatgacagacatcaaaatagacaaagtgtttattggaagttgcactaatggaagaattcaggacttaagggaagctgccaaacttcttaaggataaaaaaatagcggaacacgtaaatgctatggttgttcctggatcaggtcttgtaaaaattcaggctgagcaagagggtttggacaaagtatttaaagactctggttttgagtggagagaaccaggctgctcaatgtgtcttggtatgaatgaggatcagttgaaaccaagagagagatgtgcatcaacatcaaatagaaacttcgaaggaagacaaggtcgtgggggaagaacacatctagtaagcccagcaatggcagcagtagcagctattgaaggacacttatcagatgttagaaaatttaataattaat

SEQ ID NO: 283833 - DNA, 777 bp, Unknown
  Bacterial polypeptide expressing nucleotide sequence isolated from the Sargasso Sea
aatgtctaaaactctatatgataagatatgggaaaaccatcttgttcatgaacaaagtgatggaacatcattaatttatgtagatagacacttagtccatgaagttacaagcccccaagctttcgaaggtctcagattacaaaaaagaaaagttagacgaccagaattaacacttgcagtgcctgatcataatgttcctacaactgataggtctaaaggcataaatgatgaggattctagaatacaagtcgaaacattaagaaaaaactgtaaagactttggagtaaaactttttgatgtaaatgataagcgtcaaggtatagtccatattataggacccgaacaaggtttcactcagccaggaacagtaatagtatgtggtgatagtcatacagcaacacatggagctttcggagcgttagcttttggaataggaacttctgaagttgaacatgttcttgctacgcaaactttaatgcagaagaaatcaaaaaatttaagaataaacgtgaatggcaatttaccaaagggtgttactgcaaaagatgtaatattaaaaattattggtacgattggaaccgctggtggaactggatatgtagttgaattcgctggagatgtgattaaaaacttaagcatggaagagagaatgactgtttgtaatatgactattgaagctggtgctagagcgggtttaatcgcaccagacgaaaagacatttagttatttaaaagataaaactatgtcgcctaaaggagaaaatggaataaagctgta

SEQ ID NO: 283834 - DNA, 766 bp, Unknown
  Bacterial polypeptide expressing nucleotide sequence isolated from the Sargasso Sea
tcattaagtatggaaggtcgaatgactatatgtaacatgagtatagaagctggggcgagagctggattaattgctcctgaccaaactacttttgattatattagaggtagaccatacgcaccaaaaggagaagattgggataaagctattaaatactggaaatcattgccgtcagatgagaatgctaaatatgataaagagataaatattaaagctgaagatataacacctcaaattacatggggaacaagcccgcaagatgtagtcccaattgatggaaaagttccaaatccagactcaattaatgatataaacagaagaaaagctgttgaacgatctttagaatacatgggcttagaaccaaatcaagaaattgataaaattaaaatagacaaagtttttattggctcttgtacaaatggaagaattgaagatttaagagaagttgcaagagtcgttgaaggtaaaaaagtgtctgttgaatctatgattgttcctggatctggtttagtcaaagaacaagcagagagtgaaggcctggataaaatctttattgaagcaggttttgattggagagaaccaggctgctcaatgtgtcttgctatgaacccagatcaattaaaaccaaaagaaagatgcgcttctacctcaaatagaaattttgaaggtagacaaggaagggaaggaaggactcatttagttagtccggcagttgcagcagcatcagctatcaaaggaacttttgctcaagagagtgatttataat

SEQ ID NO: 283835 - DNA, 835 bp, Unknown
  Bacterial polypeptide expressing nucleotide sequence isolated from the Sargasso Sea
ggtttaagaaattcaaatagaaaagtaagacaaccaagtctaacccttgctgttgcggaccataacgttcctactacagatagatcagaaggaattttagatgaagagtctagaattcaagtagaaacacttgaaaaaaattgtaaagaatttgatattaaattatttggaatgaacgataaaagacaaggaatagtccatataataggtcccgaacaaggttttactcaaccaggaaacataatagtatgtggggatagtcatactgcaactcacggtgcgttcggagcactagcttttggtattggaacttctgaagttgaacacgtattagcaacacagacattagtacaaaaaaaatctaaaaattttagaattaaagtaaatggaagattaccaattggagttacatcaaaagatgtaattttacaaataattggtaaaattggaaccgcaggaggcacaggttatgttattgaatatgcaggggagttaatatcaagtttaagcgttgaacaaagaatgaccatttgcaatatgaccattgaaggaggagctagagcaggattaattcaaccagacgaaaagatttttaattatttaaaagataaacctatgtcaccaacaaaagataattgggataaagctattgaatattggactaaattgaaatctgatcaaaatgcagattttgataaagagatttcaatagaagggtccgagattaaaccaatggtaacatggggcacttctccccaggatgttattgagattgatggaaaagttccaaatccagccaatgaaaaaaatgaagatagaaaacagtcaatttcaa

SEQ ID NO: 283836 - DNA, 841 bp, Unknown
  Bacterial polypeptide expressing nucleotide sequence isolated from the Sargasso Sea
tatagtctgtggagattctcatacagcgactcatggagcttttggagcgctagcttttggaattgggacttctgaagtagagcatgtgttggcgactcagaccttacagcagaagaaaccaaagaccatgcttgttgaagttgatggaatgcttccaattaatgtgacgccaaaagatattattcttgcaatcataggtaaaataggcactgctggaggaacaggtcatgtaattgagtatgctggcgatgcaatccgaggcatgtcaatggaagggcgcatgactctttgcaatatgacaatagaagcaggtgcacgtgcaggtatggttgcaccagatgaaacaacttttgaatatcttaagaatagaccattttctcctaaaggtgatgcttttgaagaagcagtttcagagtggaagaaactgcccagtgacgaaaatgctgaatttgatcttaatgtgaaaatcaatgcacaggatgttttgccacaggtaacatggggaacaagcccaggtatggtgacagatatcaacagtagagtcccggacccgaagaagatacaaaatccttctgagaggaaatctgtggaaaacgctttaaaatatatggatctcaaggcaaaccttcctatcaaagaaatcagtattgaccgagtttttattggttcatgtacaaattcacgcatagaagatcttcgttctgttgcagaatttgtagagggccgaaaagtaagtgaaaacgtctctgccatgattgttcctggaagtggattgatcaagcaaaaggcagagcaggaggggctagataaaatatttacttcagcaggctttgaatggcgt

SEQ ID NO: 283837 - DNA, 781 bp, Unknown
  Bacterial polypeptide expressing nucleotide sequence isolated from the Sargasso Sea
aacactagctgtcgccgatcataatgttcctacaacagatagatctgtagaaatagaggatgaagaatcaaaaatccaaattgaggcacttaaaaataattgtgctgaatttgatattaacttcattgatatgagtgatattagacaaggcattgttcacattataggtcctgaacagggttttactcttccaggctccacaattgtttgtggggatagtcatacttcaactcatggagcatttggagcattagcacatggtattggaacatctgaggtagagcatgttttagcttctcagacactaatacaaaaaaaagcaaaaaattttaaagttgagatagttgggacactaactgactctatatccgcaaaagatcttgctctatctgtaattggagcgattggaactgcgggtggtactggttatgttattgagtacatgggtaatgcagttgaaagccttagtatggaaggcagaatgacattatgtaatcttacaatagaagctggtgctagagcagggttaattgctcctgatcaaaaaacttttgactatttaaaggatcgaccgttagttccaaaaggtgatatttgggataaagcagtcagttattggaaaactctaccaagtgatcctggggcacattatgataattcaataaaaattgatattgataacctttcacccttagtaacttggggaactagtccagaggatgtcattgatattgatggaagtataccaaaacccgaggatatagaagagaagcaaagaaga

SEQ ID NO: 283838 - DNA, 552 bp, Unknown
  Bacterial polypeptide expressing nucleotide sequence isolated from the Sargasso Sea
agccgatggtaacttggggcacttcaccacaagatgtattaactatagatgaaaatattcctaatccagaaagtgaaacagatttagataaaaaaaactcgattgaaagatctttaaaatatatgggattaaaacctaatacaaagatacaagatattaagattgataaggtttttatcggcagttgtacaaatggtagaatcgaagatttaagagaggcagctaaaatattaaaagataaaaaaattgctggtcatgtaaatgcaatggttgttcccgggtcaggcttggtaaaagaacaagcagaacaagagggtttagataaaatatttataaattcaggctttgaatggagagagcccggctgttcaatgtgtttggcaatgaatgctgataaactaaaacctggagaaagatgtgcatcaacatcaaatagaaattttgagggaagacaaggtagaggtggcagaacacatctagtaagtccaggtatggctgctgccgcagcgatttctggaaacttagatgatgtgagaaagtatcaaagctaat

SEQ ID NO: 283839 - DNA, 346 bp, Unknown
  Bacterial polypeptide expressing nucleotide sequence isolated from the Sargasso Sea
atgcaaaaatttgataaattaaaaagcattccagcacatttgccaatcgtaaatattgatacagatatgttaattccaaagcaatttttgaagacaatcaaaagaactggacttggtaaaaatttattttttgaaatgagatacgatgatcaaggaaatataataaatgattttattttaaatcaagaaccatttaataaatcaaaaatcttgatagctggtaaaaattttggatgtggttcttctagagagcatgcgccttgggcgttactagattttggaattacgtgcgtaattagttccagttacgctgacatattttataataactgtttaaaaatggaat

SEQ ID NO: 283840 - DNA, 613 bp, Unknown
  Bacterial polypeptide expressing nucleotide sequence isolated from the Sargasso Sea
atgaaaaaatttaatacacttaaaagtattcctgcatatttaccaatagtaaatattgatacggatatgattattccaaaacaatttcttaaaacaataaaaagaactggtcttggaaaaaatcttttttttgaaatgagatatgacaatgaaggagaaaagattaataaattcgttttaaaccaagaaccatataataaatcaaagattttgattactggaaaaaactttggttgtggatcctcaagagaacacgctccatgggcgttgttagattttggaataacatgcgtgataagttcgagctacgcggatatattttataataattgttttaaaaatggaatattacctattaaaatagatgaagaaaaaataaaacaaatttcagagtattcaaaaagaaaagaagaaatctcaattaatttagaagatcaaaaaatattatttggtaataatgaaatttcatttgatttagacaaatttaaaaaaaaatgtttgttagaaggattagatgatatagctctatcacttgaaaaatcagacaaaataaaatcattcgaagaaaatctcaaagaaaacaaaccatggatttttgatgataaaaattaaa

SEQ ID NO: 283841 - DNA, 683 bp, Unknown
  Bacterial polypeptide expressing nucleotide sequence isolated from the Sargasso Sea
aatgtctaaaactttatacgataaaatctgggatgatcatcttgtgtatacacaagatgatggaacatctttactttatgttgacagacatttagttcatgaagttactagcccgcaagcatttgaaggattgagaaactctaatagaaaagtaagacaaccaaatctgacattagctgttgcagaccacaatgttccaacatctgatagatctaaaggaatttctgatgaagagtctaagcttcaagtagaaactttagaaaaaaactgtgatgaatttggaataaagctttttggaatgaatgacaaaagacaagggatagtccatataattggacctgagcaaggatttacacagccaggaagtataattgtttgtggagatagtcacacagcaacacacggagcttttggatctctagcttttggcataggaacttctgaagtagagcacgtattagctacacaaactttagttcaaaaaaaatcaaaaaactttcgtattaaagtggatggaaagttgtcaatcggcgtcacatctaaagatgttattttacagatcattggtaaaattggtactgcaggtggaactggttatgtaattgagtacgcaggaagcttaatctcatcacttagtgtagagcaaagaatgacaatttgtaatatgactattgagggaggtg

SEQ ID NO: 283842 - DNA, 694 bp, Unknown
  Bacterial polypeptide expressing nucleotide sequence isolated from the Sargasso Sea
aaaaatttttgattacttaaaaaataaacccatgtctccaaaaaaagaaaattggagcaaagcattagataattggaaaaatttaaaatcagatagcggagcaaattttgataaagaattaaatttagaagcccacgaaattatgccaatggttacatggggaacttctcctcaggatgtaattactattgatggaaaggttcctaatccaaacgatgaaaaagatttagataaaaaaaattcaattgagagatcattaaaatatatgggtttaaaaccaaatactgccgcgaaagacattaaaatcgataaagtttttattggcagttgtacaaatggaagaattgaggatttaagagaggctgcaaaaatattaaaaaataaaaaaaaagcatcccatgttgaagcaatggtggtcccaggttctggcttagttaaacagcaagcagaacaagagggattagataaaatttttattaactcaggatttgaatggagagagccagggtgttcaatgtgtcttgctatgaacgctgacaaactgaaacccaaagaaagatgcgcatctacttcaaatagaaattttgagggaagacaaggaagaggtggaagaacacatttagtaagcccaggtatggccgcagctgctgctatttctgggagtctcgatgatgttagaaagtaccaaagttaa

SEQ ID NO: 283843 - DNA, 822 bp, Unknown
  Bacterial polypeptide expressing nucleotide sequence isolated from the Sargasso Sea
tggaacagggatgtgtaatagaatacgctggtgatttaatcaaatcattaagtgttgagaacagaatgactatttgtaatatgacgatagaaggaggtgctagagcaggattaatagctccagatgagaaaatatttaaatatttagaaggcagaccaatgtctccaaaaggaaaactttgggataaagctttagaaaattggaaaaatttaaatactgacgagggtgctaagtttgataaagaagtaaatttaaatgctaatgaaatttcgccaatgataacttggggaacatcacctcaagacgttattacgattgatgaaaaagtaccaaatccaaaaaatgaaaaggatgaagacaagaaaaattctttagaaagatctttaaattatatgggtttgaaaccagatatggcagctaaagatattaagattgataaagtttttattggaagttgtactaatggtagaatagaggatttaagagaggctgcaaaaattcttaaagataaaaaaatagcttctcatgttgaggctatggttgtgccaggatctggattagttaaagagcaggcagagcaagagggattggacaaaatttttgttaattcaggatttgaatggagagaaccagggtgttcaatgtgtttagcaatgaatgcagataaattaaaaccagaagagagatgtgcctcaacatcaaatagaaattttgaaggtaggcagggaagaggtggaagaactcatttagtaagtccaggtatggctgctgctgcagcaatatcaggaaatcttgacgatgtaagaaaatatcaaaattaac

SEQ ID NO: 283844 - DNA, 850 bp, Unknown
  Bacterial polypeptide expressing nucleotide sequence isolated from the Sargasso Sea
atcattaccaaaaggtgttacggcaaaagatgtaattttaaaaataatcggaacgataggaactgctggtgggacaggttatgtgattgaatttgctggagaagtaataaaaagcttaagcatggaagagaggatgaccgtttgtaatatgacaattgaagctggagcaagagcaggtttaatcgccccagacgaaaaaactttcgagtatttaaaaggaaaaaaaatgtctccaacaggagaaaattggaataaagcagttaactttatgaaatccttgtactctgacgatggctgcaagtttgacaaagaaataaatattgacggaagtgaaattgagccattagtcacttggggaacttcgccacaagatgtttctccaattacaggtgtagtgccagatcctgaaaaagaaaaaaatgcagatagaaaaatggcaatgaaaaggtcactagagtatatgggtttagaggctaatacaaaaatctctgagattaaaattgataaaatattcattggcagttgtactaacggaagaattgaagatttaagagtagcggcggaccttttaaagggcaagaaagttgctagaaatgtgagcgctatggtagtacccggttcgggattagtgaaagcacaagctgaggaggagggtttagataaaatttttatcaatgcgggttttgaatggagagagccaggatgctctatgtgtttaggcatgaatcctgatcaattaaaacctaaagaaagatgcgcttcaacatcaaacagaaatttcgagggcagacaaggaagaggaggaagaactcatctagtcagtccgggtatggctatcgcagccgcggta

SEQ ID NO: 283845 - DNA, 987 bp, Unknown
  Bacterial polypeptide expressing nucleotide sequence isolated from the Sargasso Sea
aaccagtcgcaacaagttgatcacatagtcccaacagaaagccagcagcgtccttttagcgatccactggcagaagaaatgttgtctactttagaaaagaattgtgaatcttatggaattcaatttcatggaattgggagcaattctcaaggtgtggttcatgttatggctccagaattagggttaactcagcctgggatgacagtagcctgtggagattcacacacttcaactcatggagcatttggagccattgcattcggtattggcacaagtcaagtaagagatgttttagcgagtcaaagcttggcaatgaaaaaattaaaagttcgcagaatatggatagatggtgaattacaaaaaggagtttatgcaaaagatctaattcttcatattattcgacatcttggtgtcaaaggaggggttggttttgcatatgaatttgcaggccctgcaatagaaaaactttccatggaaggaagaatgacgatttgcaatatggctattgagggaggagccagatgcggttatatcaacccagatgaaactacttttcaatatctaaaagggaaagaatatgctcccaaaggtcaagaatgggatagagctatgaactggtggaaaagtttagctagtgattctcaagctaaatatgatgatgagattcaactagatggatcatctatcgaacccacagttacttgggggataactccagggcaaggaatttcaattaaagaaaaaattcctaatcctgagttgcttccgcaaaatgaacaacaaatagcaagagatgcttgtaaatatatgaatctcaaacctgaaaaacctatagagggaacagcaattgatgtttgctttataggaagctgcactaatggaagattgagtgatctactagaggcctctaaaattgtggaaggtcatacagtcgcaactggaattagagcatttgttgtccctggttcccaaaaggttgctaaagag

SEQ ID NO: 283846 - DNA, 833 bp, Unknown
  Bacterial polypeptide expressing nucleotide sequence isolated from the Sargasso Sea
tgtaaaagcaggagtagggtatgcatatgaatttgcaggtcctgcaataagaaatctttctatggaagagagaatgacaatttgcaatatgtctatagaggggggagcccgttgtggttacataaatcctgataaaaaaacttacgattatcttcaagaaagattattcacacccaaaaacaataattgggatgaagcacttaaatggtgggaatctctcaaaagtgatgagaaatcagtttatgatgatgtaataacaatagacgcatcaaagatagaaccgactattacttggggtattactcccggccaaagtgtaggtattaatcaaaaaataccttcaaaacttgaaatccattcggatgatcaatttattgctgaagaagcatatgaatatatggggtttcaaccagggcaactacttaaaaatactccaattgatgtttgttttataggtagctgcactaatggaagaatcagcgatttgagggctgctgcaaaaattgtaaaaaataaaaaagtttcaaagagtgtgaaagcttttgtagttcctggatcagaacaagttgctatggaagcaaagaaagaaggccttgatcaaattttcctagatgcaggctttcaatggagagagccaggttgctcgatgtgtttagctatgaactcagataagttagaaggtaatcaaatcagtgccagttctagtaatcgcaatttcaaagggaggcaaggatctcccaacggcagaacattattaatgagccctgcaatggttgctgccgctgccatttcaggctgcgtaagtgatgtaagagaatttattaaaaaatgaa

SEQ ID NO: 283847 - DNA, 364 bp, Unknown
  Bacterial polypeptide expressing nucleotide sequence isolated from the Sargasso Sea
ctgcacaaacggaagaatagaggatttaagactagccgcagaacttctaaaaggaaaaaaaattgcaaaaagtgtaagcgctatggtggttcctggatctggactggttaaagctcaagctgagaaagagggcttacataagatatttattgaagctggatttgagtggagagaacctggttgttcaatgtgtctagggatgaatcctgatcaattaaaacctaaagaaagatgtgcttctacatcaaatagaaattttgaaggaagacaaggaagaggcggaagaactcatttggtaagccccggtatggcgatagcagcagcgattaaaggtcatctttcagatgttagagaaatagaataa

SEQ ID NO: 283848 - DNA, 868 bp, Unknown
  Bacterial polypeptide expressing nucleotide sequence isolated from the Sargasso Sea
tcaaaagatttaattttatacataattgggagtataggtacttcaggtggaacaggatatacaatcgagtacacgggcgaaactatatcagacttaagtatagaatcacggatgaccatgtgtaatatgacaatagaggctggcgctaaatctggcttgatggcttttgatgagaaaactcatgattatttaaaagatagagaatttctaccttcatctaaacattatgacaatgcacttaagtattgggaaacattaattagtgacaatgaagtaacgtttgatagaaaagagaaattcaatgcgagtgatattcaaccccaagtaacatggggcacctctccagaaatggtcacatctgtcgatgaatgtattcctagttcagattcaattgataatgaggaagaatatgtagatacacttaggtatatgggtctggaacctaaaactgaaataaaatcgattgatcttgacaaaatattcattggatcatgtactaactctcgtatagaggacttgcgccaggcagctgaagttgttcaaggagaaaaagtttccagcaaaattaagcaagcaatcattgtaccaggttcggggctcgtaaaagcacaagcagaaagagaaggattagataaaatatttgtgaaagcaggttttgaatggagagaccctggatgttcaatgtgcttgggaatgaatgatgactttttacaaccttacgagagatgcgcatctacatctaatagaaactttcaaggccgacaaggcgataaaggtagaacacatcttgtaagcccagggatggctgcagttgctgctataaaaggtcacttttacaatgttaaggattttatgaatgaaaagtaaa

SEQ ID NO: 283849 - DNA, 441 bp, Unknown
  Bacterial polypeptide expressing nucleotide sequence isolated from the Sargasso Sea
ttactttttgtagatagacatttaattcatgaggtgacaagccccccagcttttgaaggattaagaaattctaacagaaaagttagacatccaaatttaactttagcagttgcagatcataatgttccaacaactgacagatcaaaaggtatctcagatgaagaatcaaaaattcaagtagatactttagagtcaaattgtaaagaattcggtgttcaattatttggtatggatgataagaggcaaggtatcgttcatattataggacctgaacaaggttttactccaccaggtacagttattgtttgtggagatagtcatacagcaacgcatggagcatttggtgctttagcgtttggaataggaacttcagaagttgaacatgttttagcaacccaaacactagttcagaagaaagctaaaaattttagaattaatgtt

SEQ ID NO: 283850 - DNA, 440 bp, Unknown
  Bacterial polypeptide expressing nucleotide sequence isolated from the Sargasso Sea
tatgaaagaaactctttatgataaaatctggaacgaacatctagttcatcaatatagcgatggttcatcgttaatctatattgatcgtcaccttatacatgaagttacctcgccacaagcctttgatggacttaatatagagaatagaaaaatctggaataagaattctatttttgcggtgtcagatcataatgtaccaacaaaaaataggacatctggaattagtgacaagatatcaaaactccaagtcgatactttaacaaataattgtaagaagcataatattaaatactttgatctaaatcatataaatcaaggtattgttcatgtaatcgggccagaacttgggataactcaaccaggaatgactttagtatgtggtgactcccatacatcaactcacggagcacttgcatcattatcctttggtattggcacaa

SEQ ID NO: 283851 - DNA, 869 bp, Unknown
  Bacterial polypeptide expressing nucleotide sequence isolated from the Sargasso Sea
catgaatgataaaagacaaggtattgttcatattattggtccagaacaaggctttactcagcctggatctgtaattgtttgtggagatagtcatacggctactcacggtgcatttggtgcgcttgctttcggaattggaacctcagaagtcgagcatgttttagcaacacaaacattaattcaaaaaaaatctaaaaatcttcttctaagagttgatggaaaattatcaattggaattactgctaaagatgtaattttaaagattataggaacaataggaactgctggcggcacaggatttgttatagaatactcaggagaagtgattaaaaatttttctatggaagaaagaatgactatttgtaacatgacaattgaaggtggagcaagggctggattaattcaacctgacgaaaaaacatttaactatttacaaaacagaccaatgtcaccaaaaaatgaaaaatggaagaaagccttagagtattggagcaaactaaaatctgaagaaggatgtaatttcgataaggaagttattataaaaggcgaagaagtggtacctcaagttacttggggaacatcacctcaagatgtagtccctgttaacggttctgttccagatcccaaaaatgaaaaaaatcaagatagaagagtcgcaatggaaagatcattagactacatgggattaaaaccaaacacaaaaatgacagaaattaaaattgataaagtttttataggaagttgcacaaatggtagaattcaagatcttagagaggctgcaaagctactcaaagataaaaaaattgcaaaacatgttaatgctatggttgttccaggctcaggtttagttaaaaaatcagctgagcagg

SEQ ID NO: 283852 - DNA, 590 bp, Unknown
  Bacterial polypeptide expressing nucleotide sequence isolated from the Sargasso Sea
atttgataaagaaataaatttaaatgctgatgaaattttgcctatgataacttgggggacatctcctcaagatgtgattaccattgatgaaaaagtaccaaatccacaaaatgagaaggatgaagataaaaaaaattctttagaaagagctcttaattatatgggtttaaaaccaaatatggcagctaaagacattaagatagataaagtttttattggaagttgtacaaacggtagaattgaggatttaagagaagctgcaaaaattttaaaagataaaaaaatagcctcccacgtgcatgcaatggttgttccaggatctggattagtaaaagagcaagcagagcaagaaggactagacaaaatttttgtaaattctggttttgagtggagagaaccaggttgttcgatgtgtttggcaatgaatgcagataaattaaagcctgaggagaggtgtgcatcaacatcaaatagaaattttgagggaagacaaggtaggggtggaagaactcatttagtgagccctggtatggctgcggcagcagcgatatcgggaagcctggacgatgtaagaaaatatcaaaattaat

SEQ ID NO: 283853 - DNA, 259 bp, Unknown
  Bacterial polypeptide expressing nucleotide sequence isolated from the Sargasso Sea
tatgcaaaaatttaatacactaaaaagcattccagcttatttaccaatagtaaatattgatacagatatgattattccaaaacaatttttgaaaacaataaaaagaacaggcttaggtaaaaatttattttttgagatgagatatgatgaaaaaggcaaagagattaatgattttgttttgaatcaaagtccattcgatagctcaaagattgtgattgcaggtaaaaattttggttgtggctcatcaagagagcacgct

SEQ ID NO: 283854 - DNA, 923 bp, Unknown
  Bacterial polypeptide expressing nucleotide sequence isolated from the Sargasso Sea
gtttgtggagatagccacaccgcaacacacggagcttttggcgctctagcatttggaataggaacttctgaagtagaacatgtgcttgcaactcaaactcttctacaaaaaaaatcaaaaaatttaagagtaagcgtaaccggaaagctaccaactggagtgacttcaaaagatgtcattttacaaactattggaaagattggtacggccggcggaacaggtatggttattgagtatgctggcgatgtaataaaagatttaaatatagagcaacgtatgaccatttgtaacatgtccatagaagcgggtgcacgtgctggattaattgcaccagatgaaaaaactattaactatctaaaagacaaacccatgtcccctaaagatgacaattgggacaaagctgtagaatattggaataagctaaaatccgataaggatgctaagtttgataaagaagtagaaatagaaggagataaaattagcccaatggtaacttgggggacatctcctcaggatgttgtttctgtaactgatatagttcctgatcctgaaaaagaaaaagatttagataaaaaaaaatctatgatcagatcattgaactatatgggtcttaaaccaaatacaaaaataactgatattaaagtagataaaatttttattggtagttgcacaaatggaagaataggcgatttaagagatgctgctaaaattttaaaaggaaaaaaaattgctaagcatattactgctatggttgtcccaggttctggattagtaaaacaacaggcagaacaagaaaaaatagacgaaatatttaaagaagctggttttgaatggagggaaccaggatgtgtcatgtgtcttgctatgaatgctgacaaacttaatccaaagagagatgtgcttcgacatcaaatagaactttg

SEQ ID NO: 283855 - DNA, 916 bp, Unknown
  Bacterial polypeptide expressing nucleotide sequence isolated from the Sargasso Sea
agatgtaattctacaaataataggaaaaataggtactgctggaggaacaggatgtgtaatagaatatgcaggtgatctaattaaatcgcttagtgttgagaatagaatgacaatttgcaatatgacgatagaaggtggcgcaagagcaggattgatagctccagatgaaaagatatttaaatatttagaaggcagaccaatgtctcctaaaggaaatgattgggataaagccctagataattggaaaaatttaaatactgatgagggtgcaaattttgacaaagaggtaaacctaactgctaatgaaatttcgccaatgataacttggggaacttcacctcaggatgttattacgatagatgaaagagtaccaaatccaaataatgagaaagatgaggatagaaaaaattctttggaacgagccttaaattatatgggcttgaaaccagatatggcagctaaagatattaaaattgataaagttttcattgggagctgtactaatgggagaattgaagatttaagagaggccgcaaaaattttaaaagataaaaaaattgcacctcatgttcatggtatggttgttccaggttcaggattagttaaagaacaagctgagcaagaggggttagataaaatttttgtaaagtcaggatttgagtggagagagccaggatgttcaatgtgtttagcaatgaatgcagataaattaaaaccagaagagagatgcgcttcaacatcaaatagaaattttgaaggtagacaaggcagaggtggaagaactcatttagttagccctggcatggctgctgctgcagccatatctggaaatcttgatgatgtgaggaaatatcaaaataaatatgcaaaaattcaacactttgaaaagtataccagcatatttgccaatagttaa

SEQ ID NO: 283856 - DNA, 496 bp, Unknown
  Bacterial polypeptide expressing nucleotide sequence isolated from the Sargasso Sea
gttcctgacccaaataaagaaaaaaataaagatagacaagcttctatgaaaagatctttagaatatatgggtttagaagcaaatacaaagataacggatataaaaattgataaagttttcattggaagctgtacgaactcaagaattcaagatttaagagaagctgcaaaacttttaaaaaataaaaaaatcgcaacacatgttaatgcaatggttgtaccaggatcaggtttagttaaaatccaagctgaacaagaaggtttagataaaatttttaaagactcaggttttgaatggagagaaccaggatgttcgatgtgccttgctatgaatgcagataagctgaacccaagagaaagatgtgcctcaacttctaacaggaattttgaaggacgtcagggaagaggtggaagaactcacctagttagtcccgcaatggctgctgctgctgcaatagaaggccatttatctgatgtaagaaaatttaataattaaa

SEQ ID NO: 283857 - DNA, 490 bp, Unknown
  Bacterial polypeptide expressing nucleotide sequence isolated from the Sargasso Sea
tgtgccggacccagaaaaggaaaagaacgtggatagaaaaatggccatgaaaagatctcttgattatatgggattaaaagcaaacaccaaaatttcggacataaaaattgataagatttttataggaagttgtactaatggaagaatagaggatttaagattggctgcagatcttcttaaaggcaaaaaaattgccaaaaatgttagcgctatggtagttccaggatctggattggttaaagagcaagctgaaaaagaaggaattgacaaaatattcaaagaagcaggctttgaatggagagagcctggctgttcaatgtgtttgggcatgaatccggatcagttaaaacctagagaaagatgtgcttcaacatcaaatagaaactttgaaggcaggcaaggtcgtggaggtagaacacatttagtcagcccaggaatggctatcgcagcagcaattaaagggcatcttactgatgtaagagaaatataa

SEQ ID NO: 283858 - DNA, 375 bp, Unknown
  Bacterial polypeptide expressing nucleotide sequence isolated from the Sargasso Sea
tatggaaaagtttaataacttaaaatcaataccatcatatctatcattacaaaatattgatacagatatgattataccaaagcaatttttaaaaaccattagaagaacaggtttaggaaaaagtttattttatgaaatgcgttatgatgaaaatgggaaagaaaacgttgatttcattcttaacaaagaaccttataataaatcaaaaattcttttagcaggaaaaaattttggatgtggttcatctagagaacacgctccatgggctttatcagattttggtataaagtgtgtaataagtgcaagctttgcagatattttttacaataactgttttaaaaatggaattcttccaattaagattgatgacaaaat

SEQ ID NO: 283859 - DNA, 667 bp, Unknown
  Bacterial polypeptide expressing nucleotide sequence isolated from the Sargasso Sea
cacgcgcccaaaggtcaagaatgggataaggctatttcttggtggaaaagtttagctagtgattcaaaagcaatattcgatgatgagattcaattagatggatcatcaatcgaacccactgttacttggggtataactcctgggcaaggaatttcaatcaaagaaacaattccaaaccctgagtttcttcccaaaaatgagcaacaaatcgctaaagatgcttgtaaatacatgaatctaaaaccagacgaacccatagagggacaatcaattgatgtttgctttattgggagctgtaccaatggaagattaagtgatctcgaagaggcatctaaaattgttaaaggtaatacagtcgctgatgggattagagcatttgtcgttcctggttctcaaaaggtcgctaaggaggcaaaagaaaaaggattagataaaatatttcttaaatcaggttttgaatggcgagaaccaggttgttcaatgtgtctcgccatgaacccagataaactagaaggcagacaaataagcgctagttcaagtaatagaaatttcaaaggaagacaaggctctgcaaatgggagaaccttgttaatgagccccgctatggttgctgctgctgcaataaatgggaaggttacagatgtaagaaagttcctgcaagagtaaa

SEQ ID NO: 283860 - DNA, 748 bp, Unknown
  Bacterial polypeptide expressing nucleotide sequence isolated from the Sargasso Sea
ccgcaggccttcgaaggcctgcgcaatgccgggcgggccgttcgcgcgccgaaccgcacccttgccgtcgccgaccacaacgtgccgacaacagatcgctccgccggcatcgccgacgaggaatcgcgcattcaggtcgatgcgcttgccaagaacgccgccgatttcggtgttccctatttcgccatgaacgatatccgtcagggtatcgtccatgtgatcgggccggagcagggcttcacccagccgggcatgactatcgtctgcggtgattcgcacaccgcgacccatggcgcgttcggcgcgctggcatttggcatcggcacatccgaggtcgagcatgtgctggccacccagacgctgatccagaagcctgccaagaacatgcggatcaccgttgacggcgatctggcacccggcgtcaccgccaaggatgtgatcctcgccatcatcggcaagattgggaccgccggcggcaccgggcatgtcatcgaatttgccggctcggccattcgcgacctgtcgatggaaggccggatgaccgtctgcaacatggcgatcgagggtggcgcgcgcgccggcatgatcgcgccggacgaaaagacattcgcctatattgaggacaagccgatgtcgccgaagggcgatgtctgggacaaagccgtcgcctactggcgctcgctgccgtccgacgaaggtgcctgctatgacaccgagatcgtgcttcccgccgccgagatcgcgccga

SEQ ID NO: 283861 - DNA, 519 bp, Unknown
  Bacterial polypeptide expressing nucleotide sequence isolated from the Sargasso Sea
aatggaagttgacgacgatcagcaggtagatcagcaggaccgcgccggctggaatgatcatttagtttcagaaaatgaagatggaacatcaatcatttatattgacagacatcttgttcatgaagttacaagtccccaagcatttgaaggactaaaaattgcaaacagatcagtaagaaaacctaattttacattagccactgctgatcacaatattcctacaacaaatagagatgagggaatatcagatccagagtctaagttacaggtagatactcttgaagagaattgtaaagagcacggaattacttttctttccatgtctgataaaagacagggcatagttcatattatcggaccggagcaaggtttcacacaaccaggaatgactatcgtttgtggtgatagccatacgtcaacacacggtgccttcggtgctcttgcatggggaattggaacttctgaagtagaacatgttctttgcactcaaacattggtacaaactaaagctaagaatat

SEQ ID NO: 283862 - DNA, 868 bp, Unknown
  Bacterial polypeptide expressing nucleotide sequence isolated from the Sargasso Sea
ataggaacttcagaagtagagcatgttttggcaacacaaacattaattcaaaaaaaatcaaaaaatttaagagtaaatgtaactggaaaactattaacaggaattacttcaaaagatgtaattttacagactattgggaagataggaactgccggtgggacaggcatggttattgaatatgctggaaaagttatagaaaatttgaacatagaacagcgaatgacaatatgtaacatgtcgatagaagccggtgcacgggctggattaattgctcctgatgaaaaaactattcaatatttaaaagataaaccaatgtcaccaaaaaaaacaaattgggataaagctgtggagtattgggataaactcaaatctgataggaatgcattttttgataaagaagtagaaataaaaggagaagatattagtccaatggtaacctggggaacttcaccacaggatgttgtgcgtatcactgatgtagttccagatccagaaaaagaaaaaaatgaagatagaaaaaaatcaatgataagatctttaaattatatgggtcttcagccaaacacaaaaatgacagatataaaagtagatagaatttttattggtagttgtacaaatggaagaataggagatttaagagatgctgcaaaaattattaaagggaaaaaaattgctagtcatgttaatgcaatggtagtccctggatctggcctagtaaaacaacaagcagaacaagaaaaaatagataaaatttttattaatgcaggttttgagtggagagaaccaggatgttcaatgtgtcttgctatgaacgcagataaacttaactctaaagaaagatgtgcctctacatcaaatagaaatttga

SEQ ID NO: 283863 - DNA, 550 bp, Unknown
  Bacterial polypeptide expressing nucleotide sequence isolated from the Sargasso Sea
caaacagtttttgaaaacaataaaaagaactggacttggtgaatttttattctttgaattgaagtatgatcaagacggaaatgaaattagctcattcgctctcaatcaagaccaatacaagggagcgaatatacttatagctagcaaaaattttggttgtggttcttctcgtgagcatgctccatggtcaatagcagattatggaataaaatgtattattgccccaagctatgccgatattttttataataactgttttaaaaatggcatactgccaattattttagatgaagaaacagtatcaaaattacaggacactgcagaaaattctcttaattttaacattgatttaaaaaagcaatgcataacatatattgaaaataatgaacaaaaagaaattagttttgatattgatcctgctaagaaaaattctttattagaaggattagatgatattggattaacactaaacaaatccaacaccattactgactttgaaggcattcaagaaaagaaaactccttggttgtatggcagtaaattggtatga

SEQ ID NO: 283864 - DNA, 298 bp, Unknown
  Bacterial polypeptide expressing nucleotide sequence isolated from the Sargasso Sea
gatgactggcaagacgctctacgacaagctctgggaaatgcacgaagtgaaacgtcgcgacgacggttcctcgctgatctacatcgatcgtcacatcctccatgaggtgacctcaccgcaggctttcgaaggcctgcgtctggccgggcgcaagccgtggcgcatcgacgccaacatcgccaccccggatcacaacgtgccgaccaccaaggccgagcgtcagggtggcctcgaagccatcgccgacgaagtctcgcgcatccaggtgcagaccctggacgagaactgcgatgacttc

SEQ ID NO: 283865 - DNA, 812 bp, Unknown
  Bacterial polypeptide expressing nucleotide sequence isolated from the Sargasso Sea
tggttatgtaattgaattttctggggatgtaataaaaaacttaagtatggaagaaagaatgacggtttgtaatatgactatagaagctggagctagagctggactaattgctccagatgagaaaacttttgaatatttaaaagataaggccatgtctcctaagggtgaaaattggaataaagcaatagatttttggaaatctttgttttctgataaaggttgtaagtttgataaagaaattaatattgatggaaaagaaatcgaaccattagttacgtggggcacttcccctcaagatatttcaccagttactggagtagtccctgatcctgataaagaaacaaatgaagatagaaaaatggcaatgaaaagatcattggaatatatgggtttgaaagccaatactaaaatatcagatataaaaatagacaaaatatttatcggaagctgtactaacggtagaatagaagatctaagattagctgcagaacttttaaagggaaaaaaaattgctagcaccgtcagcgcgatggtagtgccaggatctggacttgttaaagctcaagcagaacaagaggggctagataagatatttataaaagcaggatttgaatggagagaacctggatgttcaatgtgtctaggcatgaatccggatcagttgaaacccaaagaaagatgtgcatcaacatcaaatagaaattttgaaggaagacaaggtagaggcggcagaacccacttggttagtcctggtatggcaattgcggcagctataaaaggacatctttcagatgtaagagaaataaaatgat

SEQ ID NO: 283866 - DNA, 607 bp, Unknown
  Bacterial polypeptide expressing nucleotide sequence isolated from the Sargasso Sea
atgcaaaaatttaatcaattaaaaagtattccagcttatttaccaatagtaaatgtcgatacagatatgatcattccaaaacaatttttaaagacaataaaaagaactggtctaggaaaaaatttattttttgaaatgagatatgatgatgaaggaaacgagataaaggattttattttaaaccagaaaccatttaataattctaaaattttaattacaggaaaaaattttgggtgtggatcctcaagagaacatgcgccttgggcattacttgattttggaattacatgtgtaattagttcaagttatgcagatatcttttataataactgttttaaaaatggaatattaccaattaaaattgatgaggaaaaaattaaacaaatttctgagtactctttaagaaaagaagaaattgaaatagatttaaatgagcaaaaaattatttttggtaacaacgaaattaagtttgatttagatcaattcaaaaaaaaatgtttaattgagggattagatgatattgcactatccttagaaaaatctgaaaaaattatatcattcgaaaaaaaattgaaagcatcaaaaccatggatatttaatgattaaa

SEQ ID NO: 283867 - DNA, 901 bp, Unknown
  Bacterial polypeptide expressing nucleotide sequence isolated from the Sargasso Sea
gggtatctctgatcaagaatctaaaattcaagttgatactttagaatctaattgtaaggaatttggtattcagttatttggaatgaatgataaaagacagggtattgttcatattattggtcctgagcaaggttttactcagccaggtacagtaattgtttgtggtgacagccatactgcaacacacggggcatttggtgctttagcatttggaatcggaacttcagaagttgaacatgttttagcaactcaaacattagttcaaaaaaaagcaaataattttagaataaatgtagatggtaagcttcctctaggtgttacctcaaaagatgttattcttcagataattggcaaaattggtactgcgggaggaacaggctgtgtaatagagtacgctggtgatttaattagatcgttaagcgttgaaaatagaatgacaatttgcaacatgaccatcgaaggtggtgctagagcaggattgatagcacctgatgaaaaaatatttaaatatttagaaaagaaaccaatgtcaccaaaaggaaaaaattgggaaaaagccttagaatattggagaaatttaaaaacagatgatggtgctaagtttgataaagaaatcaatttaaaagctgatgaaattttacctatgataacttggggaacatctccacaagatgtaattacaattgaagaaaaagttccaaatccacaaagtgagaaagatgaagataaaaaaaattctttagaaagagcattaaattatatgggtttaaagccaaacatggcagctaaagatattaaaatagataaagtttttattggaagttgcactaatggaaggatcgaggacttgagggaggcagcaaaaattctaaaagataagaaaatagcttctcatgttcaa

SEQ ID NO: 283868 - DNA, 574 bp, Unknown
  Bacterial polypeptide expressing nucleotide sequence isolated from the Sargasso Sea
atgcaaaaatttacttttataaaaggtattccatcatatttacctatagtaaatattgatacagatatgattattcccaagcaatttttaaaaactataaaaagaacagggttaggaaaaaatttattttttgaattaagatatgatgacaaaggaaatgaaattaaagattttattcttaataataaaccacataacaattcaaaaatattaattacaggtaaaaattttggttgtggatcatcgagagaacatgctccttgggcattgctagattttggaataacttgtatcattagttcaagttatgctgatattttttacaataattgttttaaaaatggaattttaccaattattttaaaagaagacgaaataaaagaactatcagaatattctcataggaaagaagaaatatcaatcgatttaaaagaacaaaaaattatttatggtaataacgaaattcaatttgatatagatcaatttaaaaaaaaatgtttattagagggacttgatgatattgctctatctttagaaaaatcagacaaaataactttgtttgaaaaaaattaaa

SEQ ID NO: 283869 - DNA, 380 bp, Unknown
  Bacterial polypeptide expressing nucleotide sequence isolated from the Sargasso Sea
ttttattggcagttgtacaaatggaagaatggaggatttaagagaggctgcaaaaatattaaaaaataaaaaaaaggcatcccatgttgaagcaatggtggtcccaggatctggcttagttaaacagcaagcagaacaagagggattagataaaatttttattaactcaggatttgaatggagagagcctgggtgttcaatgtgtcttgctatgaatgctgacaaattgaagccagaagaaagatgcgcgtctacttcaaatagaaattttgagggaagacaaggaagaggtggaagaacacatttagtaagcccaggtatggccgcagctgctgctatttctgggagtctcgatgatgttagaaagtatcaaagttaaa

SEQ ID NO: 283870 - DNA, 465 bp, Unknown
  Bacterial polypeptide expressing nucleotide sequence isolated from the Sargasso Sea
tagaagatgttaatagaagaaaagctgttgagagatctttagaatacatgggtttagaacctgatcaagaaatcgaaaaaataaaaattgataaagtttttattggttcttgtacaaatggaagaatagaagatttaagagaggttgcaagagttgttgaaggaaaaaaagtatctgttgactcgatgatagttccaggatctggcttagttaaagagcaagcagagagtgaaggtttagataaaatttttatagatgctggatttgattggagggagcctggttgctcgatgtgtttggcaatgaatcctgatcagttaaaacccaaagaaagatgtgcttcaacttcaaatagaaactttgagggaagacagggtagagaaggaagaacacatctagtaagcccggttgttgctgccgcttcagctattaaaggaacttttgctcaagagagtgatttgtaat

SEQ ID NO: 283871 - DNA, 689 bp, Unknown
  Bacterial polypeptide expressing nucleotide sequence isolated from the Sargasso Sea
tatgtttgacaaaatatgggatgcgcatcttgtaaaagaagaagaaggaataccttcaatactttatatagaccttcatcttattcatgaagtgacttctcctcaggcatttgaaggattgagattaactgatcgagaagttaggcgcaaagacctcacccttgctgttgtggatcacaacactcctacatggtcactagatttaccaattactgaccctatagctaaacaacaattagacacgttagaaaagaattgttctgattttgggattaccttacatgatagatttagccctcttcaaggaatagtacatgttattggtccagaacaaggtcacacacaacctggtaaaacaatagtatgtggcgatagccacacctccacccatggagcttttggggcttttgctatgggaattggcacatcagaagtagaacatgtattagctactcaaacactcaggcaatttaaacccaaaactatggaaataagagttaatggagaattgcctgaaggtgttactgctaaagatattattcttgggattattggtaaaatcggtacagctggagctacaggatatgttgttgaatatacagggaaagctattagaacattgtctatggaaggtcgtatgacaatatgtaatatgagtattgaagcaggagctagggcagggatgattg

SEQ ID NO: 283872 - DNA, 793 bp, Unknown
  Bacterial polypeptide expressing nucleotide sequence isolated from the Sargasso Sea
agacaaggaatagtacatataattggccctgaacaaggtcttacccaacctggaatgacagttgtatgcggtgattctcacactgctactcatggagcttttggtgctcttgcatttgggataggaacttcagaagtagagcatgttctagctacacaaacacttcctatgaaaagacctcaaaatatgagaattacaattgaggggaatctcggaataggtgtcgagccaaaagatttaattttagctataatcggtgagattggaacagcaggaggtactgggcacgttatagaatatacgggacaggcaataaagtctctttccatggaaggcagaatgactgtttgcaacatgaccattgaggctggagcacgagccggtttgattgccccagacgaaacaacatttgactatgtaaaaggaaggcctatggctcctaaatcagaaaattgggaaaaagctgttgaatattggacttctcttccctcagacccgtcagcaacatacgaccgtgaaagagttattgatgcaaacaatatcgcgccacaagttacttggggcaccagccctgaagatgttgttgctatagaccaattagtgcctgatcctaacaaggaaactaatttagcaaaaaaacaagccatggaaagagctatagattacatgggacttaggccaggtatgaaaatgacagatatcgagataaataaagtttttataggatcctgtacaaatgctagaatagaagaccttagaaatgcagcccaaataattaatggaaacaagattt

SEQ ID NO: 283873 - DNA, 771 bp, Unknown
  Bacterial polypeptide expressing nucleotide sequence isolated from the Sargasso Sea
tctaaacgtaatgttagacatcctaagttaactcttgcggttgctgaccataatgttcctacaactgatagatctaaaggtatttcagatatagagtccaaaattcaagttgatacattagagtctaattgtaaagaatttgaagtcccactatttggaatgaatgacaaaagacaaggtattgtccatatcattgggcctgaacaagggtttactcaaccaggcacagttattgtttgtggagatagtcatacagcaactcatggagcatttggtgctttagcttttggaattggcacttcagaagtagaacatgttttagcaacacaaacattagtccaaaaaaaagcaaataattttagaataaatgtagagggcaaacttcctttaggcgttacttctaaagatgtcattcttcaaataattggaaaaattggtactgcaggaggaactggctgtgttatagagtatgctggtgatttaataagatcattaagtgtcgaacaaagaatgactatttgtaatatgacaatagaaggtggtgctagagcaggattaattgcaccagatgaaaaaatatttaaatatttaaatggaaaaccaatgtcaccaaaaggtaaagattgggataaagctttagaatattggaaaagtttaaaaactgatgaaggtgctaaatttgataaagaaataaatttagatgccaatgaaattttgcctatggttacttggggaacatcacctcaggatgtgatcacaattgatgaaaaa

SEQ ID NO: 283874 - DNA, 591 bp, Unknown
  Bacterial polypeptide expressing nucleotide sequence isolated from the Sargasso Sea
aatgaaaaaatttactaatttaaaaagtatacctgcataccttccaatagtaaatattgataccgatatgataattccaaagcaatttctaaaaacaataaagagaacaggtttaggaaaaagtttattttatgaaatgagatatgataacgatggaaatgaaattaaagattttatattaaatattgaaccttataataattcaaaaattttaattgcaggaaaaaattttggttgtggatcatccagagaacatgcaccttgggcacttttagattttggaataacatgcataataagctctagttatgctgacattttttatagtaattgtttcaaaaatggaattttaccaattactatctccgaagataaaattaaagaattagcacagtactcaaatcgtaaagaggaaatttccgttgacttggctgaacaaaaaattacttacggaaataatgaaattaaatttgatatagatgattttaaaaaagagtgtttaattgaaggttatgatgatattgctttatcattgaattataaaacaaaaatcgaaagtttcgaaaataagataaaatctgaaagaccttg

SEQ ID NO: 283875 - DNA, 403 bp, Unknown
  Bacterial polypeptide expressing nucleotide sequence isolated from the Sargasso Sea
taaagatatcaaaatagataaagtatttattggcagttgtacaaatggaagaatagaagatcttagagaggcagctaagatcttaaaagataaaaaaattgcaagtcatgtaaatgcaatggttgttccgggttctgggctagtaaaagagcaagcagaacaagagggattggataaaatttttattaattcaggatttgagtggagggaacctggatgttcaatgtgtctagctatgaattccgacaaattaaaaccagaggaaagatgtgcatctacctcaaacagaaattttgaaggacgtcaaggtagaggtggcagaacccatttagtcagtccagcaatggcagcaacagcagcggtttctggtaacttagatgatgttagaaaatattcaaattaa

SEQ ID NO: 283876 - DNA, 364 bp, Unknown
  Bacterial polypeptide expressing nucleotide sequence isolated from the Sargasso Sea
tcatgtactaatgccagaataactgatctaagaaatgctgcaaaaattgtagaaggtaaaaaagttcaccctaaagtaagagcacaaataatgcctggttcaacaataactaaattacaagcagaaaaagaaggactagataaaatttttaaagattcaggttttgaatggagagaatctggttgttctatgtgcttaggcatgaatcctgatattattgctccaggtgaaagatgtgcatcaacttcaaatagaaattttgaaggaagacaaggtaaaggaggaagaactcatcttgttagtcctgaaatggcagcagcagctgcgatagaaggacattttgttgatgtaagagattggtagg

SEQ ID NO: 283877 - DNA, 791 bp, Unknown
  Bacterial polypeptide expressing nucleotide sequence isolated from the Sargasso Sea
aagacaaggaattgttcatataattggtcctgaacaaggatttacacaaccaggaacagtgattgtttgtggtgatagtcatactgcaacacatggtgcttttggagccctagcttttggtataggaacttcggaagttgagcatgttttggcaacacaaactttaattcaaaagagatcaaaaaatttcagagtgaatatagaaggaaaactccctataggtgttacctctaaagatgttattttacaaaccataggaaaaataggaactgctggcggcacaggtacagtaattgagtatgcaggaagtgttatagaaaatttaagcatagagcagcgtatgacaatttgtaatatgtctattgaagcgggagctcgtgcaggattaattgctccagacgaaaaaactattcaatatttaaaagataaacctatgtcacctaaaaaatcaaattgggacaaagctgttgaatattggtcaaaactaaaatccgattcaggagctgaattcgataaggaagaaaaaattatagcaaaagatattagtccaatggttacatggggaacttcgccagaagatgtcgtttcgattttagattctgtaccagatccagaaaagcaatcaaacaaagatagaaaattgtccatgcaaagatctttaaaatatatgggacttaacccaaacacaaaaatgacagatataaaagttgatagaatttttataggaagttgcacaaatggaagaataggagatttgagagatgcagcaaaaattttaaaaggaaaaaaaa

SEQ ID NO: 283878 - DNA, 403 bp, Unknown
  Bacterial polypeptide expressing nucleotide sequence isolated from the Sargasso Sea
taattcaccaatattattaacaggaaaaaattttggttgcggatcgtcaagagaacatgctccttgggcattattggattttggtatcaaatgtataattagcccaagttttgcagatattttttataacaactgttttaagaacggtatgttgccgattattctcgaagagaaaaaaattgaagaacttgccgagtattcaaaaaggcaggagaatattgaaataaatcttactaatcaagagattgtatttggtaataagaaaattgaatttgaagttgatggatttaaaaaaaaatgtttggtcaacggtttagatgatatcgctatgaccttagagcaaacaaaaaaaatatcttcatacgaaaatgaagctcaaaaaagtaaaccttggatgaattaa

SEQ ID NO: 283879 - DNA, 844 bp, Unknown
  Bacterial polypeptide expressing nucleotide sequence isolated from the Sargasso Sea
tatggcgccgttaacaatgttcgataaactctggaataaacatgttgtgtatgaagaagaaggacaaccttcgattttgtatatagacctacacttggtccatgaggtgacttctccgcaagcctttgatggattacgtatggcaggaagaagtgtgagaagaccagatcttactgtttgcacagtcgatcacaacactccaacttgggaacttactaagccagttactgatgaaatatctaaaaaacaacttgatgctcttgagaaaaactgtaaagagtttggtctagatctttacgacagatttagtgaatttcaaggaatagttcatgtcataggtccagatttgggttacacccagcctggtaagacagttgtgtgtggtgacagccatacctcaactcatggtgccttgggttgcttcgctataggaataggcacttctgaggtggaacatgttttagcaactcaaaccctaagacaatttaagcctggatcaatggaagttagggttgaaggcccacttccgtttggagttgaagccaaagatgtaattctaggcatcataggagagattggaacgaatggtggaactgggtacgtaattgagtatacaggagaagctattgagtcgttgagcatggatggacgcatgacggtttgtaatatgagtattgaagcaggagctagagctggaatgattgctccagatgaaaaaactatagagtatgtgaggaacagaaggtttgctccaaaaggagaagagtttgaaaaagcagctgccgaatggttagcactcagatctgatcccggcgctaagtacgataaggtcgttgttatagat

SEQ ID NO: 283880 - DNA, 400 bp, Unknown
  Bacterial polypeptide expressing nucleotide sequence isolated from the Sargasso Sea
aatgccaaaaactttatacgataaaatttgggaagagcaccttgtacatcaacaagatgatggaacttctttactttatgttgatagacacttagttcatgaggtaacaagtccacaggcatttgagggtttgagaataaataagagaaaagtaagaaaaccaaacttaacactagctgttgcagatcataacgtaccaacaacagatcgatcaaaaggaataggagatcaagattctaaaatacaagtagagactttaagaaaaaattgtaaagaatttggtgtacctctgtttgacatgaatgataaaagacagggtatagttcatattattggaccagaacaaggctttacccaaccaggaactttaatcgtatgtggagatagtcatacagcaaca

SEQ ID NO: 283881 - DNA, 694 bp, Unknown
  Bacterial polypeptide expressing nucleotide sequence isolated from the Sargasso Sea
gtaatcacatcactaactgttgaacaaagaatgactatctgtaatatgacaatagaagctggtgcaagagcaggcctgatagccccagatgaaaaaatttttgactatttaaaaggtaagcctatgtcgcccaaaggtgacagttggaacagagcattagacgaatggaaaaaactaaagtctgatgatgatgcagtttttgacaaagagataactatcaatggaaatcaaatactaccgatgattacatggggaacttcaccagaggatgttattacaatagaccaaaaggtcccaaaccctagaaacgagacagatgaagataaaaaaaattctatagagagatctttaaaatatatgggtctaaaacctgatatggctgctacagatatcaagattgataaagttttcattggaagttgcacaaatggaagaattgaggatttaagagaagcagctaaaattttaaaagataaaaaaatttctacacacgttgaggcgatggtagttcctgggtcaggtcttgttaaagaacaggcagagcaagagggactagataaaatttttattcaatcaggatttgattggagagaacctggatgttctatgtgtttggccatgaatgctgataaacttaaaccagaagagagatgtgcctctacatcaaatagaaattttgagggaagacaaggaa

SEQ ID NO: 283882 - DNA, 727 bp, Unknown
  Bacterial polypeptide expressing nucleotide sequence isolated from the Sargasso Sea
catggctattgaagctggagctaaggttggtcttgttggggttgatgcaaccaccttagattatgttaaaaagcattctaatttgtcagactcaatctatagtcaagcttgccaatattgggagactttaaaatcagatttagatgcaaattttgatcaaacaattaatatcgatgtctcaaagataaagccacaagttacttggggcacttctcctgaaatgaccatagattttgatgcagagattccatcccaaaaggatgtagatgaatcaaatcgtgagaatttattgctcgctaaagcctacatgggcctcgatgaatcaaagtctctgcaagatttgagttttgataaaatttttattggttcttgtactaactcacgaattgaagacttgcgtgatgcagcatctgcagtagagggaaagaaaatttcaaaagatatcacggaagctatagtggtacctggttcaggtatggtcaaagcgcaggcagaagatgaaggccttgataaaatttttattgaagcgggttttttatggcgcgatcctggctgctctatgtgtttaggaatgaaccctgatcaattaaagccctatgagcgttgtgcatcaacttccaacagaaactttgaaggtagacaaggcaatcttggaagaactcatttaatgagccctttgatggcagcattaacagctataaacggaaaaataaccgacccatcatga

SEQ ID NO: 283883 - DNA, 508 bp, Unknown
  Bacterial polypeptide expressing nucleotide sequence isolated from the Sargasso Sea
aatgcctaatacattatacgataaaatttggaatgatcacttagttgaccagcaatcagacgggacggctttactttttgtagatagacatcttgttcatgaagttactagccctcaagcatttgaaggtttgagaaattctaatcgaaaggtaagacatccaaaactgactttggcagtagcagatcataatgtcccgacaacagacagaacaaatggaattgccgatcaggagtctaaaattcaagttgatactttagaaaataattgtaaggaatttggaattcaactttttgatatggatgacaagaggcaaggtattgttcatattattggtcctgaacaaggatttactcaaccaggaacagtaattgtttgtggagatagccatacagctacgcatggtgcttttggtgctttagcttttgggattggtacatcggaagtagaacatgttttagcaactcaaacattagttcaaaaaaaagcaaaaaattttagaaattaa

SEQ ID NO: 283884 - DNA, 574 bp, Unknown
  Bacterial polypeptide expressing nucleotide sequence isolated from the Sargasso Sea
gctgctccgttaagaatgataaatgttgatactgacatgatcattcctaaacaatttttaaagacaattaaacgctcaggtttaggaaaaaatcttttccacgaattacgatatgatcttcaaggcaatataaagaatgattttattttaaattgggatccctataaatcagcaaaaatacttatagctggtgaaaattttggatgtggatcaagcagagagcatgcaccatggtctttattagactttggatttaaatgcattatagctcccagttttgcagatattttttataataattgttttaagaacggaattttaccaattaagctaactaatgaaaaagtggataatttaatgaatcaagctgaaagcaaaaagaaatttacaattaatttggaagaacaacaaattttagtagaatctaattctgaaattaaatttgaactagatccttttaggaaaaaatgtttacttgaaggtcttgatgatattgctttgactctaaaaaaagttgataaaataggaacttttgaaaataaattacacgaatcaaaaccttggattctttaaa

SEQ ID NO: 283885 - DNA, 841 bp, Unknown
  Bacterial polypeptide expressing nucleotide sequence isolated from the Sargasso Sea
cttggttcaaaaaaaatctaaaaattttagaataaatgtgaatggatcacttccggtaggtgtaacctctaaagatgtaatattacaaattattggaaaaattggtactgcgggaggcactggatatgttattgagtatggaggaaatcttatttcaaccttaagtgtcgaacaaagaatgaccatttgcaatatgacaattgaaggtggagcgagagctggtttaatagaacctgatcaaaaaatttttgattatttaaaaggaaaaccaatgtctcctaaaaaagaaaactgggataaagcccttgaatattggaatactttaaggtctgatagtgatgctaaatttgataaagaaattagcctagaaggttctgaaattaaaccaatggtaacctggggaacttctccacaggacgtagttgaaattgatggcaaagttccaaatcctgaaaatgaaaaagatgaagacagaaaaagttcgattactagatcactaaattatatgggtctaaaacctaatacaaatatacaagatattaaaatagataaagtatttattggaagctgtacgaacggaagaatagaagacataagagatgcagcaaaaattttaaaggataagaaagtagccccacatgtaaatgcaataattgttccaggatcaggtttagttaaagaacaggctgaacaggaaggtttagataaaatttttaaagagtcaggatttgaatggagagagcctgggtgctcaatgtgtttagctatgaatgcagataaactcaaacccgaagagagatgtgcatctacatcaaatagaaattttgaaggaagacaggga

SEQ ID NO: 283886 - DNA, 313 bp, Unknown
  Bacterial polypeptide expressing nucleotide sequence isolated from the Sargasso Sea
aaaagtatctaagaatgtaaaagcatttgtagttcctggttcagaaaaagtaaccaatgaagcgaaacacgaagggcttgatcagatatttaaggattctggatttcaatggagagaaccaggctgctcaatgtgtttagcaatgaattcagataagctaataggtaatcaaattagtgctagttctagtaatagaaatttcaaaggtagacagggatctcctagcggtagaacactgctaatgagtccagcgatggttgctgctgctgcaattaatggcaaagtcagtgacgttcgagaatttattaactaa

SEQ ID NO: 283887 - DNA, 676 bp, Unknown
  Bacterial polypeptide expressing nucleotide sequence isolated from the Sargasso Sea
gggccagaacttggaatgactcagccaggtatgactatagtatgtggtgattcacatacatcaacacatggcgctcttgcatcactctcatttggaataggtacaagtgatgtcgagcatgtacttgctacacaatgccttaatcttgcaaaagagaaaaactttaatatagaagtaaatggtgtgctccatccttacattacatcaaaggatttaattttgtatataatcggaagtataggtacttcaggtggaacaggatatacaatcgagtacactggtgaaactatatcagacttaagtatagaatcacggatgaccatatgtaatatgacaatagaggctggtgctaaatccggcttgatggcttttgatgagaaaactcatgattatttaaaagatagagaatttctaccttcatctaaacattatgataatgcacttaagtattgggagacattaataagtgacagcggagtatcatttgatagaaaagagcaattcaatgcgaatgatattcaaccccaagtaacatggggcacttctccagaaatggtcacatctgtcgatgaatgtattcccagttcagattcaatcaataatgaggaagaatatattgatacactcgcgtatatgggtctagaacctaaaaccgaaataaaatcgattgatcttg

SEQ ID NO: 283888 - DNA, 343 bp, Unknown
  Bacterial polypeptide expressing nucleotide sequence isolated from the Sargasso Sea
atgccatatacaatttacgataaaatttggaatgaacatcttgtacacgaacaagaagatggaacatcactactttttgttgatagacatttaattcatgaagtaactagcccacaagcatttgaaggtttaagaaattcaaaaagaaaagtcagacaacccaaacttactttagctgtagcagatcataatgttccaacaacggatagaacaaaaggaatttcagataaagaatcaaagatacaggtagaaacactagattcaaattgtaaagaattcggaattcaaatttttggaatgaatgataaaagacaaggaatagttcatatcattgaccagagca

SEQ ID NO: 283889 - DNA, 424 bp, Unknown
  Bacterial polypeptide expressing nucleotide sequence isolated from the Sargasso Sea
atatagtccgtataataaatctaaaattttaattgcaggaaagaattttggatgtggctcttctagagaacatgctccttgggctttaatggattttggaataacttgtgtaattagttcaagttatgcagatatattttataataactgttttaagaacgggattctcccaattacaatttcagaggatcaaatcaaagaaatctcagagtactcgaatagaaaagaggaaatttctgtaaatttacctgagcaaacaataagttttggcaataaagaaataaaatttgaaatagatcgatttaagaaaaaatgtctaatagagggattagatgacattgctttatcactagaaaaatccgcaaaaatagtttcatacgaaaataaaattaaagaagcaaaaccttggatatttaatgattaa

SEQ ID NO: 283890 - DNA, 945 bp, Unknown
  Bacterial polypeptide expressing nucleotide sequence isolated from the Sargasso Sea
tcactcatggagcttttgggtcattgcttttggaataggtacaagtcatgtaagagatgttcttgctacccaaaccatagctatcaacaaattgaaagtgaggcagatttggtgtgacaaaaaattatctaatggtgtttttgctaaggatttagtactgcatatcattcataaacttggagtaaaggcaggagtaggtttcgcatatgaattcgcagggcctgcgatagatgaattatcaatggaagaaaggatgacaatatgcaatatgtctattgaaggaggagcaagatgcggctacattaatcctgatgacaagacatttagttatattaaaaataaattgtgtgccccaaaaagtgagcattgggataaagcgctcacatggtgggaatcattaaaaagcgatgaaaattcaatttatgatgatgtaattaaattagatgcttctaaagtggagccaaccgtaacctggggaattactcctagccaaagtataagcattaatcaacaaatcccttttttagatgacttgtcctcaaatgataaattaattgcaaaagaagcttatgaatatatgagtttcaagccgggacaattaataaaagatactcctgtagacgtttgtttcataggaagttgcacaaatggaagaatcagtgacttaagagttgccgctaaagtattaaaaggcaaaaaagtatccaagaatgtcaaagcatttgcagttccaggttcagaaaaagtggcaactgaagcaaaacaagaaggtcttgatcagatatttaaggattctggatttcaatggagagagcctggctgctcaatgtgtttagcaatgaattcagataagctaataggtaatcaagttagcgctagttctagcaatagaaatttcaagggtaggcaaggatctcccagtggaagaacactgctcatgagtcc

SEQ ID NO: 283891 - DNA, 517 bp, Unknown
  Bacterial polypeptide expressing nucleotide sequence isolated from the Sargasso Sea
atgtcaaaaacattatatgataaaatatggaatgaacaccttgtacataaacaagaagatggtacatctttgctttatgttgatagacacttagtccacgaagttactagtccacaggccttcgaaggtttaagactacaaaaaagaaaagtaagacgacccgagttcacacttgcggtatctgatcataatgttcctacaactgatagatcgaaaggcatagacgacgaagagtccaagatacaagtagaaactttaagaaataactgcaaagagtttggagtagagctttttgatgtaaatgataaaagacaaggtatagttcatgttataggtccagaacaaggctttacacaaccaggtgcagtgatagtttgtggtgacagtcatacagctactcacggagcattcggcgcactagcttttgggattggaacttctgaagtagaacatgttttagctactcaaacattaattcaaaaaaaaacaaaaaatttaagaattaatattaacggaa

SEQ ID NO: 283892 - DNA, 490 bp, Unknown
  Bacterial polypeptide expressing nucleotide sequence isolated from the Sargasso Sea
gggtgggccacaggagaatgtttcgtctaaagatattgttttatatttgattggaaagattggcactgctggagggactggctatgccattgagttttcaggttcatatattgataaattatctgttgaggggagaatgactatctgtaacatggctattgaagcaggagcaaaggttggattaattgcacctgatgaaacaacaattgattatgttaaaaaaaattcttttttagatgaggaattattcaatcaagcgaagcaattttggaagagccttcgtaccgatgataaagcagtatttgataatgaaatagaaatcgacgtatctaaaattaaaccacaagtgacatggggaacatctccagaaatggtagtaaactttgatgatccaattccgacaattattgatacaaatgaagagaacaaaaagaatgttgagcttgctagaacctatatgggtattcaaaatgaattaaaaattatctga

SEQ ID NO: 283893 - DNA, 776 bp, Unknown
  Bacterial polypeptide expressing nucleotide sequence isolated from the Sargasso Sea
tatgtcggtcccaaaaaccctatttgacaagatttgggatgcgcatgttgtgcatcgccaagatgatggcacctgtctgatttatattgatcgccatctggtgcatgaggtcacgagtccgcaggcctttgaaggattacgtgacgcgaaacgcgcggtccgggcgccgaaccgtacattggcggtggctgaccataacatcccgactacagatcgttcggtcggtatcgaagatgaagaaagccggatacaggtagaagcgctagaaaaaaatgctgccgaatttggcgtgccgtattttgcgatggatgacaagcggcaaggcatcgtccatgtgattggcccagaacaaggatttaccctgcctggcatgacaatcgtgtgtggtgattcgcatactgcaactcatggcgcttttggcgctttggcattcggtatcggcacatctgaagttgaacatgtgttggccacccagacattgattcaaaggccagcaaaaaatatgcgtgttacggtcgatggctcgcttgccgacggggttacggcaaaggatgtgattttggcgattatcggcaaaattggcaccgctggtgggacgggccatgtgattgaatttgctggttcggcgatccgtggcctgtcaatggaaggccgtatgactgtgtgtaacatggccattgaagctggcgctcgtgctggcatgatcgccccagacgcaacaacatttggctatttaaaagaccgtccaatggcaccaaaaggtgacaagtgggaca

SEQ ID NO: 283894 - DNA, 298 bp, Unknown
  Bacterial polypeptide expressing nucleotide sequence isolated from the Sargasso Sea
catgttaatgctatagtagttccaggctcaggtttagttaaagaacaagcagagcaagaaggactagataaaatttttgttagctcagggtttgaatggagagaaccaggttgctctatgtgcttagcgatgaatgctgataaattaaagccggaagaaagatgtgcctctacatcaaatagaaattttgagggaagacaaggtagaggcggtagaacccatctagttagtccaggaatggctgctgcagctgcaatttcaggtaatttagatgatgtcagaaagtatcaacattaaa

SEQ ID NO: 283895 - DNA, 270 bp, Unknown
  Bacterial polypeptide expressing nucleotide sequence isolated from the Sargasso Sea
tatgaaacctcaaaccatttttgataaaatctggaataaccacattgttgacaaaagcaccagtggggaatgtctaatttatatagataggcatcttgtgcatgaagttactagtcctcaagccttcgagggactaagaaataataatagaaaagctagaaggccctctttgactttagcagttccagatcataatgttccaacaactgatagaaagtttggaataactgatactgagtcaagaattcaagtggaaaaattaattgaaaa

SEQ ID NO: 283896 - DNA, 832 bp, Unknown
  Bacterial polypeptide expressing nucleotide sequence isolated from the Sargasso Sea
ttaatttatatcgatcgacacctcgttcacgaagtaacgagcgcgcaagctttcgaaggccttcgtctagctggtcgtcgcgttcgtcgaccagagttcacgtttgccacccccgatcataatgtgccaacaactgatcgccgtttaccgattgcagaccctatctccaaacagcaaattgacacacttcgaaataactgtaatgaattcggcgtgcggctgtttgacctcggcgacactgaccaggggattgtacatgtgattggaccagagctgggaatcactcagccaggcatgacgatcgtgtgcggtgacagccacacagctacgcacggtgcatggggcgcccttgcctttgggatagggacaagtgaagttgagcatgtactggcaactcaaacgcttcgtcaggtgaagcccaaatcactcgaagtccgtgttgatggtgcgcttctgcaaggcgtaacagcaaaggaccttgtgctgtatcttatcgggaaattgtctaccgaaggtggcactggttacgttatcgagtacacgggccctgtcattcgaggcttcggaatggaacaacgaatgaccgtttgcaatatgtcgatagaggccggagcccgtgctggaatgattgcaccagattccgtaacttttgactatctcagagaacgtgactttgctccaaaagattttgagaaagcgattgctcgctgggaacaactgccgtctgatccagatgctgtctatgacagagtagaggtattcgatggtgcagatattgttcctcaagtaacgtggggcacaaatcctgcgcaagttgttggtgtcgacactt

SEQ ID NO: 283897 - DNA, 643 bp, Unknown
  Bacterial polypeptide expressing nucleotide sequence isolated from the Sargasso Sea
atgaaatctaatagtgaaggattaataatcgatggagttgtaagttatatagatagagataatatcgatacagatcaaatcattccaacagaatacttaaaatcaataaaaaagtttggttacgaggattatttgtttgatggatggagatataaggatgatggaaagctaggcatcaaaaaagaagatagggatataaatgaagactttattcttaataataaaccatatactgaatctaaaattcttctcggaagagataattttggatgtggttcatcaagagaacatgctgtctgggctttgagagattttggtataaaggctgttattgcatcttcatttggtgatattttttacaataattgttttaaaaatggagtattgcctatcaaattagaaaaagaaaatattgagagactttttgaccttgttaagaataaagctgttgaattttcaataaatctccaacaaagaataattcatttaaatgataaagataaaattaagtttaaagtagatgctcatttgattgatcgaataatatttggtttggatgatgttgatataagtttaaaagaaaaagataaaattatgctttttgaaaaaaatagaaaaatttcaaaaccatggatatatgtaa

SEQ ID NO: 283898 - DNA, 402 bp, Unknown
  Bacterial polypeptide expressing nucleotide sequence isolated from the Sargasso Sea
aaatattgatagcaggaaaaaattttggttgtggttcatctagagaacatgccccctgggctcttttagattttggtatcacttgtgtaattagctcaagctatgcagatattttttataataattgttttaagaatggaattttaccaatcacattattagaagatgaaatcaaggagatttctgaatattctaaacgaaaggaagaagtaacaattaatttagaagagcagaaaattatttttggaaataaagaaatcaaatttgaaatagaagaatttagaaaaaagtgcttattagaaggattagatgatatttcattatcattagaaaaattagacaaaattgaaacttacgaaattaaagttcaaaaatcaaaaccatggatatttaatgattaaa

SEQ ID NO: 283899 - DNA, 884 bp, Unknown
  Bacterial polypeptide expressing nucleotide sequence isolated from the Sargasso Sea
tcttacgatagcaactatagatcataatgtcccaactactgatagaagcttgccaatgattgatgagacatcatccacacaaattaaaacattagaaaaaaactgtaaggattttggaatcaaattatttggaataaatgatccaaatcaaggaattgtgcatgtaatagggccccaattaggaattactcttcctggaagcacaatcgtttgtggtgatagtcatacatctacacaaggtgcatttggtgcatttgcttttggtattggaactagtgaagttgagcatactcttgcaactcaaaccttatggcttgaaaaaccaaaaacttttgaaatattagctaaaggtaaaagaaaaaatccattcgcagtaacttccaaggacataattttgagcataatcaaaaaaattggaactaacggaggaaatggtcatgtattagaataccgtggtgatgcaattagtgatttatccatggaacaaagaatgactatatgtaacatgtcaattgaggctggttcaagagccggcttgattgctcctgatgaaaaaacatttgattatatcgataatagaaaatatacccctaaaaattttgatgatttagttaatgagtggcaaaaaaatcttacaaccgataataattcaaaatttgacaaaagttttacaattgatgtggaaaaaatagaacctcaagtaagttggggtaccaatccatcaatggtttctgatgtgacaggtgttgttccaacacctgaagagtttggtcatgataatgaaatacaaattcaaagtgcaaaaaaagcgttagcatacatggatttggaacctgaaacaccaattatggaaatcccaattgatagagttttcattggatctt

SEQ ID NO: 283900 - DNA, 400 bp, Unknown
  Bacterial polypeptide expressing nucleotide sequence isolated from the Sargasso Sea
aatattagtagcaggagataattttggctgtggatcaagtagagaacatgctccatgggctttatctgattttggaataaaatgtgtaatttctacatcttttgctgatatcttttataataattctttcaaaaacggtttgttgcctattacagttaccaaagatcaaagagataccttattagaagatgcaaaagatattgaaaatcctgaattggaaattgatttagaatctcaggaaataagaagaccaaatggtgcaataattaaatttgatttagatccttttagaaaaaaatgcttgatggaaggcttggatgacataggcattacactaaaaaaagcaaaaaatattgaagaatttgagaatttgcgaaatcatgaacgtccttggttgtaa

SEQ ID NO: 283901 - DNA, 433 bp, Unknown
  Bacterial polypeptide expressing nucleotide sequence isolated from the Sargasso Sea
tattttaaatcaaactccatttaataattctaaaattttgattgcaggaaaaaattttggttgtggttcatctagggaacatgccccatgggcattgttagactttggcattacttgtgtaataagttctagttttgcagatattttttataataactgctttaaaaatggaattttgcctatcattcttaataatgaaaaaattaaagaactttctgagtatactaatcgaaaagaggaaatttcagtagatctttttgaagaaaagattatttatggaaataatgaaataatatttcaaatagactcttttaaaaaaaaatgccttttagaaggcttggatgatattgctctttctttaaaaaaaagtgaaaaaataaaagattttgaaaaaatcttaaaaagcgaaaagccatggatttttaatgattaa

SEQ ID NO: 283902 - DNA, 856 bp, Unknown
  Bacterial polypeptide expressing nucleotide sequence isolated from the Sargasso Sea
gagcaaggatttacacaacctggtaatattattgtttgcggtgatagtcatactgcaacacatggtgcatttggagctttagcatttggaattggaacgtctgaagtagaacatgttttagcaacacaaactttagttcaaaagaaatcaaaaaattttaggataagtgttaatgggtcgttacctattggggtaacatcaaaagatgtaattttacaaatcattggaaaaataggtactgcaggaggtacaggttacgtaattgagtatgctggaaatcttatttctgatctaagtgttgagcagagaatgacaatttgcaatatgactattgaaggtggtgctagagcaggacttatacaaccagatgagaaaatatttaagtatttaaaaggaaaaccaatgtcaccaaagggagaaaactgggataaagccttagaatattggcacacattaaagtctgataaagatgcaaactttgacaaagagttaacattagatggttcacaaataaaaccaatggtaacttggggaacttctccacaagatgtggtggaaatagatggtaaagttccgagtccagaaaacgaaactgatccagatagaaaaaattcaattaacagatcattaaattatatggggttaaaaccaaatacaaaaatccaagatattaagatagataaagtttttattggaagctgcactaatggaagaatagaagatatcagagaagcagctaaaattcttaaagataaaaaaattgccaatcatgtgcatgcaatgatcgttcctggatctggattagttaaggagcaagctgaacaagagggtttagacaaaatatttttacaatcag

SEQ ID NO: 283903 - DNA, 799 bp, Unknown
  Bacterial polypeptide expressing nucleotide sequence isolated from the Sargasso Sea
agtcgccttcagcttgatacccttaaaaagaacagcagagattttggagttgaatatatacctatggacgatgtaagacagggtattgttcatattataggcccagagcagggactcacccaaccagggaaaactattgtgtgtggagatagtcatacagcaacgcatggtgcttttggcgctcttgcctttgggattggtacttctgaagttgaacatgttttggcaacacaaactttgtggatgagaaaatcaaaaaatatgcttgttaaaactaacggcaaacttccatttggaagtagttctaaagacctaattttatcaattattggtaggattgggactgcaggtggcacaggtcatgtaattgaatatcggggaaacgcaataaccagcctgtctattgagtcaagaatgacagtttgtaatatgacaattgaaggtggggcaagagcaggtttaattgctcctgatataaaaactattgagtatctaaaagatcgaccaaggtctcctaaaggaattaattgggataaggcacaagattattggcagaaattagtttcagattttgacgcaaaatttgataaagaaataataattaactctgatgaaattgttcctcatgtaacttggggtacgtcgccagaggatgttttacctatttccgataatgttccaatgccaaaagattttgaagatttagataaaaggcgcggtgttgagagagcaatagattatatgggtttaaaagctggccaaccgctagaaagtattaatgttgataaagtatttattg

SEQ ID NO: 283904 - DNA, 994 bp, Unknown
  Bacterial polypeptide expressing nucleotide sequence isolated from the Sargasso Sea
ctatttggtatgaatgataaaagacaaggtatcgttcatattattggacctgaacaaggttttactcaaccaggaagcataattgtttgtggagatagtcatacagcaactcatggagcttttggagccttagcttttggaataggtacatcagaaattgagcatgttttagcaacacaaacacttttacagaagaaatcaaaaaattttagaattaatgttaatggaaatttatcaataggcgttacttcaaaagatgtaattcttcaaattataggaaaaataggaaccgcaggtggcacaggctatgttattgaatattctggaaatttaatttcaagtcttagcgtcgaacaaagaatgacaatttgcaatatgacaattgaagggggtgcaagagcaggattaattcagccagatgaaaagatttttaaatatcttaagaacaaaccaatgtccccaaaaaataataattgggacaaagcacttgaatattggagcaaattaaaatctgattccaccgctaattttgataaagaaattaatattgaagcttctgaaattaagccaatggtaacctggggaacttcacctcaagatgttgttgaaatagatggtaaagttccaaatccagataatgaaatagatccagatagaaaaaattcaataaatagatcattaaattatatgggtttaaaaccaaacatgaaaatcaaagatattaaaattgataaagtttttattggcagttgtacgaatggcagaattgaggacataagagaagctgcaaaaattttaaaaaataaaaaaatagcctcgcatgtcaatggcatgatagttcctggatctggattggtcaaagagcaggcagagcaggaaggtttggacaaaattataaaagagtctggttttgaatggagagagcctggttgttcaatgtgtttagctatgaattctgacaagttaagaccagaagaaagatgtgcatctacat

SEQ ID NO: 283905 - DNA, 409 bp, Unknown
  Bacterial polypeptide expressing nucleotide sequence isolated from the Sargasso Sea
atgtctaaaactctttacgataagatatgggaaaaccatcttgttcatgaacaaaacgatggaacaacattaatttatgttgataggcatttagttcatgaagttaccagcccccaagcatttgaagggctcagattaaaaaaaagaaaagtcagacgaccgggactaactcttgcagtgcctgatcataatgttcctacaactgataggtctaaaggtataaacgatgaagactctaggatacaagttgaaacattaagaaaaaattgcaaagactttggagtagaactttttgatgttaatgataagcgacaaggtatagttcatattattggacctgagcaaggtttcactcagccaggaacagtaatagtatgtggcgacagccatactgctacacatggtgcat

SEQ ID NO: 283906 - DNA, 489 bp, Unknown
  Bacterial polypeptide expressing nucleotide sequence isolated from the Sargasso Sea
aatgaacaaactaacaaaaattaaatccaaagccgtagtactcaaaagtaaagatgttgatacggatcaaataattcctgctaggtttcttaccactacctcaaaaaaaggtcttggaaaacatctatttcatgattggcgatacaatgaagatggtacagatgatcctaattttattctgaataaaaaagaaaatgaaagctctgaaatcctcattgctggaaataattttggttgtggatcctcgcgagaacacgcgccatgggctttactggattatggtattaaagttgtaataagctcaaaaattgctgatatctttaaaggaaattccctcaagaatggtcttttacccatcgttgttacagaagatattctctctatgctaatggatactcaacgcccatatctcagtatatgcatagagaaatcagaattaacattgcctaataacgaaatatttgaatatgagattgatgagttttcaaa

SEQ ID NO: 283907 - DNA, 409 bp, Unknown
  Bacterial polypeptide expressing nucleotide sequence isolated from the Sargasso Sea
gctgtagataaagtgtttattggttcgtgtaccaactcgcgcattgaagacttgcgcgccgccgccgcagtggttaaggggcgtaaaaaagcgagttcagttaagcaagccttggttgtacccggctctggtagtgttaagcagcaggccgaggctgaaggcttggataaagtatttaccgaggcaggcctacagtggcgcgcccccagttgttctatgtgtttggcgatgaatgccgacaaactcgagccgggcgagcactgtgcatctacctctaatcgtaatttcgaaggccgccaaggttttggcgggcgcacccatttggttagccccgcaatggctgcggccgcggcaatcgcaggccatttcgtagatgcgcgtgaatacggcgcggcgcaggagcaataag

SEQ ID NO: 283908 - DNA, 343 bp, Unknown
  Bacterial polypeptide expressing nucleotide sequence isolated from the Sargasso Sea
atgaaagcatttacaaccttaagcggtatcgcggcaccaatggatcgtgccaacgtcgataccgatatgatcattcccaagcaatttttgaagtcgatcaaacgtagcggcttcggccccaacttattcgatgaattacggtatttggatgaggggtttccggggcaagattgcagtaatcgcccgcttaataaagaatttccgctcaatttcccgcgttaccaaggtgcacaaatcttattggcgcgagaaaactttggttgtggttcaagccgtgaacatgcgccgtgggctttagaagattatggctttcgttgcgtgatagcaccgtcatatgccgata

SEQ ID NO: 283909 - DNA, 607 bp, Unknown
  Bacterial polypeptide expressing nucleotide sequence isolated from the Sargasso Sea
atgaataaatttatctcaataaaaagtattccagcttatctacctatcgtcaatatagatacagacatgataattcctaaacagtttttaaaaacgataaaaagaactggactaggaaaaaatttattttttgaaatgagatatgatcaaagtggtaaagagatagatgactttattttaaataatagtccgtataataattctaaaattttaattgcaggaaagaattttggatgtggctcttctagagaacatgctccttgggctttaatggattttggaataacttgtgtaattagttcaagttatgcagatatattttataataactgttttaagaatgggattctcccaattacaatttcagaggatcaaatcaaagaaatttcagagtactcgaatagaaaagaggaaatttctgtaaatttgcctgagcaaacaataagttttggtaataaagaaataaaatttgaaatagatcaatttaagaaaaaatgtctaatagagggattagatgatattgcgttatctctagaaaaatctgaaaaaatagtttcatacgaaaataaaattaaagaggcaaaaccttggatatttaatgattaaa

SEQ ID NO: 283910 - DNA, 426 bp, Unknown
  Bacterial polypeptide expressing nucleotide sequence isolated from the Sargasso Sea
attggaaaaatttaaaaaaattcgtagtattattacaccatttgataaagcaaatgttgatacagatcagattgttccaaaacaatttctaaaacttattcataagattggttttggaaaatatcttttttacaactggagatttgaaaatgatggaagtccaaaaaaagacttcattttaaacgaatcaaagtatgagaattcaaaaatactagtaacaaatgaaaattttggatgtggatcctctcgtgaacatgcagtttgggctctaaaagattatggattttcagttattattgcgccttcttttgcagatattttttatagtaattgtttcaaaaatggggtccttccaatacagataaacaggaatatagttaaacgaatttttactgatataactgaattagagatagatcttgaaaa

SEQ ID NO: 283911 - DNA, 613 bp, Unknown
  Bacterial polypeptide expressing nucleotide sequence isolated from the Sargasso Sea
atggaaaaatttaataaattaaaaagtataccttcttatttgtcattacaaaatattgatacagacatgattattccaaagcaatttctaaaaacaattaaaagaacaggtctaggaaagagcttattttatgagatgcgatatgatgagaaaggaaacattgttgagaattttatattaaataaaagtccatatgataaatcaaaaattttattagctggtaaaaatttcggatgtggctcttcaagagagcatgctccttgggcattatccgattttggaattaaatgtataattagctcaagctttgctgatatattttataacaattgctttaaaaatggcattttgccaataaaaatagcagaagaaattgttttagagttatctaattattcaaaaagacaagaagagatagaagtaaatttagaaaatcaagaaatatcttatggaaataaagttataaaatttgagatagatcaatttaaaaagaaatgtttaatcaatggtttagatgatattggcttatctatggaaaaaataaatcaaattgatagctatgaaaaaaaaattaatgaaaacaaaccttggattttaaagagtgaaaaataga

SEQ ID NO: 283912 - DNA, 689 bp, Unknown
  Bacterial polypeptide expressing nucleotide sequence isolated from the Sargasso Sea
aaactatagagtatttaaagatagaccgatgtctccaaaaggtgagaactggacaaaagcagttgcacattggaaaaaacttttttctgatagtgatgcaaagtttgataaggaaataaacattgatgcaaaagatattgaaccattagttacatggggaacatctccacaggatgtttctccaattactggagaagtaccagatccagaaaaagagaaagataaagatagaagaacagcgatgtacagatccttagattacatgggtttaaaacctaaaatgaaaatctctgatattaaagtagacaagatctttatcggaagttgtacaaatggaagaatagaagatttaaggttggcggcaaaactattaaaaggaaagaaaatagcaagcgatgtaagtgcaatggttgttccagggtcgggattagttaaaaaacaagcagaagaagaaggtatcgataaaatttttaaaaatgcaggatttgaatggagagaaccgggatgttctatgtgtttaggaatgaatgaagatcagctatcttcaaaagaaagatgtgcatcaacttcaaatagaaattttgaaggtagacaaggaagaggtggaagaactcatcttgtaagcccaggaatggctgtggccgcagcaataaagggctatttagctgatgtaagagaaattaattaaa

SEQ ID NO: 283913 - DNA, 379 bp, Unknown
  Bacterial polypeptide expressing nucleotide sequence isolated from the Sargasso Sea
ttttattggtagttgcacaaatggtagaattgaagatttgagggaagcagcaaaaatattaaaagatagaaaaattgcaaaacatgttaatggaatggttgttccaggctcagggttagttaaggaaaaagccgaacaagaaggtttagataaaatttttataaattcgggttttgaatggagagaacctggatgttctatgtgtttggcaatgaatgcagataaattaaaaccaggtgaaaggtgtgcatctacatctaatagaaattttgaaggcagacaaggaagaggtggaaggacacatttggttagtccaggtatggcggcagctgctgcaatttctggaaatttggatgatgttagaaagtatcaaaactaa

SEQ ID NO: 283914 - DNA, 862 bp, Unknown
  Bacterial polypeptide expressing nucleotide sequence isolated from the Sargasso Sea
tcttattagcacacaagaagatggtgcgtcattaatctatattgataggcatttagttcatgaagtaacaagcccacaagcctttgaggggttaagaatgtctggtagagatgtaaattctcctaaccgaactttagctgtggctgatcataacgtaccaacaactgatagagctgacggaattcaagaagaagaatctagaatccaagttgaagctctagacaagaatgtagaagatttcggaataccatattttaacatgatggataaaagacaaggaattgttcacgtgatagggccagaacaaggctttactcaaccgggtatgacaatagtttgtggtgacagccataccgcaacccacggtgcatttggagctctggcgtttggtattggcacttcagaagttgaacatgttttggctactcaaactttaattcaaaagccagctaaaaacatgctcatcaatgttgaaggtgagcttcaaccaggtgtgtctcctaaagatttagttcttgctattattggagaaatcggcactgcaggtggtactggtcatgttatcgagtattcaggtaaagctatagagcaactttctatggaaggtaggatgactgtttgtaatatgtcaatagaagctggtgcaagagcaggaatgatagctcctgacaaagtaacatttgattacttaagagataaacctatgtctccaaaaggtaaagattgggatttagctttagaatggtggaaatcattgccttcagatgaaaacgcattttatgacaaaaaaattagcattaacgctaataaaatcaaaccaaccgtaacatggggtactagtccagaagatgttgtttcaatc

SEQ ID NO: 283915 - DNA, 835 bp, Unknown
  Bacterial polypeptide expressing nucleotide sequence isolated from the Sargasso Sea
ataatagaaaaaataggaacggcaggtggaactggttatgttattgaatatgctggtaatgcaatttcctctctttctatggaaggaagaatgacaatctgtaatatgagtattgaagcaggtgctagagctggtttaatcgctcctgacgaaaaaacttttgaatatattaaaggtagaccgtatgctccatcaggagataattgggacaaagcggtagaattttggaaagctcttccatctgatgagggcgcaaaatatgatgaagaaattttaattaatgctgaagatatttcaccacaaattacttggggcacaagcccacaagacgttgttgctataaatggtatagtaccaaatcctcaagaagagagtaatccaaatagaaagaaggctatggagcgttctcttgaatatatgggtttagaacccaaacaagaaatacaaaaaattaaaattgataaagtgtttattggctcttgtactaatggaagaattgaggatttaagagaagttgctaaagttgtagaaggaaaaaaagtttctgtagactcaatgattgttcctggttcaggtctagttaaaaaacaagctgaagaagaaggtttagataaaatttttattgaagcaggatttgattggagagaaccaggttgctccatgtgtttagctatgaatccagatcaactaaaaccgcaagaaagatgtgcatcaacatcaaatagaaattttgaaggcagacaaggtagagaaggtagaacacatcttgtcagtcctgcaatagctgctgcctctgcaatcaaaggttcttttgcaacagcagaggatttataaa

SEQ ID NO: 283916 - DNA, 601 bp, Unknown
  Bacterial polypeptide expressing nucleotide sequence isolated from the Sargasso Sea
atgaaaaaatttacagttttaaaaggtattgctgctgttatgccagatataaatatagatacagatgctattattccaaaacaatttcttaaaacaatacatagaaaaggattgggaaaaagtttgttttataatgagcgttacactgaaggatataataaaaatgtagattttattttaaataaagatccatggtcaaatagtagtattattattgcaggggaaaactttggatgtggatcttctagagaacatgctccttgggccttattagattttggcatacaatgtattatttcaaattcttttgctgatatattttttaataattctgttaagaatggcttattacttattaaattaaataaaaatgaaatacaaaaattaaatgaattagcaatgaaaaaagaaaactttactgtggatttaataaatcaaaaaatatcagttaaaaataatgagattaattttaatgttgacccaattattaaagatagattaatccatggctatgatgacatagaaattactttaaaaaataaacaattaatagttgattatgaaaacaacaaaaataaattccatattggaagaatatagt

SEQ ID NO: 283917 - DNA, 897 bp, Unknown
  Bacterial polypeptide expressing nucleotide sequence isolated from the Sargasso Sea
ccccagagccgtccgtttgcggatcccttggctgaggagatgctcagcaccttggagcgcaactgtgccgaccatgggatcaccctcaacggtatcggcagcggccgacagggcatcgtgcatgtgatcgctccggagctggggctgacccagcccgggatgaccgtcgcctgtggcgactcccatacgtcgacccatggggcctttggagccatcgccttcggcatcggcaccagtcaggtgcgcgatgtgctggccagtcagagcttggccatgtcgaaactcaaggtccggcgcatccaggtgaacggtcggctgtccgatggggtctcggccaaggacctgatccttcacgtgatcaggacgctcggtgtgaaggggggcgttgggtttgcctatgagttcgcgggcccagcggtggaggcgctgtcgatggaagagcggatgaccctctgcaacatggcgatcgagggtggtgcccgttgcggttatgtcaatccagatcaagtcacctttgattacctcagcggtcgagcaggagccccttcgggcgctgcctgggatcgggccgtgagctggtggcgcagcttggccagcgatccggacgctgtggtggatgacgagctggtgttcgatgcggccagcatcgctcccacagtgacctggggaatcacaccgggtcaggggctgggtatcgatgagtgcattccgctgcttgagcagctggagccaggagagcgacccatcgccgaggaggcctatcgctacatggatcttcagcccggtaccgccatcgtgggggtgcctgtggatgtctgcttcatcggcagttgcaccaacggtcgaatcagcgatctgcgggcggctgcggctgtggcccgtggtcgccacgtcgct

SEQ ID NO: 283918 - DNA, 679 bp, Unknown
  Bacterial polypeptide expressing nucleotide sequence isolated from the Sargasso Sea
ggtatcgttcatgttatcggaccagaacaaggatttactcaaccaggagcagttatagtttgtggtgacagtcacactgctacccacggtgcatttggtgctttagcatttgggataggaacttcagaggtagagcacgttttagcaactcagacattaattcaaaaaaaaacaaaaaactttagaataaacgttaatggaagtttgccaaaaggtgtaacagcaaaagatgtaatcttaaaaattataggtacgataggaactgcaggaggtactggctatgtagtcgagtatgctggaagtgttattagaaacctaagcatggaagaaagaatgacagtatgtaatatgactattgaagctggagctagagcaggactgatagcaccagatgaaaaaacatttcaatatttaaaaggaagaacgatgtctcccgaaggtaaaaattggaataaggctgttgaattttggaatacactttattcagacaaagattgtaaatttgataaagaaattaacattcaagctgaaaatattgaaccacttgtaacttggggaacttctcctcaggacgtgtcacctgttaccggattagtacctgatcctgataaggagaaaaatgcggatagaaaaatggctatgaaaagatctttagactatatgggtcttaaggctaata

SEQ ID NO: 283919 - DNA, 340 bp, Unknown
  Bacterial polypeptide expressing nucleotide sequence isolated from the Sargasso Sea
aatgcctaaaacactttacgataaaatttggaatgaacaccttgttcatgaacaagaagatggtacttctttattgtttgttgatagacatttaattcatgaagttacaagccctcaagcatttgaaggattaagaaattctaaaaggaaagtaagacagccaggtcttacattagctgttgcagatcacaacgttccaacaacagatagatcaaaaggaatttccgatgaagagtcaaaaattcaagttgatacgttagatgcaaattgcaaagaatttggtatcaaaatttttggaatgaatgacaaaagacaaggcattgttcatataattggtcct

SEQ ID NO: 283920 - DNA, 354 bp, Unknown
  Bacterial polypeptide expressing nucleotide sequence isolated from the Sargasso Sea
aatgccaaaaactttatacgataaaatttgggaagatcatcttgtacatcaacaggaagatggtacatctttactttatgttgacagacatttaatccatgaagtaacaagccctcaagcttttgaaggtttaagattaaataatagaaaagttagacaaccaaaacttactctagcagtagcagatcataatgtgccaactacagacaggtccaaaggaattgacgatgaagagtcaaaagtacaggttgatacattaagaaataactgtaaagaattcggagtcccactatttgatatgaatgatagaaggcaaggcatcgttcatatcattggtccagaacaaggctttac

SEQ ID NO: 283921 - DNA, 571 bp, Unknown
  Bacterial polypeptide expressing nucleotide sequence isolated from the Sargasso Sea
ttgagtcaagataccttatttgataaagtttgggatttacacaaagtttcaagtcttcctggtggctcagatcaaattttcattggtcttcacctcatccatgaagtgacaagtcctcaagcatttggcgctttaaaagacaaaaacttaaaagtaaaattccctaatagaactgttgccacagttgatcatattgtgccaacagataatcagagcagacctttcaaagataatcttgccgaacaaatgattagcacgttagagaagaattgcttacaacataaaataagattttttaatattggtagtggtaatcaaggaatagttcatgtagtagctccagaattggggctaacgcagccaggaatgacaatcgcttgtggagattcacatacttcaactcatggagcttttgggtcaattgcttttgggataggtacaagtcaagtaagagatgttcttgcaacccaaaccatagccatgaacaagctaaaggtaaggcagatttggtgtgataataaattatctaatggtgtttatgctaaggatttagtgcttcatattattaata

SEQ ID NO: 283922 - DNA, 850 bp, Unknown
  Bacterial polypeptide expressing nucleotide sequence isolated from the Sargasso Sea
gcaacgcacggagcattcggtgcgttagcttttgggataggtacatccgaggtcgaacatgtccttgccactcaaactctaatgcaaaagaaatcaaaaaatttaagaataaacgttaatggcagtttgccaaaaggagtcactgctaaagatgtaattttaaaaattataggtacgattggaactgctggaggaacaggatacgtagtggaatttgctggcgatgtaattaaaagcttaagtatggaagaaagaatgaccgtttgtaatatgactattgaagctggtgctagagcaggcctaatagctccagacgacaaaacttttaattacttaaaaggtaaaacaatgtcgcctaaaggtgaaaattggttaaaagctgtagaattttggaagactttatattcagacaaagaatgtaaatttgataaagaggtaaatatcaatggtaaggaaatagagccactcgtaacttggggaacttctccacaagacgtttctccggtgactggtgttgtaccagatcctgataaagaaaaaaatgaggatagaaaaatggctatgaaaaggtctcttgattatatggggttaaaggctaacactaaaatatcagatattaaaatcgataaaatatttataggtagttgcactaacggtagaatagaagatctaagattggctgcagagcttttaaaaggtaaaaaaattgctgaaaatgtaagtgcgatggttgttcctggctcgggattagtaaaagagcaggcagaaaaagagggaatagacaaaatatttaaaaatgcaggttttgaatggagagagcctggttgttcaatgtgtttaggtagaaccc

SEQ ID NO: 283923 - DNA, 391 bp, Unknown
  Bacterial polypeptide expressing nucleotide sequence isolated from the Sargasso Sea
atgccatacacaatttacgataaaatttggaaagaacatctagttcatgaacaagaagatggaacttctttactttttgttgacaggcatttaattcatgaagtaactagtccacaagcatttgagggtttaagaaattcaaatagaaaagtaagacaacctaaacttactttagctgtagcagatcacaatgttccaactacagatagaacaaaaggaatttctgaccaagagtcaaaaatacaggttgatacattagattcaaattgtaaagaatttggaattcaggtttttggtatgaatgataaaagacaaggaatagttcatataattggtccagaacaaggttttactcaaccaggaactattattgtttgtggtgatagccata

SEQ ID NO: 283924 - DNA, 673 bp, Unknown
  Bacterial polypeptide expressing nucleotide sequence isolated from the Sargasso Sea
tatgcctaaaacactgtatgataaaatatgggaagaccatcttgttcatagccaatctgatggaacctcattactctatgtagatagacacttagttcacgaagtaacaagtccgcaggcttttgaaggattaagaatacaaaaaagaaaagtaagaaaaccacaatttactttagctgtagcagaccataatgttccgacaacagatcgatcaaaaggcataaacgatcaagagtcaaaaatacaagtggatacgttaagaaaaaattgtaaagagtttggagtccctttatttgatatgagtgataaaagacaaggaatagttcatattataggacccgaacaaggatttactcagccaggaacagttatagtctgtggagatagtcatactgcaacgcatggtgcttttggtgcgttagcatttggtattggaacatcagaagttgaacatgttttagcaacacaaactcttattcaaaaaaaatcaaaaaattttcttttaaaagttaatggcaaaatcccaattggagtaacagcaaaagatgttattttaaaaattataggtactattggtacagcaggaggaactggctatgtaattgaattttctggggaggttataaaaaattttactatggaagaaagaatgactgtctgcaatatgacaata

SEQ ID NO: 283925 - DNA, 322 bp, Unknown
  Bacterial polypeptide expressing nucleotide sequence isolated from the Sargasso Sea
atgcctcaaactatatacgataaaatatggaatgatcatcttgttcatcaacaagaggatgggacttcacttttatttgttgatagacatttaattcatgaagttactagtccacaagcatttgaaggtttaagaaattctaatagaaaagttagacaaccttctttaactttagcagtagcagatcataatgttccaacaacggatagatcagtgcctattactgacgaagattcaaaaatacaaattgagacactagaaaaaaactgtgcagaatttggaataaatctttttggaatgaacgataaaagacaaggaatag

SEQ ID NO: 283926 - DNA, 645 bp, Unknown
  Bacterial polypeptide expressing nucleotide sequence isolated from the Sargasso Sea
aatgggataaagctgtagattattggaatatacttaaaacagatgcggatgctaaatttgacaaagaaataactttggacggaaaagaaattaaaccaatggtaacatggggaacatctccccaagatgttgttacaattgacgataaggttccaaatcctaataaagagaatgatttagataaaaaaaattcaatagaaagatctttaaaatatatgggcttaaaaccagatacaaaaatgcaagacataaagattgacaaagtatttattgggagttgtactaatggcagaattgaagatcttcgcgatgccgcgaagatattaaaggataaacaaatatcaagtcatgttgaggcatttgttgttccaggatcaggcttggttaaagagcaagctgaacaagaaggtttagataaaatatttaaaaattccggttttgaatggagagagcctggttgttcaatgtgtctggctatgaatgcagataaacttaaaccagaagaaagatgtgcatcaacatcaaatagaaattttgaaggtcgtcaaggccgaggaggaagaactcatttggtaagtccagcaatggctgcagctgcagcgatctctggtaatttggatgatgttagaaagtaccagagttaaa

SEQ ID NO: 283927 - DNA, 264 bp, Unknown
  Bacterial polypeptide expressing nucleotide sequence isolated from the Sargasso Sea
aatgccccaaactctatacgataaaatttggaatgaacatatagttcatcaacaaaatgatggaacaactttgatatatgttgacagacaccttatccatgaagtcactagcccgcaggcttttgagggtttaagattatcaaaaagaaaagtaagaaagccaaatttaactttggctgtagctgatcataatgtacctacaactaatcgcttaaaaggaattgaagataaagagtctaaaatacaagtagaggtacttgaaag

SEQ ID NO: 283928 - DNA, 709 bp, Unknown
  Bacterial polypeptide expressing nucleotide sequence isolated from the Sargasso Sea
gtaacaagcccacaagcttttgagggcttaaggttaaacaaaagaaaagttagaaagcccgactttactttggctgtagctgaccacaacgtccctacaacagatcgaacaaaaggcattaatgatcaacagtcaaaaaaacaagtagatacacttagaaaaaattgtaaagaatttggagttcctttgtttgatatgaatgataagagacagggtatagttcatattattggaccagaacaaggttttactcaaccaggaacaattattgtttgtggtgatagtcatactgctactcatggagcttttggcgcattagctttcggaataggaacttcggaggttgaacatgttttggctacacaaacccttatacaaaaaaaatccaaaaactttttacttaaggtagatggaaaaatacctgttggagtgactgctaaagacgttattttgaaaattattggtactattggcactgctggaggaactggatttgtaattgagtattctggagatgttattaaaaactttagcatggaagaaagaatgactatttgtaatatgactattgaaggaggagctcgagcgggattaatccagcccgatgaaaagacttttaaatatctgcagaatagacctttgtccccaaaaaaagataattgggaaaaagctttaaagtattggagcaatttaaaatctgacaaagatt

SEQ ID NO: 283929 - DNA, 508 bp, Unknown
  Bacterial polypeptide expressing nucleotide sequence isolated from the Sargasso Sea
atgtcacaaacaatttacgataaaatttggaatgatcatctggttcatgaacaaaaagatggaacttcattgctttttgtggatagacatttgatccatgaggttacaagcccacaagctttcgaaggactaaggacatcgaacagaaaagttagacaaccaaaattaacacttgctgttgcagatcataatgttcctacaactgatagatcaaaaggaatatcagacgaagactctaggatacaggtagaaactttagataaaaactgcaaagaatttggaattcaattatttggtatggatgacaaaaggcaaggcattgttcatataattggtccagaacaaggatttactcaacctggaaatataattgtttgtggagatagtcatactgctacccatggtgcattcggtgctttggcatttggaataggaacctccgaggtagagcatgttttggcaactcagactttggtacaaaagaaatcaaaaaattttagaataaatg

SEQ ID NO: 283930 - DNA, 374 bp, Unknown
  Bacterial polypeptide expressing nucleotide sequence isolated from the Sargasso Sea
gttgagtgccggcaccctctacgacaaggtgtgggacctgcatcgggtggcggagctccccggcggatccacccaactgtttgtcggtttgcatctgatccatgaggtcaccagtcctcaggccttctcggcgttgaaggacaagggtctaacggtgcgctgccctgagcgcacggtggccacggtggaccacatcgtgccgaccacgtctcagcaacggccgttcgccgatccgttggcggaggagatgctcggcaccttggagcggaactgccaggagcacggcatccctctcaacaacatcggcagcggtcggcagggcatcgttcatgtgatcgccccggagctgggcctgacccagccgggcatgacag

SEQ ID NO: 283931 - DNA, 697 bp, Unknown
  Bacterial polypeptide expressing nucleotide sequence isolated from the Sargasso Sea
atgaagaccttatacgacaaactctgggaggagcatcacgtaacccaactcgattcgggtgagtcactcctatatatcgatagacattatttacatgaggtaacctcccctcaggcatttgaaggattatcaaaaaaaaatttaaagccgtggaggcttgaagcaaatatagctactcctgatcacaatgttcctactacacgagggaatgactttaaatctgagcaaataaaggatgaaatttcaaagatacaggtagttgagcttgataaaaattgtaataactttggcataaaacaatttgatattaaatcatcaaagcaagggattgttcatgtaataggtcctgaattaggctatacattaccaggcatgacaatagtatgtggtgactctcatacctctactcatggtgcattaggttgcttggcaatgggtattgggacatctgaagtagagcatgttcttgctactcagtgcctaaaagtttcgaagcttaaaaatatgattgttaaatttgaagggattcctgccgagaatgtgacatcaaaagatattgttttatatttaattggacttattggaacggcaggtggaacaggttatgcaatagaatttgctgggaactatattgaggatatttctatagaaaacagaatgactatttgtaacatggctattgaagctggagcaaaag

SEQ ID NO: 283932 - DNA, 500 bp, Unknown
  Bacterial polypeptide expressing nucleotide sequence isolated from the Sargasso Sea
aatggaaaaatttaataatttaaaatcaattccatcttacttatcgttacaaaatattgatacagacatgataataccgaagcagtttttaaaaactattaaaagaacaggtctaggaaaaagtctgttttatgaaatgcggtacgatgaaaatggtaaaaaaaacgataattttattcttaacaaagaaccttataacaaatcaaaaattcttctagctggaaaaaattttggatgtggttcatctagggagcacgctccatgggctctttctgattttggtataaagtgtgtcataagcgctagctttgcagatattttttacaataactgttttaaaaacggaatacttccgattaaaattgatgacaagacaattgttgagcttgcagaatattcaaatagaaaagaagaaatcgaagttagtctagataatcaagaaataaaatatggaaataaaattgcaaaatttgaacttgatgcatttaaaaaaaagtgtt

SEQ ID NO: 283933 - DNA, 313 bp, Unknown
  Bacterial polypeptide expressing nucleotide sequence isolated from the Sargasso Sea
tcttaaggcaaaaattgcccaaaatgtcagtgctatggtagttccaggatctggattggttaaagagcaagctgaaaaagagggaattgataaaatatttaaagaagcaggctttgaatggagagagcctggttgttcaatgtgtttaggtatgaatccagatcaattaaagcctaaagaaagatgtgcttcaacatcaaataggaactttgaaggcagacaaggtcgtggaggaagaacacatttagtcagcccagggatggccattgcagcagcaatcaaaggacatctaactgatgtcagagaaatataa

SEQ ID NO: 283934 - DNA, 844 bp, Unknown
  Bacterial polypeptide expressing nucleotide sequence isolated from the Sargasso Sea
acagatagatctaaaggtatttcagatcaagaatctaaaattcaagtcgatactttagacaataattgtaaagaatttggtgttcaattgtttggtatggaagataaaagacaaggtatagttcacatcataggtcctgaacaaggttttacacaacctggtacaataattgtatgtggagatagtcatacagcaacacatggtgcctttggtgctcttgcatttggaattggaacctccgaagtagaacatgttttagcaacacaaactttagtgcaaaaaaaatcaaaaaattttagaattaatgttaatggagaactttctcttggagttacatctaaagatgtgattcttcaaatcattgggaaaataggaacagcaggtggaacaggatatgtaattgaatatgctggaaatttgatttcttcattaagcgttgaacaaagaatgacaatttgcaatatgacaattgagggaggcgctagagcaggattaattcaaccagatcaaaaaatatttgattatttaaaaaataaacctatgtctcctaaaaatgataattgggataaagcacttgaatattggagtaaacttaaatctggagatgatgctaaatttgataaagaaattactttagacggaagagatataaaaccaatggttacatggggaacttcaccgcaagacgtagttactattgatggaaaagttcctaatccaggagaagaaaacgatccagataaaaaaaattctattgaaagatctttaaaatatatgggtctaaaacctggcactgcagttaaagatattaaaattgataaagtttttattggtagctgcacaa

SEQ ID NO: 283935 - DNA, 610 bp, Unknown
  Bacterial polypeptide expressing nucleotide sequence isolated from the Sargasso Sea
tttataatggaaaaatttgaacttttaacaggtatcgctgctcctttaccaatgatcaatgttgatactgatatgattattcctaaacagtttttaaagacaattaaacgctctggtcttggaaaaaatctttttcatgaacttcgatatgacatgcaaggtaatataaaaaatgattttgtattaaattgggatccatacaaacaagcttctattttagtcgctggagataattttggttgtggatcaagcagagagcacgcgccatggtcactcctagattttggatttaaatgtattattgctccaagctttgctgatatattttataataattgttttaaaaatggaattcttccaattcgtcttgatcaaaaaacagtcgatgttttgatggatcaagcaaatcaaaaaaaacatttaactataaatcttaaagatcaactaattatactagaagatggaaatacaattgagtttcaaattgatccgtttaggaaaaaatgtttacttgaaggcttagatgatattggtctaactcttcaaaagaaagaaaaaattgatcaatatgaagcttctttaaaaaacacacatccttggattatctaaa

SEQ ID NO: 283936 - DNA, 739 bp, Unknown
  Bacterial polypeptide expressing nucleotide sequence isolated from the Sargasso Sea
acaatatgcaatatgtctattgaagcaggagctaaagtaggattagtgtctgttgacgacaaaactattgattacgttaaaaaacattcaaaccttgaagccaatttaataaatgatgctattaaaaaatggaaaaatttaaggactgataaagaagcaatattcgataaggaaattgatattgatgtatcaaaaattaatcctcaagtttcctggggcacatcaccagaaatggtaattgatttcaatgaaaagattccatcgagctcaattttttctcctgaaaaaagaaaaagcttagatctagctaaaaattatatgggattgtcagataatcaggaattgagcgatttagatttcgataaagtattcattggatcatgtactaattctcgaattgaagatctaagagaagccgcagaagtcttaaaaggtcaaaaggtttctgaaaatattcaagaagccattgttgttccaggatctggaatggttaaagaacaagctgagaaggagggaatccataaaatattcattgatgctggatttcagtggagggcgccgggttgttccatgtgtttaggcatgaatccggaccaactcagtccatatgaaagatgtgcttcaacttcaaataggaattttgagggtcggcaaggtaacttaggtagaacacatttaatgagcccaaagatggctgctttaactgcaataaacggaaggattgtaaaagagatttaag

SEQ ID NO: 283937 - DNA, 825 bp, Unknown
  Bacterial polypeptide expressing nucleotide sequence isolated from the Sargasso Sea
attgcaacacctgatcataatgttcccacaactgacagggacaagggaatagctggtataaatgatgaagtatcaaaacttcaagtggttacgttagatgataattgtaaagagcatgaaatactgcagtttgatattcatgataaacgccagggcatagttcatgtggtagggcctgaacaaggattaactttacccggcatgacaattgtttgtggagattctcacacctctactcatggggcattagcgacactttcaatgggtattggtacttccgaagtggaacatgttttagctactcaatgcttgaaaacctcaaaactaaaaaatatgagggttaacatttcaggtgagctgcaagaaggtgtcactccgaaggacgttacattggcagttattggaagaattggaaccgcaggaggaactggttatgcaatagagtatgctggttcagtcatcgaaaatatgtcaattgaaggcagaatgacagtatgtaatatggcaattgaagctggagctagggcaggacttgtggcatatgatcaagtaactgaagcttatataaaagataggccatttaccccaacaggagaacaatggttggtagcaaaagagcaatggcaagaccttgtcagtgatagagaagctcaatttgataaagagatagaaattgatggatctttaatagcacctcaggttacctggggaacttcaccagaaatggtcagtgacattgatggtgtaatacctgagcctaatagtgaatctattagacatgctcttaattatatgaagcttgaacctggtaagaagataaaagat

SEQ ID NO: 283938 - DNA, 489 bp, Unknown
  Bacterial polypeptide expressing nucleotide sequence isolated from the Sargasso Sea
aatgccttttacaacatacgataaaatttggaacgaacatcttgttgatgaacaaccagatggaacatcacttttgtttgtagatagacatttaattcatgaagttacaagcccgcaagcatttgaaggcttaagaaattcaaatagaaaagtaagacatcctaaattaactcttgcagttgcagatcataatgttccaacaactgataggtcaaaaggtattgcagatgaagattcgagaattcaagttgaaactttgaacaaaaactgtaaggaatttggtgtcgagatatttggtatggacgataaaagacaaggcattgtccacatcataggacctgaacaaggttttacacagcctggaaatattattgtttgtggtgatagtcatactgcaactcatggagcatttggagctttagcttttggtattggaacctcagaagtagaacacgttttagcaacacaaactttagttcaaaaaaaatc

SEQ ID NO: 283939 - DNA, 598 bp, Unknown
  Bacterial polypeptide expressing nucleotide sequence isolated from the Sargasso Sea
aatggaaaaatttaaaaatttaaaaagtattccagcgtatattccaataatgaatatagatacggataaaattataccaaagcagtttttaaaaacaattaagagatctggtcttggaaaaagtcttttttacgagatgcgattcgatgaaaatggaaaacccataaaaggttttattttagatagtgatccatataacaaatcaaaaatattaataactggaaaaaatttcggttgtggttcttctagagaacacgctccttgggcattacttgattttggaataagagtaatagtgagtgaaagttttgcggatattttttacaacaactgttttaaaaatggaattttacctattgaagcaagtgaggacattataaatgaacttacagattattctaaaagaaaagagaatattgaggtaaaaatcgaagagcagaaaattttatatggaaataaatcctatgaatttaaaattgatacttttaaaaaaaaatgtcttatagagggtcttgatgatatagctttatcacttgaaaaaatcaaaagtattgaaaattttgagaaaaatttaattaatagaaaaccttggatttaa

SEQ ID NO: 283940 - DNA, 598 bp, Unknown
  Bacterial polypeptide expressing nucleotide sequence isolated from the Sargasso Sea
atggaaaaatttaaagatattaaaagtattccagcgcacatttcaatgatgaatgttgatactgataaaataattccgaaacaattcttaaaaactatcaaaagatctggattaggaaaaagtttattttacgagatgaggtttgatgaaaaaggcaaacccattaaaggatttgttctagacaccgagccttataaaaattcaaaaatactaattactggaaaaaatttcggctgcggttcttctagagaacatgcgccgtgggctttagtagattttggtataagagttataattagcgaaagttttgcagacatattttacaataactgttttaaaaacggcatacttcctataatagctgacgaaaaaataataaaagaactatgtgaatattcatctagaaagcaaagtattgaggtaaaattattggagcaagtgattaattatggaaataaaagtttcaaattcaatcttgatcaatttaaaaaaaaatgcctaataaatggattagacgatatagctctatcactagaaaaaattcaaaatatagaacaatttgaagataagatgagacaaagcaaaacctggatttaaa

SEQ ID NO: 283941 - DNA, 370 bp, Unknown
  Bacterial polypeptide expressing nucleotide sequence isolated from the Sargasso Sea
cttgagttccgccaccctgtacgacaaggtctgggcgctgcatcaggtcgctgagctgcccagcggatccacccagttgttcattggcttgcatctgatccatgaggtgaccagtcctcaggcctttgccgccctcaaggacttgggactgacggttcggcaccctgagcgcaccgtggccacggtggatcacatcgtcccaaccaccagccaggccagaccctttgcggaccccttggccgaagagatgctcaccacgctggagcgcaactgccaggagaacggcatcagcatgaacgcccttggcagtggccggcagggaatcgtgcacgtgatggcacctgagctgggcctgacgccacgggcatga

SEQ ID NO: 283942 - DNA, 498 bp, Unknown
  Bacterial polypeptide expressing nucleotide sequence isolated from the Sargasso Sea
aatgccttttacaacttacgataaaatttggaacgagcatcttgttgatgagcaaccagatggtacatcgctattatttgtagatagacatttaattcatgaagttactagcccccaagcatttgaaggcttaagaaattcaaatagaaaagtaagacatcctaaattaactcttgctgttgcagatcataatgttccaacaactgataggtcaaaaggtattgcagatgaagactcgagaattcaagttgaaactttgaacaaaaactgtaaggaatttggtgtcgagatatttggaatggatgataaaagacaaggcattgtccatatcattggacccgaacaaggttttactcagcctggaaatattattgtttgtggtgatagtcataccgcaactcatggagcatttggagctttagcatttggtataggaacttctgaagtagaacacgttttagcaacacaaactttagttcagaaaaaatctaaaaactt

SEQ ID NO: 283943 - DNA, 1117 bp, Unknown
  Bacterial polypeptide expressing nucleotide sequence isolated from the Sargasso Sea
atttggggtactatatttcctcttctagatagaagacaaggaattgttcatattgttggtccagagcaaggaataacacaaccaggtatgacaattgtttgtggggatagtcatactgctacacatggcgcttttggagcactagcatttggtataggaacaagtgaagttgagcatgttttagcaagtcaaactttaattcagcaacccgcaaaaaatatgaaaatttcagttaatggaaatcttaaacctggagtgacagcaaaagatataatacttcatattattggcttgattggaacagctggtggcacaggatatgttatcgaatatgctggtgatgtaattcattcacttagtatggaaggtcgaatgactatttgcaacatgagtatagaagcaggggctagagcaggtttgattgctcctgaccaaactacttttgattatattgaaggaaggccttatgctccaaaaggtgaagattgggataaggcaatagagttttggaaatcattaccatcagatgcaaatgcaaaatacgataaagaaatacatattgaagcggaagagatctcaccacaaattacttggggaacaagtccgcaagatgtagttccaataaatggaaaggttccaaatccagaaaacattgaggatcttaatcgaaaaaaagctgttgagcgttctttagaatatatgggtttagaggcagatcaagaaattgaaaaaataaaaattgataaagtatttattggttcttgtacaaatggaagaatagaagatttaagagaggttgctagagtcgttgagggaaaaaaagtatctgttgactcgatgatagttcctggatctggtttagttaaagagcaagctgagagcgaaggtttagataaaatttttattgatgcaggatttgattggagagagcctggctgttcaatgtgtttggctatgaatccagatcaactaaaaccaaaagaaagatgtgcctcaacatcaaatagaaactttgaaggaagacaaggtagagaaggcagaactcatctagtaagccctgttattgctgctgcttcagccattaaaggaacctttgcccaagagagtgatttgtaat

SEQ ID NO: 283944 - DNA, 538 bp, Unknown
  Bacterial polypeptide expressing nucleotide sequence isolated from the Sargasso Sea
tatgatcataccaaaacagtttttaaaaacaattaaacgttcagggttaggtaaaaatctttttcatgaacttcgttatgatatgcaaggcaatataaaaaatgattttgtgttaaactgggatccttataaacaagcatcaattctcattgctggggataattttggctgtggatcaagtagagagcacgctccctggtcgcttttagattttggttttaaatgtattattgctccaagttttgctgatattttttacaataattgttttaaaaatggaattctgccaattcgcctagctcaagataaagttgatattttaatggagcaagcaaataataaaaacactttaactatagaccttaaagaacaaaaaattatttctgaagatggcaattcaattaattttgatatcgatgaatttagaaaaaaatgtttattagaaggacttgatgatattggtttaacacttcaaaaaaaagaaaaaataacccaatacgaaactaagcttaaattatcacatccgtggattatttaa

SEQ ID NO: 283945 - DNA, 459 bp, Unknown
  Bacterial polypeptide expressing nucleotide sequence isolated from the Sargasso Sea
aagcctctatgaaaagatctttagaatatatgggtttaaaagccaatacaaaaataacagatataaaaatcgataaagtttttattggtagttgcaccaatggaagaattcaagatctcagagaagcagcaaagcttttaaaagataaaaaaattgcaaaacacgttaacggaatggttgttcctggatctggattagtaaaagatcaagccgaacaagaaggtttggataagatttttaaaaattcaggttttgaatggagggaaccaggctgctctatgtgtcttggcatgaatgaagatcagctaaaaccaaaggaaagatgtgcatcaacctcgaacagaaactttgaaggtagacaagggcgaggtggaagaacacatcttgtaagtccagctatggcagcagcagcagcaatcgaaggtcatttatctgatgtaaggaaatttgataattaat

SEQ ID NO: 283946 - DNA, 550 bp, Unknown
  Bacterial polypeptide expressing nucleotide sequence isolated from the Sargasso Sea
atgaatatagatacagataaaattattcctaagcaatttttgaaaactattaaaagatctggtttaggaaaaagtttgttttatgagatgagatatgatgaaaagggtaatcccataaaaggatttattttagataatgatccatataaaaattctaaaatactaatagctggaaaaaattttggatgcggttcttcaagagaacatgccccatgggccttacttgattttggaattaaagctatagtaagcgagagttttgctgatattttttataataactgttttaagaatggaattcttccaattgttgctgacgaaaatattattaatgaattagcggaatattctgctagaaaagaaaatatcgaaataaaacttgaagagcaagaaattatttatggaaataagtcttataaattcaaactagattcttttaaaaagaagtgcttgcttgaaggattagatgatattgcattatctcttgaaaaaataaaaaatatagaaagctttgaaaaaaatatgcatcaaagcaaaccttggatttaac

SEQ ID NO: 283947 - DNA, 1270 bp, Unknown
  Bacterial polypeptide expressing nucleotide sequence isolated from the Sargasso Sea
ttgaggttagctggtagaaaagttaaacatcctgaaatgactcttgcaacagtagaccatggtgtcccaacttcaaataggctactgggaataaaagatcctctttctaaaatccagattgaagctttagaaaataattgtgaggaatttggagttacattatttggaattaatgatccacgtcaaggaattgtacatgttattgggccagaacaaggaataacccaaccaggaatgacaattgtttgtggtgatagccatacagcaacccatggagcattcggagcactagctttcggtatagggacttcagaagtagaacatgttttagctacacaaacattggcaatggaaaaaccaaaaacaatgaaagtggaagtaattggagatgtatctgtaggagttggaccaaaagatataattttaggaataatcagaaaaattggaactggtggtggagccggtcatgtcattgaatatgtaggtgatgttattcaaaatatgagcatggagaacagaatgactatctgcaatatgtcgattgaaggaggagctagagcaggaatgattgctccagatgaggtaactttcaattatctgaaagagaaaaattatgcccctaggggttctgactgggatgatgcaattgctgaatggggaaatctatactctgatgaagatgctgagtttgataaagttgtaacaataaacgctgatgaacttgaaccatctatatcatggggaacaaatccttcacaggtaatttttgttaacgataccattccttatccagatgattttaatgaagaatctgaaaaggaagcggcatcaagagctttggaatatatggatttaaagcctggagaaaaaattaatgaaatccaattggatagagtttttattggtagctgcactaatgggagaatcgaagatttaagagaagccgcagaagtagtaaaagggaaaaaagtttcgtcaacaattggtgcaatgattgttcctggatcaacacttgttaaaaaacaagcggaagaggaaggattagacaaaatctttattgaagctggttttgactggagagaagcaggttgctcaatgtgtttaggaatgaatccagacattttaagtcccggtgaaagatgtgcctctacatcaaatagaaattatgaaggtagacaaggtgctggagggcgaacccacttagttagtccaaaaatggcagccgcagcagctttatacggaaaatttgttgatataaggaacctgtaaa

SEQ ID NO: 283948 - DNA, 1414 bp, Unknown
  Bacterial polypeptide expressing nucleotide sequence isolated from the Sargasso Sea
ttttttcaatgcccaatactttatacgataaaatttaggaatgatcaccttgtagatctacaagatgatggaacagctttgttatttgtagatcgtcatttggttcatgaggtaaccagtccccaggcatttgaaggtttaagaaactctaatcgtaaagttagacatcctaatttaacacttgcagtagcagatcataatgttccaacaactgatagatcaaaaggtatttctgataaagagtcaaagatacaagttgaaaccttagaagctaattgcaaagagtttggaattaaactttttggtatgaatgataagagacaaggaatcgtacatgttacaggtccagagcaaggctttactcaacctggaacagtaatagtatgtggtgatagccatacggcaacccacggtgcttttggttctttagcatttggaattggaacctcagaagtagaacatgttttagctactcaaacattagttcaaaaaaaagctaaaaattttagagtaaatgtaaatggtaaactccctttaggtgtaacctctaaagatgttattcttcaaataattggaaaaattggtacagcaggtggaacgggttgtgtaatagaatatgcaggtgacctgattagatcattgagtgttgaacaaagaatgacaatttgcaacatgactatagaaggaggagctagggcaggattaatagcacctgatgaaaaaatatttagatatttaaaagacagaccaatgtctccaaaaggtcaagattgggataaagcaatggaatactggaaaaatttaggaacagatgaaggtgctaaatttgataaagaaattaatcttcaagcagaggaaattttacctatgataacttggggaacttctcctcaagatgtaatcacaatagatgaaaaagttccaaatcctcagaacgaaaaggatgaggatagaaaaaattctttagaaagatctttaaattatatgggtttaaaaccaaatatggctgcaaaagatataaaaatagataaagtttttattgggagttgcactaatggaagaatagaagatttgagagaggcggcaaaaattttaaaagacaaaaagatagctgctcatgttcatgcgatggttgtaccaggatcaggattagttaaagaacaggctgagcaagagggattagataaaatttttgtaaattcaggctttgaatggagagaacctggttgctctatgtgtttagccatgaatgcagataagttaaaacctcaagaaagatgtgcttccacgtcaaatagaaacttcgaaggaagacaaggaagaggcggaagaactcatttagttagccctggtatggcagcagcagcagctatttctggaaatcttgatgacgttagaaagtaccaaaattaaa

SEQ ID NO: 283949 - DNA, 355 bp, Unknown
  Bacterial polypeptide expressing nucleotide sequence isolated from the Sargasso Sea
atgatatcaaataatcctaaaactctttttgataaaatttgggaacatcatcttgtagatagacaagaagatggaacttgtcttatatatattgatagacaccttgttcatgaggttacaagccctcaagcatttgaaggtttgagaaataataaccgtaaagttagaaggcctcaaagtacttttgctgtagctgatcataatgttccaacttcagacagatccaaaggtatagaaaataaagaaagtagaattcaggttgaaacactagaaaaaaattgtaaagattttgatgttacactttttccattattagatagcagacaaggtatagttcacatagttggaccagaac

SEQ ID NO: 283950 - DNA, 607 bp, Unknown
  Bacterial polypeptide expressing nucleotide sequence isolated from the Sargasso Sea
atgaaaaaatttgatacgttagagagtatacccgcatatcttccaatagttaatattgatactgatatgataattccaaaacagtttttaaaaacaatcaaaagaactggtttaggaaaaaaccttttcttcgaaatgagatatgatgaaactggcaaacaaattgaaaattttatacttaataatgaaccttacacaaattcaaaaattttaatagctgggaaaaattttggctgtggttcatcaagagaacatgctccatgggctttattagattttggtattacttgtgtaattagctcaagctacgctgatatattttataataattgtttcaaaaatggaattttaccaattaccattagtgaagagcaaataaaacaaatttcagaatattcaaatagaagggaaaaaattttgattaatcttaaagatcaaaaaatagtttttggtaacaatgaaataaaatttgagttagatgaattcaaaaaaaaatgtttaattgagggtttagatgacattgcgttatctctagagaaatcagataaaattgactcttttgaaaaaaaattaaagtcttcaaaaccttggattttcaatgattaaa

SEQ ID NO: 283951 - DNA, 1045 bp, Unknown
  Bacterial polypeptide expressing nucleotide sequence isolated from the Sargasso Sea
cttgagcaaccaaggcccaaaaacactttttgataaaatctggtctgagcatcttgtcggtcaaagagaagatgggactaatcttttatatattgatcgtcatttagttcatgaagtaactagccctcaagctttcgaaggattaaaactatccaatcgtcccgttcatagaccagaggctacgatagctgtcgcagaccataatgttcctactataaatagacaaaatattgaggacccacaaagtaaaattcaagtcgaaactttagcaaaaaacactaaagagcatggaattcaatattttgatttaatggaccaaagacaaggtattgttcatatcattggtcctgagcagggaattacccaaccgggcatgacaattgtctgtggagacagtcacacgtctacccatggagctttcggagctctcgcttttggtatcggaacaagtgaagttgagcatgttctggctacgcaaacaattgttcaaaatcctgcaaaaaatatgagaatttcggtcaatggtgaacttccttttggagtaaattctaaagatttaatcttgtacataattggaaaaattggaacagctgggggaactggtcatgtaattgagtatgctggttcatctatcatgggcctttcaatggaaggcagaatgactatttgtaatatgagcattgaagctggtgctcgcgccggtttaattagcccagatcaaacaacttttaattatataaaaggcagaccttatgctcctggaactgaacactgggatcaagcagtagaatactggtcatctcttccctcagataatgatgcaaattacgatcatgaaatagttatagatagttcagaaattgacccaatggtgacatggggaactagccctgaggatgttgtgtcagtgaaaggcacagtaccaaatccgagcagtgctaaaacagaaaataaaaagaaaagtatagaaagatcacttgagtatatgggccttaagcctggaacaaaaattacagacataaagttagataaaatattcattggc

SEQ ID NO: 283952 - DNA, 610 bp, Unknown
  Bacterial polypeptide expressing nucleotide sequence isolated from the Sargasso Sea
aatggataagtttcattctttaaaaggtatcgcagctcctttaccaattgttaatatcgatactgatatgatcatcccaaagcaatttctcaaaacaattaaaagaactggtcttggtgtaagtttgttttatgagatgagatatgataacgatggaaacctcattaaagattttgttttgaatacatctccttttaatcagtcaaaaattttggttgctggtgataattttggttgtgggtcaagtagagagcacgccccttggtctcttaaagattttggaataaggtgcgtaatttcaacaagttttgcagatattttttataataattgctttcaaaatggaattttaccgattgttgtcagtcctgaaaacctcgatcagttaatgacagcagctaaaaatcaaattgagttcaatattgaccttccggagcaaatcattaaagctggcaatcattcaatcaattttgaaattgaagaattcagaaaagaaagacttttgcagggattagacgatataggcattacccttggttaccaagacaaaataaatgcttacgaagaggataaaaaaaataaaaaaccctggttatttaaagatacttaa

SEQ ID NO: 283953 - DNA, 1063 bp, Unknown
  Bacterial polypeptide expressing nucleotide sequence isolated from the Sargasso Sea
cagggcgccacctgcccgggcatgaccgtggtctgcggcgactcccacacctccacccacggtgcgttcggcgccctggcccatggcatcggcacgtctgaggtggaacatgtgttcgccacccagtgcctggtggccaagaaaatgaagaacatgctggtacgcgtcgaaggccaattgccgtttggcgtgaccgccaaagacatcgtgctcgccgtgatcggcaagatcggcaccgccggcggcaacggccatgccatcgagttcgccggcagtgctatccgcgacctgtccattgaaggccgcatgaccatctgcaacatgtccatcgaagccggtgcccgcgtgggcatggtggcggcggacgaaaaaaccgtcgaatacgtcaagggtcgcccgttcgcgccgcaaggcgccgattgggatgccgccgtcgaagcgtggaaagacctggtctccgacgccgatgcggtgttcgacaccgtggtcgaactcgacgccgcgcagatcaagccgcaagtcagctggggcacttcgcccgaaatggtcctggccgtcgaccagaacgtgccggacccggccaaagaggccgacctggtcaagcgtggctccatcgagcgcgccttgaaatacatggggttgaccgccaaccaggcgatcaccgatatccagttggaccgcgtgtttatcggttcctgcaccaactcgcggatcgaagacctgcgcgccgcggcggtgatcgcaaaaggccgcaaggtggcctcgaccatcaaacaagccattgtggtgccaggttccgggctggttaaagcccaggcggaagccgaagggctggacaagatcttcctcgacgccggttttgaatggcgtgagccgggctgctcgatgtgcctggcgatgaacccggaccgcctggagtcgggcgagcattgcgcgtcgacctccaaccgtaacttcgaagggcgccaaggcgcgggtgggcgtactcacctggtgagcccggccatggccgccgctgctgccgtcaacggtcgtttcatcgacgttcgcgaattgatctgag

SEQ ID NO: 283954 - DNA, 548 bp, Unknown
  Bacterial polypeptide expressing nucleotide sequence isolated from the Sargasso Sea
gttggaccgtgccaatgtggacaccgaccagatcatcccaaagcagttcctgaagtcgatcaagcgcaccggtttcggccccaacctgttcgatgagtggcgctacctggacgtgggctacgcctaccaggacaactccaagcgccctctgaacaaggactttgtgctcaacgccgagcgttaccaaggcgccagcgtgttgctggcccgggaaaacttcggctgcggctccagccgcgagcacgcgccttgggccctggaagagtacggctttcgcagcatcatcgcgccgagctacgccgatatcttcttcaacaacagcttcaagaacggcctgttgccgatcatcttgagcgacgctgaagtggacgagttgttccagcaagtggaggccaatgtcggctaccagttgacggtggacctggccgcgcaaaccgtgacccgcccggatggcaaggtgtaccactttgaagtggatgccttccgtaagcactgcctgatcaacggcctggacgacattggcctgaccttgcaggacggcgatgcga

SEQ ID NO: 283955 - DNA, 1054 bp, Unknown
  Bacterial polypeptide expressing nucleotide sequence isolated from the Sargasso Sea
acacagccaggtagtattatagtttgtggagatagccatacagctacacatggagcttttggctccttggcatttggaataggaacttcggaggttgaacacgtattagctacacaaacattagttcaaaaaaaatcaaaaaattttcgtattaaagtcgatggagaattatctattggagtaacttctaaagatgtaattttacaaattattggaaaaattggtactgcaggtggaactggctatgtaattgagtatgctggcagtcttatttcatcgctaagcgttgaacaaagaatgactatttgcaacatgacaatcgaaggtggagcaagagcaggattaattgaacctgaccaaaaaatatttgattatttaaaagatagaccaatgtctccaaaaaaagataattggaataaagctttagattactggagtaaactaaagtctgataatggagctaaatttgataaagaaatcacattagaaggaaaagatattatgccaatggttacctggggaacctcaccacaagatgttatatctatagacgaaaaaattccaaaccctgaaagtgaaactgatgaagatagaaaaaattcaattgaaagatcacttaaatacatgggcttaaaaccaggaacagctattaaagatgtaaaaatagataaagtttttattggcagttgtacaaacggtagaatcgaagatctaagagacgccgcaaaaataattagaaacaaaaaagtagcacaacatgtttatgcgatggtagtacctggctcaggtttagtaaaacaacaagcagagcaagaagggttagataaggtgtttaaagaatcaggttttgactggagagaaccaggatgttcaatgtgtttagccatgaattctgacaaattaaaaccagaagaaagatgtgcatctacctcaaatagaaattttgagggcagacaaggaagaggtggaagaacacatcttgttagtcctgggatggccgcagccgcagcaatttctggatctttggatgatgtaagaaaatatcaaaattaaa

SEQ ID NO: 283956 - DNA, 1408 bp, Unknown
  Bacterial polypeptide expressing nucleotide sequence isolated from the Sargasso Sea
atgaccactcctaaaacactttatgataagatctgggatgcacatttggctcatgaggctgatgatggaacttgcctattatacattgatcgccatcttgttcatgaggtaacaagcccacaggcttttgaagggttaagaatgtctggccgtggggttcgagcgccgaataaaacaattgccgttccagatcataatgttccaacgactattgatagggaaggcggtatagataatgaggaaagccgtattcaggttgaagcgcttgacaaaaatgcgcgagaatttggggttcattattatcctgtatccgatatccgccaaggaattgttcatatagtcgggcctgaacaaggttggacattacctggtatgacggtcgtatgtggtgacagtcatactgcaacccatggagcttttggagctttggcacatggaattggaacatcggaagttgagcatgttttagcaactcaaaccttaattcagaagaaatcaaaaaacatgaaagttgaaattaagggcaaattgcgtcctggggttacagccaaggatattacactttcggtcataggagcaacgggcactgctggtggtacaggttacgtaattgaatactgtggagaagctattcgcgatctttcaatggaaggcagaatgactgtttgtaatatggcaatcgaaggaggtgctcgtgctggtttaattgcacctgacgagaaaacttttgaatattgtaaaggtcgtccacacgctcccaaaggtgcggcttgggaacaagcagtggagtattggaagacgctattcactgatgagagtgcctattttgataaaataattgaaataaatggtgatgatatcgccccagttgttacatggggaacttctcccgaagatgtgctcccaattactgaaattgttccagcacccgaaaacttccaaggcggtaagatagaggccgtaaaaagatcgcttgattatatggggctcaccgctgggcaaaaattgacggatattaaaattgacactgtctttataggttcatgtacaaatggccgtatagaagatttgcgcgctgctgcaaaaatcctcgaaggcaaaaaagttaaagatggtatgcgagctatggtggttccgggatctggcctcgtgcgagcccaagccgaagaggagggattggctgatatattcaagcaagcaggttttgaatggcgtttggctgggtgttcgatgtgtttggcaatgaacccagatcaattgagtgaaggtgagcggtgcgcctcaacttcaaaccgtaatttcgaaggccggcaaggctacaaggggcgtacgcatttggtatcgcctgccatggcagcagcagcagcggtaacagggcatttaactgacgtgcgagagatgatttgat

SEQ ID NO: 283957 - DNA, 1222 bp, Unknown
  Bacterial polypeptide expressing nucleotide sequence isolated from the Sargasso Sea
taaaatttggctacatcaccttgttgatcagcaagacgatggaacatgtcttttatatatagatcgtcatcttgtacatgaagttactagccctcaagcatttgaaggattaagaaataataaacgtaaagttagaagacctgaaaacacttttgcagtagctgatcataatgttccaactacagatagaacaaaaggaattgaaaataaggaaagtagaattcaagttgaaacacttgaaaagaattgtaaagattttgatgtgactcttttcccacttttagatagtagacagggtattgtgcatattgttggtccagaacaaggtataactcaacctggaatgacaattgtttgtggtgatagtcatactgcaactcatggagcatttggagctctagcttttggcataggaactagtgaagtagaacatgttcttgcaactcaaaccttaatacaaaagccagcaaaaaatatgaaaattgaagttaaaggaaatttaaattcaggagttaatgcgaaagatattatcctaaatattattggtaaaattggaactgctggcggtacaggatatgtaattgaatatgccggtgaagcaatttctaacctatcaatggaaggaagaatgacaatttgtaatatgagtattgaggctggagcaagagctggattaattgccccagacgaaaaaacatttgaatatataaaagaaagaccatatgctccaaaaggtgaagattgggatagagctttagagttctggaaatccctcccatctgatgatggtgctaaatatgataaagaaatcataattgatgctagagatatttcccctcaaattacatggggtacaagccctcaagacgttgttgaaattaatggtaaagttcctaatccaaatgaagaaagcaatcttagtagaaagaaagcaatggagcgttcgcttgagtatatgggattagagccacaacaagaaatacaaaaaatcaaaattgataaagtttttattggctcatgtactaatggtagaatagaggatttacgtgaagttgcaaaagtagttcaaggtaaaaaagtatcagtagatgcgatgatagttccaggctctggtttagtaaaaaaacaagcagaagaagaggggttagataaaatttttattgaagctggttttgattggcgtgaaccaggatgctcaatgtgtttagcaatgaacccagat

SEQ ID NO: 283958 - DNA, 1149 bp, Unknown
  Bacterial polypeptide expressing nucleotide sequence isolated from the Sargasso Sea
cattaagaaaaaattgtaaagaatttggcgtggaactttttgatgtagacgataaaagacaaggcatagttcatattattggacctgagcaaggcttcactcaacccggtaccgttatagtatgtggtgatagtcatactgctacccacggagcgtttggagctttagcgtttggaataggaacgtcagaagttgaacatgtattagctactcagactctaattcaaaaaaaatctaaaaacttgagaataaatgtaaatggttcactacccaaaggtgtcactgctaaagatgttattttaaaaattataggaacaattggcactgctggcggcacaggttatgtaatagaatttgctggagatataataaaaaatttaagcatggaagaaagaatgactgtttgtaatatgactatagaagcaggtgccagagcaggattaatttctccagacgaaaaaacctttgagtatttaaaaggtaaaacaatgtccccgaaaggtgaaaattggaataaagctttaaaattttggaagtcattgtattcagataaagattgcaaatttgacaaggaagtaaatattgaaggaaaagaaatcgaacccttggttacttggggcacttctcctcaagatgtatcacctgtaactggtattgtgcctgatcctaatgaagaaactaatgaagatagaaaaatcgctatgaaaagatctttagaatacatgggtcttaaagcaaataccaagatatctgatataaaaatagataaaatatttattggcagctgtacaaacggaagaatagaggatttaagattagctgcagatcttttaaaaggaaaaaaaattgcagataatgtaagtgcgatggtagttcctggatctggattagttaaatctcaagcagaggaagaaggaattgataaaatatttattgaagcaggcttcgaatggagagaacctggctgttcaatgtgtttgggaatgaatccagatcaattaaagccaaaagaaagatgtgcttctacatcaaacagaaattttgagggaagacaaggaaggggaggtagaactcatctagtgagccctggcatggcagttgcagcagcgattaaaggttatctttcagatgttagggaaataaaataat

SEQ ID NO: 283959 - DNA, 513 bp, Unknown
  Bacterial polypeptide expressing nucleotide sequence isolated from the Sargasso Sea
aatgtcacaaactatttacgataaaatttggaatgaacatttggttcatgagcaaaaagatggaacgtctcttctttttgttgataagcatttaatacatgaagttacaagtccccaagcatttgaaggactaagaacttctaatagaaaagttagacaaccaaacttaacactcgcagttgcagatcataatgttccaactactgataggtcaaaaggtatatccgatgaagactcacggatacaagtagagactttggaaaaaaactgtaaagagtttggaattcaattatttggtatggaagacaaaagacaaggtatagtccatatcattggaccagagcaaggatttactcaacctggagatataattgtttgtggagatagtcatactgcaactcacggtgcgtttggtgctttagcatttggaataggaacttcagaagttgagcatgttttagcaactcaaactttagtacaaaaaaaatcaaaaaactttagaataagtgttaa

SEQ ID NO: 283960 - DNA, 1399 bp, Unknown
  Bacterial polypeptide expressing nucleotide sequence isolated from the Sargasso Sea
catgtccaaaactctatacgataagatatgggaaaaccatcttgttcacgaacaaagcgatggtacatcattaatttatgttgatagacatttagttcatgaagttacaagtccacaagcttttgaagggcttagaatacaaaatagaaaagtcagaagaccagagcttactctcgctgttcctgatcacaacgtaccaacaactgatagatctaaaggtataaatgatgaagactccagaatacaagttgaaacattaagaaaaaattgtaaagactttggagtagaattattcgatgttaatgataagcgtcagggtatagtacatattataggacctgaacaaggttttactcagccaggaacagtaatcgtatgtggtgatagccataccgcaactcacggtgcattcggtgcgttagcatttggaataggaacatccgaagtcgaacatgttcttgctacacaaactttgatgcaaaaaaaatcaaaaaatttgagaattaatgttaacggtaatttgccaaaaggggttactgccaaagacgtaattttaaaaattataggtacaattggaacagcaggtggaaccggatatgtagtcgaatttgctggtgatgtaattaaaagcttaagtatggaagaaagaatgactgtttgtaatatgactatcgaggcgggtgcaagagcaggtttaatcgcacctgatgaaaaaacattcaattatttagaaggtaaaactatgtcaccaaaaggtgaaaattggacaaaagctgtagaatactggaagactttatattctgacaaagattgtaaatttgataaagagataaatattgacggaaaaaacatagagccattagtcacttggggaacatctcctcaagatgtttcaccagttactggagtagtacctgatcctgaagatgagaagaacgaagatagaaaaatggctatgaaaagatctctcgattacatgggtttaaaagcaaatacaaaaatttcagagattaaaatcgataaaatttttataggtagctgtactaatggaagaattgaggatttaagattagccgctgatcttctaaaaggtaaaaaaatagctgaaaatgttagtgcgatggtcgtgcccggttctggtttggtaaaagaacaggcagaaaaagagggaattgataaaatttttaaagaagcagggtttgagtggagagaaccaggttgctcaatgtgtcttggtatgaaccctgatcaattaaagcctaaggaaagatgtgcatcaacatcaaatagaaattttgaaggtagacaaggtcgaggaggaagaacgcatttagttagcccaggtatggctatagctgccgcgattaaaggacatttaacagacgtaagagaaatatag

SEQ ID NO: 283961 - DNA, 730 bp, Unknown
  Bacterial polypeptide expressing nucleotide sequence isolated from the Sargasso Sea
aatgccttttacaacttacgataaaatttggaacgatcatctagttgatgaacaacccgatggtacatcacttttgtttgtagatagacatttaattcatgaagttacaagccctcaagcatttgaaggcttaagaaattcaaatagaaaagtaagacaccctaaattaactcttgcagttgcagatcataatgttccaacaactgataggtcaaaaggtattgcagatgaagactcgagaattcaagttgaaactttgaacaaaaactgtgaggaatttggcgtcgagatatttggtatggacgataaaagacaaggcattgtccatattataggacctgaacaaggttttacacagcctggaaatattattgtttgtggtgatagtcataccgctactcatggagcatttggagctttagcttttggtattggaacatcagaagtagaacacgttttagcaacacaaactttagttcaaaaaaaatcaaaaaactttagaattagcgtaaatggctcattacctattggcgtaacatcaaaggatgtcatcttgcagataattggaaaaataggaacagctggtggtactggttatgtgattgagtatgctggtaaccttatatctaatctaagtgttgaacaaagaatgacaatttgcaacatgacgattgaaggtggagcaagagcaggactaatacaaccagatgaaaagattttccatatttaa

SEQ ID NO: 283962 - DNA, 457 bp, Unknown
  Bacterial polypeptide expressing nucleotide sequence isolated from the Sargasso Sea
aaagaaaagtatagaaagatcacttgagtatatgggccttaagcctggaacaaaaattacagacataaaattagataaaatattcattggctcttgtacaaatggtcgaattgaggatttaagaaaagttgcatctatcgttaaggacaaaaagattgcttcacacgttcaagcaatgatagtaccaggatcaggcttagttaaaaaacaagctgaagaagaaggaattgataaaattttaaaagatgctggctttgaatggagagaggctggatgttcaatgtgccttggtatgaatcctgatcaattaaaacctggtgaaaggtgcgcatcaacttctaatagaaattttgaaggtagacaaggccgaggtggtagaactcatttaatgagccctgagcttgctgcagcatctgctattacgggaaacatttcagacataagagattttacataa

SEQ ID NO: 283963 - DNA, 760 bp, Unknown
  Bacterial polypeptide expressing nucleotide sequence isolated from the Sargasso Sea
atgcctaataccctttatgataaaatttggaatgatcaccttgttcataaacaagaggatggtacttctttactatttgttgatagacatttaatccacgaagttacaagtccacaggcatttgaaggcttaagaaactctagaagaaaggtaaggcaaccaggacttacactagcagttgcagatcacaatgtcccaacaactgatagaaccaaaggaatttcagatcaggaatcaaaaattcaagttgatacactagatgccaattgtaaagaatttggtattcaaatttttggcatgaatgacaaaaggcaagggattgttcatataataggccctgaacaaggttttacacaaccaggtacaataatagtttgtggagatagtcatactgcaacacatggtgcttttggagcattagcatttggtataggtacctctgaggttgaacatgttctagcaacacaaactttagtccaaaaaaaatctaaaaattttagaatcaatgttaatggtagtttacctattggtgttacttctaaagatgtaattttacaaattattggaaaaataggtactgccggtggaacgggttatgtaattgaatacgctggtaatttgatttcatcactaagtgtagaaaacagaatgaccatatgcaatatgaccattgaaggtggagcaagagctggattaatacagccagatcaaaaagtttttgattacttaaaaggcaaacctatgtctcctaaagaaaaaa

SEQ ID NO: 283964 - DNA, 607 bp, Unknown
  Bacterial polypeptide expressing nucleotide sequence isolated from the Sargasso Sea
atgaataaatttatctcaattaaaagtgttccagcttatctacctatcgtcaatatagatacagacatgataattcctaaacagtttttaaaaactataaaaagaactggactaggaaaaaatttattttttgaaatgagatatgaccaaagtggtaaagagatagatgactttattttaaataatagtccgtataataattctaaaattttaattgcaggaaagaattttggatgtggctcttctagagaacatgctccttgggctttaatggattttggaataacttgtgtaattagttcaagttatgcagatatattttataataactgttttaagaatgggattctcccaattacaatttcagaggatcaaatcaaagaaatttcagagtactctaatagaaaagaggaaatttctgtaaatttgcctgatcaaacaataagatttggtaataaagaaataaaatttgaaatagatcaatttaagaaaaaatgtctaatagagggattagatgacattgcgttatctctagaaaaatctgaaaaaatagtttcatacgaaaataaaattaaagaggcaaaaccttggatatttaatgattaaa

SEQ ID NO: 283965 - DNA, 571 bp, Unknown
  Bacterial polypeptide expressing nucleotide sequence isolated from the Sargasso Sea
catgccccaaacactttacgataaaatttggaatgaacatttggttcatcaacagaaagatggaacttcattactatttgttgatagacatttaatacatgaagtaacaagtccacaagcttttgaaggattaagaaattcaaatagaaaagtgagacagccaaaacttacattagctgtcgctgatcacaatgttccaactactgatagatccaagggtattgacgatcaagagtctaaaatacaagtagatactttaggtaaaaattgtaaggattttggaattcaattatttgagatgaatgataaaaggcaaggtatagttcatataattggacctgaacagggatttacacaacctggaacagttatcgtttgtggcgatagccataccgcaacccatggtgcttttggtgcacttgcatttggaataggaacatctgaagtagaacatgtactagctactcaaactttagtacaaaaaaaatcaaagaattttagaataaaagtagatggtaaattattgttaggtgtaacttcaaaaagatgtaattttacaaataatggaaaa

SEQ ID NO: 283966 - DNA, 607 bp, Unknown
  Bacterial polypeptide expressing nucleotide sequence isolated from the Sargasso Sea
aatgaataaatttaatatattaaaaagtatcccagcatatctaccgatcgtaaatgtagatactgatatgattattccaaagcaatttttaaaaactataaagagaacaggtttaggaaaaaatcttttttttgaaatgagatataatgacgatggaaaattaataagtgattttattttaaataaagaaccatatagcaaatcaaaaatattaattactggaaaaaattttggttgtggatcatccagagagcacgctccatgggcacttttagattttggtattaggtgtgttataagttctagttttgccgatattttttacaataattgttttaaaaatggaattttacctataacgattgctgaagaaaaaattaaagagatttcagactatgcaaatagaaaagatgaaatattagtcaatttgtcagatcaaaaaattatttttggaaataaagaaattaaatttgaaatagatgaattcaaaaaaaaatgcttaattgaaggattggatgatatcgctctatctttagaaaaatcagatgaaattactgcatatgaaaaaaaaataaaattagaaaaaccttggatttttaatgattaa

SEQ ID NO: 283967 - DNA, 430 bp, Unknown
  Bacterial polypeptide expressing nucleotide sequence isolated from the Sargasso Sea
tatgggcttagaaccggatactcctgttaaaaatataaaaattgataaagtttttataggtagttgtaccaacggaagaattgaagatttgagagaagcagcaaaaattttaaaagataagaaaattgctaatcatgtcggcgcaattgtagtaccaggatcaggcttagtaaaagagcaagctgaacaagagggattaaacaaggtatttataaacgctggatttgaatggagagaaccaggttgttcaatgtgtcttgctatgaatgctgataaactaaaaccagaagaaaggtgtgcgtctacatcaaatagaaattttgaaggccgccaaggcaggggaggcagaacacacttagttagtcctgcaatggcagcagcagcagctgtttcaggaaatttagaggatgttagaaaatataataattaa

SEQ ID NO: 283968 - DNA, 1420 bp, Unknown
  Bacterial polypeptide expressing nucleotide sequence isolated from the Sargasso Sea
atgtcaggtaaaacattaagtcagaaagtttgggaacgacacgtagttcacagtgatgaaagtggttcggacttgctttttattgacttacaccttgtccacgaagtcacctcgccgcaagctttcgacggtttgcgaatggcaggtagagaggttcttcgcccggatttaacagtcgcgacagaagatcataatgttcccactacagaaatagacaaacctatagccgatccaattagtcgtaaacagatagaaactttaagaaataactgttctgaattcggtatacgtcttttctcaatgggagaccaaggccaaggaattgttcacgtcataggaccagaaatgggactcacacttcctggaatgactgttgtttgtggcgacagtcatacaagcactcacggagcatttggggcacttgcatttggaattggaactagtgaagtcgaacatgttttagcaacacaaacacttccccaaacagaaccaggaacactatcagtgacagtagatggaaaccttcctgaaggcactactgcaaaagacgtgattctcgcgattatcggagagttaggtactggtggcggcattggaaaaataattgaatatagaggtgaggccatcagaaatctttcaatggaaggaaggatgactgtctgcaacatgtcgatagaggctggagccaaagcaggattaatagcaccagatgaaacgacttttgaatacctaaagggtagaacgcacagcccaagcgccgatcagtgggaagaagcaatagcagattggaaatctttagctactgatgatgacgctaaatttgatcaagaaatagtcataaacggaaacgaaatttcaccttatgtgacttggggaaccaatccgggacaggtcgcaccaataaaaggtctaatcccagacccagaacaattcgcggagcccgcacaacaagaatcagcaagaagggcacttgagtacatgggaattgcagaaggaactaaaatatctgaaatctcggtagacacagtttttattggatcttgcacaaatagtcgtatagaggatctaagagaagccgcaaaagtagcgcaaggtcaacaagtcgcacctggagttagaactctcgtagttccggggtcagggtcagttaaagctcaggctgaagcagaaggacttcatgaaatcttcctagaagctggattcgactggcgtgagcctgggtgctccatgtgtctcgcaatgaatccagacaaactaaaagaaggcgaacgttgtgccagcacgagtaaccgtaattttgaaggacgtcaaggtagagggggaagaacgcatttggtttccccagcagtagctgctgcaacagctattgtcggagcctttgcaacacctgaagatctagaggcaagaggagtcaagtagt

SEQ ID NO: 283969 - DNA, 994 bp, Unknown
  Bacterial polypeptide expressing nucleotide sequence isolated from the Sargasso Sea
gatgacaaaaaataatccaaaaacacttttcgataaaatttggttacatcaccttgttgatcagcaagaagatggaacttgtcttttgtatattgatcgtcatttagttcatgaagttactagtccacaagcttttgagggattaagaaataataatcgcaaagtaaaaagacctcaaagtacttttgctgtagcagatcataatgttccaacttcagatagaacaaaaggaattgaaaataaagaaagtagaattcaagttgaaacacttgaaaaaaattgcaaggattttaatgttacactttttccacttttagatagtagacaaggtatagttcatatcgtgggtcctgaacagggcattactcaaccaggaatgactatagtttgtggtgatagccatacagctacccatggagcttttggtgcattagcgtttggtataggtacaagcgaagttgaacatgttcttgcaactcaaactttaattcaaaaaccagcaaaaaatatgaaaattgaagttactggcaaacttaatcaaggtgttacagctaaagatattatccttcatattatcggtcaaattggaactgcaggtggtactggttatgtcatcgaatatactggtgaagcaatttcgaacttatcgatggaaggacgaatgactatttgtaatatgagtattgaggctggagcaagagctggcttaatttctccagataataaaacttttgattacataaaaggaagaccttatgctccaaaaggtgaaaattgggataaagctctaaagttttggaaatcacttccatctgatgagggtgctaactatgataaagaaatcataattaaagctgaagatatttcatctcaaattacatggggtacaagcccccaagatgttgttgcgataaaaggcaaagttccaaatccaaatgatgagagcaatccaaatagaaaaaaagcaatggagcgctcacttgagtacatggga

SEQ ID NO: 283970 - DNA, 607 bp, Unknown
  Bacterial polypeptide expressing nucleotide sequence isolated from the Sargasso Sea
aatgcaaaaatttaataaacttaaaagtattccagcatatttaccaatagtaaatattgatactgatatgattatacctaaacaattcttaaaaactattaaaagaactggcttaggtaaaaatttattctttgaaatgagatatgataatgatggtaaggaaataaaagattttatattaaataacaagccatttactgattctaaaatattaattactggaaataattttggatgtgggtcttctagagagcatgcaccttgggctttattagattttggaattacatgtgtgatcagttcgagttatgctgatattttttatagcaattgttttaaaaatggtattttgccaattattttacaagaagaaaaaataaaagagctctcagagtattcatctagaaaagaagaaatttcaataaacttaagtgatcaaaaaatcacttatgggaataatgagataagatttgatattgatccatttaaaaaaaaatgtttactagaagggttagacgacattgccttatcgcttgaaaaatccgcaaaaatggatctttttgaaaaaaaattaaaagagactaaaccatggatatttaatgattaa

SEQ ID NO: 283971 - DNA, 684 bp, Unknown
  Bacterial polypeptide expressing nucleotide sequence isolated from the Sargasso Sea
tatgagctacagcgatcctagaacattatttgaaaagatatggaaacggcacgaaattttaacccgcgacgacggcgtctcgttactatctatcgatagacatttatgtcatgagggttcttttcatgcgtttgataaacttaagatggaaaatagaaccgtacgttgcccagacctaactgttgccatcgccgatcactacgtatcgactaactttccagatcaaggaaatgaagtagaagccctaagagttccaattgaaaaattggaagttaacgctaaggaagctggcataagactctatggtgtgggctcaaaagaacagggtatcgtgcacgttgtcggaccagagcaaggcctcactataccaggcatcacccttgtatgtggggatagtcacactgcgacgcacggtgcctttgggtgcctggcctttggcataggtgcgtctgaagtagcccatgtgctggccactcagaccttgtggcaagcaaagccaaaaactatgcgcattaatataaatggtccgctttcagatggtgtcgtagcaaaagacattattctgtatttaatctcagtgataggtgcaaatggagcaagtggacatatgattgaatatgctggttccacaataaaaggcctttcaatggaaggacgaatgacaatctgtaacatgtcgattga

SEQ ID NO: 283972 - DNA, 625 bp, Unknown
  Bacterial polypeptide expressing nucleotide sequence isolated from the Sargasso Sea
aaaacattttctggtaccgtagctccactggataagaataacatagatacagatgctattatcccaaagcaatatcttaaatcaatatcacgttccgggtttggggttaacctatttgatgagtggagatacactgaatatggtgagcctggagatgatcattctaaaagacaaaaaaataacgactttgttttaaataaaaaaccttataatacagcgtctgtattattaacaggaaaaaactttggttgtggttcaagtagagaacatgctgcttgggcaataaaggattttggtattaaaactattttagctgaaagttttgctgatattttttacaataattgcttcaagaacggaattctgcctatcgttttaaatgaggatttaattaaatccttgttcagaaagtgcgatgaggatgataaattttctcttaaaattgatctagataatcaaattatatctggatttgataatgaatatctatctttcgaaattgatccttacagaaagaaagcgttattaaaaggattagacgaaataggacagactcttgaggacatagatcttattagtgattttgagcaaaaacacaaaaaaacatttccatggttattttaga

SEQ ID NO: 283973 - DNA, 976 bp, Unknown
  Bacterial polypeptide expressing nucleotide sequence isolated from the Sargasso Sea
ataggaacatctgaagttgaacatgttttagcaactcagactcttatacaaaaaaaatctaaaaactttttacttaaagtagaaggtaaaataccagtcggagtaaccgctaaagatgttatattaaaaattattggtacaattggaacggcaggaggaactggatttgtaattgaatatgctggtgatgtaattagaaacttcagtatggaagaaagaatgaccgtttgtaatatgaccatagaaggaggagcgcgggcaggattaattcaacctgataataagacatttaaatatttagagaacagacctttgtcaccaaaaaaagataattggaaaaaagctttagattattggagtaatttaaaatcagacaaagattctacatttgataaagaaataattttaaatggaaaggaagtagtcccacaagttacctggggaacctcgccacaggatgttgttcctgttaatgggctagttccagatccaaaaaaagaaaaaaataacgatagacgcgtggcaatggaaagatcgctagactacatgggtttaaaaccaaatactaaaatgacagatataaaaatagataaagtttttattggaagctgtactaatggaaggattcaggatttaagagaagcagctaaacttctaaaagataaaaaaatagcagaacatgtgaatgctatggttgttccaggctcaggacttgtaaaaattcaagcggagcaagaaggtttagataaagtgtttaaagagtcaggatttgaatggagagaacctggctgctcgatgtgtctaggaatgaacgaagaccagcttaagccaagggaaagatgcgcatcaacttcaaatagaaattttgaaggtagacaaggtcgtggaggtagaacacatttgttaagtccagcaatggcagcagtagcagctattgaggggcatttatcagatgtgagaaagtttactaattagc

SEQ ID NO: 283974 - DNA, 628 bp, Unknown
  Bacterial polypeptide expressing nucleotide sequence isolated from the Sargasso Sea
atggaaaaatttaataaactcagcggtcatgcaataccactacgtataactaatgtggatactgatatgattattccaaaacagttcttaaaaacaatcaagcgaactggacttggggaatttttattctacgagttaagatatgatcaagatggaaacaaaattagttctttcgcccttaaccaagaacagtataaagacgctagtatacttatagcgggtaaaaactttggctgtggatcctctcgtgagcatgctccgtggtctatagctgattatggtattaaatgtataattgcaccaagttatgcagacattttttataacaattgtttcaaaaatggaattttgcctataatccttgatgaagcaacagtttcaagattacaggacacatccgacagtatattaaatttcaatatagatttagaaaaacaaaatattactttcttagaaaataatgaaaaaaaagaaattagttttgaaatcgatccagctaaaaagaaatgtttgcttgaaggacttgatgatattggtctgactttaaataaagtagcttcaattggccactttgaagaagatcaagagaatgaaattccctggttatatggaaacaaattaaaatgag

SEQ ID NO: 283975 - DNA, 1405 bp, Unknown
  Bacterial polypeptide expressing nucleotide sequence isolated from the Sargasso Sea
aatgtctaagaccctttacgataaaatttggaatgaacatcttgttcatgaacaagaagatggaacttctttattatttgttgatagacatttaatacatgaagttactagtcctcaagcatttgagggattgaggaattcaaaaagaaaagtaagacaaccaagccttactttagctgttgcagatcataatgttcctacaactgatagatcaaaaggaatttcggatgaagaatcaaaaatacaagttgatacattagatgctaactgtaaagaatttggtatccaagtttttggaatgaacgataaaagacaagggatagtacatattattggaccagaacaaggctttactcaaccaggaactataattgtatgtggagatagtcatacagcaacacacggtgcatttggtgcattagcttttggtatcggaacatccgaggttgaacatgtgttagccactcaaactttagttcaaaaaaaatccaaaaattttagaattaacgttaacggaacattgcctgttggagtaacttctaaagatgtaattttacaaattattggtaaaataggaacagcaggtggaactggttacgttattgaatatgcaggcaacttaatatcatctttaagtgtagaaaatagaatgaccatatgcaacatgaccattgaaggtggtgcaagagctggattaattgaacctgatcaaaaagtttttgattatttaaaagataaaccgatgtcacctaaaaaagaaaattgggaaaaagctttagaatattggaatagtttaaaatcggataatgcagcacaatttgataaagaaataaatttagatggaaaagatattaagccaatggtgacttggggtacttcacctcaggatgtattgactatagatcaaaatgttccaaatccagaaaatgaatcagatccagataagaaaaattcaattgaaagatctctaaaatatatgggcctaaatcctaatacaaaaataaaagatataaagatagataaagtatttataggtagttgcacgaatggaaggattgaggatttaagagaagcagcaaaaatattaaaagataaaaaaattgcaaatcatgttaatgcaatggtagttcctggttcagggttggttaaacaacaagcagaacaagaaggattagataaaattttcataaattcaggatttgagtggagagagcctggatgttcaatgtgtttagcaatgaatgctgataagttaaaaccaggtgagagatgtgcatcaacttcaaataggaattttgaaggcagacaaggaagaggtggaagaacgcatttggttagtccaggaatggctgcagctgctgcaatttctggaaacttggaagatgttaggaaatatcaaagctaa

SEQ ID NO: 283976 - DNA, 607 bp, Unknown
  Bacterial polypeptide expressing nucleotide sequence isolated from the Sargasso Sea
aatgcaaaaatttaacaaattaaaaagtatccccgcatatttacctatagtaaatattgacacagacatgttaattccaaagcagttccttaaaacaataaaaagaactggtcttggtaaaaatttattttttgaaatgaggtacgacgataaaggaaatattataaaagatttcgttttaaatcaggaaccatacaataaatccaaaatattaatagcaggtaaaaattttggttgtgggtcttcaagagagcatgcaccatgggcgttactagattttgggattacatgtgtaattagctcaagttatgctgatattttttataataattgttttaaaaatggaattctgccaataattttaaatgaagaaaagataaaacaaatctctgattattttaatagaaaagaagaaattgaagttgatttagataaacaaaaaattacttttggaaataatgaatttaaatttgaaatagattcatttaaaaaaaaatgtttgttagaaggtttggatgatattgcattatctctagagaaaacagataaaatcatatcttttgaaaataaattaaaaaatttaaagccttggatattcaatgattaa

SEQ ID NO: 283977 - DNA, 1372 bp, Unknown
  Bacterial polypeptide expressing nucleotide sequence isolated from the Sargasso Sea
gaagcacatattgtcaaagaaagagatgatggaacttgcctgatatacatagataggcatttaacacacgaagtaactagccctcaggcatttgaaggtctaagactaaaaaacagaaaagttaggcggccacatagaactatagcagtacctgatcataatgtacctacaacatcagacagacttgatataattgaggacgaggaatctagaattcagttagagacccttaaaaataacgctaaaatttttgaagtgccttatattccaatggaagatattcgacaaggaatagtacatataattggacccgaacaaggattaactcaacccggaatgacagtagtttgtggggattcgcacactgctacccatggagcatttggagctcttgcttttgggataggaacttctgaagtcgagcatgttcttgctactcagactctcccaatgaaaaggcctcaaaacatgagaatctcaattgatggtaagcttagaatgggagtagaacctaaagatttaattttagctataattggtgaaattggaactgcaggtggaaccggtcatgtaattgaatataccggagaagctattagaggcttatctatggaaggaagaatgacggtttgtaatatgacaattgaagctggagctcgtgcaggtttaattgcacctgacgaaaaaactattgattatgttaaaggaagacctatggctccaaaatcagaaaactgggaaaaagcaattaattactgggcttcactgccctctgatccgtcagcaacttatgatcgagagagaattataaatgcagatgatattgctccacaagttacttggggcacaagcccagaagatgttgttgctatagatcagctagttccagaccctaaaaacgaattaaatttagctaaaaaacaagccatggaaagagctattctatacatggggttgaggccaggtatgaaaatgacagatattgaaattaataaagtatttatcggctcgtgtactaatgctagaatagaagatttaagaaatgccgctaaagtaattggcagtaataaaatatctaacaacgttaaagctatagttgtcccaggttctggcttagtaaaaaagcaagcagaagaagaaggcttagataaaatttttatctctgccggttgggaatggagagaaccaggttgctcaatgtgtatcgggatgaatcctgataaagtagatccggaagaacgttgtgcctcaacttcgaatagaaattttgaaggtcgtcaaggcgataatgcaagaactcatcttgtaagccctccgatggcagctgccgcatccattactggcaaattaactgatataagaaatttttaac

SEQ ID NO: 283978 - DNA, 1252 bp, Unknown
  Bacterial polypeptide expressing nucleotide sequence isolated from the Sargasso Sea
gcggcctgatcttacgttggcagttgcagatcataatgtacctaccacggatcgttctaaaggtatagacgatgaagagtcccgcattcaaattgaagctcttgataaaaattgcttagattttggcattgaactttatgggatgaatgatattcggcagggaatttgccacgtcataggtccagaacaggggtttaccttgccgggtaccacgatggtgtgtggagactctcacactgctacccatggcgcatttggttgtttggcatttggaattggcacctcggaagtagaacatgtcttagctactcaaacgatgattcagaccaaggcaaaaaatatgagggtgaccgtaaatggctcattgccaactggggttactgcaaaagatatgattttaagaataatcggtgaaataggcacagctggtggaactggcagcgtaatagagttttcaggagaagccgtttctgagcttacgatagaaggccgtatgaccatgtgcaacatgacaatagaaggtggagcgagggcagggttggtggctccagaccagaaaacttttgattatttaatgggccggccaaagagccccaagggtgccagttgggaaactgcaattgattattggaagagtctaaagagtgacgacggtgcgaagtttgaaattgaaatagcactagatgctgaagatatagcccctcaggtaacgtgggggactagtcctgaggatgttttgccaattactggcagggttccctcccctaataatgagtccgatactaacaaaaaagcaaaaatgcagcgttcattggattacatgggtttagaacccggtatgctcctagaggacatcaagattgataaaatgtttattgggtcttgcactaatagtcgtattgaggatttgcgacttgcggcaaaagtagcaaacgggcaaaaagtagcagaccatgtggacgctctggttgtgcctggttctggtcttgtcaaagagcaggcggaaaaagaaggtttggatgaaatatttgtttctgctggctttgattggagagagcccggttgttccatgtgtctggctatgaatgccgataaattgcaacctggagagagatcggcttcaacttctaatcggaattttgagggtagacaaggaccgggtggtagaacacatttggttagtccggctatggctgctgctgctgcgataaagggccacttagttgatgtcagatcgtttaatatagattga

SEQ ID NO: 283979 - DNA, 1003 bp, Unknown
  Bacterial polypeptide expressing nucleotide sequence isolated from the Sargasso Sea
aatgccaaaaacactatacgataagatatgggaagaccatcttgttcatcaacagtctgatggaacttcgttgatttatgttgacagacatcttattcatgaagtcactagtccccaagcttttgaaggtctcaggattcaaaaaagaaaggttagaaaacctgacttaacattagcagttgctgatcataatgttcctacgacagaccgttcaaaaggaattacagatcaagactcaaaaaaacaagtagatgttttgagaaataattgtaaagaatttaatgtcgaattatttgatatgaacgacaaacgccaaggtattgttcatattattggacctgagcaaggattcactcagccaggaactgtaatagtttgtggagatagccatacagcaactcatggtgcgtttggagctttagcttttggcataggaacctcagaggttgagcatgttttagcaactcaaacattaatacaaaaaaaatcaaaaaattttagagtgaatgtaaatggaaaactgccgttaggagttacagctaaagatgtaatacttaaaattattggtaccattggaacagctggtggcacaggacatgttatagagtttgctggtggtgtaataaaagctttaagtatggaggagcgaatgacagtttgtaatatgacaatagaggcaggtgcaagagctggactaatagctcctgacgaaaaaacttttaaatacttaaaaggtaaaccaaagtcaccaaaagaaaaaaaatgggaaatggcgttagaaaattggaaaaaattttattctgatgagggttgtaattttgataaagaaataaatatcaatgcaaaagagatagaacctttagttacttggggaacttctccacaagatgtttctccaataactgggttagttccagaccctgaaaaagaaaaagataaagataaaaaattagctatgtatagatctttagaatatatggggcttaaaccaaatatgaaaatt

SEQ ID NO: 283980 - DNA, 1405 bp, Unknown
  Bacterial polypeptide expressing nucleotide sequence isolated from the Sargasso Sea
atgagtcatccaagccctaaaactttatttgataaaatctggtcacaccatcttgttcatagacaagaggatggtacatgccttatttatattgatcgccatttagttcatgaagttacaagccctcaagcttttgaaggattaagaaacaacaatagaaaattacatcgtcctgaaagtacgtttgcagtagctgatcataatgttccaacctctgatcgctctaaaggaattgacaatgaggaaagcagaattcaagtagaaacacttgaaagtaactgtaaagagtttggagtaacgctttttcccttattagataagaggcaaggaatagttcatattgttggacctgagcaaggaataactcaacctggtatgacaatagtatgtggagatagccatacagcgacacatggagcatttggtgcacttgcttttggaataggaactagtgaagttgaacatgttttagctagtcagactctcattcaacaacctgcaaaaaatatgaagatctcagtcaatggcaatttaaaatctggagttacatcaaaagatattattcttcatataattggaattattggtacagcgggaggaacgggttatgtaatcgaatatgctggagaagcaattcagtcattaagtatggaaggtagaatgactatttgtaacatgagcattgaagctggagccagagcaggtttaattgctccggatgaaaaaacttttagttacatcaaaggtagaccatatgctccaaaagatgaagattgggataaagcattagctttctggaagtcactaccatcagatgaaaacgcaagttatgacaaagaaataaatataaatgctgaagatattacccctcaaataacatggggaacaagccctcaagatgttgctcccattaatggtaaagttccaaacccagaaacaatcaaagactctaatagaaggaaagcagttgagcgttcacttgaatatatgggcttagagcctaatcaagagattgaaaaaataaaaattgataaagtttttattggctcttgtacaaatggaagaattgaagatctaagagaggttgcaaaagttgttgcaggaaaaaaagtttctgttgaggcaatgatagttcctggatcaggtctggtcaaagaacaagcagagaatgaaggattagataaaatttttattgaagctggttttgactggagagagcctggatgctcaatgtgtttagcgatgaaccctgatcaattgaaaccaaaagaaagatgcgcatcaacttcaaatagaaattttgagggaaggcaaggtagggaaggaagaacacatttagtaagtccagcagttgcagcagcatcagctatcaaaggaacttttgcacaagaaagtgatttataat

SEQ ID NO: 283981 - DNA, 538 bp, Unknown
  Bacterial polypeptide expressing nucleotide sequence isolated from the Sargasso Sea
atgattattcctaaacagtttttaaagacaattaaacgctctggtcttggaaaaaatctttttcatgaacttcgatatgacatgcaaggtaatataaaaaatgattttgtattaaattgggatccatacaaacaagcttctattttagtcgctggagataattttggttgtggatcaagcagagagcacgcgccatggtcactcctagattttggatttaaatgtattattgctccaagctttgctgatatattttataataattgttttaaaaatggaattcttccaattcgtcttgatcaaaaaacagtcgatgttttgatggatcaagcaaatcaaaaaaaacatttaactataaatcttaaagatcaactaattatactagaagatggaaatacaattgagtttcaaattgatccgtttaggaaaaaatgtttacttgaaggcttagatgatattggtctaactcttcaaaagaaagaaaaaattgatcaatatgaagcttctttaaaaaacacacatccttggattatctaaa

SEQ ID NO: 283982 - DNA, 1405 bp, Unknown
  Bacterial polypeptide expressing nucleotide sequence isolated from the Sargasso Sea
atgtccacaacactttacgataaaatatggaatgatcatctggtagatcaacaagatgatggaactgcactgttatttgttgatagacatttggttcatgaggtaacaagcccacaggcctttgagggattaagaaattcaaatagaaaagtaagacacccaaatttaacactggcagttgcagaccataatgttcctaccactgatagaacaaaaggaatatctgacaaagagtctaaaatacaggtagatactttagatgcgaattgtaaggaatttggtgttcagatttttggaatggatgatagacgacaaggaattgtacacattataggtccagaacaaggctttactcaacctggaacagttatagtttgtggggacagtcatacagcaacacatggagcttttggagcattagcatttggaattggaacttcagaagttgaacatgttttagcaacacaaactttggttcaaaagaaagcaaaaaattttagaataaatgttaatggtaaattaccaataggtgttacttcaaaagatgtaattcttcagataattggaaaaataggaacagctggtggcacaggttgtgtaattgaatacgcaggagatttaataagatcattgagtgtcgaacaaagaatgactatttgcaacatgacaatcgagggaggtgctagagcaggattgattgaaccagatgaaaagatatttgaatacttaaagggaaagccaatgtctcctaaaggtgacaattgggataaagctctaaattattggaatggcctaaaaactgatccgaatgcaaattttgataaggaaattaatttaaacgcttcagagattttaccaatgataacatggggaacgtcccctcaagatgtaattacgattgatggaaaagttcctaatccacaaaatgaaactgatgaagataaaaagaattcaatcgaaagatctttgaaatatatgggattaaagccggatatgtcagcaaaagatattaagattgataaagtatttattggaagctgcacaaatggaagaatagaagacttaagagaggcagcaaaaattttgaaagataaaaaagtatcatcccatgttaatgcgatggtagttccaggttcaggacttgtaaaagaacaagccgagcaagaaggactagaccagatattcattaattcaggatttgaatggagagaaccaggctgttcgatgtgtttagctatgaatgctgataaactaaaaccagaagaaagatgtgcttctacatcaaatagaaattttgaaggaagacaaggtagaggtggtagaactcatttagttagtccgggtatggcagctgcggcagcaatatcaggaaatctagaggatgtcagaaagtaccaaaattaaa

SEQ ID NO: 283983 - DNA, 1087 bp, Unknown
  Bacterial polypeptide expressing nucleotide sequence isolated from the Sargasso Sea
atgtccactactctttacgataaaatttggaatgatcacttagtagatcaacaagatgatggaacagcattactttttgttgataggcatttagtgcatgaagtaactagtccacaagcttttgaaggtttaagaaatacaaacagaaaagttagaagacctaatttaactttagctgtagctgatcacaatgtacccacaacaaatagaacaaaaggaatagctgatgaagagtcaaaaatacaagtagatactttagaggctaactgtaaagaatttggtattcaactttttggaatggatgataaaaggcaagggatagtacatatcataggacctgagcaaggtttcacacaaccaggaacagtgattgtttgtggagacagtcatacagcaacacatggtgcttttggttctttagcattcggtattggtacatctgaggttgaacatgttttagctacacaaacattagttcaaaaaaaagcaaaaaattttagaataaatgttaatggtcaattacctcttggagttacatccaaagacgtaattcttcaaattattggtaaaataggaacagccggaggaacaggttctgtaatagaatattcaggtgatttaataaggtctttaagtgttgaacaaagaatgacaatttgcaatatgacaattgaaggtggtgcaagggcagggttaatagcacctgatgaaaagatatttgattatttaaaaggaaaaccaatgtcaccaaaaggagataattgggaaaaggctcttggctattggaatactcttaaaactgacactgatgcaagctttgatcaagaaataaacttaaacgccaatgaaattttaccaatgattacttggggaacttctcctcaagatgtgattacaatcgatggtaaggttcctaatccacagagcgaaaacgacgaagataaaaaaaattctatcgagagagctttaaaatatatgggtttaaaacctgatatggcagctaaagatattaaaattgataaagtatttataggaagttgtacaaatggaagaatagaagacctaagagaagctgctaaaatttaaa

SEQ ID NO: 283984 - DNA, 1405 bp, Unknown
  Bacterial polypeptide expressing nucleotide sequence isolated from the Sargasso Sea
aatgccattaactttatacgataaaatatggaatgatcatcttgtccaccaacaagaagatggtacttcattactttttgtagatagacatttaatacatgaagttacaagtccacaagcatttgaaggtttgagaagttctaatagaaaagtaagacaaccaaatttaacattagctgttgcagatcataatgtacctactactgacaggacaaaaggaatttcagatgaagaatctaagttacaggtagacactcttgaaaagaattgtaaagagtttggaataaagctatttggtatggatgataagagacagggtatagttcatatcattggtcctgaacaaggatttactcaacctggcacaatcatagtttgtggagatagccatacagctactcatggcgcttttggatctttggcatttggaattggaacatctgaagttgaacatgtacttgccacacaaactctagttcaaaaaaaatcaaaaaatttcagaataaatgtaaacggcaaacttcctttaggagttacatctaaagatgtaatattacaaataataggaaaaataggaacagctggtggaactggttatgtaattgaatatgctggagacttgatttcatctttatctgttgagaatagaatgaccatttgtaatatgacaattgaaggaggagctagagctggtttaattcaacctgatgaaaaagtttttgaatatcttaaaaataaaccaatgtcaccaaaaaatgaaaattgggacaaagctttagaatattgggaaaccctaaaatctgatcatggatctaaatttgataaagaaattaatcttgagggaaacgatataaaaccaatggtaacttggggaacatcacctcaagatgtaattactatagatggtaaagttcctaatccaaaaaatgaaaaagatcctgataaaaaaaattcaatagaaagatcattaaaatatatgggtttaaatcctgatataaatgcaaaagatattaaaattgataaagtttttattggaagttgtacaaatggaagaattgaggacttaagagaagctgcagaaatattaaaagataagaaaatagcaaatcatgtagacgcaatggttgttcctggatcaggtttagttaaacagcaagcagagcaagagggtttagataaaatttttataaattctggatttgagtggagagaaccaggttgttcaatgtgtctagctatgaatgctgataaattaaaacctggtgaaagatgtgcttcaacatccaacagaaactttgaaggaagacaaggaagaggtggaagaacgcatttagtaagtccgggaatggcagctgcagcagcaatttctggtaatttagatgatgtaagaaagtatcagatttaa

SEQ ID NO: 283985 - DNA, 1105 bp, Unknown
  Bacterial polypeptide expressing nucleotide sequence isolated from the Sargasso Sea
catgatggacaaaagacagggaattgttcatgtgataggaccagaacaaggctttacccaaccaggtatgacaatagtttgtggtgacagccataccgcaacccatggtgcatttggagctttggcatttggtattggcacttcagaagttgaacatgttttggctactcaaactttaattcaaaagccagctaaaaacatgctcatcaatgttgaaggtgagctccaaccaggtgtgtctcctaaagatttagttcttgctattattggagaaatcgggactgcaggtggtactggtcatgttatcgagtattcaggtaaagctatagagcaactttctatggaaggtaggatgaccgtttgtaatatgtcaatagaagctggtgcaagagcaggaatgatagctcctgacaaagtaacatttgattacttaagagataaacccatgtctccaaaaggtaaagattgggatttagctttagaatggtggaaatcattgccttcagatgaaaacgcatattatgacaaaaaaattaccattaatgctaataaaatcaaaccaacagtaacatggggtactagtccagaagatgttgtttcaattgatggttatatacctgatccttcaaagattaaagatgaggacgctagagctaaggtacaaagatcactagattatatgggattagtaggtggtcaaaagatatctgaagttgaaataaatactgtattcataggttcatgtacaaattccagaatagaagatttaaggtcagctgcaaaagtaatagatggaaaaaaagttaaaaaaggtattagggccatggtagttccaggttctggattggtgaaaagtcaggctgaagaagagggtctaaatttattatttactgaagctggttttgagtggagagagcccggttgttcaatgtgtttagcaatgaatgaagacaaacttcaacctggtgaaagatgcgcaagtacatccaatcgaaattttgaaggtagacaagggaaaggtggaagaacacatctggttagtcctgaaatagctgctgcctctgcaattacaggcaaattaactgattatactttaatcacgtag

SEQ ID NO: 283986 - DNA, 1408 bp, Unknown
  Bacterial polypeptide expressing nucleotide sequence isolated from the Sargasso Sea
attgagtcaagataccctatttgataaagtttgggatttacataaagtttcaagtcttccaggaggatctgatcagatatttattggtcttcatcttatccatgaagtgacgagtcctcaagcatttggtgctttaaaggacaaaaacttaaaagtaaaattccctgaaagaactgttgctactgttgatcatattgtgccaacagataatcagagcaggcctttcaaagataatctcgctgaacagatgattgaaacacttgagaggaattgcttagaacataaaataaaattttttaatattggtagtggtaatcaaggaatagttcatgtagtagcaccagaattagggctgactcaaccaggaatgacaatcgcttgcggagattctcatacttcaactcatggggcatttgggtcaattgcttttgggataggcactagtcaagtaagagatgttctggcttcccaaaccatcgctatcaacaaattgaaagtgaggcaaatttggtgtgacaaaaaattatctaagggtgtttttgctaaggatttagtacttcatatcattaatgaacttggtgtaaaggcaggagtaggtttcgcatatgaattcgcggggcctgcgatagatgaattatcaatggaagagaggatgactatatgtaatatgtctattgaaggaggagcaagatgcggctacattaaccccgatgaaaagacatttagttacattaaaaacaaattatgtgctccaaaaagtgagcattgggataaagcgatcacatggtggaaatcattaaaaagcgatgaaaattcaatttatgatgatgtaattaaattagatgcttctaaagtggagccaactgtaacctgggggattactcctggccagagtataagcattaatcaacaaattcctcttttagatgacttgtccccgaatgataaattagttgcaaaagaggcttatgaatatatgagtttcaagccagggcaatatatcaaagatactcctgttgatgtttgtttcataggtagttgcacaaatggaagaatcagtgacttaagagttgccgccaaagtattaaaaaacaaaaaagtatccaagaatgtcaaagcatttgtagttccaggttcagaaaaagtagccactaaagcaaaacaagagggtcttgatcagatatttaaggattctggatttcaatggagagagcctggctgctcaatgtgtttagcaatgaattcagataagctaataggtaatcaagttagtgctagttctagtaatagaaatttcaagggtaggcaaggatctcccagtggaagaacacttctcatgagtccagcaatggttgctgctgctgcaattaatggcaaagtcagtgacgttagagaatttattaaataa

SEQ ID NO: 283987 - DNA, 1405 bp, Unknown
  Bacterial polypeptide expressing nucleotide sequence isolated from the Sargasso Sea
aatgccattaactctttacgataaaatttggaatgaacatttagttcatcaacaagaagatggtaccgcattattatttgttgatagacatctaatacatgaagttacaagtccacaagcttttgaaggtttaagaaattcaaatagaaaagtaagacaaccaactttaacattggcggttgccgatcataacgtaccgacaactgataggagtaaaggaatagatgatattgagtctaaaatacaagttgatactttagaaactaattgtaaagaatttggaattaaactttttggaatgggtgataaacgacaaggcattgttcatataattggtccggaacaaggctttacccaacctggtacagtaattgtatgtggtgatagtcatactgcaacacacggagcttttggagcgttagcttttggaatcggaacatctgaagttgaacatgttttagcaacacaaacattagttcaaaaaaaagcaaaaaattttagaataaatgtaagcggcaaactacctattggagtaacttcaaaagatgtaattttacaaattattggaaaaattggaactgctggaggtaccggctgtgtagttgaatattccggtaccctaatatcatctttaagtgttgaacaaagaatgacaatttgcaatatgactatcgaaggaggcgcaagagcggggcttattgaacctgatcaaaaaatttttgattatttaaaagatagaccaatgtctccaaaaaaagacaattgggacaaagcattagaaaactggaaaaatttaaaatcagactcagatgcaatatttgataaagaagttaatttaaaagctgaagaaattataccaatggtgacatggggcacttctcctcaagatgtaattactattgaaggtaaagttcctaatccaaaaaatgaaaaagatttagataaaaaaaattcaattgaaagatctctaaaatatatgggtttaaagcctgatactgccgcaaaagatataaagattgataaagttttcattggtagctgtactaatggacgaattgaagatttaagagaagcagcaaaaatattaaaggataagaagaaagcgtctcatattgaagcaatggtagtaccaggatcaggattagttaaacagcaagctgaacaagaaggactagataagatttttattgactcaggctttgaatggagagagccaggttgttcaatgtgtttagcaatgaatgccgataaattgaaaccagaagaaagatgtgcgtctacttctaatagaaattttgaaggtagacaaggtcgtggaggaagaactcatttagttagtcctggaatggcagcagcagcagctatatcaggaaatcttgatgacgttagaaaatatcaaagttaa

SEQ ID NO: 283988 - DNA, 541 bp, Unknown
  Bacterial polypeptide expressing nucleotide sequence isolated from the Sargasso Sea
tatgattattccaaaacagttcttaaaaactattaaaagaacagggttaggaaaaaatttattttttgaattgagatatgatgaaaagggtaatgaaattaaagattttattcttaatcaagagccttataatagttcaaaaatattgatatccggaaaaaattttggctgcggatcttcgagagaacatgctccttgggcattattagattttggaataacctgcgttataagttcaagttatgcagatattttttataacaactgttttaaaaatgggatattaccaatcattttaaatgaagaaaatataaaagagctatcagaatactctaatagaaaagaagaaatatcaattgatttaagagaacaaaagattatttatggaaacaatgaagttggatttgatgttgatccatttaaaaaaaaatgtttattagaaggattagatgacattgctctttctttagaaaaatcagatgaaattaattcttttgaaaaagaattaaaaaataaaaaaccatggatatttaatgattaa

SEQ ID NO: 283989 - DNA, 1399 bp, Unknown
  Bacterial polypeptide expressing nucleotide sequence isolated from the Sargasso Sea
aatgaattatactttatatgacaaaatatggaatgaacatagcattctagttaatgatgatgatagcgagttgttgtatattgatagacatcttgtgcatgaagtaacatctcctcaagcttttgatggattagaaattaataatcgtaaagtttggagcaaaaattcgatatgtgcagtatctgatcataatgtcccaacacgaaatagacttaatggaattaaagactctatctcaaaacttcaagttgatacgctaatcgataactgtaaaaaacataagattaattattttgatttaaataatataaatcaaggtattgtgcatgtaataggaccagaacttggttttactcaaccaggtatgacacttgtttgtggagactctcatacttcaactcatggcgctcttgcatcacttgcttttggtgtaggtactagtgatgttgaacatgtgctagctacacaatgtattaatgtaaaaaaagagaagaatttcaatattagcattatcaattcactctctgatggtgtgtcatcgaaagatttaatactctatatcataagagagattggaacgtcaggagggactggcttcactattgaatttagtggcgactgtattagcaagttaagcattgaggcaagaatgactttgtgcaatatgagtattgaaggaggagcaaagtcaggtcttgtagcttttgacaacaagacattggactatgttattaaaactaaaaattcgccatctaaaaaatacatagatgatgcaataaagtattgggaaacccttcactcagatgattctgcagatttcgataaatctatcgagttcgatgctagcgtcataaagccacaagttagttggggtacatcacctgaaatgactgtcgatatagatgggaaagtaccagatccaaatgatattaaagataaaaataaaaaacaatcctatataaatgctttaaagtatatggatttggatgcaaatcaaaaaatcgactctatagaacttgataaaatatttatcggatcgtgtactaattctcgtatagaggatttgcgctgcgctgctttggaagtagaagggaaaagaatttcatcaagaattaaacaagctattgtagttccagggtcaggacatgtaaaaaaacaagctgagaatgaagggttagatattatatttaaaaaagcaggttttgagtggcgtgatccaggatgttcaatgtgtttaggaatgaatgacgataatttaaatccttatgagagatgtgcctctacatcaaatagaaattttgagggaaggcaaggtgatagaggtaggacgcatttagtcagtccaattattgcagcaagatcatcaatacatggatgcttaacgagtgaaaaaaaatga

SEQ ID NO: 283990 - DNA, 1399 bp, Unknown
  Bacterial polypeptide expressing nucleotide sequence isolated from the Sargasso Sea
aatgaagaaaacgttatatgacaaattatggcatgatcatcttgtaaaacctttaggcgatggttttgatttactttacattgacagacacctagttcatgaagtaacttctccacaagcttttgaaggactaaagctatcaaatagaaaaatttggaatgttaaaagtattgtggcggttcctgaccataatgttcctactacgaatagattaaatggtattgaagataaaatttcaagaacacaagtagaagctcttaatgataattgtaagacctttggcttgatgcaattcgatcttgaagattctcgacaaggtattgttcatgttgttgggccagagcaaggtattgttttgcctggtatgacagttgtatgtggagattcacacacatctactcatggcgcattagcatgtttagcttttggcataggaacatctgaagttgaacatgtaatggctactcaatgtattattaagaagaaagctaaaaatatgttggtaaatgtagaaggttcaaactcagattttatattttcgaaagatatagctcttcacataatcggacagataggaactgctggaggcacaggttacgctattgaatacaaaggaaatataataaatgatatgtccatagaatcaagaatgactctttgtaacatgacaattgaagctggagcaactaccggattaatagcttttgatgaaaaaacttttgattatattaatgataaaccatattcaccctctggtgaaaatctaaagaaagcaaaaaatagttggaacgatttattttctgatgagggatctaaattcgaaaaagtaataaatgttgatacaaaaaacataaatcctatggtgacctggggtacatcgcctgaaatggtatcagatgtgaatggcagagttcctcaagcggatgatgacttaattaaggaccatgaaggatatcaaaaagcattagactacatgggactggagtctggacaatcaatcaatagtattgttcttgataaagtatttattggctcttgtacgaattcaagaattgaggatttaagagttgtcgcaaaagtcgtagatggtaaaaaagtttctaaaacaatcaaaaaagctatcattgttcctggatcaggagtcgttaaagagcaagctgaaaaagagggccttgatgaaatttttataaaagcaggttttgaatggagaaatcctggatgctctatgtgtctcggcatgaatgatgatcaacttgggccatatgaaagatgtatatcaacatcaaataggaattttgaaggaagacaaggaagacttggaagaactcacttagctagtccagcaacagctgcagcatcagcaataaaaggaaacatagcagatgctcgggagttataa

SEQ ID NO: 283991 - DNA, 1405 bp, Unknown
  Bacterial polypeptide expressing nucleotide sequence isolated from the Sargasso Sea
aatgccaaatacactttacgataaaatttggaatgaccacttagttgatcagcaaactgatggtacagctttattatttgttgatagacatcttgttcatgaagtaacaagccctcaagcttttgaaggtcttagaaattcaaatcgaaaagtaaggcatccaaatttaacattagctgttgcagatcataatgttccaacgactgataggacaaatggtatagcagaccaagagtctaaaattcaggtggatacattggaaaaaaattgtaaagaatttggtatacaactttttggtatgaatgataaaagacaaggaattgttcatataattggacctgagcaaggatttacccaaccaggcacagtaattgtttgtggagatagtcatacagctacacacggtgcatttggagctttagcatttggaattggaacgtcagaggttgaacatgttctagcaacacaaaccttagtgcaaaaaaaagcaaaaaattttagaattaatgttaatggaaaacttcctttaggagtaacatcaaaagatgtaatcctgcaaataattggaaaaattggaacagctggaggcactgggtgtgttgttgaatatgctggagatttgattagatcactaagcgtggaacaaaggatgactatatgtaatatgactattgaaggtggtgcaagagcaggattgattgcaccagatgaaaagatatttaaatatttaagtggaaaaccaatgtctcctaaaggtgaaaaatgggacaaagctctagaatattgggcgagtttaaattcagatgatgatgcgacatttgaaaaagaaataagtttagaggccaatgaaattttacctatgataacatggggaacatctccacaggatgtgataacgattgatggtaaagttccaaatcctgatgctgagaaagatgaagataaaaagaattcattagaaagatctttaaaatatatgggtttaaaacccaacatggctgctaaagatattaaaatagataaagtttttattggcagctgtacaaatggaagaatagaagatttaagagaagcagcaaaaattttaaaagataaaaaaatagcctctcacgtccatgctatggtggtaccaggatctggattagtcaaagagcaagcagaacaagaaggtctagataagatatttgttagctcaggatttgagtggagagaaccaggttgttcaatgtgcttagcaatgaatgcagataaattaaaaccagaagaaagatgtgcatcaacatctaatagaaattttgaggggagacaaggtagaggtggaagaactcatcttgtaagtccaggaatggcagcggcagcagctatttcaggaaatttagatgatgtaagaaagtatcaaagttaa

SEQ ID NO: 283992 - DNA, 355 bp, Unknown
  Bacterial polypeptide expressing nucleotide sequence isolated from the Sargasso Sea
aatcagtgacctaagagttgccgctaaagtattaaaaggcaaaaaagtatccaagaatgtcaaagcatttgcagttccaggttcagaaaaagtggcaactgaagcaaaacaagaaggtcttgatcagatatttaaggattctggatttcaatggagagagcctggctgctcaatgtgtttagcaatgaattcagataagctaataggtaatcaagttagcgctagttctagcaatagaaatttcaagggtaggcaaggatctcccagtggaagaacactgctcatgagtccagcaatggttgctgctgctgcagttaatggcaaggtcagtgacgttagagaatttatcaactga

SEQ ID NO: 283993 - DNA, 607 bp, Unknown
  Bacterial polypeptide expressing nucleotide sequence isolated from the Sargasso Sea
atgcaaccttttactagccataccgggcttgcggtcatgatcgacagcgccaatatcgataccgatcaaattatcccgaagcaatttttatctaaggtgacgcgggatggattcggtgtgcacttattccacgactggcgttatctcgatgatgccggggaagtgcctaatcctgattttactctaaacaaacctcgctatagcggtgcgtcgattctgctggcacaggaaaactttggctgtggctccagccgtgaacacgccccatgggcactggcggattttggcctgcgcgccattatcgctccgagctttgccgatattttttatggaaactccatcaataacggtttgttgccagtgaagctgagcgcgaatgaagtgcgtcagttaatggatgaggtggcgagcgaagaaggcgcacaaatcaccgtggacttaacgacttgtaaggtgacatcgccttcgggagctgagtttagctttacgttggccgagtcggcgcggcataaattgctgaatggtttagatgccattggcttgaccttatcccacggggcgcagataggcgagtacgaatcacaaatcccaagctggcgatgctaag

SEQ ID NO: 283994 - DNA, 904 bp, Unknown
  Bacterial polypeptide expressing nucleotide sequence isolated from the Sargasso Sea
atgtcgaaaactctatacgataagatatgggaaaaccatcttgttcacgagcagaatgatggtactacattaatttatgtagatcgtcatttagttcacgaagtcacaagcccacaagctttcgaggggctgagattgcaaaaaagaaaagttagaagaccagaattaactttagctgttcctgaccataatgttcctacaactgatagaacaaagggtattgacgatgaggagtcaagaattcaggtggagacgttgagaagtaattgtaaggagtttggtgtaaagctttttgatgtgaacgacaaacgtcaaggtattgttcacattattggtccagaacaaggattcactcaacccggaactgttatagtgtgtggagatagtcatactgctacccacggtgcatttggtgctttagcatttggtattggaacctcagaggttgaacacgtacttgctacacaaaccttaattcaaaaaaaatcaaaaaattttagaattaatgtaaacggagaattgcccaagggtgttacagccaaagatgtaattcttaaaattataggaacaataggtacagctggcggtactggctatgttgtagaatttgctggcgccgttatacgcagccttagtatggaagagagaatgacagtttgtaatatgacaatagaagctggggctagagcagggttaatagcaccggatgaaaaaacatttgattatttaaaaaacaaatctatgtcacccaaaggagaagattggttaaaagcagtaaaattttggaaaacattgtattcagataaagaatgtaaatttgataaagaaataaatattgatggcaaagatattgagccattagttacttggggaacttctccactaagatgtatcaccctgtgac

SEQ ID NO: 283995 - DNA, 1198 bp, Unknown
  Bacterial polypeptide expressing nucleotide sequence isolated from the Sargasso Sea
gatgacaataaataatcctaaaactctttttgataaaatttgggaacatcatcttgtcgatagacaagaagacggaacttgtcttatatatattgatagacaccttgttcatgaggttacaagccctcaagcatttgaaggtttgagaaataataaccgtaaagttagaaggcctcaaagtacttttgctgtagctgatcataatgtcccaacttcagatagatctaaaggtatagaaaataaagaaagtagaattcaggttgaaacactagaaaaaaattgcaaagattttgatgttacactttttccattattagatagcagacaaggtatagttcatatagttggaccagaacaaggtattactcagccaggtatgacaatagtttgtggtgatagtcatacagcaacacacggagcatttggtgccttagcttttggtatcggcacaagtgaagttgagcatgtattagctactcagaccttgattcaaaaacctgcaaagaatatgcgaatttctgttgaaggtaaattaaacttaggtgttacagcaaaagatattatccttcatatcataggaaagataggaacagctggtggaactggttatgttattgaatatggtggtaatgcaatttcctctctttctatggaaggaagaatgacaatctgtaatatgagtattgaagcaggtgctagagctggtttaatcgctcctgacgaaaaaacttttgaatatattaaaggtagaccgtatgctccatcaggagataattgggacaaagcggtagaattttggaaatctcttccatctgatgagggtgcaaaatatgatgaagaaattttaattaatgctgaagatatttcaccacaaattacttggggcacaagcccacaagacgttgttgctataaatggtatagtaccaaatcctcaagaagagagtaatccaaatagaaagaaggctatggagcgttctcttgaatatatgggtttagaacccaaacaagaaatacaaaaaattaaaattgataaagtgtttattggctcttgcactaatggaagaattgaggatttaagagaagttgctaaagttgtagaaggcaaaaaagtttctgtagactcaatgattgttcctggttcaggtctagttaaaaaacaagctgaagaagaaaggttagataaaattttttattga

SEQ ID NO: 283996 - DNA, 859 bp, Unknown
  Bacterial polypeptide expressing nucleotide sequence isolated from the Sargasso Sea
aatggccaagaccctctatcagaaagtattcgacgcccacgtggtccgggaagtggagggggaaacccccctcatctacatcgaccgccacctggtgcatgaagtgaccagcccgcaggcattcgacggcctgcgcgccatgaaccgccagctgcgccgcccggacctgacctgggccaccatggatcacaacgtctccaccaccaccaaggacatcgccgcctccggcgagatggcccgcatccagatggagacgctggcagccaactgcaaggagttcggggtccgtctgtatgacctgaaccaccaataccagggtatcgtccacgtgatgggccccgagctcggcatcaccctgcccggcaccaccatcgtctgcggcgactcccacaccgccacccacggagccttcggctcgctggcgttcggcatcggcacctccgaggtggagcatgtgatggccacccagaccctgaaacagggccgcgccaagaccatgcgcatttcggtcaacggcaagctggccgagggcatcagcgccaaagacgtggtgttggccattatcggcaaggttggccatgccggcgggaccggctatgtggtggagttcgctggcgaggccatcgaagggctcaccatggaagggcgcatgacggtgtgcaacatggccatcgagcttggcgccaaggcggggatgatcgcccccgaccagaccaccatcgactacattcgcggcaaggagttcgctcccaagggcgaggcgctggaacaggccatcgcctactggcagagcctcaagagcgacgaaggtgcccacttcgatgccgaggtagtgctcgacgccgccgacatcgcgccg

SEQ ID NO: 283997 - DNA, 1267 bp, Unknown
  Bacterial polypeptide expressing nucleotide sequence isolated from the Sargasso Sea
atgagtaacccaaaaactttatatgataaaatatggaatgaccatgtagtcaccaataatgatgatggtacttctgtaatttacattgatagacatttagttcatgaagtcacaagtcctcaagcatttgaaggtttgaagattgctgggaggtctgtaaggcaacctcagttcacattagctacagcagatcataatattccaactacagatcgagataagggcattgctgatccagagtcaaaattgcaagttgaaacattagaaaaaaattgtgcagatcatggaattacttatctttccatgaatgataatagacaaggaattgttcatatcattggtcctgaacaagggtttacacaaccaggaatgactattgtttgtggtgacagccatacttcgactcacggggcttttggtgcattagcttggggcataggaacatctgaggtagaacatgttttagccactcaaaccttaattcaaaccaaagcaaaaaatatgagaattgatattcagggtgatttaccaataggagtaactgcaaaagatattgtgttaaagattattcaaacaattgggactgcgggtggtacggggtatgttattgaatatactggaaatgtaataaaagctctttccatggaaggaagaatgactgtttgcaatatgtctattgaagctggggcaagagctgggttaattagccctgatgaaaaaactgctgaatatataaagggtaggccattagcacctagcgatgattattatgaaaaagctgttcaatattggatgtctttagcttctgataaggatgcccaatatgataaaactatctcaattaatgctaaagatattattcctcaagttacttggggaactagccctgaagatgttgtatcaattgatggttcagttccaaatcctcatgatgaaaatgatacagaaaaaaagaagtctatgattcgtgcgcttgaatatatgggtttagaaccaaatactcaaatgaaagacataaaagttgataaggtttttatcggatcatgtacaaatggtagaattgaagacttaagagcagtttctaaaattgctaacggtaaaaaagtagctggtcacgttaacgcgattattgtccctggttctggattggtaaaggaacaagccgagaaggaaggtcttgataagatatttatagagtctggatttgaatggcgtgatccagggtgttctatgtgtcttgctatgaacgccgataaacttcagccac

SEQ ID NO: 283998 - DNA, 437 bp, Unknown
  Bacterial polypeptide expressing nucleotide sequence isolated from the Sargasso Sea
aatgaaacctaaaacactttttgacaagatttgggatcaccatcttattgatacccaggaagatggtgcgtcattaatatacatagataggcatttagttcatgaagtaactagtcctcaagccttcgaaggattaagattatctggaaggactgttaactcaccaaaaagaacccttgcagtcgctgatcataatgtccctactactgacagagctggtggaatagatgaagaagaatcacgaatccaagttgaagcattagacaaaaatgttgaagattttggtattccttattttaatatgatggacaaaagacagggtattgttcatgttataggacctgagcaaggttttactcagccaggaatgacaatagtttgtggagatagccatactgctacgcatggagcctttggtgctcttgcttttggaattg

SEQ ID NO: 283999 - DNA, 607 bp, Unknown
  Bacterial polypeptide expressing nucleotide sequence isolated from the Sargasso Sea
catggaaaaatttactaatcttaaaggtatagctgctccttttaactttataaatgttgatactgacaaaataatacctaaacaattcttaaaaactattaagagaacaggtttgggtaaacatttattcgatgagatgagatttaatgacgatggcaccgaaaaaaaagactttgtattaaatgaagaaccttatagatctagcaatataattgttgcgggcgataactttggatgtggctcaagcagagagcatgcgccttgggcgttatctgattttggtataaaatgtattatatcaacttcatttgcagatattttttataataattccttcaaaaacggtcttctgcctatcaaagtaacttccgaacaaagagaagctttaatggctgatgctaaagataaagaaaaccctgaactagaaatagatttaccatcacaagaaattaggaggccaaatggatctgtaataaaatttgatatagatccatttagaaaaaaatgtcttctcgaaggattagatgatattggtttaaccatgcaaaaatcgagtgaaattcaaaactttgaaacaaaaatgtcttctgaaagaccatggttataa

SEQ ID NO: 284000 - DNA, 667 bp, Unknown
  Bacterial polypeptide expressing nucleotide sequence isolated from the Sargasso Sea
atgaacaaattcaccgtacatacgggtctggttgtacctctcgatcgggagaacgtggacacggacgcgatcattccgaagcaattcatgaagtcgatcaggcggacgggatatggcccacacgcattcgatcaatggcgctatctcgaccacggcgagccggggatggacaattcaacacgtcccctgaatcaggaattcatactcaaccaaccccgttatcagggcgcatcgatcctgttgacgcggcgcaacttcggctgcgggagctcccgtgagcatgcgccctgggcgttggagcagttcggcttccgggcattaatcggaccgggcttcgcggagatcttttacaacaattgctttaagaacgggttattgccgatcgtgctgccggaagagcaggtgacacatctgttcgagcagacgcgctcaaactgcgggtttcagttgaccattgatctggaacggcagcgcataactacgtcgggtggtgacgagcactcgttcgaggtcgaagcgttcaggaaatattgcctgctcaacggctacgacgacatcgcgctcactttgcgtcacgccgacctgattcgaagtttcgagaaaaagcggatagagagccaaccgtggctcgccagacacctgacatctccactgatcggaaaatgac

SEQ ID NO: 284001 - DNA, 757 bp, Unknown
  Bacterial polypeptide expressing nucleotide sequence isolated from the Sargasso Sea
atgtctaaaactttatacgataaaatttggaaagatcacattgtccatcaacaagaagatggcacttcattactatttgtcgataggcatttaattcatgaagtgactagcccacaagcatttgaaggattaagaaactcaaatagaaacgtaagacatccaaatttaactcttgctgttgcagatcacaatgttcctaccactgatagaagtaaaggtataaatgatatagactcaaaaatacaagtcgatactttagaaactaactgtaaacagttcggaattaaactttttggaatgaatgataaacgccaaggcattgttcatataatcggaccagaacaaggttttactcaacctggaaccgtaattgtttgtggagatagccatacagcaacccatggagctttcggtgctttagcatttgggataggaacatcagaagttgaacatgttttagcaactcaaacattggttcaaaaaaaagcaaagaatttcagaattaatgtaaatggcaaacttccaatcggagtaacttcaaaagatgttattcttcaaataatcggaaaaattggcactgctggaggaacaggaacagttatagaatattctggtaatttaatatcctctttaagtgtagaacaaagaatgacaatttgtaatatgactatagaagctggagctagagcaggcctaatagagcccgatcaaaaaatttttgattatcttaaggataaacccatgtctccaaaaggag

SEQ ID NO: 284002 - DNA, 604 bp, Unknown
  Bacterial polypeptide expressing nucleotide sequence isolated from the Sargasso Sea
aatggaatcatttaaaacaataattggtatccctgcaccactaccaatgattaatgtggataccgatatgattattccaaaacaatttttaaaaacaataaagagatctggtttaggaaaaaatttatttcatgaattaagatacgatattcaaggtaacataaagaatgattttgttctaaattgggacccttataaaacttcaaaaattttaattgctggggcaaattttggttgtggatcaagtagagagcatgcaccatggtcgcttttagattttggttttaagtcaataattgcaccaagcttcgcagatattttctataataattgttttaaaaatggaattctgccaattaagttagatcaacaaaatgtagatatattaatgaacgaagcagaaaataaaaatgatgtttcagttgatttagaaaatcaaaaaatcacttatcaaaatgataaaataatagaatttgaaattgatgcatttcgaaaaaaatgtttgttagaaggcttggatgatatcggtttgacacttcaaaaaaataaaaaaattgatgttcacgaagaaaaaatacacagtatccaaccttggatagtgtag

SEQ ID NO: 284003 - DNA, 1060 bp, Unknown
  Bacterial polypeptide expressing nucleotide sequence isolated from the Sargasso Sea
atgtctaaaactctatacgataagatatgggaaaaccatcttgttcatgaacaaagtgatggaacatcattaatttatgttgataggcatttagtccatgaagttacgagtccccaagcttttgagggacttagattacaaaaaagaaaagtcagacgaccagaattaactcttgcagtgcctgatcacaatgttcctacaactgacaggtcaaaaggtataaatgatgaggactctagaattcaagtagaaacattaagaaaaaactgtaaagactttggaatagaactttttgatgttaatgataagcgtcaaggtatagtccatattataggacctgagcaaggtttcactcagccaggtacagtaattgtatgtggcgacagccatactgctacccacggagcgttcggtgcattagcttttggaataggaacatctgaagttgaacacgttcttgctacacaaactttaatgcaaaagaaatcaaaaaatttaagaataaacgttaatggcaatttaccaaaaggagttactgcaaaagatgtaatcttaaaaattattggtacgattggaactgcgggtggaactggatacgtagttgaatttgctggcgatgtaattaaaagcctaagcatggaagagagaatgactgtttgtaatatgaccattgaagcaggtgcaagagctggactaattgcaccagatgaaaaaacatttagctatttaaaaggtaaaacaatgtcgccgaaaggtgaaaattggactaaagccgtagaattttggaagactttgtattcagacaaagactgcaaatttgataaagaggtaaatattgatggcaaaaatatagaaccacttgttacttggggcacttcacctcaagatgtgtcaccagttactggtgttgtgccagatccagaaaaggaaaataaccaggatagaaaaatggccatgaaaagatctcttgattatatgggattagaagcaaacactaaaatttcagacataaaaattgacaagatttttataggaagctgtacaaacggaagaatagagg

SEQ ID NO: 284004 - DNA, 511 bp, Unknown
  Bacterial polypeptide expressing nucleotide sequence isolated from the Sargasso Sea
atgcccaatactctttacgataaaatttggaatgatcacttagtagatcaacaagaagatggtacatctttaatatttgttgatagacatttagttcatgaagtaactagtccacaggcgtttgaaggattaagaaattctaagagaaaagtaagacatccaaaacttacacttgcagttgcagaccacaatgttccaactactgatagatcaaaaggtatctcagatgaagagtctaaaatacaagttgatactttagagtctaattgtaaagattttggtattcaattatttgggatgggagataaaagacagggtatagtacatataattggaccagaacaaggttttactcaacctggaacagtaattgtttgtggtgatagtcatacagcaacacatggtgcatttggttctttagcatttggaattggaacctcagaggtagaacatgtattagcaacacaaactttagttcaaaaaaaagcaaaaaattttagagtaaatgttg

SEQ ID NO: 284005 - DNA, 1399 bp, Unknown
  Bacterial polypeptide expressing nucleotide sequence isolated from the Sargasso Sea
tatgggaaaaacattatttgataaaatctgggataatcacctcgttacgtctattgatgagagtacgaacttaatatttattgatttacatcttgtccatgaagttacttcacctcaagcgtttgatagtctaagaatctctgatcgaaaagtaaaatatcctgaattaactttggcaacagttgatcacggtgtcccaacatcgaacagactattgggaataaaagatcctctttcaaaaattcaaattgaagctttagaaaaaaattgtgaggaatttggagtcactctttttggaattaatgatccccgtcagggaatcgttcacgttataggacctgaacaagggattactcaacctggaatgactattgtgtgtggagatagccatacagcaacacatggtgctttcggagcattagcatttggaattggcacttcagaggttgaacatgttctagctactcagactttagcgatggaaaagccaaaaacaatgaaggttgaagttattggagatgtctcagatggagttggacctaaagatattattttaggcatcatcagaaaaattggaactggaggtggcgccggtcatgtaattgaatacgttggtgatgttataaaaaatatgagcatggagaatagaatgacaatttgtaatatgtcaatcgaaggtggagcaagagcaggaatgattgctccagatgaaactactttcaattatttaaaagataaaaactatgctcccaaagactctgattggaatgatgcaataaatgagtggggtgaacttttttctgatgatgacgctgcttttgataaagttgtaacaataaatgctggggagcttgaaccatcagtttcttggggtacaaatccatcacaagttatattcataaatgacgaaattcctcatcctgataattttcaagacgaatcagataaagaagcagcaattagagctttagagtacatggatttagagcccggaataaaaattaatgaaatcactttagatagggtatttataggcagttgtacaaatggtcgtattgaggatttaagagaggctgcccaagtcataaagggcaaaaaagtatcagagactgttggtgccatggttgttcctgggtcaacacttgtaaaaaatcaggctgaggaagaaggattagacaaaatttttattgatgcaggttttgattggagagaagcaggatgttcaatgtgtctgggtatgaatccagatatattaagtccaggtgaacgctgtgcttctacttcaaatagaaattatgaaggaagacagggagctgggggaagaacacatttagtaagtccaaaaatggctgcagcagctgcaatctatggaaaatttgtagacataagggatttataa

SEQ ID NO: 284006 - DNA, 562 bp, Unknown
  Bacterial polypeptide expressing nucleotide sequence isolated from the Sargasso Sea
tatgattattccaaaacaatttctcaaaacaattaagcgaacaggtttaggtaaaaatttattttatgaattaagatatgatgaaaaagatgcacctatagattcgtttgtccttaatcaagataaatataaagactctcaaattttgattactggtaaaaattttggctgcgggtcatctcgtgaacatgcaccctggtcaatcttagattatggtattaaatgcatcatcgcttcgagctttgcggatatcttttataataattgtttcaagaatggtattcttccaatcaaattagatgagtctgaagtaactaaattacaaaaagcagcggaaaacagtcttagttttacaattgatttagaaaatcagaagatttcttattttgataaaaatataaatcatgaggtaagttttgaacttgataaagccaaaaaaactagcctattagagggtttagacgatattggattgacactagctaaagttaatcatatttctgattttgaaaataagcaaaagtcaagaacaccctggttgtatagccagcaaataaaatga

SEQ ID NO: 284007 - DNA, 1181 bp, Unknown
  Bacterial polypeptide expressing nucleotide sequence isolated from the Sargasso Sea
cttgagttccggcaccctctacgacaaggtgtgggacctgcatcgggtggcggagcttcccggcggatccacccaactgttcgtgggtcttcatctgatccatgaggtcaccagccctcaggcgtttgcggcgctgcgcgacaagggtctgagcgtgcgctgccccgagcggactatggccacggtcgatcacatcgtgcccaccacctcccagagtcgtccgtttgctgatcccttggctgaggagatgcttagcaccttggagcgcaactgcgctgaccatgggatcaccctcaacggcatcggcagcggccgacagggcatcgtgcatgtgatcgctccggagctggggctgacccagcccgggatgaccgttgcctgtggcgactcccatacgtcgacccatggggcctttggcgccatcgccttcggcattggcaccagtcaggtgcgcgatgtgctggccagtcagagcctggccatgtcgaaactcaaggtccggcgcatccaggtgaacggtcggctgtccgatggggtctcggccaaggacctgatccttcacgtgatcaggacgctcggtgtgaaggggggcgttgggtttgcctatgagttcgcgggcccagcggtggaggcgctgtcgatggaagagcggatgaccctctgcaacatggcgatcgagggtggtgcccgttgcggttatgtgaatccagatcaagtcacctttgattacctcagcggtcgagcaggagccccttcgggcgctgcctgggatcgggccgtgagctggtggcgcagcttggccagcgatccggacgctgtggtggatgacgagctggtgttcgatgcggccagcatcgctcccacagtgacctggggaatcacaccgggtcaggggctgggtatcgatgagtgcattccgctgcttgagcagctggagccaggagagcgacccatcgccgaggaggcttatcgctacatggatcttcagcccggtaccgccatcgcgggggtgcctgtggatgtctgcttcatcggcagttgcaccaacggtcgactcagcgatctgcgggcggctgcggctgtggcccgtggtcgcaacgtcgctgatggcatcaaggcctttgtggtgccaggttccgagcaggtggcgaaggcagcggaagcggaaggactcgatcgtg

SEQ ID NO: 284008 - DNA, 1405 bp, Unknown
  Bacterial polypeptide expressing nucleotide sequence isolated from the Sargasso Sea
atgcctcaaactatatacgataaaatatggaatgatcatcttgttcatcaacaagaggatgggacttcacttttatttgttgatagacatttaattcatgaagttactagtccacaagcatttgaaggtttaagaaattctaatagaaaagttagacaaccttctttaactttagcagtagcagatcataatgttccaacaacggatagatcagtgcctattactgacgaagattcaaaaatacaaattgagacactagaaaaaaactgtgcagaatttggaataaatctttttggaatgaacgataaaagacaaggaatagttcatattattggtccagaacagggatttacacaaccaggaacgattattgtttgtggtgatagtcacactgctacgcacggagcatttggtgcattagcattcggaattggaacttcggaagtggagcatgtcttggcaacacagactttagttcaaaaaaaatcaaaaaattttagaataaacgttaatggatctcttcctgttggagtaacatcaaaggatgtaatattacaaataatcggaaaaattggtacagctggtggaactggttatgtaattgaatatgctggaaacttaatttctaatttaagtgtcgaacaaagaatgacgatttgcaatatgacaatagaaggtggagcaagggctggattaatagagccagatgaaaaagtttttaattatttaaaaggtaaaccaatgtctccaaagaattcaaattgggacaaagcattagaatattggagtaaattaaagtctgatggtgatgcagtatttgacaaagaaatcagtcttgagggcaaagatattaaaccaatggtaacttggggaacttcgcctcaggatgtagtagatattgatggaattgttcctgatcctgaaaatgagcaaaacgaagacagaaaaaattctattaacaggtcattaaaatatatgggtttaaagccgaaaactaaaataaaagatattagaattgataaagtttttattggaagttgcacaaatggaagaattgaagatttaagagaagctgcaaaaatcttaaaagataaaaaaattgcttctcatgtaaatgcaatgatagttcctggttcaggattagtaaaacaacaagcagagcaagaaggtttagatgtaatatttaaaaattctggatttgaatggcgtgagccaggttgttcaatgtgtttagctatgaatgcagataagttgaagccagaagaaagatgtgcatcaacatcaaatagaaatttcgaaggaagacaaggacgaggtggaagaactcatttagttagtccagctatggctgctgcagctgctatatctggaaatttagatgatgttagaaaatacaatagttaaa

SEQ ID NO: 284009 - DNA, 610 bp, Unknown
  Bacterial polypeptide expressing nucleotide sequence isolated from the Sargasso Sea
atggataagtttaattctttaaaagggatcgcagcccctttaccaatcgtaaatattgatacagatatgattatcccaaagcaatttcttaagactataaaaagaactggccttggagttagcttattttatgagatgagatatgataatgatggaaatctaattaaggatttcgtattaaacacatcgccttttgatcaatctaaaatattagtagcaggagataattttggatgtggctctagtcgagaacacgccccttggtctcttaaagactttggaattaagtgtgtaatttcaacaagttttgctgatattttttataataattgttttcaaaatggaattttaccgattgttgtcagttctgaccaacttgatcaattaatgatggcagctacaaatcaaatagagttcagcatcgatctcccagagcaaactgttaaagcgggcaatcattcaattaattttgaaattgaagaatatagaaaagatagacttttgcagggattagatgacataggaattactcttggataccaagacaaaattagcgcctatgaagaagacaaaaaaaataaaaaaccttggttatttaaggacaattaaa

SEQ ID NO: 284010 - DNA, 607 bp, Unknown
  Bacterial polypeptide expressing nucleotide sequence isolated from the Sargasso Sea
aatgaaaaaatttacaactttaaaaagtatacctgcatatcttccaatagttaatattgatacagatatgattattcctaaacaatttttaaaaacaataaaaagaactggtcttggtaaaaacttattttttgaaatgagatatgatgaaagagaaaatctgataaatgattttattttaaataatgatccatttaataaatcaaaaatattaattgcaggaaaaaattttggttgcggttcctctagagagcatgctccatgggcacttttagattttggaataacttgtgtaattagttcaagttttgcagatattttttataataattgcttcaagaatggaattttacccattactttaaaagaagaagaaattaaggaaatttcagaatattcaaatagaaaagaagaaatttcagttaatttaccagatcaaaaaatcacatttggaaataaagaaattaattttcaaatagatgaatttaaaaaaaaatgtttattagaaggtttagatgatatcgctttgtctttagaaaaattagaaaatattatttcatttgaaaaaaagattaaatctaaaaaaccttggatctttaatgattaa

SEQ ID NO: 284011 - DNA, 402 bp, Unknown
  Bacterial polypeptide expressing nucleotide sequence isolated from the Sargasso Sea
tatgaaaccaaaaacattatttgagaaaatatgggacaatcacttaatagcttcgattgatgaaggcacaaacctactgtttgttgatatgcatctagttcatgaagtcacttctccccaagcttttgatagtttaagaataagtaaaagaaaagttaaatatccacaattaactttagcaaccgtcgaccacggtgtgccaacctcagatagagcattgggaattaaagaccctttatcgaagaaacaaatagatgcattagaaaataactgtagtgagtttggaataactatttttggtgtaaatgatccacgacaaggaattgtacatgtaataggtcctgaacaaggcattactcaacctggtatgacgattgtatgtggggatagccacactgctac

SEQ ID NO: 284012 - DNA, 919 bp, Unknown
  Bacterial polypeptide expressing nucleotide sequence isolated from the Sargasso Sea
aatgcctcaaactttatacgataaaatttggaatcagcacttagttcatcaacaagatgatggcacatctctgctttttgttgatagacatttagttcatgaggtaacaagtcctcaagcttttgaaggcttaagaacatcaaatagaaaagttagacaaccgagtttaactttagcagttgctgatcacaatgtacctactactgatagatcaaaagggattgaggatgaggattcaaaaattcaagtcgatacattagaaaaaaattgtaaagaatttggaataaagttgtttggaatgaacgataaaagacaagggattgttcatattataggtcctgaacaaggttttactcaacctggaaccgtaatagtttgtggcgatagtcatactgctacacacggtgcatttggagcattagcctttggaattggaacttctgaggttgagcatgtgttagcaactcaaactttagttcaaaaaaagtcaaaaaacttaagaataaatgtaaatggtaagttaccaattggggtaacatcaaaagatgtaattttgcaaataattggaaaaattggaaccgcgggcggcacaggttatgttattgaatatgctggggatttagtctcctctttgagcatcgagcaaagaatgacaatttgtaatatgactattgaaggtggggcaagagctggattaattaaaccagatgaaaaaacatttaaatatttaaaaggtagaccattatctcctaaaaatgaaaactgggataaagcattagaccactggagcaaacttcactcagataacgatgctatttttgacaaagaggtgaaccttgatggaaaagatataaaaccaatggttacttggggtacatctcctcaagatgtggttccaatagatggtaaagttccaaac

SEQ ID NO: 284013 - DNA, 1414 bp, Unknown
  Bacterial polypeptide expressing nucleotide sequence isolated from the Sargasso Sea
aatgggacgaactctatttgaaaaaatatgggacaaacatgttgtcgaatcttttgatgacggcaacgatctaatatatatcgatagaatatttcttcatgaaagaacaggtagtattgcacttcaaaacttgcatgatcgaaacattgctgtcagaaatccaaaacaagtatttgcaacaatagatcatattgtcgacacgatacccggaagagatgatgaaactctgatgccaagcggaaaagagttcatcaaatcactcaggtcttccgcaatcagagagaatatcaatttctttgacctgaatactccagagcaaggcattggacatgttgtttcgcctgaacaaggaattgccctccccggtctcacatatatttgccctgattctcacacttgcagtctcggtgctcttggaaccttggcctggggtgttggatcgagcgaatgtgaaattgctttagcaacaaatacccttattaaaaagaaaccgaagtccataaaagtcaatgttaatggtaatgtaaatgatcaagtgagtgcgaaggatatagtgctctacttaatatcgaactatggtgccaatggggcagatggctctgccgtcgagtttggaggaaatgtcatagatcaaatgggaatagaagcaagattaaccctttgcaatatgtctgttgagtttggggcgatgactggaattattcaacccgatgagaaagtcttcgaatatttaagaggaaaaaaatacgcaccaaccttggatcaaatacaagaggctgaaaaatactggcgtaaattaaaatcagacaaagatgctgaatattctgagatcattgatattgactgcgatcaagttggaacatttgtcacttggggaaccagtcctgaacatgccattgatctcaatgaaaaaattccgtctttgaatgaaatcgatgatgaaactaaaaaagattctgcaaaaaaagcactcgaatatatggggttgaatgagggtgagacactcatgggaaaaaagatagatgctgcttttatcggttcatgcacaaatagtcgattgagcgatctaagaattgcagcttcaatcttaaaagataaaaaagtttctaatggagttaaagccatttgtgttccgggatcctcaaaagtcaaaaaagatgcggaaaatgaaggattggatgaaatctttatatcggctggatttgagtggcgtgagtcgggttgctcaatgtgcttttatgcaggtggagagagctttggcttgagcgaaagggtcatatcttcaacaaatagaaactttgaaaatagacaggggaagagtactagaactcatttggcatctccagcaactgttgcggcctctgcgattaagggaacaattgcatttccaaaagacttgaaggaggatttatga

SEQ ID NO: 284014 - DNA, 1405 bp, Unknown
  Bacterial polypeptide expressing nucleotide sequence isolated from the Sargasso Sea
aatgccgcacacactttacgataaaatttggaatgatcatttagttcatgaacaagatgacggtaccgcattattatttgttgatagacatttaattcatgaggtaacaagtccacaggcttttgaaggcttacgaagctcaaatagaaaagtgagacaaccatctctaactttagccgtagcagatcacaacgtaccaactacagatagatcaaaaggaatatcagatcaagaatctaaaattcaagtagaaactctagaggcaaattgtaaggaatttggaataaaactttttggaatgaatgataagaggcaaggaattgtacacgtaacaggtccagagcaaggatttacacaaccaggaacagtaatagtttgtggagatagtcatacagccactcatggtgcattcggttcactagcttttggaatcggaacttcagaagtggaacatgttcttgcaacacaaacattagttcagaaaaaagcaaaaaattttagaataaatgttaatggaaaacttccattaggagtaacatcaaaagatgttattttacaaatcattggaaaaataggtacagctggtggaacaggttgtgtaatagaatatgcaggagatttgattaggtctttaagtgtagagcaaagaatgactatttgtaatatgacgatcgaaggaggagcacgagctgggttaatagaaccagatgaaaaaatatttaattatttaaaagggagaccaatgtcgcctaaaggcgaaacttgggataaagcagttgaagtttggagtaatttaaattcagataatggttctcactttgacaaagaagtaagtctaactgcagaagaaattattccaatggttacttggggcacctctcctcaagatgttataacaattgaaggaaaagttccaaatccaaatacagaaaaagatcttgataagaaaagttcaattgaaagatctttaaagtatatgggtttgaagccagatacgctagcaaaggacattaaaattgataaagtttttattggaagttgtacaaatggaagaattgaagatttaagagaagctgcaaaaatattaaaaaataaaaaaaaagcttctcacgttcatgcaatggtagtcccagggtcaggtttagttaaacaacaagcagagcaagagggtttagataaaatttttataaaatcaggttttgaatggagagagcctggttgttctatgtgtttagcaatgaatgcagataaattaaagcctgaagaaagatgtgcatctacctctaatagaaattttgaaggaagacaaggcagaggcggcagaacacatttagtaagcccaggcatggctgcagccgcagcgatatctggtaatttagatgatgttagaaagtatcaaaattaa

SEQ ID NO: 284015 - DNA, 607 bp, Unknown
  Bacterial polypeptide expressing nucleotide sequence isolated from the Sargasso Sea
aatgcaaaaatttatttctcttaaaagcattccaacatatttaccaattgtaaatatagacacagacatgattataccaaaacagtttttaaaaactattaaaagaacaggtttaggaaaaaatcttttttttgaactaagatatgatgaaacaggaaaagaaattccagactttatcttaaacaaaaaaccattttgtaattccaacatattaattacaggaaaaaattttgggtgtggttcttcaagagaacacgcaccttgggcactattagattttggaattacttgtattattagttctagttatgctgacattttttataataactgttttaaaaatggaattttaccaattgttttaaatgaggataaaattaaggaattgtcagaatactctaatagaaaagaagagatttcagtcaacttagtggatcaaaaaattatatatggaaacaacgaaattttatttgagatagacccatttaaaaaaaaatgtttattagagggtctagatgacattgccttatctcttgaaaaatctgataaaataaaattcttcgaaaataaaattaaaaatcaaagaccctggatatttaatgattaa

SEQ ID NO: 284016 - DNA, 1315 bp, Unknown
  Bacterial polypeptide expressing nucleotide sequence isolated from the Sargasso Sea
atgcctaaaacattatatgacaaaatttggaatgatcacttagttgaccagcaatcagatgggacagctttactttttgtagacagacatcttgttcatgaagttactagtcctcaagcatttgaaggtttgagaaattctcatcgaaaggtaagacacccaaaactgactttagcagtagcagatcataatgtcccgacaacagatagaacaaatggaattgcagatcaggagtctaaaattcaagttgatactttagaaaataattgtaaggaatttggaattcaactttttggtatggatgataaaaggcaagggattgttcatattattggtcctgaacaaggatttacacaaccaggtactgtaattgtttgtggagatagtcatacagctactcacggcgcatttggagccttagctttcggaattggaacatctgaggtagaacatgttttggcaacacaaacattagtccaaaaaaaagcaaaaaattttagaataaatgttaatggaaaacttccattaggtgttacttcaaaagatgtaattttacaaataattggaaaaataggaactgctggtggtactggatgtgtcgttgaatatgctggtgatttaattagatcgttaagtgttgaacaaagaatgactatatgtaacatgactattgaaggtggagctcgagcaggattaattgcaccagatgaaaaaatttttaaatatttagatggaaaagcaatgtcaccaaaaggtgaaaaatgggacaaagctcttgaatattggaaaaatttaaaatcagacgataatgcaacatttgataaagaaattagtttagaagctaaagaaattttgccaatgataacttggggaacttcacctcaagatgttattacaattgatggtaaagttccaaatccaaattctgagaaagatgaggataaaaagaattcgatagaaagagctttaaaatatatgggtcttaagccagatatggcagctagagacataaagatagataaggtttttattggtagctgcactaatggaagaattgaggatttaagagaagcagcaaaaattttaaaagataaaaaaattgcgtcacatgtacatgcaatagtggtacctggatctggattagttaaagagcaggctgaacaggaaggtttagatagaatatttgttaattctggatttgaatggagagagccaggttgttcaatgtgtctagcaatgaatgcagataaattaaaacctgaggaaagatgtgcctcgacttcaaatagaaatttcgaaggaagacaaggtagag

SEQ ID NO: 284017 - DNA, 361 bp, Unknown
  Bacterial polypeptide expressing nucleotide sequence isolated from the Sargasso Sea
atgcctaatactctttacgataaaatctggaatgatcacttagttgaccagcaagatgatggtacagctttgttatttgttgatagacaccttgtccacgaagtaactagcccacaggcattcgaaggccttagaaattctaatcgaaaagtaagacatccaaaacttactttggctgttgcagatcacaatgttccaacaacagatagaaccaacggtattgcagatcaagagtctaaaatacaggtagatactttagaaaaaaattgtaaagaatttggagtagagctttttggtatggacgataaaagacaaggaatagttcatataattgaccagaacaagggttactcaacctgaa

SEQ ID NO: 284018 - DNA, 586 bp, Unknown
  Bacterial polypeptide expressing nucleotide sequence isolated from the Sargasso Sea
atggaaaaatttaaaaatgtagaaagtaggcccgtgccactaaattctgctcatgtagacacagatcaaataattccgaaacaattccttaaaaggattgaaagaactggctttggacaatttttattttttgattggagatttaatgatgatggctccccaaacgaaaaatttattctaaacgatgttaggtttaaagattctgaaattttactcgctcaggaaaattttggctgtggaagttcaagagaacatgcaccttgggctttaagagattatggattcaaagttattatttcttcatcttttgctgacatattatataacaattgttttaaaaattgcatccttcctataattcttaatgaaaaagatcttgaatatctttttgagtcaacttcaaattttaatgactacaaattaaatgtagatcttgaaaaaaatcttttagctgacaataaaggctttgagattttttttaatattgatccttttagaaaaaaatgcttacttgaagggcttgatgatatagcattaacattagagcattctgaaaaaatagataattacgaaaaagcattataat

SEQ ID NO: 284019 - DNA, 1411 bp, Unknown
  Bacterial polypeptide expressing nucleotide sequence isolated from the Sargasso Sea
ttgagtaaatctccaaaaactctatttgaaaagatctggcaggatcatttggttattcaagagaccaaagagacacctgcgatactttatattgatcttcatcttattcatgaagtcacaacacctcaggcatttcagtctttgagagacaaaggattgtcagtcagagatccaaaaaaagttttagcaactatggatcattccactccaactcttcctgtcaatagcatagctgacctcgatatcgttgccgaaaaaggacctgctgatcaaataagagacatgatcaagaattgtgaagattttggtattgagctacatggatttggctcggataagagaggtattgttcatgtgattggtcctgagcttggcgccacacagccgggaaaaacaattgtatgtggggatagccataccagtacgcatggcgcatttggagcgctagcattcggtataggtaccacagaggttggacatgttttggcatctcagtgtcttcttcagagaaaacccaagacatttgctgtgaatatgtcaggagcactcaaatctggagtgtctgcaaaagatatcattctaaaaattattcaagaagttggagtcgatggtggtgttggtcatgttatagagtatagaggccaaacagcaggccttctttctttagaggaaaggatgaccatttgtaatatgagcattgaggctggcgcaagagccgggatgtttgcacctgatgataaaacatttgactacttgatagataaaccaatgtcgccaaaaggattagattgggatgaagcaatacagagatggtctagattgattactgatgagaatgctgaatttgataaagaagtaaccattgatgtagatcgattgtcaccgatggtcacctacggcacaaacccaggaatggcaatgcaaattgatgatgtcgtaccagcatcaaatggagatcttggtcataaacagtcactgaattatatgcagattgaagccgacaaacccattataggaaaagagattgatgtagtttttataggaagttgcacaaactcaagaatatctgaccttcatgatgcagccgaaattctcaagggcagaaaagtttcaaatggggtcagagcattggttgtaccaggttctcaggcagtaaagaaagaagcagaaagtttagggctggataaaatattcgaatcagcaggagcagaatggcgtgaatctggatgctcgatgtgccttggaatgaatggtgatacagttggaaatgggcaattggcagtgagtacgagtaaccgaaattttgagggtcgacaaggtaaaggggctagaacaatactagcaagtccaaaaactgctgctgcatcagcgattgcaggatctgtagatgacccaaggaaatatagttaac

SEQ ID NO: 284020 - DNA, 883 bp, Unknown
  Bacterial polypeptide expressing nucleotide sequence isolated from the Sargasso Sea
tttgagaaaattttggaataaacacatagtggctgaaccaaaggatcagcccgaaatattatacatagatcttcatcttgttcatgaggtgacatctcctcaggcatttgaaggacttagattaaataatagaaaagttagaagacctgatttaactattgcaactgttgatcataatattactactgatgatactcgtactcaaataattaaagatgaaattgctaggaagcaagttgagacaattagagaaaattgcaaatctaataatattaccctttttgatgtttgggataaagaacaaggtatagttcacgttattggccctgaacagggatatactcaacctgggatgacaatagtttgtggagattctcatacctcaactcatggagcttttggagctttagcttttgggattggaacctctgaggtcgaacacgttcttgctactcaaaccttaaggcaaaggaaacctaaaactatgaaggtagaatttaagggatctttgtctaaaggagtaactgcaaaagatatggtccttaagctaattggtcaaataggtactgctggtggaacaggatacgtaatggaatatacaggtgaagcagtaaaaagtttgaatatggaaggtagaatgaccatttgtaatatgtctattgaaggtggtgcacgggcaggtatgatagccccagatcaaacaacttatgattggatgaaaggaagaaataaagtcccaaaaggatctgattgggaaaaatctataaaagaatgggatgaattaagatctgatccggaagcaatatatgattcttatgtagaagttgatttgtatgatttagaaccttttgtttcatggggaactaacccttctcaagtatta

SEQ ID NO: 284021 - DNA, 1364 bp, Unknown
  Bacterial polypeptide expressing nucleotide sequence isolated from the Sargasso Sea
tatgaatagaaccttgtacgacaaaatttgggacagtcacttcgttggcactcgaagtgatggcaacagcttgctctacatagatttgcaacttcttcacgaggttacgtctccgcaggctttcgaggggcttcaaatggctaaacggcctttatggagagttggggcaaatcttgctacgccagaccataatgtgccgacagagtcgagagaactcggtatggccggtatcaaggatttgatttcacttgagcaggtagagacacttaacgagaactgtaaaaatttcaatgttcagcagtttgatattctggacgagagacagggcattgttcatgtggtgggcccagaacaaggcgctacgatgccaggaatgactatagtctgtggtgattcacatacctcgacccacggcgcgtttgcatcgctcgctcagggaatagggacttcagaggtggagcatgtcatggctactcagtctcttgtgcaaaacaaagcaaaaaatttcgaagtaagggttgatggacttcttgaagagggtgtctttgcgaaggatgtcgctttagcgatcatcggcgctctcggtacggccggggctacagggcatacaatcgagtatcgcggcgacgctatatctgctcttagcatggagggtcgtatgaccctttgcaatatgtccattgaagctggcgcaagagcaggactggtggcggttgatgattgtacgcttgagtacgtcaaagggcggccattcgcgccgaaaggtgaactctggttgagggcgttagagagttggaaagatctatacagcgacgatggggcccattttgataatacgctgtctttgcgggcggaaactatagaacctcaagttacttgggggacctctcctgaaatggtctgcggaatcacctcatttgtgcccgacccaatggcgatatcggatcctgtcgtttcggagtcgacgagattggcgcttggctatatgggtcttgaggctggcacgccgataacggatattgagcttgaccagattttcattggatcctgtactaatgctcgtatcgaagacttgcgggttgcagctcacgttgtttccgggaaatcagtagcgaagaagataaaaagggcattggttgttcccggctcaggtctagttaagcagcaggctgaagaggaaggtttagcgaagatctttgttgatgctggatttgagtggagagcggctggttgctctatgtgtttaggcatgaatcccgatcagcttggagaaaaggaacactgtgcctcaacgtcaaatcgaaattttgaggggagacagggacacaaaggacgaactcatttagtcagccccgctatggcgg

SEQ ID NO: 284022 - DNA, 1117 bp, Unknown
  Bacterial polypeptide expressing nucleotide sequence isolated from the Sargasso Sea
atgccacagactttatacgataagttatggaaccttcatgaagttgcgcaaagggaggacggcactcatctattatatatagacagacatttaattcatgaagttacctctcctcaagctttcgaaggtctaaaaatagccggaagaaaaccgtggagaatttcatcaaatattgccacccccgatcataatgttccaactacggacagagcaaagggtattcaaggtataaatgatgaggtcgctaagttacaagtagtcaccttggatgaaaactgcaaacaacatgatattttacaatttgatattcatgatatacgtcagggtatcgtccatgtcgtaggcccagagcaaggtttaacccttccaggcatgacaattgtatgtggggactcacacacttcaactcacggggcattggctacactttccatgggtataggtacatccgaagtagagcatgtccttgcaacgcaatgcctcaaaacttctaaattgcaaaacatgagagtcataatcaatggtgatttacagaaaggagtaactcccaaggacgttactctcgcagtaataggaaagataggaacggcagggggtactggttatgcaatagagtacgcgggatctgtaatagaaaacatgtctattgaaggaagaatgactgtttgcaatatggcaatagaagcaggagcaagagctggcttagttgcctatgaccagactacagaggcttatatcaaaaatagaccatttgctcccaccggagagcaatggattaatgcaaagagtcaatgggaagaattgattagcgatgaggatgctaaatttgataaagaaatagagatagacggatctttaattgcacctcaagttacctggggaacatctccagagatggtgattgatattgacggttttattcctgaacctgacagtgaatctattcaacatgccttagattatatggatctggaacctggtaaaaaaattaaagatataaagcttgatcaagtatttataggttcttgtactaattctaggatcgaagatttgagagaggctgcgaaagtatggaaggaaaaaagatatcagactcaattaaacgagcaattgtagt

SEQ ID NO: 284023 - DNA, 580 bp, Unknown
  Bacterial polypeptide expressing nucleotide sequence isolated from the Sargasso Sea
tttggtcgcaccgcttgatcgagtaaacgttgatactgatcagattatccctaaacagtttctaaaatcgattaagcggacgggttttggtgattatttgtttgatgcttggcgatttgatgatccaggcgaactagggatgacgcccaatgaacgagttataaatcacgattttgtgttgaaccaaccgcgttatcagggtgcgagtattttattagcgagaaacaacttcggttgcggttcttccagagagcacgccgtttggtcgattatggaattcggttttaaagtcgttattgctgagagctttgccgatatattttatgggaattgctttaaaaatggattattgccggttcaattgccgccagatgttatagacaggctcttcgagctatcttcagatggtcttgagttgtcagtagatttacccaaccaaacggtgactgaaggagctggcgaggttttttctttcgatattgatcagggaatgaaaataaaattgttagaaggacaagatgaaataagtctttcgttgaaggaaagagagaaaatcctgctctttcgagaaagggcataa

SEQ ID NO: 284024 - DNA, 691 bp, Unknown
  Bacterial polypeptide expressing nucleotide sequence isolated from the Sargasso Sea
aatgtctacaacattatacgataaaatttggaacgatcacctagttgatcaacaagatgacggcacatctttactttttgtagatagacatttaattcatgaggtaacaagcccccaagcttttgaaggtttgagaaattctaatagaaaagttagacatccaaatttaactttagcagttgcagatcataatgttccaacaactgacagatcaaaaggtatttcagatgaagagtcaaaaattcaagtagatactttagaggcaaattgtaaagaatttggtgttcagttatttggtatggatgataagaggcaaggtatagttcatatcataggacctgaacaaggttttactcaacctggtacagttattgtttgtggagatagtcatactgcaacgcatggagcatttggtgccttagcatttggaataggtacttcagaagttgaacatgttttagcaacccaaacactagttcaaaagaaagctaaaaattttagaattaatgttaatggtgaacttcctttaggagttacttccaaagatgtaatacttcaaataattggaaaaataggtacagcaggtggaacaggatctgttgtggaatatgctggagatttaataagatctttgagtgttgagcaaagaatgaccatttgtaatatgacaattgaaggtggtgcaagagca

SEQ ID NO: 284025 - DNA, 1207 bp, Unknown
  Bacterial polypeptide expressing nucleotide sequence isolated from the Sargasso Sea
gatagaagtttacctatggttgatgaaacctcgtctactcaaattaaaacacttgaacaaaactgtaaagatttcggaataaagctatttggaattaatgatcctaatcaaggaattgtacatgtaattggaccccaattaggaattacattgcctggtagtacaattgtatgtggtgacagtcatacttcgactcaaggtgcatttggtgcctttgcgtttggtattggaactagtgaagttgaacatactcttgccactcaaacactatggcttgaaaaaccaaaaacctttgaaatcttagctactggacaaagaaagaattcttttgctgtaacttctaaggatattattctaagtataattaaaaaaattggaaccgatggtggaacaggtcatgtattagaatatcgtggaaatgcaattactgatttgtcaatggaacaaagaatgacaatatgtaatatgtctattgaggcaggttctcgtgctggcctaattgctcctgattctaaaacatttgattatgtcaataatcgtgaatacactccagaaaattacgatgatctagttgacacatggaaagaaaatctaatgtctgatccaaactcaaaatttgataaaagttttacaattgatgtagaaaaaattgaaccacaagtaagttggggaacaaatcctgcaatggtatctgatgtaactggaacaattcctacccctgaagattatggtaaaaataatgaaatccaagttgaaagtgcaaaaaaagctttggcatacatgaacttagaacctgaaaccccaatcgtagaaattcctattgatagagtattcatcggttcctgtacaaatgcaagattagaagatctaaaagatgctgcagaaattgtgaaaggtaaaaaagttaattcaaatgtaaacgcaatggttgtcccaggttctcaaatggttaaacatgaagctgaaaaattaggattagataaaattttcaaggatgcaaattttgaatggcgcgaatctgggtgtagcatgtgtcttggaatgaatcctgacatcttaaaaccaggagaacgttgtgctagtacgtcaaatagaaactttgaaggacgacaaggttctggtggtcgtacacatctagtaagtcctgttatggccgctgcttctgctatatctggccattttgttgatgtgagggaatggtgctgaa

SEQ ID NO: 284026 - DNA, 586 bp, Unknown
  Bacterial polypeptide expressing nucleotide sequence isolated from the Sargasso Sea
atggaacctttttcaaaagttactagtaaaatcaccccatttgataaagcaaacgttgacacagatcaaattattccaaaacaatttctcaaattaattacaaagtctggatttggaaaatttcttttctatgactggagatttgatcaaaatggaaatccaaaaaatgattttgtattgaataatcctgtctatcagaactctcaaattttggtaacaaatgaaaactttgggtgtggttcatctagagaacatgctgtttgggctctcaaagattttggctttagagtaattattgggccttcttttgcagatattttcttcagtaattgcttcaaaaatggtgttttgcccataattctagatgttactcaagttgaaaaattactaaaagtgcaagattctgttgaattggatttgaattcacaaaaaattacctttggaaatgaatctataacttttgaaattgattctcatagaaaaactagattactggaaggactagatgatattgatcttactttaaaagaaaatacgaacattgaaaattttgaaaataattcaaacataattccaattttttaaa

SEQ ID NO: 284027 - DNA, 1402 bp, Unknown
  Bacterial polypeptide expressing nucleotide sequence isolated from the Sargasso Sea
atgcctgctaccctatatgacaagctctgggatgagcatctagtccgaacggatgattccaacgaatcattaatttacattgataggcattatcttcatgaagttacttcgccccaagcttttgaggggctaaggcacaaagacttaaaaccatggcggcttgatgcaaatattgccactccagatcacaatgttcctactgatcgaggtcatgcatttaatgctgaattaattaaagatcaagtggctaaaattcaagtggttgagcttgataaaaactgtaacaaatttggcattcatcaatttgatataacttcaaataagcaaggaattgttcatgtaatgggacctgagcttgggtacacactacctggcatgacaattgtatgtggtgactcacacacttcaacacatggagcatttggatgtttggccatgggcataggaacatctgaagtcgaacatgttttagcaactcaatgtttaaaaattactaagctaaaaaacatgcaagttaattttaacggtagtctgcaaaaaggcgttacctcaaaagatattgttttacatttaatcaaattaattggaactgccggaggcacaggtcatgccattgagttctcaggatcatatattaaatccgcttcaatggaatctaggatgacaatttgcaacatggctattgaagctggagctaaggttggtcttattagggttgatgcaaccaccttggattatgttagaaagcattctaatttgtcagattcaattttcaaccaagcttccgaatattggcagactttaaaatcagattcaaatgcaaattttgatcaaacgattaatatcgatgtctcaaagattaagccacaagttacttggggcacatctcctgaaatgaccatagattttgatgcagatatcccatcccaagaggatatagatgaatcacatcatgaaaacttactccttgcaaaagcctacatgggtcttgatgaatcaaagactctgcaagatttgagttttgataaaatttttattggttcttgtactaactcacgaattgaggacttgcgtgatgcagcatctgcaataaagggaaagaaaatttcaaaagatatcacggaagctatagtggtgcctggttcaggcatggtcaaagcgcaggcagaagatgaaggccttgataaaatttttattgaagcgggttttttatggcgtgatcctggttgctctatgtgtttgggaatgaaccctgatcaactaaagccctatgagcgttgtgcatcaacttccaacagaaactttgaaggtagacaaggcaatctaggaagaactcatttaatgagccctttgatggcagcattaacagctataaacggaaaaataactgacccatcatgag

SEQ ID NO: 284028 - DNA, 382 bp, Unknown
  Bacterial polypeptide expressing nucleotide sequence isolated from the Sargasso Sea
aatgcgaaaatttaaaacaataaaaagtatcccagcttatctttcaatagttaatattgatacagatatgataattccaaagcaatttttaaaaacaattaaaagaactggattgggtaaaaatttattttatgaaatgagatataatgaaaaaggtaatcctatagaagatttcattttaaatacaaaaccattcaatgagtcaaaaatcttaattgcaggaaaaaactttggatgtggatcttcaagggagcatgctccttgggctttacttgattttggaataacatgcgttatcagttccagttatgcggatattttctataataattgttttaaaaatggaattttaccaattattcttccagatacaaaaataaaa

SEQ ID NO: 284029 - DNA, 486 bp, Unknown
  Bacterial polypeptide expressing nucleotide sequence isolated from the Sargasso Sea
tatggcttacgaaaaatttaatatattaaacagtaccgctgttcctctaaatattgacaatgttgatacagatcaaattattcctgctaggtttctcaaagctaccgaaaggaaaggatttggtgataatctttttagagattggagatataattcagataatacgttagtagattcatttcccttaaacaataaaaaatatgaaggaaaaattttagtcgctggtaaaaattttggttgtggctcatcaagagagcatgctgtgtgggcaatttatgattatgggttcagagctgttgtgtctagcttttttgctgatatatttaaaaataattgtttaaatattggggtattaccagtccaagttagtgagtcatttttatcagaaattttttcagaaattgataaaaattccaaaaatatatttgaaataaatcttgaagaccaggaatttgaaattaaaagctccggtaaaaaggaaaaatt

SEQ ID NO: 284030 - DNA, 607 bp, Unknown
  Bacterial polypeptide expressing nucleotide sequence isolated from the Sargasso Sea
aatgcaaaaatttaatacattaaaaagtattccagcttatttaccaatcgtaaatatcgatacagatatgattattcctaagcaatttttaaaaacaataaaaagaactggacttggaaaaaatttgttttttgaaatgagatatcacgataatggaaaagaaattaatgattttgtattaaataaggaaccatttaataattcaaaaattttaattgcaggaaacaattttggatgcggttcatctagagagcatgctccatgggcattgttagactttggaattacttgcgtgattagttcaagttatgctgatattttttatagtaattgttttaaaaatggaattttaccaataattcttgaagaggaaaaaataaaagaactttctgattacgcaaatagaaaagaggaaatttctgtagacttaaatgatcaaaaaattatttatggaaacaatgaaattaaatttgaaatagatccatttaagaaaaaatgtttgctagaaggactagatgacattgctctctctttaaaaaaatctgacaaaatcgaaaattttgaaaataaattaaaagataaaagaccttgggtttttaatgattaa

SEQ ID NO: 284031 - DNA, 544 bp, Unknown
  Bacterial polypeptide expressing nucleotide sequence isolated from the Sargasso Sea
atggcacctttaacattatttgaaaaaatttggaaaaaacatgtagttcatgaagaagatggtaaacctactctactttatattgatttacatcttgttcatgaagttacttcgccgcaagcatttgaaggtttaaggcaggctggccgtaaagttagaagaaaagataaaacttttgcaactatggatcataatgtaccaactgtcgataggtataatataaaagatccaatctctcttcagcagatagaaactttatcatcaaattgtaaagaatttgatattgaactttttgatttaaatagcccttaccaaggcattgttcatgtaattggtcctgagcaaggtctaaccagacctggtcaaactatagtttgtggggatagccatacttccacacatggtgcatttggtgctttagcttttggaattggaacaagtgaagttgaacatgtgctatctacacaatgtttatggcaaaataaaccaaaaaccttcgaggtaagagttgatgggaaaaggcaaagtggtgtaaactgcaaag

SEQ ID NO: 284032 - DNA, 607 bp, Unknown
  Bacterial polypeptide expressing nucleotide sequence isolated from the Sargasso Sea
atgcaaaagtttacaacattaaaaagtattccagcatatttaccaatagtaaatatagatacagacatgattattccaaagcaatttttaaaaactataaagagaacaggtcttggtaaaagcttattttttgagatgagatatgatgaaaatggaaaaataatagatgattttatattgaacaaagatccatttaataattccaaaatattaattgctggaaaaaattttggttgtggatcatcaagggaacatgctccatgggctttattagattttggcattacatgtgttattagttctagttttgcagatattttctataataattgttttaaaaatggaattttgccaatcattctcaatgaagaaaaaataaaagaattatctgagtatgcgaatagaaaagagtctatttccgtagatcttaatgatgaaaaaatagtttatggtaataatgaagtaaaatttaaagtagactctttcaaaaaaaagtgtcttttagagggattagacgatatagccttgtctttaaaaaaatctaataaaattgagaaatttgaagaggatttaaaaagaataaagccttggattattaatgattaaa

SEQ ID NO: 284033 - DNA, 1255 bp, Unknown
  Bacterial polypeptide expressing nucleotide sequence isolated from the Sargasso Sea
atgccacaaacaatttacgataaaatttggaatgatcatctggttcatgagcaaaaagatggaacttcacttctttttgtggatagacatttaattcacgaagtaacaagtccacaagctttcgaaggattaagaacatctaacagaaaagttagacaaccaaaattaacacttgctgttgctgatcataatgtaccaacaactgatagatcaaaaggaatatcagatgaagactctagaatacaagtagaaactttagataaaaactgtaaagagtttaatattcaattatttggtatgaatgataaaagacaaggtattgttcatataataggtccagaacaagggtttactcaacctggaaatataattgtttgtggagatagtcatacagctacccatggtgcatttggtgctctggcgtttggaataggaacttctgaagtagagcatgttttggcaacgcaaacattggttcaaaagaaatcaaaaaattttagaataagtgttaatggcgaattatcaattggcgtcacagcaaaagatgtaattttacaaattattggaaaaataggaactgctggcggaactgggtatgtaattgagtatgcgggcaatttaatatctggattaagtgtagagcaaagaatgacaatttgtaatatgactattgaaggaggagctagagctggattaattcagccagatgaaaagatatttgaatatttaaaaaataaaccaatgtctccaaaaaatgacaattgggaaaaagctattgaatattggagcaatctaaaaacagactctgatgcaaaatttgataaagaaattgttttagagggccaagaaataaaacccatggtaacttggggaacatcacctcaagatgttgtcgaaatagatggccaagttccaaatcccgataatgaaaaagatgaggatagaaaaagctctatagagagatcgcttaattatatgggattaaaaccaaatacaaaagtacaagatataaaaattgataaagttttcataggaagctgcacaaatggaagaattgaagatataagagaagcggcaaaaattttaaaagacaaaaaaatagcaaaacatgttaatgctatgatcgtaccaggttcaggactagttaaagaacaagcagaacaagaaggcttagatcaaatatttataaaatctggatttgaatggagggagcctggatgttcgatgtgccttgctatgaacgcagataagtaaa

SEQ ID NO: 284034 - DNA, 1405 bp, Unknown
  Bacterial polypeptide expressing nucleotide sequence isolated from the Sargasso Sea
aatgtctaagaccctttacgataaaatatggaatgagcatcttgttcatcagcaaaaagatggaacttctttattatttgttgatagacatttaatacatgaagttactagtccacaagcctttgaaggattaagaaattcaaaaagaaaagtaagacaaccaagtcttactttagctgttgcagatcataatgttcctacaaccgatagatcaaaaggaatttcagatgaagagtcaaaaatacaagtagatacactagacaataactgtagagaatttggtattcaagtttttggaatgaatgacaaaagacaaggtattgtacacattattggaccagaacaaggttttactcaaccaggaaccataattgtatgtggagacagtcatacagcaacacatggtgcgtttggagcattagcttttggtattggaacatcagaagtagaacatgttttagctactcaaactttggttcaaaaaaaatctaaaaattttagaattaatgttaatggaaatttgcctattggggtgacttccaaagatgtaattttacaaattattggaaaaataggaacggcaggtggaactggttatgtgattgagtatgctggaaacttgatatcttcgttaagtgtagaaaatagaatgaccatatgcaatatgactattgaaggtggagctagagctggattaattgaacctgatcaaaaagtttttgattatttaaaagataaaccgatgtcaccaaaaaaagaaaattgggaaaaagctttagaatattggaatactttaaaatcagataaggaagcgcaatttgataaagaagttagcttggatggaaaagatattaaaccaatggtaacttggggaacatcaccacaagatgtattaactatagatcaaaatgttccaagcccagaaaatgaaacagatccagataagaaaaattcaattgaaagatcattaaaatatatgggtttaaatcctaatacaaagataaaagatataaagatagataaagtttttataggcagttgcacaaatggaagaattgaagatttaagagaagcagcaaaaattttaaaagataaaaaagttgcaaatcatgttaatgcaatggtggttcctggttcaggcttggttaaacaacaagcagaacaagaaggattagataaaattttcataaattcaggttttgagtggagagagccaggttgctcaatgtgtttagcaatgaatgctgataagttaaaacctggagagaggtgtgcatccacttcaaatagaaattttgaaggcagacaaggaagaggcggaaggacacatttagttagtccaggaatggctgcggccgctgcaatttcaggaaatttagacgatgttagaaagtatcaaaactaa

SEQ ID NO: 284035 - DNA, 607 bp, Unknown
  Bacterial polypeptide expressing nucleotide sequence isolated from the Sargasso Sea
aatgcaaagatttaataaattaaaaagtatccccgcatatttaccaatagtaaatattgatacagacatgataattccgaagcaatttcttaaaacaataaaaagaaccggtcttggtaaaaatttattttttgagatgagatatgatgaccaaggaaactttataaaagatttcgttttaaatcaggaaccattcaataaatctaagattttaatagcaggtaaaaattttggatgtggttcttcaagagagcatgcaccttgggctttattagatttcgggattacttgcgtaattagttcaagttatgcagatatcttttataataattgttttaaaaatggaatcttaccaatagttctagatgaagaaaagataaaagtaatttctgagtattctaatagaaaagaagaaattgaagttaatttagagagtcaaaaaattatttttggaaataatgaaattaaatttgaattagattcatttaaaaaaaaatgtttattagaaggtctagatgatattgcattatctctagaaaaaactgataaaatcatatcttttgaaaataatttaaaaaatttaaagccatggatatttaatgattaa

SEQ ID NO: 284036 - DNA, 1393 bp, Unknown
  Bacterial polypeptide expressing nucleotide sequence isolated from the Sargasso Sea
tatgggtaagacattatttgacaaagtttgggataatcatgttataagtaaaattgaaaatggcccagatgtattatttattgatcgtcactttattcatgaagtaacaagtcctgttgcttttgttgggcttaaaagcagaaatttaaaagttttatttccagataaaacttttgcgacagcagaccataacactccaactataaatcaacacttgccaattaaggatgtattatctgctcaacaagtaaaaactttagaaaaaaattgcgaagaacatggtatagacttttggggactaggacataaaatgaacggaattgtccatgttattggtccagaaaacggtataactcaaccaggattgactatagtctgtggtgactcacatacttcaactcatggagcctttggagctattgcatttggaattgggacctctgaagttgagatggttctttcatgtcagtctataatgcaacaaaagccaaaaaaaatgaggattactatagatggaaaattaaatgattttgtaactccaaaggatgtagctatatatattattagccagctttcttcttctggagcaactggttattttgttgaatatgctggagatgtattcagatcaatgagtatggagggaagaatgactgtttgtaatctaagtatagaaatgggtgctcgaggaggaatgattgctcctgacgaaaagacttttgaataccttaagggtagagaattttctccaaaagataaagagtgggataatgctataaaaaactggagtaatttaaagtcagattccgattcagtttttgacaaagaaatttcatttaatgctagtgacattgagcctatgataacatatgggacaaatcctggtatggcagttcctatttcaaaagaaattcctgattttgataattcaggttcagaagcttccttctctaagtcactaaaatatatgaatttcaaagaaggtgatgtaatgctgggtaaaaaaattgattatgtatttctaggaagctgtactaatggaagaattgaagattttagatcatttgcaagtttaattaaagggaaaagaaaagcagagagtattgatgcatggctagttcccggatctcataaagtactaaaaagcataaaagaagaaggaatacttgaaattttggaaagttctggttttaaactaagagaaccagggtgttcagcatgtctagccatgaatgatgataaaatacctgctggaaaatatgcagttagtacaaccaataggaactttgagggaagacaaggtccaggagcaagaacacttcttgcaagccctttagttgctgcagcatccgcaattactggaaaaataactgaccctagagaaattatttaa

SEQ ID NO: 284037 - DNA, 343 bp, Unknown
  Bacterial polypeptide expressing nucleotide sequence isolated from the Sargasso Sea
tatggcttacgataagtttaatataattaaaagctcagctgttccgttaaatatagataatgttgacactgatcaaataattcccgctagatatcttaaagcaacagaaagaaaaggatttggagataacctttttagagattggaaatataacagtaataatgaaataattaagaatttccctctaaataatgaggattattcaggaagaattttagttgctggtaaaaactttggatgtggttcatcgagagagcatgcagtttgggctatctatgattatggttttagagcagtcgtatcaagtttctttgctgatattttcaaaaaccaaattgtttaa

SEQ ID NO: 284038 - DNA, 865 bp, Unknown
  Bacterial polypeptide expressing nucleotide sequence isolated from the Sargasso Sea
ttgagtaactctggaaaaacattatttgaaaaggtctgggacgatcatttggttcttcaggagactgaagagacacccgcaatactttatattgaccttcacctcattcatgaagttacaacgccccaggcatttcagtcccttagagatcaaggtttgtctgtaagagatccaagcaaagttttggcaacaatggatcattccactccaactctgccagtcaaaagtttaagagatctcgatatagttgctgaaaaagggcctgccgatcaaatcagagacatgataagaaattgtgaagaatttggaatcgagcttcatggttttgattcagataaaagaggaatagtccatgtgattggaccagagttaggtgctactcaaccaggaaaaacgattgtttgtggcgatagccatacaagcacacacggtgcgtttggtgcacttgcatttggcataggtacaactgaggttggtcacgtcttggcatcacaatgtcttctgcagagaaaaccaaggacattagcagtcaatatgaatggtgctctcaaatcgggggtatctgcaaaagacatcatattaagaatcattcaaaagcttggagttgatggtggcgttgggcatgtcattgagtacagaggatcaacagcgagcattctttcactagaagagagaatgaccatatgcaacatgagcattgaagcaggcgcaagagctggaatgtttgcacctgatgacaaaacttttaattacttaattgataaaccaatgtcacctaaaggattagcatgggatcaggcagttgaaaaatggtcaacattggtaagcgatgacaattgtgaattcgataaggaagtagatattg

SEQ ID NO: 284039 - DNA, 994 bp, Unknown
  Bacterial polypeptide expressing nucleotide sequence isolated from the Sargasso Sea
tttggtgcactagcttttgggattggaacttctgaagttgaacatgtattagctactcaaactttagcaatgagtaaaccaaagacaatgaaggttgaggttactggagaaatgaatggaagaataactccaaaagatttaatactagggatcataagagaaataggaactggtggcggagcaggccatgtaattgaatattccggcgaagtaataaaaaaaatgagtatggaaaacagaatgactatatgcaatatgtctatagagggaggtgcaagggcagggatgatagcccctgatgaaacaacatatgaatatctgaaaaataaaaattatgctccaaaagatgaggaatggggaaatgctcttgctgaatggaaaaatctttattcagatgatgatgctgagtttgataaagttgtcgaaattaatgtagataaactaaaaccctctatctcatggggaacaaacccgtctcaagtaattttcattgatgaagaaattccaagcccagatagttttaagaatgatgcagacaaagaggctgcggaaagagcattagagtatatggatttaaagccagggcaaaaaattaacgaaatcccattagatagagtttttataggtagctgtacaaatggaagaatcgaagacttaagagctgcagcaaaaataattgatggaggcaaggttcatgaaaatattaatgcaatggttgtccctggctcaacattggttaaaaaacaagcagaagatgagggcttagataaagttttcataaatgctggttttgactggagagaagctggttgctcaatgtgcttaggtatgaatcctgatatattagccccaggtgagagatgtgcttctacttcaaacagaaattatgaaggaagacaaggtgtcggagggcgaacacatctcgtaagtccccaaatggctgcagcagcagcaattaatggcttctttgttgatgttagagaaagcaattaat

SEQ ID NO: 284040 - DNA, 1408 bp, Unknown
  Bacterial polypeptide expressing nucleotide sequence isolated from the Sargasso Sea
ttgagtcaatataccctatttgataaagtttgggatttacataaggtttcaagtcttcctggaggatctgatcaaatatttattggtcttcaccttatccatgaagtgacgagtcctcaagcatttggtgctttaaaggacaaaaaattaaaagtgaaattccctgatagaactgttgctactgttgatcatattgtgccaactgataatcagagcaggcctttcaaagataatctcgctgaacagatgattgaaacacttgagaagaattgcttagaacataaaataagattttttaatattggtagtggtaatcaaggaatagttcatgtagtagcaccggaattaggcctaactcagccaggaatgacaatcgcttgcggagattctcatacttcaactcatggagcttttgggtcaattgcttttggtataggtacaagtcaagtaagagatgttcttgctacccaaaccttagccatgaacaaattgaaagtgaggcagatttggtgtgacaataaattatctaagggtgtttatgctaaggatttagtccttcatataattaataaacttggtgtaaaggcaggagtaggttttgcatatgaattcgcaggacctgcgatacatgaattatcaatggaagaaaggatgacgatatgcaatatgtctattgaaggaggagcaagatgcggctacatcaaccctgatgaaaagacctttagttacattaaaaataaattatatgctccaaaaaatgagcattgggatagagcgcttagatggtgggaatcattaaaaagcgatgaaaattcaatttatgatgacgtaattaaattagatgcttctaaggtagaaccaactgtaacctgggggattactcccggccaaagtataagcattaatcaacaaatccctcttttagatgaattatccccaaatgataaattagttgcagaagaggcttatgaatatatgagtttcaagcctggacaattaataaaagatactcctgtagacgtttgtttcataggtagttgcacaaatggaagaatcagtgacttaagagttgcagctaaagtattaaaaggcaaaaaagtatccaagaatgtcaaagcatttgcagttccaggttcagaaaaagtagccactaaagcaaaacaagagggtcttgatcagatatttaaggattctggatttcaatggagagaacctggctgctcaatgtgtttagcaatgaattcagataagctaataggtaatcaagttagtgcgagttctagtaatagaaatttcaagggtaggcaaggatctcccagtggaagaacacttctcatgagtccagcaatggttgccgctgctgcaattaatggcaaagtcagtgacgttagagaatttattaactgat

SEQ ID NO: 284041 - DNA, 1211 bp, Unknown
  Bacterial polypeptide expressing nucleotide sequence isolated from the Sargasso Sea
tccactactgatagatcaaaaggaatttcagaatgaggagtcaaaaattcaagttaatacactagattctaattgtaaagaatttgggattcaaatttttggaatgaatgataaaagacaaggtattgttcatataataggtcccgaacaaggttttacacaaccgggtacaataattgtatgtggagatagtcataccgcaacacatggagcttttggagcattagcctttggtattggtacttcagaggttgagcatgttttagcaacacaaactttggttcaaaaaaaatcaaaaaattttaggataaatgttaatggcagtctacctatcggagtaacctctaaagatgtaattttacaaattattggaaaaataggtactgctggtggaactgggtatgtcattgaatattctggaaacttaatttcatctttaagtgtagaaaatagaatgacaatctgcaatatgactattgaaggtggagcgagagctggattaattgaaccagatcaaaaagtttttgattacttaaaaggtaaaccaatgtctcccaaagggaaaaattgggataaagcactcgagtattggaacacccttaaatcagacgaaaatgctaaatttgataaagaggtaaacctcgatggtaaagatataaagccaatggtaacttggggcacttcacctcaagatgtattgactatagatgaaaatgttccaaatccagaagccgaaacagatttagataaaaaaaactcaatcgaaagatctttaaaatacatgggtttaaaacctgacacaaaagttaaagatattaaaatagataaggttttcataggcagttgtacaaatggaagaattgaagatttaagagaagcggctaaaattttaaaagataaaaaaattgcaggtcatgtaaacgcaatggtagtacctggttcaggactggttaaacaacaagcagaacaagaaggacttgataaaatatttataaattcaggtttcgaatggagagagcctggatgctcaatgtgtttagcaatgaatgctgataaacttcagcctggagaaagatgcgcatcaacatcaaatagaaattttgagggaagacaaggtagaggtggaagaactcatctagtaagtcctggtatggctgcagctgcagcaatttctggaaatttagatgatgttagaaagtatcaaaactaat

SEQ ID NO: 284042 - DNA, 607 bp, Unknown
  Bacterial polypeptide expressing nucleotide sequence isolated from the Sargasso Sea
atgcaaaaatttgataaattaaaaagtatcccggcatatttaccaattgtaaatattgatacagatatgttaattccaaagcaatttcttaaaacaattaaaagaactggtcttggtaaaaatttgttctttgaaatgcgatacgatgatcaaggaaatattattaaagattttattttaaacaaagaaccatttaataaatcaaaaatcttgatagctggtaaaaattttggatgtggctcttcgagagaacatgctccttgggcattactagattttggaattacatgtgtaattagttcaagttatgctgacattttttataataattgttttaaaaatggaatattgccaatcgtattagatgaggaaaaaattaaacaaatttcagagtactccaacagaaaggaagaaattgaaatagatttaaataatcaaaaaatagtatttggaaataatgaaattagttttgaaatagactcattcaaaaaaaaatgtcttttagagggtttagacgacatagcattatctttagaaaaaactgataaaataatatctttcgaaaaaaatttaaaaaattcaaagccttggatttttaatgattaaa

SEQ ID NO: 284043 - DNA, 592 bp, Unknown
  Bacterial polypeptide expressing nucleotide sequence isolated from the Sargasso Sea
atggaaaaatttaaaactgtagaaagtcgacctgctcctttagactcatctaacgttgatactgaccaaattattcctaaacagtttctgaaaagaattgaaagaactggctttgggcaatttctattttttgattggcgttttaatgatgatggaactgagaatgataaatttatattaaatgattcaagatttaagaattcagaaatattattatctcaggaaaactttggttgcggtagctctagggaacatgcaccttgggctttaagagactatggtttcaaggtaataatatcaacttcttttgcagatatactttacaacaattgcttcaaaaactgtatattaccaatcatagttgatgaaaagcacttaaattacctattcaattcatcattaaacttcaatgattacaaagtcatagtcaatctagatgaaatgaccttaagcgataacaaaggattttcatataaatttaatattgatccatatagaagaaaatgtcttttagaagggttagatgatatctctttgacattgatgcacgaaaaaaagataactttatatgaaaataaattttctaagtaaa

SEQ ID NO: 284044 - DNA, 315 bp, Unknown
  Bacterial polypeptide expressing nucleotide sequence isolated from the Sargasso Sea
ctaaagttagagcaatagttgtcccaggctctcaagtagtcaagtatcaagcagaaaaacttggtattgataaaatttttaaagatgctggatttgaatggagagagtcaggatgcagcatgtgtcttgcgatgaatccagataaattgtcaccaggcgaaagagcagccagtacttcaaatagaaattttgaaggtaggcaaggtaaaggtggcagaacccatcttgtaagtccaacaatggcagctgcggcagcgatagaaggtagatttatagatatacgagcatatgatgtcgatttaggagattattaat

SEQ ID NO: 284045 - DNA, 1074 bp, Unknown
  Bacterial polypeptide expressing nucleotide sequence isolated from the Sargasso Sea
agagggaattgctgatgaagattctagaattcaagttgaaactttgaataagaactgtaaagaatttggagtagaaatatttggaatggatgacaaacgacaaggtattgttcatatcattgggccagagcaaggatttacacaaccaggtaatattattgtttgtggcgatagtcatactgcaacacatggtgcatttggagctttagcatttggaattggaacgtctgaagtagaacatgttttagcaacacaaactttagttcaaaagaaatcaaaaaattttaggataagtgttaatggatctttacctatcggggtaacatcgaaagatgtaatattacaaatcattggaaaaattggtacagcaggaggtacaggttacgtaattgagtatgctggaaatcttatttctgatctaagtgttgagcaaagaatgacaatttgcaatatgactattgaaggtggtgctagagcaggacttatacaaccagatgagaaaatatttaagtatttaaaaggaaaaccaatgtcaccaaaaggagaaaactgggataaagccctagaatattggcacacattaaagtctgataaagatgcaaattttgacaaagagttaacattagatggctctcaaataaaaccaatggtaacttggggaacatctccacaagatgtggtggaaatagatggtaaagttccgagtcctgaaagtgaaactgatccagatagaaaaaattcaattaacagatcattaaattatatgggtttaaaaccaaacacaaaaatccaagatattaagatagataaagtttttattggaagctgcactaatggaagaatagaagatatcagagaagctgctaaaattcttaaagataaaaaaattgccaatcatgtacatgcaatgatcgttcctggatctggattagttaaggagcaagctgaacaagagggtttagataaaatatttttacaatcaggttttgaatggagagaaccaggctgttcaatgtgtttagctatgaatgcagataaacttaagccagaggaaagatgtgcgtcgacatcaaa

SEQ ID NO: 284046 - DNA, 1405 bp, Unknown
  Bacterial polypeptide expressing nucleotide sequence isolated from the Sargasso Sea
aatgcctaatacactatacgataaaatttggaatgatcacttagttgaccaacaagcagatggtacggctttactttttgtagatagacatcttgttcatgaagtaacaagtcctcaagcatttgaaggtttaagaaattctaatagaaaagtaagacatcctaaattaactttggcagtagcagatcataatgttccaacaacagacagaacaaatggtattgcagatcaagagtctaagattcaagttgatactctagataataattgtaaagagtttggcattcaactttttggtatggatgacaagaggcaagggattgttcatattattggtcctgaacaaggatttacccaaccaggtactgtaattgtttgtggagatagtcatacagccactcacggtgctttcggagctttagcttttggaattggaacatcagaggtagaacatgttttggcaacacaaacattagttcaaaaaaaaggaaaaaattttagaataaatgtaaatggaaaacttccattaggtgttacttcaaaagacgtaattttacaaataattggaaaaataggaactgctggtggcactggatgtgttgttgaatatgctggtgatttaatcagatcattaagtgtcgaacaaagaatgactatatgtaatatgactattgaaggtggagctcgagcaggattaattgcaccagacgaaaaaatttttaaatatttagagggaaaaccaatgtcaccaaaaggtgaaaaatgggaaaaagctctcgaatattggaagaatttaaaatcagatgataatgcaacttttgacaaagaaattagtttagaagctaaagaaattttgccaatgataacctggggaacttcaccccaagatgttattactatagatggcaaagttccaaatccaaatactgaacaagatgaggatagaaagaattcaattgagagagctttgaaatatatgggtcttaagccagatatggcagctaaagatataaagatagataaagtttttattggtagttgtacaaatggaagaattgaagatttaagagaagcagcaaaaattttaaaagataaaaaaattgctgcacacgtcaacgcaatggtagtaccaggatctgggttagttaaagagcaagcagaacaggaaggtttggataaaatatttgttaattcaggatttgaatggagagaaccaggttgttccatgtgtttagcaatgaatgctgataaattgaagccggaggagagatgtgcttcaacttcaaataggaattttgaaggaagacaaggtagaggtggaagaactcatcttgtaagtccaggaatggcagctgcagctgcgatatcgggtaatttagatgatgtaagaaagtatcaaaactaa

SEQ ID NO: 284047 - DNA, 171 bp, Unknown
  Bacterial polypeptide expressing nucleotide sequence isolated from the Sargasso Sea
gatgactggaaagacgttatacgacaagatctgggattcgcacctggttaatcagcgtgaagatggaactgcgctaatttacatagatcgacatctgatacatgaggttacctcaccgcaggcgtttgagggtctgaagatgtcaggcagagttccttggcgatcagatgc

SEQ ID NO: 284048 - DNA, 967 bp, Unknown
  Bacterial polypeptide expressing nucleotide sequence isolated from the Sargasso Sea
tcagaagttgaacatgttttagctacacaaactttagtacaaaagaaatcaaagaactttagaattaatgttaatggaaatttaccaattggtgtaacagcaaaagatgtaatcttacaaattataggaaaaattggcaccgctggtggaacaggttatgtaattgaatatgcaggtaatttaatttcttctcttagtgttgaaaatagaatgaccatttgtaatatgactatagaaggtggagcaagagcaggcctaatccaaccagatcaaaaagtttttgaatatttaaaaaataaaccaatgtcaccaaaaaaagaaaactgggaaaaagctatagaatattggagcaatctaaaaactgataatggagctcattttgataaagaaataaatttagatggcaaagatattaaaccaatggttacttggggaacttctccacaagacgtagttacaatcgatgggaaagttccaaatccaaaaaatgaaactgatccagacaaaagaaactccattgaaagatcattaaaatatatgggtttgaactcagatattttagttaaagatattaaaattgataaagtttttatcggaagttgtacgaacggtagaatcgaagatttaagagaagcagcaaaaatattaaaagataaaaaaattgcaaagcatgttaatgcaatggttgttccaggctcaggattagttaaacaaaaagctgaacaagaaggtttagataaaatttttattaagtcaggctttgagtggagagaacctggatgttctatgtgtttagccatgaatgcagataaattaaaaccaggtgaaagatgtgcgtctacttcaaatagaaactttgaaggtagacaaggaagaggcggaagaacacatttagttagtccaggtatggctgcagcagctgcaatttctggaaatttagatgatgttagaaagtatcaaaattaat

SEQ ID NO: 284049 - DNA, 607 bp, Unknown
  Bacterial polypeptide expressing nucleotide sequence isolated from the Sargasso Sea
aatgcaaaaatttaataaacttcaaagtattccagcttatctacctatagttaatgttgatactgatatgataattcctaaacaatttttaaaaactattaaaagaactggtttaggaaaaaatctattttttgaaatgaggtatgacgatcaaggaaatgaaataaaagaatttgttttaaataaagaaccatttaacaattctaaaattttaattgctggaaaaaattttggttgtggatcttctagagaacacgcaccctgggcactgcttgattttggaattacatgtgtgattagttcaagttatgcagatattttttataataattgttttaaaaatggaatattacctgtcaaaatcgatgaagaaaaaattaaacaactttctgagtattctttaagaaaagaagagatcaaaattgatttaaatgatcaaaaaattatttttggaaataatgagattaattttgacttggaccaattcaaaaaaaaatgtttacttgagggactagatgatatcgctctatctttagaaaaatctgaaaaaattatatcttttgaaaaaaaattagaaaaatcaaaaccgtggatttttaatgattaa

SEQ ID NO: 284050 - DNA, 607 bp, Unknown
  Bacterial polypeptide expressing nucleotide sequence isolated from the Sargasso Sea
aatgaagaaatttaattcattaaaaagcattcctgcatatttaccaatagtgaatattgatactgatatgataattcctaaacagttcttaaaaactattaaaagaactggccttggaaaaaatttattttttgaaattagatatgataatgatggaaaagaaattaaagattttgttcttaatcaagaaccttataataaatcgaagattttaattacaggaaaaaactttggatgtggatcgtcaagagaacatgccccttgggcattagcggattttggaattacatgcataataagctctagttatgcagatatattttataataattgctttaaaaatggaattttaccaattgttttagaagaagaaaaaattaaagaacttttagaatactctaaaagaaaacaagaaatatcaattgatttaactgaagaaaaaattttttttggtaataaagaaatcaaatttgaaattgattcatttaaaaaaaaatgtttattagaaggtcttgatgatattgctctttctttagaaaaagaagaaaaaattttttcttttgaaaaaaatttaaaaaataaaaaaccgtggatatttaatgattaa

SEQ ID NO: 284051 - DNA, 1405 bp, Unknown
  Bacterial polypeptide expressing nucleotide sequence isolated from the Sargasso Sea
atgccatatactttatacgataaaatctggaatgatcatcttgtccatcagcaagaagacggcacatctttactttttgtagatagacatttaattcatgaggtaacaagtccccaagcttttgaaggtttgagaaattctagcagaaatgtaagacaaccaaatcttaccttagcggttgcagatcataatgtccctactaccgatagaacaaaaggaatttcagacgaggagtctaagttacaagtagatacccttgaaaaaaattgtaatgaatttggtattaaattatttggaatggatgataaaagacagggaatagttcatatcatcggtccagagcagggattcactcaaccaggaacaattattgtttgtggtgatagtcatactgctacgcatggagcttttggagctttagctttcggaattggaacctctgaggttgagcatgttcttgctactcagaccttagtacaaaagaaatctaaaaattttagaataaatgttaatggtaaacttccattaggagttacatcaaaggatgtaatacttcaaataattggaaaaataggaactgcaggtggtactggatatgtaattgaatatgctggcgacttgatttcctccttaagcgttgaaaatagaatgactatttgtaatatgacaattgagggtggagctagagcaggcttaattgaacctgatcaaaaggtttttgattatttaaaaaacaaaccaatgtctccaaaaaatgaaaattgggaaagagccttagaatattggaataaactaaattctgatgatggagcacaatttgataaagagatcaatctagaaggaaaagatattaaacctatggtaacttggggaacatcacctcaagatgtaattactatcgatggtaaagtgcccaacccaaaaaatgaaaaagatccagacaaaaaaagctcgattgaaaggtcattaaagtatatgggtttaaaccctgatatagatgcaaaagatattaagatcgacaaagtttttattggcagttgtaccaatggaagaattgaggatttaagagaggcagctaaaattttaaaagataaaaagatagcaaatcatgttgatgcaatggtagttcctggttcaggacttgttaaagaacaggctgagcaagaaggattacataaaatctttattaattctggatttgaatggagagaaccaggttgttcaatgtgtttagcaatgaatgcagataaattaaaacctggtgaaagatgtgcatctacttctaatagaaactttgaaggaagacaaggaagaggcggtagaacacatttagttagtccaggaatggcagctgcagcagcaatttcaggcaatttagatgatgttagaaagtatcaaggataat

SEQ ID NO: 284052 - DNA, 607 bp, Unknown
  Bacterial polypeptide expressing nucleotide sequence isolated from the Sargasso Sea
atgcaaaaatttaataaagttaaaggtatacctgcttatttaccaatagttaatattgatactgatatgttgataccaaagcagttcttaaaaacaattaaaagaactggtttaggaaaaaatttattttatgagatgaggtatgatgaaaaaggaattaaaaatgatcaatttatacttaaccaatctccttatgataaatctaaaatattaattgctggaaaaaattttggttgtggctcatccagagaacatgctccctgggctttgctagacttcggcattacctgtgtaattagttctagttatgcagacattttttataacaattgttttaaaaacggaattcttcccattgtaatagacgaagaaaaaattaaacaaatttctgaatattcatctagaaaagaggaaatagaaattgatttggttaatcaaataattaaatttggaaataatgaaattaaatttgaaattgatccatttaaaaaaaagtgtttacttgaaggattagatgatattgcgttgtctttagaaaaaactgataaaatcatgtcgtttgaaaataaacttaaaaattcaaaaccctggatatttaatgattaaa

SEQ ID NO: 284053 - DNA, 1105 bp, Unknown
  Bacterial polypeptide expressing nucleotide sequence isolated from the Sargasso Sea
tatgaaaccaaaaacattatttgagaaaatatgggacaatcacttaatagcttctattgatgaagacacaaacctgctgtttgttgatatgcatctagttcatgaagtcacttctccccaagcttttgatagtttaagaataagtaaaagaaaagttaaatatcctgaattaactttagcaaccgtcgaccacggtgtgccaacctcagatagagcattgggaattaaagaccctttatcgaagaaacaaatagatgcattagaaaataactgtagtgagtttggaataactatttttggtgtaaatgatccacgacaaggaattgttcatgtaataggtcctgagcaaggcattactcagcctggtatgacaattgtatgtggggatagccacactgctactcacggagcttttggtgcactagcttttgggattggaacttctgaagttgaacacgtattagctactcaaactttggcaatgagtaaaccaaagacaatgaaggttgaagttatcggagaaatgaatggaagaataactccaaaagatttaatactggggatcatcagagaaataggaactggtggcggagcaggccatgtaattgaatattccggagaagtaataaaaaaaatgagtatggaaaacagaatgactatatgcaatatgtctatagaaggaggtgcaagggcagggatgatagcacccgatgaaacaacatatgaatatctgaaaaataaaaattatgctccaaaagatgaggaatgggaaagtgctcttgctgaatggaaaaatctttattcagatgatgatgctgagtttgataaagttgttgaaattaatgtagataaactaaaaccctctatctcatggggaacaaacccgtctcaagtaattttcattgatgaagaaattccaagcccagatagttttaagaatgatgctgacaaagaggctgcggaaagagcattagagtatatggatttaaagccggggcaaaaaattaacgaaatcgcattagatagagtttttataggcagctgcacaaatggaagaatcgaagacttaagagctgcagcaaaaataatcgatggaggcaaggtt

SEQ ID NO: 284054 - DNA, 653 bp, Unknown
  Bacterial polypeptide expressing nucleotide sequence isolated from the Sargasso Sea
gatgaacaatccaaataataaaacattatttgataaaatttggtctcatcatcttgttcaccaacaagaagatggtacttgtctaatttatattgatcgtcatttagttcatgaggtaacaagccctcaagcatttgagggtttgagagacaataacagaaaagtatatcgtcctgaaaatacttttgctgttgctgatcataatgttcctacttcagatagatctaaaggtattgataatgaagaaagtagaatacaagtagaaacactagaaaataactgtaaagaatttggagttactctttttcctcttctagataaacgacaaggtattgttcatatagttggtcctgagcaaggtattactcaaccaggaatgactattgtgtgtggggatagtcacactgctacacatggagcttttggtgcgcttgcttttggaatcggtacgagtgaggtagaacatgttttagctagtcagactcttattcaacaacctgcaaaaaatatgaagattgctgttaatggaaaattaaaatctggggttacagcaaaagatattattcttcatattataggtgtgattggaacagctggtggaacaggctatgttattgaatatactggcgaggttataaattctcttagtatgg

SEQ ID NO: 284055 - DNA, 1182 bp, Unknown
  Bacterial polypeptide expressing nucleotide sequence isolated from the Sargasso Sea
atgacaacgattctagaattcaggtagaaacacttgaaaaaaattgcaaagactttgatatcaaactttttggaatgaatgataaaagacaaggaatagttcatatagtaggacccgagcaaggctttactcaaccaggtacagttattgtttgcggagacagtcacacagcaactcatggcgctttcggggctttagcgtttggaataggaacctcagaagttgaacacgttttagcaacacaaactcttgttcagaaaaaagcaaagaattttagaattaatgttaatggaaaacttcctttaggagtaacttcaaaagatgtaattcttcaaattattggcaaaataggaactgctggaggaactggatgtgtattagagtatgctggctcagtcatatcaaatctttctgtcgaacagagaatgactatttgtaatatgtctatagaaggtggcgctagagcaggattaatccaacctgatgaaaagatttttaattatttaaaagatagaccaatgtctccaaaaaaagaaaattgggaaaaagctcttgattattggagtaaattaaaaagtgatagtgatgcaaaatttgataaagaaattaatttaaaaggtgatgaaatagcgcccatggttacatggggaacttcacctgaggacgtagtttcaattaatggaaaaatccctaatccagaaaatgaaaaaaatatcgataaaaaaaattcaataaatagatctcttaattatatggggcttaaacctgatgtgaaagttcaagacattaaaattgacaaagtttttataggaagttgtacaaatggaagaattgaagatttgagagaggctgcagaaatattaaagaataagaaaaaagcttcacatgtacatggaatggtagttcctggttctgggttagtcaaagaacaagctgaacaagaaggtctagataaaatatttatagagtccggttttgaatggagagaacctggatgctcaatgtgtttagcaatgaacgctgataaattaaaaccccaagaaagatgtgcatctacttcgaatagaaattttgaaggaagacagggaagaggaggaagaacccacttagtaagcccaggtatggcagcagcagcagcaatcgcaggaaatttagatgatgtaagaaaatatcaaaactaat

SEQ ID NO: 284056 - DNA, 1405 bp, Unknown
  Bacterial polypeptide expressing nucleotide sequence isolated from the Sargasso Sea
atgccaaaaactttatacgataaaatttgggaagatcatcttgtacatcaacaagaagatggcacatctttactttatgtagatagacatttaattcatgaagtaacaagccctcaagcttttgaaggcttaagattgaataaaagaaaagttagacaaccaaaactcactttggcagtcgcagatcataatgtaccaactaccgatagatccaaaggaattaatgatgaagaatccaaagtgcaggttgatactttaagaaataattgtaaagaatttggagttccactatttgacatgaatgataaaaggcaaggtatcgtccatatcattggtccagaacaaggctttactcagcctggatctgtaattgtttgtggagatagtcatacagctactcatggtgcatttggtgcacttgcttttggaattggaacttcagaagttgaacatgttctagcaactcaaacgttaatccaaaaaaaatctaaaaatcttcttctcaaagttgatggtaaattaccgattggggtcactgccaaagacataattttaaagattataggaacaataggaaccgctggcggcacaggatttgtcatcgaatactcaggagaagttattaaaaattttagtatggaagaaagaatgactatttgtaacatgacaatcgaaggtggagcaagggctggattaattcaacctgacgaaaaaacatttaactatttacaaaacagaccaatgtcaccaaaaaatgaaaaatggacaaaagctttggagtattggagcagacttaaatctgatgaaggatgtaattttgacaaggaagttataataaaaggcgaggaagtagcaccccaagttacgtggggaacatcacctcaagatgtagtccctgttaatggttttgttccagatcctaaaaatgaaaaaaatcaagatagaagagtcgcaatggaaagatctttagactacatgggactaaaaccaaacacaaaaatgacagaaattaaaattgacaaagtttttataggaagctgtacgaatggtagaattcaagatctacgggaggctgcaaagttgctcaaagataaaaaaattgcaaaacatgttaatgctatggttgtcccaggttctggtttagttaaaaatcaagctgagcaggaaggtttggataaaatttttaaaaactcaggttttgaatggcgagagcctggttgctcaatgtgcttaggaatgaatgaggaccagttaaaaccaaaagaaagatgtgcgtctacatcaaatagaaattttgaaggtagacaaggaagaggaggaagaactcaccttgttagtccagctatggcagctgccgctgctttggatggccacctttcagatgtaaggaaatttggtagttaaa

SEQ ID NO: 284057 - DNA, 553 bp, Unknown
  Bacterial polypeptide expressing nucleotide sequence isolated from the Sargasso Sea
atggataaatttgaaaatattaaaagtatacctgcctatatttcattaatgaatatcgatacagataaaataatacctaaacaatttttaaaaactattaaaagatcaggattaggtaaaaatttattctatgaaatgagatttgatgagaaaggaaagccaatttcaggattcattttagataatgatccatataataagtcaaaaattttaatcactggaaaaaattttggatgtggatcttcgagagagcatgctccgtgggcattactagattttggtattagagcaattattagtgaaagttttgctgatattttttacaacaattgtttcaaaaatggtattttgccaatagttgcaaatcaaaatattataaatgaattgtcagaatattcctctagaaaagagaatattgaggttaagttaaccgaacaagaaattctatatggaaataaatcttttaagttcgaattagatccattcaaaaaaaaatgtttactagaggggctagatgatattgcattatctcttaataaagctgagagcatca

SEQ ID NO: 284058 - DNA, 278 bp, Unknown
  Bacterial polypeptide expressing nucleotide sequence isolated from the Sargasso Sea
aatgtcaaaaactttatacgataaaatctgggaagaacatttagtacatcagcaagaagatggcacatctttgttatttgtcgatagacatttaatacatgaggttactagtccccaagcttttgaaggtttaagaaattctaacaggaaagtcagaaatcccgaattaacacttgctgttgcagatcataatgttccaactacagatagatctaaaggtattgcagatgaggaatctaaaatccaagttgatacactgggtaggaattgtaaggagt

SEQ ID NO: 284059 - DNA, 1279 bp, Unknown
  Bacterial polypeptide expressing nucleotide sequence isolated from the Sargasso Sea
gtcaggtagggctccgtggcgttcagatgcaaacttagcggtgccggaccataatattccaacgaccactgatgagaggcgacagggactgtcaggaattaaagatcctgtctcaaagattcaagtcaaagcgttagaggataattgcaaagaaaacaatattttatcgttagaaatgaatgatatacgtcaaggtattgtccatgttatggggcctgagcaaggagcaacgcttccaggcatgacgattgtctgcggtgattctcatacctcgactcacggcgcccttggagcgcttgctcacggtattggtacctcagaagttgagcatgtgcttgctacgcagtgcctaatgcaaagaaaaatgaaaaatatgcttgttcgggttgatggtgtcttgaagaagggggtcacggcaaaggacgtcgttctggcgattattggtgaaatagggacagcggggggaaccggatatacgatagagtttgggggcgaggttatcaaaaatctatcaattgaagggcgtatgaccatttgtaacatggccattgaggcaggagcccgtgctggcctgattgctgttgatcaaaagacgctgaactacgttaaaggacggccatttgctccaagtggagacatgtgggcacatgcttcggaggcctggagaagcttggtgtccgactcaaatgcgaattttgatagaacagtaataatcgatgggagcgaaattgaaccgcaagtaacgtggggaacttcgccggagatggtcgcgccggtctcagggtcgattcctgatccgactttagaaaccgacccaacaaagaaggggaacttagagcaggcattgaaatatatggggcttgaggcaggtactgaaataaaaaatatccaattggattatatattcataggctcctgcacaaactcgaggatagaagacctcagagaggctgctcaagtagttaaagacagaaaagttgccgaaaatatcgaggttgcaatggttgtccccggttctgggttggttaaaaagcaggcagaggaagaagggttggatcaaattttcaccagtgcgggtatacagtggcgtgaacctggctgttctatgtgtctagccatgaattcagatcaactgggagagggcaagcattgtgcatctacatctaaccgcaactttgaggggcgacaaggttttggggggagaactcatctagttagtccagctatggctgccgcagctgcgattcatggtcattttgtcgatgtaagtaagatctga

SEQ ID NO: 284060 - DNA, 484 bp, Unknown
  Bacterial polypeptide expressing nucleotide sequence isolated from the Sargasso Sea
tattccaagaacatcagactattctgaacaaaataaaaaaaacatagaacttgcaagagattatatgggcattaaagatgaggctaagctttctgatttagtatttgataaagtttttataggctcatgtactaactctagaatcgaagatcttagacaggccgctgaaatagttaaaggaaaatttgttgccgaaaatattagtgaagcaatagtggtaccaggatcaggtatggttaaagagcaagctgaattagaaggtttagataaaatctttaccgaagctggatttgtttggagagatcctggttgttctatgtgccttggaatgaatccagatcaattaaaaccttatgagagatgtgcttccacttcaaacagaaactttgagggtcgacaaggatatcttggtagaacacatctaatgagtcctattatggctgcatacaccgcaattaacggaacagtaggagatccattatga

SEQ ID NO: 284061 - DNA, 625 bp, Unknown
  Bacterial polypeptide expressing nucleotide sequence isolated from the Sargasso Sea
aatgattgatggaatcgtaggctatattgacagagataacattgatacagatcaaatcattccaacagagtacttaaaatcaattaaaaaatttggtttcgaagattatttatttgatggttggaggtatcatgacgacggaagattaggcattaaaaaagaagaaagagaaatcaatgaggacttcattctaaacaaaactcctttcaacgaatctaaaatacttttagcaagagataattttggttgtgggtcatcaagagagcatgcagtttgggctctaagagattttggtataaaagcagttatcgcttcttcttttggagatattttttataacaactgttttaaaaatcgtgttcttccaatccagcttaaaaaaaatcaaattgaggaattgtttaaaacagtacaagatgaaattgtagaattttcaatagatcttcaagaaagaattattactaatggtgataaagaaataagttttgatgtagaagatcatcttatagacagaataatctatggattagatgatgttgatattactttaaaagtaaaagaccaaattcataattttgaaaaaaatagaaaagaaaccagaccatgggtttttataaatgagtaa

SEQ ID NO: 284062 - DNA, 484 bp, Unknown
  Bacterial polypeptide expressing nucleotide sequence isolated from the Sargasso Sea
attgattggaaatgtaataaaatatgaacaggataatattgacactgatgtcataatccctggaacatatctgaaaatccatgattacaatgaattagcaacacatgcaatggaaggattagatcctgaatttccatcaaaggttaaggacggagatttcattgttgcaggaaaaaattttggttgtggttcgtcaagagaacatgcacctattgcactctcaacatgtggaataaaagctgtaattgctacatcttttgcaagaatattttatagaaactctgttgatggggcattcttgttacctattgaagtagatgaagaaacatacaaaaaaatatcaaattctgatcaactagaaattaacattgaaaaaaatgagataaaaaacatcacaaaaaatgaatcatattctatgaaacctttttcagaaataattgcaaaaattattgctgctggtggtcttttcaagtacaaaaggtaa

SEQ ID NO: 284063 - DNA, 1411 bp, Unknown
  Bacterial polypeptide expressing nucleotide sequence isolated from the Sargasso Sea
aatgactgaaacattatttgagaaaatttggaattctcatgttgtagttgaaagagaaaatgaaccttcattaatttacattgatcgtcatcttatccatgaagtaacatctcctcaggcttttgatggattaagagttaacaaccgaaaggtaaggcgccctgatttgactgtggctacaattgatcacaatgttcctactactgataggagcttaccaatgattgacgaaacttcatcaacacaaatcaaaactttggaaaaaaattgtaaggattttggaataaagctatttggaattaatgatcctaatcaaggaattgtacatgtaataggtccacaattaggaattaccttacctggaagtacaattgtgtgtggtgatagtcatacttccactcaaggtgcatttggtgcatttgcatttggaattggaactagtgaggttgaacatacacttgcaacccaaacactttggctagaaaaaccaaaaacatttgaaattttagctaccggtaaacgtaaaaattcatttgcagtgacatctaaggacataattctaagtataatcaaacagattggaactgacggaggcactggtcatgtattagaatatcgtggagatgcaataagtgatttatccatggaacaacgaatgactatttgcaatatgtctattgaagcaggttcaagagcaggtcttatcgcacctgatgaaaaaacatatgattatctcaataatagggaatacactccaaaaaattatgatgaacttgtagatgaatggaaaaataatctaatgtctgatcctaactcaaaatttgataaaagttttacaattgatgtagaaaaaattgaaccacaagtaagttggggaacaaaccctgcaatggtatctgatgtaaccggaaaaattcctactcctgaagattttggtcaaaataatgaaatacaaattgaaagtgcaaaaaaggctttatcttacatggatttgaaacctgatactgctatcgtggaaattccaattgacagagttttcattggttcatgtacaaacgcacgtttagaagatttgaaagatgctgcagaaattgtaaaaggtaaaacagttaattcagatgttaatgcaatggttgttcctggttcacaaatggtaaaacttgaggctgaaaaattaggattagataaaatattcaaagatgcaaattttgaatggagagaatctggttgtagtatgtgtcttggaatgaaccctgatatcttaaaaccgggtgaaagatgtgctagtacctctaatagaaattttgaaggaagacagggttctggtgggcgaactcatcttgttagccctgttatggctgctgcatctgctatcgctggtcattttgttgatgtgagggaatggtcttaa

SEQ ID NO: 284064 - DNA, 589 bp, Unknown
  Bacterial polypeptide expressing nucleotide sequence isolated from the Sargasso Sea
cttgaaaccattttctaaaattattagtatcatcactccgtttgataaagcaaatgtagatacagatcaaataattccaaaacaatttcttaaacttattacaaaatctggatttggaaaatttcttttttatgattggagattcaatcatgatggaaaggaaaaagatgatttcattttaaatgattcacactatcagaattcccaaatacttgtaacaaacgaaaactttggctgtggttcatcaagagaacatgcagtttgggctttgaaagattttggttttgatgtaatcatatctccttcgtttgctgatattttctatagtaattgcttcaaaaatggggttttaccaattattttagatattgaaaatattaagaaattattaaatttcaaggataaaattgaacttgatttacagtctcaaacaatcaattttggtagtgaatcgataaattttcaaattgattctcatagaaaaactagattgttagaaggtctagatgatattgatcttactctcaaagaagatgaaaaaatagaaaatttcgaaaaaaattcttctagaatatcaatttttgaataa

SEQ ID NO: 284065 - DNA, 607 bp, Unknown
  Bacterial polypeptide expressing nucleotide sequence isolated from the Sargasso Sea
atgcaaaaatttaaaaccataaaaagtatacctgcacatcttccaatagttaatattgatacagatatgataattccaaagcagtttttaaaaaccattaaaagaacaggtcttggaaaaaatttattttatgaaatgagatataacgaaaagggtacaccaattgaagactttattttaaacactagtccatttaacgactctaagatcttaatagctggaaaaaactttggttgtgggtcttcaagagaacatgctccctgggctttacttgatttcggaataacatgcgttattagctcaagttatgcagatattttctacaataattgttttaaaaacggaattttaccaattgtacttccagaagcaaaaataaaagaactctctgaatactcaaaaagaaaagaggaaatcattgtaaatctggaagaacaaaaaattacttttggaaataatgagattgattttgaaatagatcagttcaaaaaaaagtgcttaattgaagggttagacgatattgctctttcattagaaaaaaatccaaaaattactgaatttgaaaaaaaattatccacaaacaggccatggatttttaatgattaaa

SEQ ID NO: 284066 - DNA, 607 bp, Unknown
  Bacterial polypeptide expressing nucleotide sequence isolated from the Sargasso Sea
aatgaaaaaatttaataatttaaaaagtattccagcatatttaccaattgtaaatatagatacagatatgattattccaaaacaatttttaaagaccataaaaagaacaggacttgggaaaagtttattttttgaaatgaggtatgacgataatggaaaagaaaattctaattttgttttaaataaggaaccatataataaatcaaaaattttaattactggtaaaaattttggatgtggatcttcaagagaacatgcaccttgggcacttttagattttggaataacttgtataattagttctagttatgcggatattttttataataactgctttaaaaatggtatattgccaattacagtaacagaagaaaatataaaagaactttctgaatacgctaaccgaaaagaagaaatatctataaacttaagcgatcaaaatattttatttggtaatcaaaaaataaaatttgatttagatgaatttaaaaaaaaatgcttaatagaaggattagatgatatagctttatcacttaaacaaaaccaaaaaattgatgcatttgaaaaaaaattaaaaactaacaaaccatggatctttaatgattaa

SEQ ID NO: 284067 - DNA, 1405 bp, Unknown
  Bacterial polypeptide expressing nucleotide sequence isolated from the Sargasso Sea
aatgtctaaaactttatacgataaaatctgggatgatcatcttgtgcatacacaagacgatggaacatctttactttatgttgacagacatttagttcatgaagttactagcccgcaagcatttgaaggattgagaaactctaatagaaaagtaagacaaccaaatctaacattagctgttgcagatcataacgtaccaacatctgatagatctaaaggaatttctgatgaagagtcaaaacttcaagtagaaactttagaaaaaaactgtgatgagtttggaataaagatttttggaatgaatgataaaagacaggggatagttcatataattggacctgagcaaggatttacacagccaggaagtataattgtttgtggagatagtcacacagcaactcacggagcttttggatctctagcttttggtataggaacttctgaagtagagcatgtattagctacacaaactttggttcaaaaaaaatcaaaaaactttcgtattaaagtggatggaaagttgtctatcggcgtaacatctaaagatgttattttacagatcattggcaaaattggtactgcaggtggaactggttatgtgattgagtatgcaggaagcttaatctcatctctaagcgtagagcaaagaatgacaatttgtaatatgactattgagggtggtgcaagagcaggtttaatcgagccagatgaaaaaatatttaattatttaaatggtagaccaatgtcgcctaaagaagaaaattgggataaagcattagactattggagtaaattaaaatctgacggtgatgctaattttgataaagaagttactttagatggaaaagatattatgccaatggtaacatggggaacatctccacaagatgtcatatctatagatggaaagataccaaatccagaaaacgaagcggatgaggatagaaaaaattcaatagaaagatcattaaaatatatgggattaaaacctggtacagctatcaaggatgttaaaatagataaagtttttataggaagctgcacaaacggtagaattgaggacttaagagatgcagcgaaaataattaagaacaaaaaagtggcacaacatgtatatgctatggtagtccctggctctggactagttaagcaacaggctgaacaagaaggtttagataaagtttttaaagattcaggttttgattggagagaacctggatgttctatgtgcttagctatgaatgctgataaattaaaacctgaagaaagatgtgcatctacttcaaatagaaattttgaaggacgtcaaggtagaggcgggagaacacatcttgttagtcccggaatggctgcagcagcagcaatatcaggatctttagacgacgttagaaaatttcaaaattaa

SEQ ID NO: 284068 - DNA, 607 bp, Unknown
  Bacterial polypeptide expressing nucleotide sequence isolated from the Sargasso Sea
aatgcaaaaatttaaaacaataaaaagtatacctgcatatcttccaatagttaatattgatacagatatgattattccaaagcagtttttaaaaacaattaaaagaacaggtcttggaaaaaatttattttatgaaatgagatataatgaacaaggtacaccaattaatgatttcattttaaatacaagtccatttaacaactctaagatcttgattgctggaaaaaactttggttgcggatcttcacgagaacatgcaccatgggcattacttgattttggaataacttgcgttatcagttcaagttatgcagatattttctacaataattgttttaaaaatggaattttaccaattgtacttccagaaacaaaaataaaagaactctctgaatattcaaaaagaaaagaggaaatcatcgtaaatctagaagaacaaaaaattacttttggaaataatgagattgacttcgaaatagatcagttcaaaaagaagtgtttgcttgagggtttggatgacatcgctctttcattagaaaaaaatccaaaaattactgaatttgaaaaaaaattatccttaaacaggccatggatttttaatgattaa

SEQ ID NO: 284069 - DNA, 607 bp, Unknown
  Bacterial polypeptide expressing nucleotide sequence isolated from the Sargasso Sea
atgcaaaaattttccacattaaaaagtattccagcatatttaccaatagtaaatatcgatactgatatgattatcccaaaacagtttttaaaaacaattaaaagaactggactaggaaaaaatttgttttttgaaatgaggtatgatgataatggaaataaaataggcgattttatattaaatcaagatccatttacaaattcaaaaatactgatagcaggaaaaaactttggttgtggatcctcaagagaacacgctccttgggcattattagattttggtattacatgtgtaattagctctagttttgctgatattttttataacaattgttttaaaaatggaattttaccaattattgttgatgaggaaaaaataaaagaattatctgaatatgctaatagaaaagaggaaatttcagtagatcttaaagaagaaaaaatagtttatggtaataatgaaattaaattcaaaatagactcctttaaaaagaaatgtcttctcgaaggtttagatgatattgcgctatctttaaataagtctgataagataaaaagttttgagcaaaaattaaaaagctctaagccatggattataagtgattaag

SEQ ID NO: 284070 - DNA, 791 bp, Unknown
  Bacterial polypeptide expressing nucleotide sequence isolated from the Sargasso Sea
tatgaaacaaaccctgtacgataaaatttggaatgatcactgcattttagataatgatgatcactcatcgcttttatatattgatcgccacttaattcatgaggtcacctcaccacaggcatttgatggattagaaatcaaaaatagagatatatggaataaaaaatcaattatggcaacaacagaccacaatgttccaactattaatagagatcaaggaatcaccgacccagtttctaaaatccagatagaggctcttcgagaaaattgtaaaaaatataacatagagctttatgatttagataatcttaagcaaggtattgttcatgtaatagggccagaacttggaatgactcagccaggcatgactatagtgtgtggtgattcacatacatcaacacatggtgctcttgcatcactctcatttggaataggtacaagtgatgtcgagcatgtacttgctacacaatgccttaatcttacaaaagataaaaactttaatatagaagtaaatggcttgctccatccttacattacatcaaaggatttaattttatatataatcggaagtataggtacttcaggtggaacaggatacacaatcgagtacacgggcgaaactatatcaaacttaagtatagaatcacggatgaccatatgtaatatgacaatagaggctggtgctaaatcaggcttgatggcttttgatgagaaaactcatgattatttaaaagatagagaatttctaccttcatctaaacattatgacgatgcacttaagtattgggaaa

SEQ ID NO: 284071 - DNA, 760 bp, Unknown
  Bacterial polypeptide expressing nucleotide sequence isolated from the Sargasso Sea
atgccatatacaatttatgataagatttggaatgaacatctagttcaccaacaagaagatggaacatcacttctttttgttgatagacatttaattcatgaagttacaagccctcaagcttttgaaggtttaagaaattcaaaacggaatgtaaggcagccaaaattaactttagctgtagctgatcataatgttccaacaacagatagatctaagggaatttcagataaagagtcaaaaatacaagttgatactcttgaaagtaattgcaaagagtttggaataaaattgtttggcatgaatgataaaagacaaggaattgttcatattattggaccggagcagggatttactcaaccaggaacaattatagtatgtggtgatagtcatacagcaacccatggagcatttggttctttagcatttggtattggaacttcagaagttgaacatgtattagcaacacaaactttagttcaaaaaaaatcaaaaaactttagaataaatgttaatggaaaattatcccttggagtcacttcaaaagatgtaatattacaaattattggaaaaataggaacagctggtggaactggttatgtaatcgaatattcaggcaatgtaatttcctcattaagtgttgaacaaaggatgacaatttgcaatatgacaattgagggaggagctagagctggactgattcaaccggatgaaaaaatttatgattatttaaaaaataaaccaatgtctccacaagaatgat

SEQ ID NO: 284072 - DNA, 1393 bp, Unknown
  Bacterial polypeptide expressing nucleotide sequence isolated from the Sargasso Sea
gatgaaaaccctttatgacaagttatgggatgaccatgtcgtagaagatctaggatcaggtgatcaccttgtttatatcgatcgacactttcttcatgaggttacatctccacaagcatttgatgggatcaacaaaaaaaatctaaagccttggagacttgctgccaatattgcaactcctgatcacaatgttcccacagcaaggggtcaaaactttgaacttgaatccattgaggatgaggtatcaaaaattcagattatagagcttgatagaaattgtaataaatttgatatcccacaatttgatatcaattcagagaaacaagggatagttcatgttgttggtcctgaaaatggcttcactttaccaggtatgacgatagtatgcggagattctcatacctcaacacatggagcatttgctgctctatcaatgggaattggcacctcagaggtagaacatgttttagctacacaatgcttaagaattaaaaagcttaagaactttagaattaatctattaggatgtcctcgacctgacgttacttccaaggatgttattttatatgtgatccgatcaatcggaaccgatgggggaacaggacacgccattgaatttagcggagactatatctcatctctatcaatggaatctcgaatgactatttgcaatatgtctatcgaagcaggagctaaggttggcttaattgcttttgataaaatcacagaatcttatctatttgataaggtgcaactagataaaagtgaatatgataaagcgctagaattctggaaaagtctttcttcagattcaaaagcaaagtttgataaggaaatagaaattgatgtttccaaaattaagccacaggtctcctggggaacctctcctgaaatgacaagtgactatgactcatgtgttcccgagctagatcaaaatagtgataaatattcaacttataaaaaggcaattgaatatatgggactaaaagaaagagaaaaattatctgatcttacttttaataaagtatttgttggttcatgtactaattcaagaatagaagatcttaggttagtagcatcagaggttaaagacaaaagaatttcaaaaagtattgaggaagctttgattgttccaggttctggtcaggtaaagttacaagccgaaaaagaaggtcttgataaaatttttattgaagcaggctttagttggagggatccaggttgctcaatgtgtttggggatgaacgaggataaattatctcctggtgacagatgtgcatctacatctaatagaaattttgaaggccggcaaggacatatgggaagaacacacctagtaagtccgatgatggcagcaagaatagctatccatggaggaattccgcatgagtga

SEQ ID NO: 284073 - DNA, 493 bp, Unknown
  Bacterial polypeptide expressing nucleotide sequence isolated from the Sargasso Sea
catgagtgagtttaaaaatatttcagggattgcctgcatccttgatatagataatattgatactgatcaaattattcctaccgagtacctcaagtctataaagaaatttggatttggagattttttatttgatggatggcggtatcacgatattgcaaatattaatactccaacttcatcgagatcgctaaatcaagattttattttgaatcaagcgccattcaacgaatcaaaaattattatcacaggtaaaaattttggatgtgggtctagtagagaacatgcagtttgggcactacgtgattttggtatagaaacagttatagcagagtcttttggtgatattttttataataattgttttaagaatggagttcttccaatagcccttaataaggatgaacttttaatagtgaaagactatgtgagcaatgaatcaaaacttcacatcagccttgcagataagaacattgttatcaaaaagaaaaaatag

SEQ ID NO: 284074 - DNA, 1405 bp, Unknown
  Bacterial polypeptide expressing nucleotide sequence isolated from the Sargasso Sea
aatgtctaaaactttatacgataaaatctgggatgatcatcttgttcatgcacaagaagatggaacatcattactctatgtagatagacatttagttcatgaagttacgagccctcaagcatttgaaggattaagaaactcaaatagaaaagttagacaaccaaatctgacactagccgttgcagatcacaacgtgccaacatctgatagatcaaaaggcatctcagatgaagagtctagacttcaagtagaaactttagaaaaaaactgtgaagagtttggaataaagctttttggaatggatgataaaagacaaggcatagttcatataattggacctgagcaaggtttcacacagccagggagtataattgtctgtggagacagtcacacagcaacccacggagcttttggatctttagcttttggcataggaacttctgaagtagagcacgtattagccacgcaaaccttagttcaaaaaaaatcaaagaactttagaattaaagtcgatggaaagttatccatcggtgtaacatctaaagatgttattttacaaattattggcaaaattggcactgcgggtggaactggttatgtaattgagtatgcaggaagtttaatctcatcactaagtgtagagcaaagaatgacaatttgtaatatgactattgagggaggtgcaagagcaggattaatcgagcctgaccaaaaaatatttgattatttaaaaggtagaccaatggcacctaaaaaagaaaattgggataaagctttagattattggagcaaattaaaatctgataatgatgctagctttgacaaagaagttactttagatggaaaagatattatgccaatggtaacatggggaacctctccacaggatgttatttcgatagatggaaggataccaaatccggacaatgaagcagatgaggatagaaaaaattcaatagaaagatctttaaaatatatgggtttaaaacctggtacagctataaaggatgttaaaatagataaagtgtttatcggtagttgtacaaatggtagaattgaggacttaagagatgcagcaaaaataattaagaacaaaaaaattgcacaacacgtttatgccatggtggttcctggttctggattagttaaacaacaagccgaacaagagggtttagataaagtcttcaaagaatcaggttttgattggagagaacctggatgttcaatgtgtttagccatgaacgctgataaattaaaaccagaagaaagatgtgcatctacttcaaatagaaattttgaaggtcgtcaaggtagaggtgggagaacacatcttgtaagtcctggaatggctgcagcagcagcaatatcaggatctttagacgatgtgagaaaatatcaaaattaa

SEQ ID NO: 284075 - DNA, 607 bp, Unknown
  Bacterial polypeptide expressing nucleotide sequence isolated from the Sargasso Sea
aatgcaaaaatttaaaaccataaaaagtatacctgcatatcttccaatagttaatattgatacggatatgataattcctaagcagtttttgaaaaccattaaaagaacaggtttaggaaaaaatttattttatgaaatgagatataatgagaaaggtgtaccaattgaagattttattttaaatacaagtccgtttaataattcagagattttaattgctggaaaaaattttggttgtggttcctcacgagaacatgcaccatgggcattacttgattttggaataacttgcgttgtcagttcaagttatgcagatattttctacaataattgttttaaaaatggaattttaccaattgtacttccagaagcaaaaataaaagaactctctgaatattcaaaaagaaaagaggaaattattgtaaatcttgaagaacaaaaaattacttttggaaataatgagattgactttgaaatagatcaattcaaaaagaagtgtttgcttgagggtttagatgatatcgctctttcattagaaaaaaatccaaaaattactgaatttgaaaaaaaattatcctcaaacaagccgtggatttttaatgattaa

SEQ ID NO: 284076 - DNA, 483 bp, Unknown
  Bacterial polypeptide expressing nucleotide sequence isolated from the Sargasso Sea
ttatttatgagatgagatatgatgaaaaaggaaaaaaaatagatgattttattttaaatcaaaatccttttaataattcaaaaatattaatagcaggaaaaaattttggttgtgggtcatctagagaacatgctccatgggcattattagattttggtattacatgtgtaattagttcaagttttgctgatatattttttaacaattgttttaaaaatggaattttaccgattattcttaatgaagataaaattaaggagttgtcagaatatgcaaatagaaaagaagaaatttctatagacttaaatgaagaaaaaataatttatggaaataatgaggtcacatttgaggttgataaatttaagaaaaagtgccttttagaaggtttagatgatattgcgttatctttaaaaaaatctgataaaattgagaattttgaaaaaaatttaaaaaatcaaaagccgtggattattaatgattaaa

SEQ ID NO: 284077 - DNA, 315 bp, Unknown
  Bacterial polypeptide expressing nucleotide sequence isolated from the Sargasso Sea
gcaaaggccgaaaagttgaaaaaggtgttcatgctatgattgttcctggctctgggttggtaaaagagcaagcagaaaaagaaggcttagataagattttcattgaagcaggttttgattggagagatccaggatgttcaatgtgcttagctatgaatgcagataagttacagcctcaagaaaggtgtgcttcaacttctaatcgaaattttgaaggcaggcaaggtagaggtggtagaacccatttaatgagtcctcaaatggcagcagcagcggcaatcagaggtaagcttactgattttagagatctttaat

SEQ ID NO: 284078 - DNA, 865 bp, Unknown
  Bacterial polypeptide expressing nucleotide sequence isolated from the Sargasso Sea
atgaaaccagaaacactttttgacaaaatatggaataatcatatagtccatgaagaagatggtaaacctacccttctttacatagacttgcatttagtccatgaagttacatctcctcaagcatttgaaggacttagacaagcaggaagaaaagtcagaagaacaaatagaactttcgctactatggaccataacgttcctacattagataggaataacattaaagatcccatttctgcccaacaaattgaaacattagaaaataattgtaaagaatttcaaatagaactttttgatctcgcaagcccttatcaaggcattgttcatgttataggtcctgagcaaggtctaactaaacctggtagcacaatagtctgtggggatagtcatacctctactcatggagcatttggggcgttagcctttggaattggaacaagcgaagttgaacatgttttatcaactcagtgtctatggcaaaataagccaaaaacttttgaagtaagagttgatggtgtcagacctaaaggagtaacagcgaaagatattattctaaacattataggagagattggtactgcaggagcaacaggttatgtaattgagtatacaggcgatgcaattaaatcattatctatggagcagagaatgacaatttgtaatatgtcaattgaaggtggggctagagctgggatgattagtccagatgaaataacattgaactatttaagagataaacctagaataaaatctttagataatttagatagtctgatgtctgagtggaggaagcttgcttctgatgaaggttgtgtttttgataaaaaacttcttcttgatgctgcaaaaatgctcctcaggtgag

SEQ ID NO: 284079 - DNA, 1295 bp, Unknown
  Bacterial polypeptide expressing nucleotide sequence isolated from the Sargasso Sea
tttgaaaaagactttattcgataaaatatgggaaaaacatgtagttcatgaaagacaggacggtagctctttaatatatatagataggcatcttgttcatgaagttactagtccacaagcttttgagggtctaagaaatagcaataggcctttaagaagaccagatttaactctggctgttgcagatcataatataccaactgaaaataggatagagggtataaaagatgatattgcgagagttcaagtagaaacactcgaaaaaaatgttaaagagtttaatgttccatacatacctttaatggattcacgtcaaggaatagttcatgtaataggacctgagcaaggttttactttaccaggttgtacgttagtatgtggagacagccatacttctactcatggggcatttggtgcgcttgcttttggaataggaaccagtgaggtagaacatgtttttgctactcaaacattagtacaaaaaagacctaagactatgttaataaatgtttcaggtaaattatctataggagttacagcaaaagatatagcattaggtattattaaaaaattaggaacttcaggaggcacagggtatgttctagagtatgcgggtgaagcaatttctgatttatctatagaagcaagaatgacattatgtaatatgtcaatagaggcaggtgcaagagcaggtttagtggctccagattctaaaacatatgagtatataaaaaataggccaatgtctcctaaaggagttttattcgagaaatctatggaagattggaaactattacctagtgatgaaggggcaatttatgataaagtagtaaatataaatgctaactctcttgaacctcatttaacttggggaactagtcctgaagatgttcttccaattaatagcaatgttcctgaccctagaaatattgataaagaaagtttaaaaaatgccatgcaagattctcttgattatatgggcctaaaacctgggattcctctaactgatataaaaatagataaagtatttattggttcatgtacaaatagcagaattgaagatcttagggaagctgcaaagattgcaaaaggaaataaggtaaacgattcagttcatgcaatggtggtgccaggatcgggattgattaaagaacaggctgaaaaagaaggaattgcagatatattaatccaagctggttttgattggagagagcctggatgttcaatgtgtcttgaaatgaatcctgatcaattaaagccgaaagagagatgtgcatcaacatcaaatagaaatt

SEQ ID NO: 284080 - DNA, 1402 bp, Unknown
  Bacterial polypeptide expressing nucleotide sequence isolated from the Sargasso Sea
atgggatacaccatatatgacaagctctggaatgagcacttaataagatcctatgatgatggagactcactaatttatattgataggcattttcttcatgaagtaacatctcctcaagcttttgagggcctcaaaaaaaaatcactcaaaccatggagaattaatgcaaacattgctactccagatcacaatgttccaactacaagggataacaaatttagcattgagagcattgaggacaatatctcaaagttgcaggttgttgagttagataaaaattgtaatgatttcggcataaaacaatttaatatcaactcaaataatcaaggcatagttcatgtaattggaccagaattaggcttaacgcttcctggaatgagtattgtttgcggcgactctcatacttcaactcatggtgcttttggttgtcttgcaatgggaattggaacatctgaagtggagcatgttcttgccactcaaagtttaaaagtaaggaagcttaaaaatatgagaataaattttgaggggtcgatacaagaaggagtatcctcgaaagatattattttatatttaattaggacaataggaactgcaggtggaacaggatatgcagttgaatttgcgggatcatatatacgaaatatctctatggaagccagaatgacaatatgcaatatgtctattgaagcaggagctaaagtaggattagtgtctgttgacgacaaaactattgaatacgttaaaaaacattcaaatcttgaagctaatttaataaatgatgctattaaaaaatggaaaaatttaacaactgataaagaagcaatgttcgataaagaaattgatattgatgtatcaaaaattaatcctcaagtttcttggggcacatcaccagaaatggtaattgatttcaacgaaaagattccatcgagctcaattttttctgctgaaaaaagaaaaagcttagatctagctaaaaattatatgggattgtcagataatcaggaattgagcgatttagatttcgataaagtattcattggatcatgtactaattctcgaattgaagatctaagagaagccgcagaagttttaaaaggtcaaaaggtttctgaaaatatccaagaagctattgttgttccagggtctggaatggttaaagaacaagctgagaaggagggaattcataaaatattcattgatgctggatttcagtggagggcaccgggttgttctatgtgcttaggtatgaatccagaccaattaagtccttatgaaagatgtgcttcaacttcaaataggaattttgagggtcggcagggtaacttaggtagaacgcatttaatgagtccaaagatggctgctctaaccgcaataaatggaaggattgtaaaagagatttaag

SEQ ID NO: 284081 - DNA, 631 bp, Unknown
  Bacterial polypeptide expressing nucleotide sequence isolated from the Sargasso Sea
atgaaagattttattgaaggcattgtagctccaattgatagagataatatagatactgatcaaattatcccaacagaatatttaaaatctattaaaaaatttggatatgaggattatctttttgatggctggagatataaagatcagggtcgtcttggaatgaaaaaaggtgaaagaaaaatcaatcatgaatttattcttaacaattcgccttatgatgaatctaaagttttgcttacaagagataattttggatgcggctcaagtagagagcatgcagtttgggctctcagagactttggtattgaagttgttttagcaagctcatttggcgatattttttttaataattgtttcaaaaatggtgttttaccgttaaagctcaaaaaaactgaaattgaaaaactattttcattgtctaaagatagcccagtatctatttcagtaaatataaaagataaagttatactttttaaagataagctctctattgattttgatcttgataataatttagctgaaagaatcatctatggccttgatgagatcgatattactcttaaagattcagaattaattaagaaatttgaagaacatagaaaagaaaataacccatggattttcgaatgaa

SEQ ID NO: 284082 - DNA, 433 bp, Unknown
  Bacterial polypeptide expressing nucleotide sequence isolated from the Sargasso Sea
cttgattatatggggttaaaagcaaatactaaaatttcagacataaaaattgacaagatttttataggaagctgtacaaatggaagaatagaagatttaagattggctgcagatcttcttaaaggcaaaaaaattgccaagaatgttagtgctatggtcgttccaggatctggattagttaaagagcaagctgaaaaagagggaattgacaaaatatttaaagaggcaggctttgagtggagagagcctggttgttcaatgtgtttaggtatgaatccagatcaattaaagcctaaagaaagatgtgcttcaacatctaataggaactttgaaggtaggcaaggtcgtgggggaagaacacatttagtaagtccagggatggctattgctgcagcaatcaaagggcatttaactgatgtgagagaaatataat

SEQ ID NO: 284083 - DNA, 610 bp, Unknown
  Bacterial polypeptide expressing nucleotide sequence isolated from the Sargasso Sea
tatgcaaaagtttaataatttaagatcaataccatcatacttatcattgcaaaatattgatacagatatgattatcccaaagcaatttttaaaaactatcaaaagaacaggtttaggaaaaagtttgttttatgaaatgcgttatgatgaaaatggaaaaaaaattactgattttattcttaacaaggaaccgtataacaaatctaaaattcttttagctggaaaaaattttggatgtggttcatctagggagcatgccccatgggcgctttctgattttggtataaaaagtataataagtgcgagctttgcagatattttttacaataattgttttaaaaatgggatccttccaattaagattgatggtaaaattgtagtcgaactagcagagtattctaagaggaaagaagaaattgaaataagtttagaaaatcaagaaataaaatatggaaacaaagttgcaaattttgagcttgattcctttaaaaagaaatgtttgatggaaggtctagacgatatagcactttcaatggaaaaaatttctagcatagacgactacgaaaaaaaactacaatccacaaaaccttgggttctaaataatgtctaa

SEQ ID NO: 284084 - DNA, 399 bp, Unknown
  Bacterial polypeptide expressing nucleotide sequence isolated from the Sargasso Sea
tactagtagctggcgataactttggttgtgggtcttctcgtgaacacgcgccgtgggccttattagattatggcgtgaagtgcgttatttctaccagctttgcagacatcttttttaacaactgtttcaaaaatggtattttacccatcgtggtctcaaaggaagagctggatcaattgatggatgatgcagacaatggagcgaattcagttttagatatagatttggaaaaccagcatataggtcgccctaatggggagaaaataaattttgaaattgatgaatttcgtaagcattgtttgataaatggtttagatgacatcggtttgaccatgcaaaagcaatctaatattgatgattttgaaaagaaacgtgaagcagaaaagccttggatttaaa

SEQ ID NO: 284085 - DNA, 1012 bp, Unknown
  Bacterial polypeptide expressing nucleotide sequence isolated from the Sargasso Sea
agcaacccatggagcttttggtgcattagcatttggcattggaacttccgaagtagaacatgtgttagctactcaaactttagtacaaaaaaaatccaaaaactttcgaattaatgtaaatggaaaattaccagttggtgtaacagcaaaagatgtaattttacaaataataggaaaaattggaacagctggtggaactggttatgtaattgaatatgctggtaatttaatttcatctctgagtgtagaaaacagaatgaccatttgtaatatgactattgaaggaggggcaagagcaggtttaattcaacctgatcaaaaagtttttgattatttaaaagacaaaccaatgtcgcccaaaaatgataactgggaaaaagctttagaatattggactaatcttaaatcagatgaaggagcacattttgataaagaaataaatttagatggaaaagatatcaaaccaatggttacttgggggacttcacctcaagatgtagttacaattgatggaaaagttccaaatccaaaaaatgaaactgatccagataaaaaaaactcaatagaaagatcactaaaatatatgggtttaaattctgatattccagttcaagatattaaaattgataaagtatttattggtagctgcacaaatggtaggattgaagatttaagagaagcagcaaaaatattaaaagataaaaaaattgcaaaacatgttaatgcaatggtagttccaggctctgggctagttaaagaaaaagcagaacaagaaggtttagacaaaatttttattaactcaggttttgagtggagagaaccgggatgttctatgtgtttggcaatgaatgctgataaactaaagccaggtgaaagatgtgcgtccacttcaaacagaaattttgaaggtagacaaggaagaggtggaagaacacatttagttagtccaggcatggcagcagcagctgcgatttctggaaatttagacgatgttagaaagtatcaaaattaa

SEQ ID NO: 284086 - DNA, 373 bp, Unknown
  Bacterial polypeptide expressing nucleotide sequence isolated from the Sargasso Sea
aatgcaaaaatttaataaacttaaaagtattcctgcttatctacctatagttaatgttgatacagatatgataattcctaaacaatttttaaaaacaattaaaagaactggcctaggaaaaaatctattttttgaaatgagatatgatgatcagggaaatgaaataaaagattttattttaaataaagaaccatttaaagattctaaaattttaattgctgggaaaaattttggctgtggctcttctagagaacacgcaccttgggctctacttgattttggtattacatgtgtgattagctcaagttatgcagatattttttataataactgttttaaaaatggaatattacccattaaaattgatgaggaa

SEQ ID NO: 284087 - DNA, 1195 bp, Unknown
  Bacterial polypeptide expressing nucleotide sequence isolated from the Sargasso Sea
acattaaatcaacatttacctattaaagaagaattatctagaaatcaactaaaccaacttacaaaaaactgtaaagattttggaattgaattatacggacttggtcataaataccaaggaatagttcatgttattggtccagaacttggaataactcaaccagggatgacaattgtatgtggagatagtcatacttcaactcatggagcatttggttccattgcttttggaataggcacaagtgaggtagagatggtattagcaactcaatgtttacttcaaaaaaaacctaaaaccatgttgattgaaataaatggagaattacaaaaaggagtgtattctaaagacataatattatacattatttcaaaaatttcttcttcaggtggaacaggctattttgtagaatattctggttctacaatttcttctctatcaatggaagctagaatgactatttgtaatatgagtattgaaatgggtgctagaggaggtatgattgctcccgatcaaaaaacttttgactatgttgaaaataaaaaattttcacctgatggtattgattttgataataaagtaaagtattggaaaactttggtttctgatagcaatgctaaatatgataaggttttaaaatatgatgctaaagatattgaacccatgataacatatggaacaaatcctggaatgggaatgaaaataagagataaaatacccgaattaccattggagggatctaaagattcatttgataaatctttgaattatatgggtttaaaatctggaacccatatattaaacaaaaaaatagattatgtttttataggtagttgtacaaattcaagaatggaggatttaagaatagcagcgaaatttattgatggaaaacaaaaagcatccggtgttagtgcatgggttattcctggatctaaacaagtagaaaagatggctatcgaagaaggaatagataagatatttaaaaatgcaggttttgaatttagacaaccaggttgttctgcttgtcttgcaatgaacgaagataagatacctaaaagtaaattttgtgtttctacttcgaatagaaattttgaaggaaggcaaggaccaggctctagaacaatgctagctagtcctttaactgctgctgccactgcagtaaatggatatgtaacggatgttagagactatatttgat

SEQ ID NO: 284088 - DNA, 205 bp, Unknown
  Bacterial polypeptide expressing nucleotide sequence isolated from the Sargasso Sea
ggttgttcgatgtgtctggcgatgaatcccgatcgcctcgaaggccggcagatcagtgccagttccagcaatcgcaacttcaaggggcggcaggggtctgccagcggacgcaccctgttgatgagtccggcgatggtggcagctgccgccgtccacggccaggtgaccgatgtccgcaccctgtcccttcaatccgcggtctgat

SEQ ID NO: 284089 - DNA, 628 bp, Unknown
  Bacterial polypeptide expressing nucleotide sequence isolated from the Sargasso Sea
aatgaataaatttaaaacttttaaatctattgcaataccacttataagaaataatattgataccgatgcaataatacctaagcagtatttaaaagcggtttcaagacaaggcttcggaaattttctttttgatgactggagatacaaagatccaggagaccttgatgttgaaatatcaaaaagaaaaaaaaatgatgattttattcttaataaaaaggatttcgaaaaagctcaaattattattagtggcgaaaactttgggtgtggctcatccagggaacatgctgtatgggcattaagtgattttggcataaaatctgtcatagcaattagttttgcagacattttttacaacaattgctttaaaaatggcctattgcctgtgattttaaaaaaagaagaaattgaagaaattaaaacatatattggtagcttatcattaattgaaattaatttagaaaaccaattagtaaaatgcgctgataaaagttatgaatttgaaattgatccatcaaggaagtttaatctaataaatggaattgatgacatttctaaaactttagaatatcagaatgatattataagttatgaaaacaaacgcaaaaaaaataaaccatggttaatttaa

SEQ ID NO: 284090 - DNA, 583 bp, Unknown
  Bacterial polypeptide expressing nucleotide sequence isolated from the Sargasso Sea
attgatatcgatgcatcaaaattaaatacatatgtgacttggggcactagcccagaacatgcgatcgaaatcaaagataaaataccaagtattgatgatgcaaacagctctaaagaaaatacatcgataaaaaaggcccttgattacatgggcttggaagaaaatgatgcaatcagaggaaccaaaattgatgctgcatttataggttcttgcaccaatagtaggttgtctgatttgagggttgcagcatcaattcttaaaggaaataaaattgctcctggaataaaagcaatctgtgtacctggatcatctaaggtcaaaaaagaagctgaatcagaaggcatagataaaatttttaaatctgctggtttcgaatggagagaatcaggctgttccatgtgtttctttgccggcggagagagctttggtgaagatgagcgcgtgatatcaaccaccaatagaaattttgaaaatcgacaaggaaagaaaaccagaacccacttggcatcacccgctacagtagccgcttcagccatcaaaggtgaaataacaaccgcacatctgacggagaatgaaacatgaa

SEQ ID NO: 284091 - DNA, 613 bp, Unknown
  Bacterial polypeptide expressing nucleotide sequence isolated from the Sargasso Sea
catgaatccagtaaaaataatttctggaattgctgcaccttttctaaggatcaatgtcgataccgatgcgatcatacccagccgagaaataaaagccgtttcaaagaaaggtctagccgaggggctgttttcagagtggagatacacttctattgctgatagaacaccaaatgatgaattcattcttaatcgagagccatttaatcgatctgccatactgcttactggtgataattttggttgcggctcatcaagagagcatgcagtatgggcactacaagaatggggcatcaaagcagtgattggttcaacatttggatcaattttttatggcaactgcataagaaatggcttacttcccattcaactatccactgatgatcttcaaaaattaattgattttgttgaaaaagacccagaatcaaatcaaatcctaattgatctggagacgttgagtattaattttggatcatctgaaattaattttgaattcgataaaaaatatcaagcttcactcttagaaggcctggatgagatacagcaaactttaaagctcaatgacgaaatatcttcctttgaagaaaaacatctaaagcagaacccatggttgtaa

SEQ ID NO: 284092 - DNA, 1023 bp, Unknown
  Bacterial polypeptide expressing nucleotide sequence isolated from the Sargasso Sea
aatgaagactttgtacgacaaactctgggaggagcaccacgtcacccaactcgaatcgggagagtcactcttatatatcgatagacattatttacacgaggtaacatcacctcaagcatttgaaggattatcaaaaaaaaacttaaaaccatggaggcttgaagcaaatatagccacaccagatcataatgttcctacaatacggggcaatgattttaactctgagcaaataaaggatgaaatttcaaagatacaagttgttgagcttgataaaaactgtaataccttcggtatcaaacaatttgatattaaatcatcaaaacaaggtattgttcatgtaatagggccagagttaggttataccttgcctggtatgacaatagtatgtggtgattctcatacatctactcacggtgcgttaggctgtttggcaatgggtattggtacatcagaagtggaacatgttcttgctacccagtgtttaaaagtatccaagcttaaaaatatgcttgttagatttaacggaactccagctgagaatgtgtcatcaaaagatatcgttttatattttattgggcagattggcactgctggcggtacaggttatgcaatagaatttgctgggagttatattgatgcaatttctatcgagagcagaatgactatttgtaatatggcaattgaagcaggcgctaaggttgggttaattgctcctgatgaaacaacaataaattatgttagagagaaatctttcttagataaagaaaccctagaaaaggctgaagattattggacaaacttaaatactgatgaaggagccaactttgataatgagattattattgatgtatctaaaattaagccacaagtaacatggggaacttcacctgaaatggttgtaaattatgacgatgaaattccaactcctatgaatgtttctgaagataataaaaaaaatatagagcttgcaagaaattatatgggtattcaagatgaatcaaaattatcagatttagtttttga

SEQ ID NO: 284093 - DNA, 1408 bp, Unknown
  Bacterial polypeptide expressing nucleotide sequence isolated from the Sargasso Sea
gatggctaacccgcaaacgctatttgataaaatttggaaaaatcacctggtagatacccaagaggacggcacctgtctaatctatattgatagacatcttgtgcatgaggtaacaagtccccaggcatttgagggcttgcgaaatgcgggtaggaaagttagacgacctgacttgaccttagctgttgcggatcataatacgcctacgacggatatctctgaaggtattgctgaagaagagtcgagaatacaagtcgaaaccctagaaagtaatgtaaaagaatttggggtcccatatattggtttaacagacactaggagaggtattgtccatattattggaccagaacagggctttactttgcctgggatgaccattgtttgtggagatagtcacactgcaactcacggagcttttggtgcccttgcttttgggataggaacgtcggaagtggaacacgtattggctactcaaaccctgctccaaaaaccagcaaaaaacatgcgtgttacagtagagggagagttaccacttggtgttaccgcaaaagacgtcattctggctataattggaaaaattggcactgccggaggcactgggcacgtaatcgagtttgctggggaggcggtaacatcattatcgatggaatcccgaatgacagtatgcaatatggcaatagaagccggcgctagagctggaatgatcgctccagacgacgtcacctttgaatatctcaagggaaaacctatgtcgccaaaagcaggctcattcgaacaagcagtagcatattggaaaacattaccatctgatcctggagctaaatacgacaaagagattgttttaaaagcggctgaaattgtcccgcaggtgacctggggaaccaatcctgaggaagtggttccgataaccggccgtatcccagaaccagctgaaatcgaggacccaatccggcgggcaaagttgcagcggtctattgactatatgggcctcgaggctgggggattaatatcggatgtcaaaattgataaagtcttcattggatcatgcactaacggacgtattgaagatctcagagcagttgcagaaattgcgaaagggcgaaaagtagcaagtggtgttcatgcaatgatcgttgcgggctctggtttggtcagagaacaggcggaacaagaagggttaggaactatcttcgaagaagccgggtttgattggcgccaagagcctgggtgctctatgtgtcttgccatgaatgccgacaaactggagccgggtcaaagatgtgcttcaacgtccaatcgtaattttgagggtcgacaaggttttggtagtcgaacccatttagtcagcccagcaatggcggcggcagcagcgatcgcgggttctctaacagatgtgagagacctttag

SEQ ID NO: 284094 - DNA, 367 bp, Unknown
  Bacterial polypeptide expressing nucleotide sequence isolated from the Sargasso Sea
tatggacaagtttactaagttaaggggtgtggcagcgcctcttaatatgatcaacatagatactgataaattgatcccgaaacaatttttgaaaacgattaaacgtacaggattgggcaagcatttatttaatgaaatgcgctttaacgaagacggatcagaaaaacaggacttcgtgttaaataagtctgcatatcgagaggcgagtattattgtagcgggagataattttgggtgcggatcgtcccgtgaacacgcgccatgggcccttttagactttgggataaagtgcgttatttccacaagctttgcagatattttaaataataattgtttcaagaacggtatttctgccaattgttgttaa

SEQ ID NO: 284095 - DNA, 418 bp, Unknown
  Bacterial polypeptide expressing nucleotide sequence isolated from the Sargasso Sea
tgctaaaattttattaactagggataattttggttgcggctcaagtagagaacatgcggtctgggcattaagagattttggttttaagtcagtcattgctagctcttttggagatattttttacaataattgttttaagaattcagttcttccaattaaactttcgaaagaacagatcaatcatctttttgaggtttctaactttgccccagttagctttgaaattgatttattaaaaaaagagctcaagtacaaaggcgactcctcatatatgtttgatgttaaggatagcctgcttgatcgaattattaataatttagatgatgttgatatgaccttaaaacataaaaagcatattcaagcttttgagcaaaagagaagaagccaaagaccctggctttttgattacagtaactaa

SEQ ID NO: 284096 - DNA, 1426 bp, Unknown
  Bacterial polypeptide expressing nucleotide sequence isolated from the Sargasso Sea
aatgactaatccttcaatatcaagtgctccgaaaaccctgtatcaaaaggtgtgggatgctcacgttgtagcaactcccgagggtgaagcaccgatcatttatgtcgacagacacttagttcatgaagtgacttctccccaagcttttagtggcttaaaagtggctgggcgtaaattacgtgccccggagaaaactttcgcgaccatggatcacaacacctcgactcgcagcgctagtcttgatgccttaagcccgatggcgcgcactcaggtcgagaccttggcgcaaaactgtaaagacttcggcgtacgcttatatgatattcaccatcctaatcaaggaattgtgcatgttatggggcctgagcttgggattaccttacccggcactgtgatcgtctgtggtgattctcacaccgcgacccacggcgcctttggcgccttggccttcggtatcggcacttccgaggtggagcatgtgttggcgacccagactctgcgccaattaaaagccaagaccatgaaaatcgaagtccgcggtcaggtcaccgatggcgtaacggctaaagatatcgtactggcgattatcggtaagattgggatggatggcggcactggctatgtggttgagttttgtggtgaggccattgaagcattgtcgatggaagggcgcatgacagtctgcaatatggcgattgaaatgggcgctaaggctggcatggtcgcgccggaccaaaccactttcgattacctagaaggtcgtgagtttgcgccaaagggcgaagattgggcacaagccgtcgtcgcctggaaggcgctgaaaaccgatgttggcgctgagtttgatgccaccgtggtgttggatgctgccgatatcgcgccgcagctcacgtggggtactaaccctggacaagtcgttgccatcgatgcgccagtgcctaatcctgccgatgaggtgaatccaacgattcgcgctagcatggaaaaagcactggactatatcggcttaactgcaggcacgccaatgacagatgtggcgatcaataaggtctttatcggatcttgcactaactcgcggattgaagatttacgcagcgcggcgaagcatgccaaagggcgcaaagtggctgcgggcgttacggcaatcgtagtaccgggttctggccaagtgaaggcacaggccgaggccgaaggcttagataaaatctttatcgaggccggattcgaatggcgtttaccgggctgctctatgtgtttggcgatgaacgatgacagattagaggcgggcgatcgctgcgcttcgaccagtaaccgtaacttcgaaggtcgccaaggccgtggtagtcgcacgcacttggtgagtccggcgatggctgctgcagcggcgattgctgggcattttgtcgatatccgtaaaccttactaa

SEQ ID NO: 284097 - DNA, 607 bp, Unknown
  Bacterial polypeptide expressing nucleotide sequence isolated from the Sargasso Sea
aatgcaaccttttacttgccataccgggcttgcggtcatgatcgacagcgccaatatcgataccgatcaaattatcccgaagcaatttttatctaaggtgacgcgggatggattcggtgtgcacttattccacgactggcgttatctcgatgatgccggggatgtgcctaaccctgatttcactctaaacaagcctcgctatagcggtgcgtcgattctgctggcacaggaaaactttggctgtggttctagtcgtgaacacgccccgtgggcattagcggattttggcctgcgcgccattatcgcccccagttttgccgatattttttatggaaactccatcaataacggtttgttgccggtgaagctgagcgcgaatgaagtgcgtcagttaatggatgaggtggcgagcgaagaaggcgcacaaatcaccgtcgacttaaccacttgtaaggtgacatcgccttcgggggctgagtttagctttacactggccgagtcggcgcgacataaattgctgaatggattagatgccattggattgaccttgtcccacggaatgcagatcagcgaatacgaatcacaaatcccaagttggcgatgttaa

SEQ ID NO: 284098 - DNA, 411 bp, Unknown
  Bacterial polypeptide expressing nucleotide sequence isolated from the Sargasso Sea
catggccaaaacgttatacgaaaaattgtttgatgcgcacgttgtctttgaagcgcaaaacgaaaccccgctgttgtacatcgacagacatctggtgcatgaagtgacctctccgcaagcgtttgacggcctgcgcgcgcatggccgtcaggtacgccagccgggtaaaacctttgccaccatggatcacaacgtctctacccagaccaaagacatcaacgcgtcgggtgagatggcacgcatccagatgcaggagctgattaagaactgtaacgaatttggtgtcgagctgtatgacctgaaccatccgtatcagggtatcgttcacgtgatggggccagaacaaggcgtgacgttgccgggtatgaccatcgtctgcggcgattcccacaccgctacacacggcgcgtt

SEQ ID NO: 284099 - DNA, 1405 bp, Unknown
  Bacterial polypeptide expressing nucleotide sequence isolated from the Sargasso Sea
aatgcctacgaccctttacgacaaaatttggaatgaacatcttgtgcatcaacaggatgatggtacatcattattatttgtagatagacatttaattcatgaggttactagtcctcaagcatttgaaggtttaagaaattcaaaaagaaaagtaaggcaaccaggtcttaccttggctgttgcagaccataacgtgccaacaacagatagaactaaaggaatcgctgacgaagaatctaaaattcaagtagatacactcgattctaattgtaaggagtttggtattcaaatttttgggatgaatgacaagagacaaggaattgtacatataattggtccagagcaaggcttcactcaaccaggaactattattgtttgtggagatagccacacagcaactcatggagcttttggagcattagccttcggtataggaacttcggaagtagagcacgtccttgcaactcaaactctagtacaaaaaaaatcgaaaaattttagaataaatgtaaatggaactttaccaattggtgttacatcgaaagatgtaattttacaaattattggaaagataggaacagcgggtggcactggttatgtaattgagtatgcgggaaatctgatttcatctttaagcgtagaaaatagaatgacaatttgtaatatgactattgaaggaggcgccagagcgggattaattgaaccagataaaaaagttttcgaatatttaagagacaaaccaatgtctcctaagagtgaaaattgggacaaagctcttgagtattggaatacattaaaatcagacgaaggtgcgcatttcgataaagaagtcaatttagaaggcggggatattaaacccatggtaacttggggaacctcaccgcaagacgtactgacaatcgatgaaactgtaccaaatccagaaaatgaaaccgatcttgataaaaaaaactcaattgaaagatctttaaattatatgggtttaaaggccaacaccaaggtaaaagacataaaaatagataaagtatttataggtagttgtacaaatggcaggattgaagatctgagagaagccgccaaaattttaaaagataaaaaaattgccaatcacgtaaatgcaatggtggtacctggttcgggtttagtcaaacaacaagcagaacaagaaggattggataaaatatttataaattctggatttgaatggagagaacccggatgctcaatgtgtttagcaatgaatgctgataagctaaaacccggcgagagatgtgcatctacttcaaatagaaattttgaaggaagacaaggtagaggtggcagaacacatttagtcagtcctggcatggctgcggctgccgctatttctggaaatttagatgatgttagaaagtatcaaaactaa

SEQ ID NO: 284100 - DNA, 670 bp, Unknown
  Bacterial polypeptide expressing nucleotide sequence isolated from the Sargasso Sea
tagagaatttctaccttcatctaaatattatgacgatgcacttaagtattgggaaacattaataagtgacagtggtgtaacatttgatagaaaagagcaattcaatgcgaatgacattcaaccccaagtaacatggggcacttccccagaaatggtcacatctgtcgatgaatgtattcccagttcagattcaattgataatgaggaggaatacgtcgatacacttgcgtatatgggcctagaacctaaaactgaaataaaatcgattgatcttgacaaaatattcattggatcatgcactaactctcgtatagaggatttacgccaggcagctgaagttgttgaaggagaaaaagtctctagcaaaattaagcaagcaatcattgttccaggttcggggcttgtgaaagcacaagcagaaagagagggattagataaaatattcatgaaagctggttttgagtggagagaccctggatgttcaatgtgtttgggaatgaatgatgactttttacaaccttatgagagatgcgcatctacatctaatagaaactttcaaggtcgacaaggtgataaaggtagaacacaccttgtaagcccagggatggctgcagttgctgctataaaaggtcacttctacaatgttaaggattttatgaatgaaaagtaa

SEQ ID NO: 284101 - DNA, 232 bp, Unknown
  Bacterial polypeptide expressing nucleotide sequence isolated from the Sargasso Sea
attttcattgatgctggattagattggagagtagcaggatgttccatgtgcctaggtatgaatcctgacactttgtctcccggagagcgttgcgcgtctacttctaataggaattttgaaggtagacaaggaaaaggaggccgaactcatctggtcagtcctcctatggcagcagcagcagcaattgctgggcattttgtagatgtaagagactgggattacgtagattaaa

SEQ ID NO: 284102 - DNA, 595 bp, Unknown
  Bacterial polypeptide expressing nucleotide sequence isolated from the Sargasso Sea
gatgaaagcgtttaaccaatattcaagaacggttatacctatgaacagggtaaatatagatactgatcaaattattcccgcagtttacttaaaacgcattgaaagggatgggtatggggaatttttatttgctcggtggagatataacgaagatggttcagagaataaggaatttattttgaatcaagagggataccgagaaggtgggatactagttggaggtaataattttggttgcggctcatctagagaacacgctccttgggcccttaacgactatggtataagatgcgtcatcgcaccaagttttgctgacatcttctataataattgtttccaaaatggcttattgccccttaaattacctgaagaagttgtgcagcaaataattgataaagctgaaaacaaccctaattttaatttacatattgacttggaatctcagcgagtttgggacgatgacgaagaaatcagcataggattcgacattgatcaattcagaaaatattgtctaatgaatggcttggatgatattggtttaacgttagaaaatgaagataagatcaaaaattttgagagtgctcaagagaattaa

SEQ ID NO: 284103 - DNA, 1399 bp, Unknown
  Bacterial polypeptide expressing nucleotide sequence isolated from the Sargasso Sea
atgaagaccttatacgacaaactctgggaagagcatcacgttacccaactggattcaggcgagtcattactatatatcgatagacactatttacatgaagtaacttcacctcaagctttcgagggactctcaaagaaaaacttaaaaccatggagacttgaagcaaatattgctacaccagatcacaatgttccaactacgagaggagatgactttgattctgaaaaaattaaggatgagatatcaaaaattcaagttgttgagttagataaaaactgtaatacctttggaatcaaacagtttgatatcaaatcaaccaaacaaggcattgtccatgttataggcccagagcttggatatacattacctggaatgacaattgtttgcggtgactctcatacatcaacacacggtgctcttggttgcctagctatgggaataggcacttcagaagttgaacatgtgttagcaactcaatgtcttaaagtatccaaactcaaaaacatgcttgttaaatttgaaggtacgccaggtgaaaatgtttcatccaaagatatagtcctattttttattggtcagatcgggactgccggtggcacaggatacgcaatagaatttgctggaagttatattgaacaaatatcaattgagagcagaatgaccatttgtaatatggctattgaggctggtgcaaaggtcggtttagtagctccagatgataagactattaattatgtgagaaaaaattcttttatagataaagagatattgttaaaagctgaagaatattggtcaggcttgaaatcagacaaaaatgcattttttgaaaaggagttaataatagatatttctaagattaaaccgcaagtaacttggggtacatctccagaaatggttgttaattttgatgatgatattccaagaacttcagattactctgaaaaaaataaaaaaaatatagagctcgcaagagattacatgggcattaaagatgagtctaagctttctgatttagtatttgataaggtttttataggctcatgtactaactctagaattgaagacctaagacaagctgctgaaatagttaaaggaaaatctctagctgataatatcagtgaggctatagtggtgcctggatcaggcatggtcaaagagcaagctgaactagagggtttagataaaatttttaccgaagctggatttatttggagagaccctggttgttccatgtgccttggcatgaatccagatcaattaaagccttatgaaagatgtgcttcaacttcaaacagaaactttgagggtaggcaggggtatcttggaagaactcatctaatgagtcctattatggctgcattcactgcaattaatggaacaataggagagccattatgaa

SEQ ID NO: 284104 - DNA, 625 bp, Unknown
  Bacterial polypeptide expressing nucleotide sequence isolated from the Sargasso Sea
atgattgatggaatcgtaggttatattgatcgagacaatattgatactgaccaaatcattccaacagagtacctaaaatcaattaaaaaatttggtttcgaggattatttatttgatggctggagatatcatgacgatggaagattaggagtaaaaaaagaagaaagagaaatcaatgaagactttattttaaacaaagcaccattcaacgaatctaaattacttttggccagagataattttggttgtgggtcatcaagagagcatgcagtttgggccctaagagattttggtataaaagcagttattgcatcttcttttggagatatcttttataacaattgttttaaaaatggcgttctaccaattcagcttcaaaaagatcaaattgaggaactatttcaaaaaatcaaagatgaaattttgaaactttcagtagatcttcaaaaaagaatcattaccattggcgataaagaattaagttttgatgtagaagatcatcttatagatagaataatatacggactagatgatgttgatattactttgaaatcaaaagataagatttttaattttgagaagaatagaaaagaaactaggccttggatttttataaatgagtaaa

SEQ ID NO: 284105 - DNA, 848 bp, Unknown
  Bacterial polypeptide expressing nucleotide sequence isolated from the Sargasso Sea
aatgtctaaaacattatacgataaaatttggaatgagcatcttgttcatgagcaaattgatggaacatctttattatttgtagatagacatttaattcatgaggtaacaagtccccaggcttttgaaggtcttagaaatacaaatagaaaagtaagacaaccaaatttaactttagcagttgtagatcataatattcccacaacagatagatctaagggtattgatgatgaagaatctagaattcaagtagaaacacttgaaaaaaattgtaaagacttcggcataaaattatttggcatgactgacaaaagacaaggcatagttcatattgttggtcctgaacaaggctttactcaacctgggacagtgattgtatgcggtgatagtcatacagcaacacatggagcatttggatctttagcttttggcataggtacatcagaagtagaacatgtattagcgacacaaactttagttcaaaaaaaagcaaaaaattttagaattaatgtaaatggaaagttagcacttggcgtcacttcaaaagatgtaattttgcaaataattggaaaaattggaactgcaggaggaacaggaagtgtaattgaatatgctggtactttaatttcaaatttgtcagtcgaacaaagaatgactatttgcaatatgacaattgaaggtggtgctagagctggattaatccagccagatgaaaaaatttttaattatctaaaaggaaggcctatgtcaccaaaaaatgaaaattgggataaggctttaaattattggagtaatttaaaaactgataatgatgctgaatttgataaagaaataaatcttaatggaaaag

SEQ ID NO: 284106 - DNA, 655 bp, Unknown
  Bacterial polypeptide expressing nucleotide sequence isolated from the Sargasso Sea
atggataaattcatcgtacataccggcgtcgtggcgccgctcgatcgcgagaacgtcgacacggacgcgatcattccgaagcaattcctgaagtcgatcaagcgcacgggctttggcccgaacgcgttcgacgaatggcgttacctcgaccacggcgagccgggtcaggacaattcgaagcgtccgctgaatccggatttcgtgctgaatcagccgcgctatcagggcgcgtcggtgctgttggcgcgcaagaacttcggctgcggcagctcgcgtgagcatgcgccgtgggcgctgcagcaatacggcttccgcgcgatcatcgcgccgagcttcgccgatattttctacaacaactgcttcaagaacgggctgctgccgatcgtgctgaccgagcagcaagtcgatcacctgttcaacgaaacgtacgcattcaatggcttccagttgactatcgacctggacgcgcaagtcgtacgcacaacggatggcaacaccgcgtatccgttcgaagtcgcgggcttccgcaagtactgcctgctgaacggctttgacgatatcggcctcacgctgcgtcatgccgacaagattcgccagttcgaagccgagcggatcgcgaagcagccgtggctgaatcaccgcatcgtcggttaaa

SEQ ID NO: 284107 - DNA, 1224 bp, Unknown
  Bacterial polypeptide expressing nucleotide sequence isolated from the Sargasso Sea
caacgtgcccaccacgggatcgcagccacggcattgccgatccggtttccaagctgcaagtcgatacgctcgacacgaactgcgacgcctacggcatcacgcagttcaagatgaacgatctgcgccagggcatcgtgcatatcatcgggccggagcagggcgctacgctgccgggcatgaccatcgtctgcggcgactcgcacacgtccacgcacggcgcgttcggcgcgttggcgcacggcatcggcacctcggaagtcgagcacgtgctggccacgcaaacgctcttgcagaagaagagcaagaacatgctggtgaaggtcgagggcccgttgccgcgcggttgtaccgccaaagacatcgtgctcgcgatcatcggcaagatcggcacggcaggcggcacgggctacgcgatcgaattcggcggttcgacgattcgcgcgctgtccatggaaggccgcatgacggtctgtaacatggcgatcgaagcgggcgcgcgcgccggcatggtcgctgtcgacgacaccacgatcgaatacctgaagggccgtccgttctcgccgacgggcgtcgagtgggaccacgcggtcgagtactggaagcagttcaagtcggacgaaggtgcgcaattcgatcgcgtggtcgaactgaacgctgcggagatcgtgccgcaagtcacgtggggcacgtcgccggaaatggtcaccgccgtggacggccgtgtaccggacccggaacgcgaaaaggacccggtcaagcgcgacgccatggagcgcgcactgaagtacatggcgctcgaaccgaatgcgccgatcgaatccatcaagccggataaaatcttcattgggtcgtgcaccaacgcgcgcattgaagacattcgcgccgcggcctacgtcgtaaagaagctcggccgtcgcgttgcgccgaacatccgtctggccatggtcgtgccgggttcgggtctggtgaaggcgcaagcggaacgcgaaggcctcgacaaggtcttcacggacgccggtttcgaatggcgtgagcccggttgctcgatgtgtctcgcgatgaacgccgaccggctggatccgggcgagcgttgcgcatccacgtcgaatcgtaatttcgaaggtcgtcagggcgccggtggccgtacccacctcgtgagccccgcgatggctgccgctgcggctatcgaagggcatttcgtcgatattcgcaagcttggataaa

SEQ ID NO: 284108 - DNA, 862 bp, Unknown
  Bacterial polypeptide expressing nucleotide sequence isolated from the Sargasso Sea
aatgaagactttatacgacaaactctgggaagagcatcacgtcacccaactagattcgggagagtctcttttatatattgatagacattatttgcatgaggtcacatctcctcaagcatttgagggactaattaagaaaaatttaaagccctggaggcttaatgccaacattgctactcctgatcataatgtacctacaacaagaggtaataattttaattctgaatcaataactgatgaaatttcaaagattcaagtagttgaattggataagaattgtaataaatttggcattaaacaatttgatatagagtcaaataaacagggtattgttcatgttataggacctgaattaggttttactattcctggaatgactattgtttgtggagattcacacacatctacacatggagcgcttggttgtttagctatgggtataggaacttctgaagttgagcacgttcttgcaacccagtgcctaaaagtttcaaaattaaaaaatatgaatgttagatttgaaggagaagtagatgagcatgtttcttcgaaagatattgtcttatatttgattggacaaatcggtactgctggtggtactggttacgccattgaattttcaggatcctatataagtagcatatctgtcgagggaagaatgactatttgtaacatggctattgaagcaggggctaaggttggattaattgccccagacaataaaactattgagtatgttaaaagtaaatcatttcttgatgatgacacttttaatcatgcaaaagagtattggaaaactctaaagtcagatgatgatgcaaaatttgataaagaaataactatagatgtatcaaaaatcaaa

SEQ ID NO: 284109 - DNA, 607 bp, Unknown
  Bacterial polypeptide expressing nucleotide sequence isolated from the Sargasso Sea
atgaacaaattctcaacattaaaaagtattcctgcatatttaccaattgtaaatatcgatacagatatgattattccaaagcaatttttaaaaacaataaaaagaacaggacttggaaaaaatttattttatgaaatgagatatgacgaaaaaggtaaagtagtagatgactttatcttaaataaatccccatatgataattctaagattttaattgcagggaataattttggatgtggatcatctagagaacatgcgccatgggcacttttagactttggtatcacttgcgttataagtactagttacgcagatatattttataataattgttttaaaaatggaatattgcctattaaagttaatgatgaacagataaaagaactttctgaatattctaagagacaagaagaaattgcaataaatttaccagatcaaaaaataatttttggaaataaagaaatcaaatttgaattagatgaatttaaaaaaaaatgtttaattgagggactagatgatattgcactgtctttggaaaagtctaataaaataatttcatttgaagaaaaattaaaatccacaaagccttggatatttaatgattaaa

SEQ ID NO: 284110 - DNA, 313 bp, Unknown
  Bacterial polypeptide expressing nucleotide sequence isolated from the Sargasso Sea
atggataagtttaattctttaaaagggattgcagcccctttaccaatcgtaaatattgatacagatatgatcatcccgaagcaatttcttaagactataaaaagaactggtcttggtgttagcttattttatgagatgagatatgataatgatggaaatctaattaaggattttgtattaaatacatcgccttttgatcaatctaaaatattagtcgcaggagataattttggatgtggttctagtcgagaacacgctccttggtctcttaaagattatggaattaagtgtgtaatttcaacaagttttgctg

SEQ ID NO: 284111 - DNA, 445 bp, Unknown
  Bacterial polypeptide expressing nucleotide sequence isolated from the Sargasso Sea
atggaaaagtttaaaaaatttagcggtattgctgcgccaatgcccttagtgaatatcgacacggatatgataattccaaaacaatttttaaaaactataaagcgttcaggcttaggcgttaatgcatttgcagaaatgcggtataactcggatggatcagaagttgaagattttgttctaaataaaccagcatatagggactccagtattttaattgctggtgataattttggctgcggctcctctcgtgagcacgcgccgtgggcgttatctgattttggtatcaaagttgttgtttctacgtcatttgccgacatcttctttaacaattgttttaaaaatggaatgctgcctattattttgcccgaagaacaagttgagattttaatgaatgactcagaaaaaggatcgaatgcccgagtagaggtagatttagaagccccaa

SEQ ID NO: 284112 - DNA, 389 bp, Unknown
  Bacterial polypeptide expressing nucleotide sequence isolated from the Sargasso Sea
aggaaaaaactttggatgtggctcttctagagagcatgcaccttgggcattacttgattttggaattacatgtgtaattagctcaagttatgcagatattttttataataattgctttaaaaatgggatactaccaataaaaattgatgaagaaaaaataaagcaaatttcggagtattctttaagaaaagaagaaattaaaatagatttaaatgatcaaaaaataatttttgggaataatgaaattacatttgatttagatcagttcaaaaaaaaatgtttaattgaaggattggatgatattgcattatcattagaaaaatctaaaaaaattgaatcatttgaaaataaattaaaaacatctaaaccgtggatttttaatgattaaa

SEQ ID NO: 284113 - DNA, 1335 bp, Unknown
  Bacterial polypeptide expressing nucleotide sequence isolated from the Sargasso Sea
attatttggttgatagacatttagtacatgaagtaacaagcccccaagcttttgaaggacttagaaactctaatcgcaaagtcagacatccaaacttgaccctagcagtcgcagatcataatgttcctacaactgatagatcaaaaggtatttcagataaagagtctaaaattcaagttgatactttagattctaattgtaaaaaatttggtattcagttatttggaatgaatgataaaagacaaggaattgtacatatcataggacctgaacaaggttttactcaacctggtacagttattgtttgtggagatagtcacacagcaacacatggtgcatttggtgctttagcatttggaatcggaacttcagaagttgagcatgttttagcgacccaaacattagttcaaaaaaaagcaaacaattttagaataaatgtagatggtaagcttccacttggtgttacttcaaaggatgtaattcttcaaataataggaaaaattggaactgcaggaggaacaggttgtgtaatagagtatgctggtagtttaattaaatctttaagtgtagaaaatagaatgacaatttgcaacatgactattgaaggaggtgctagagcaggattaatagctcctgacgaaaaaatatttaaatatttagaaggaaaacctatgtcacctaaaggaaaagattgggaaaaagctttagaatattggaaaaatttaaaaacagatcatggagctaattttgataaagaaataaatttaaaagctgatgaaattttacctatgataacttggggaacatctcctcaagatgtaattacaattgaagaaaaagttcctaatccacaaaatgaaaaagatgaagacaaaaaaaattccttagaaagagcattgaattatatgggtttaaagccagacatggctgctaaagatattaaaatagataaagtttttattggaagttgtactaatggaagaatagaggatttaagagaggcagcaaaaattttaaaagataaaaaaatagcttcccatgttcaagcaatggttgttcctggatctggattagttaaagaacaagcagaacaagaaggattagataaaatttttgttaattcgggctttgaatggagagaacctggctgttcaatgtgtttagccatgaatgctgataaattaaaaccagaagaaagatgtgcttctacatcaaatagaaattttgaaggtagacaaggtagaggcggaagaactcacctggtaagccctggaatggctgctgctgcagctatatcaggaaaccttgatgatgttagaaagtatcggaattaat

SEQ ID NO: 284114 - DNA, 406 bp, Unknown
  Bacterial polypeptide expressing nucleotide sequence isolated from the Sargasso Sea
tatgcaaaaatttagctcattaaaaagtattccagcatatttacccttagtaaatatagatacagacatgattattcctaaacaatttttaaagactataaaaagaacaggacttggcaaaaacttattttttgaaatgagatatgatgatcaaggtaaagaaataaatgattttattttaaatcaaaatccatttaataattctaaaattttgataactggaaagaattttgggtgtggttcttcaagagaacatgctccttgggcattgttagattttggtattacttgcataattagttcgagttttgcagatattttttataacaattgttttaaaaatggaatattgcccattatacttgattatgaaaagattaaagagttatcagaatatgccaataga

SEQ ID NO: 284115 - DNA, 1288 bp, Unknown
  Bacterial polypeptide expressing nucleotide sequence isolated from the Sargasso Sea
agcctttgagggattaagaaattctaaacgtaaagtaagacacccaaaattgacattagctgttgcagatcataatgttccaacaacggacagatcaaaaggtatttcagaccatgaatctaaaattcaagttgaaactttagaggctaattgtaaagagtttggtattaaactttttggaatgagcgataagagacaaggaattgttcatgtcacagggcctgaacagggctttactcaacccggtacagttattgtctgtggtgatagtcatacagcaacacatggagcatttggtgcattagcttttggtattggaacttcagaagtagaacatgttttagcaactcaaacattagttcaaaaaaaagcaaagaattttagaataaatgtcaacggcacacttccattaggtgttacatcaaaagatgtaattcttcagataattggaaaaattggaactgcgggaggaacaggatgtgtaatagaatatgcaggtgatctaattaaatcgcttagtgttgagaatagaatgacaatttgtaatatgacaattgaaggtggtgcaagagcaggattaattgctcctgatgaaaaaatatttaaatacttagaaggtagaccgatgtctcctaagggagatgattgggataaagcactagataattggaaaaatttaaatactgatgaaggtgcaaagtttgacaaagaggtaaacctaactgctaatgaaatttcgccaatgataacttggggaacttcacctcaggatgttattacgatagatgaaagagtaccaaatccaaaaaatgagaaagatgaggatagaaaaaattctttggaacgagccttaaattatatgggcttgaaaccagatatggcagctaaagatattaaaattgataaagttttcattgggagctgtactaatgggagaattgaagatttaagagaggctgcaaaaattttaaaagataaaaaaattgcctctcatgttcatgctatggttgttcctggatcagggctagttaaagaacaagcagaacaagaaggattagataaaatttttgtaaagtcaggatttgaatggagagagccaggttgttcaatgtgtttagcaatgaatgcagataaattaaaacctgaagaaagatgtgcctctacatcaaatagaaattttgaaggtaggcaagggagaggtggaagaacccatttagtaagcccaggtatggcagcagcagcagcgatatctggaaaccttgatgatgtaaggaaatatcaaaattaa

SEQ ID NO: 284116 - DNA, 1324 bp, Unknown
  Bacterial polypeptide expressing nucleotide sequence isolated from the Sargasso Sea
tttgctatatattgataggcatctaatacatgaagtaacatctcctcaagcctttgagggtttaaagatggcaggtagagaaccttggagggtatcttcaaatatagcgactcctgaccataacgttcctactacaaatagagaaaaaggaattgaaggaatagaagatgaagtatcaaaacttcaggtgacaactctagataaaaactgttctgatttaggtattcttcagtttgatattttagacaaaaggcaaggtattgttcacgtagtaggtcctgaacaaggagtaacattacctggcatgactttagtttgcggcgattctcacacttctacacatggagctttagcaactcttgctatgggaataggtacttccgaagtggaacatgtattggcaactcaatgcttgaaagcttctaaattaaaaaatatgaagattgtaattgatggacagttatctccaggagtaactcccaaggacgtcactctagcggtaattgggaaaataggaacagcaggaggaacaggttttgcgattgaatactccggatcagttatagaagaaatgagcatcgaaggcagaatgactgtttgcaatatgtctattgaagcaggagcaagggttggactagtagcctttgataaaacaactcaagaatatgttgagggtagacctttttctccaaaaggcaaagaatgggaattggcactatttaactgggaaggtttaaaaagcgacgatgatgcccattttgacgaaacaatttttattgatggatctgctcttaagccgcaagtgacttgggggacttctcctgagatggttttggatattgatggaaccattcctgaagcaaagtccgaatcaatagagcgtgccctagaatatatgcaattgaaagcaggaatgaaaatttctgatattaaattagatcaagtcttcataggatcttgcacaaattccagaatcgaagatctaagattggctgcaagtctagttgaaggtaagaaaatttcttctggaattaaaagggcaatagtcgttcctggttctggtcttgtggctgaacaggcaataagagaaggattagacaaaatcttcattgaatctggctttgagtggcgagctcctggatgttcaatgtgccttgcaatgaatcccgatcagcttggagaaggagagcactgcgcttcaacttcaaaccgaaattttgaaggaagacagggatatggaggaaggacccacctagtcagtccagctacagctgcggcttctgctatagaaggaaaatttgttgatgtaagggagctgttctaa

SEQ ID NO: 284117 - DNA, 646 bp, Unknown
  Bacterial polypeptide expressing nucleotide sequence isolated from the Sargasso Sea
aatgaaaaatcaatatattttccattctggaattattatgcccctacctagagataatgtagatacagatcaaattattcccaagcaatttttaaaatccatcaaaaagagtggttttggacccaatttatttgacgcttggagatatgaagatgaaggatatcctggacaagacaatgactataggcccaaaaatcaagactttgtgcttaatcaagataagtataaagacgcggatattttaataagtcaaaagaattttggatgtggatcgagtagagagcatgcggtatggtctttaatggattatggtttcaaggttgtaatagcagaaagctttgctgatattttttataacaactgtttcaataatggtttattgcctattcaattatctaaagaaaaaattaacgaactatttctgctttcagaggagagtaaaggagtagaaattgatttaattgatcaattaattttatgtgaaggtaaagaggtaactagttttgagatagatcccttcagaaaacaatgtattttggaaggattagatgaaataggacttagcctaaaactctcagactcaataaaggaatacgaacaaaaaagagttgaagaggctccatggctttttaatggttatgagtaa

SEQ ID NO: 284118 - DNA, 283 bp, Unknown
  Bacterial polypeptide expressing nucleotide sequence isolated from the Sargasso Sea
atgaacaacaaacctaatccaaaaactttatttgataaaatttggtttcatcaccttgttcataaacaagaagatggaacttctttaatctatattgaccgacatttagttcatgaggtaacaagtccacaagcttttgaaggtcttagaaataataatagaaaagttcatcgaccagaaagtacttttgctgtagctgatcacaatgttccgacaacagataggtcaaaaggaattgataatgaagaaagcagaattcaagtagaaacattagaaaataatt

SEQ ID NO: 284119 - DNA, 1405 bp, Unknown
  Bacterial polypeptide expressing nucleotide sequence isolated from the Sargasso Sea
atgtcacaaacaatttacgataaaatttggaatgaacatttagttcatgaacaaaaagatggaacctccctcctttttgttgataggcatttaatacatgaggttacgagcccacaagcgtttgaaggattaagaacatctaatagaaaagttagacagccaaaattaactcttgcagttgctgatcataatgtaccaacaacagataggtcaaaaggtatatctgatgaggactctaggatacaggtagaaactcttgaaaaaaattgcaaagaatttgggataaaattatttggcatggatgataaaagacaaggcatagtccacatcatagggccagaacaaggatttacacaacctggaaatataattgtatgtggtgatagtcacaccgccactcacggagcgtttggtgccttagcatttggtatagggacctctgaggtagaacatgttttagcaactcaaacattagttcaaaagaaatcaaaaaattttagaatcaatgttaatggaaaattaccaatcggcgtaacatcaaaagatgtaattttacagattataggaaaaataggcactgcaggaggaacaggatatgtaattgaatattcaggaaatttgatatcaaatttaactgtagagcaaagaatgacaatttgtaatatgacaattgaaggtggagctagagcaggattaattcaacctgatgaaaaaatcatagaatatttaaaagataaaccaatgtctccaaaaaatgataattgggaaaaggcagttgagtattggagtaaattaaaaacagacactgatgcaaaatttgacaaagaaatttctttagacggcaatgaaataaaacccatggtaacatgggggacatcacctcaggatgttgtagaaatagatggccaagtcccaaatcctgataacgaaaaggatgaagataaaaaaaactcaattaaaagatcattaaattatatgggtttaaagccaaatacaaatatacaagatataaagatagacaaagtatttattggtagctgcacaaatggaaggatagaggatattagagctgcagcaaaaattttaaaagataaaaaaattgcatctcatgtaaatgcaataattgtaccaggctcaggattggttaaagaacaagcagagcaagaaggtttagataaaatatttaaggagtctgggtttgaatggagagaacctggctgttcgatgtgtcttgctatgaatgctgataaattaaagccagaagaaagatgtgcctcaacttcaaaccgtaattttgagggaagacaaggacgaggcggcagaacacatctggtaagtccagaaatggcagctgcagcagctatctcaggaaatctagacgatgtaagaaaatatcaaaattaaa

SEQ ID NO: 284120 - DNA, 607 bp, Unknown
  Bacterial polypeptide expressing nucleotide sequence isolated from the Sargasso Sea
atgcaaaagtttaatacattaaaaagcattcctgcatatctaccaatagtcaatattgataccgatatgatcattccaaagcaatttttgaaaacaataaaaagaacagggcttggaaaaaacttattttttgaaatgagatatgatgatcagggtaaagaaattaataattttgttcttaataaagatccatttaataaatcaaaaattttaattgctggaaaaaatttcggatgtggatcttcaagagagcatgctccgtgggctttgttagattttggaattacttgtgtaataagctcaagttatgcagatattttttatagtaattgttttaaaaatggtattttaccaattattcttgaagaggaaaaaataaaagagctttcagaatatgcaaatagaaaagaagaaatttcagtcgatctaaatgaacaaattattatctacggtaacaatgaaatcaaatttgaaatagatccctttaagaaaaagtgtttacttgaaggtcttgatgatattgctttatcacttaaaaaatctgacaaaattgaaatatttgaaaatagtttaaaagataaaaaaccatggatatttaatgattaag

SEQ ID NO: 284121 - DNA, 1405 bp, Unknown
  Bacterial polypeptide expressing nucleotide sequence isolated from the Sargasso Sea
gatgacaataaataatcctaaaactctttttgataaaatttgggaacatcatcttgttgatagacaagaagatggaacttgtcttatatatattgatagacaccttgttcatgaagttacgagccctcaagcatttgaaggtttaagaaataataatcgtaaagttagaagacccgaaagtacttttgctgtagctgatcacaatgttccaacctcagatagatctaaaggtatagaaaataaagaaagtagaattcaggttgaaacactagaaaaaaattgcaaagattttgatgttacactttttccattattagacagcagacaaggtatagttcatatagttggaccagaacaaggcattactcagccaggtatgacaatagtttgtggtgatagtcatacagcaacacacggagcatttggtgcattagcttttggtatcggcacaagcgaagttgagcatgtattagctactcagaccttaattcaaaaacctgcaaagaatatgcgaatttctgttgaaggtaagttaaacttaggtgttacagcaaaagatattattcttcatataataggaaaaataggaacggctggtggaactggttatgttattgaatatgctggtaatgcaatttcctctctttctatggaaggaagaatgacaatctgcaatatgagtattgaagcaggtgctagagctggtttaatcgctcctgacgaaaaaacttttgaatatattaaaggtagaccgtacgctccatcaggagataattggaataaagcggtagaattttggaaatctcttccatctgatgagggcgcaaaatatgatgaagaaattttaattaatgctgaagatatttcaccacaaattacttggggcacaagcccacaagacgttgttgctatagatggtatagtaccaaacccacaagaagagagtaatccgaatagaaagagggctatggaacgttctcttgaatatatgggtttagaacccaaacaagaaatacaaaaaattaaaattgataaagtatttattggctcttgcactaatggaagaattgaggatttaagagaagttgccaaagttgtagagggcaaaaaagtttctgtagactcaatgatcgttcctggttcaggtctagttaaaaaacaagctgaagaagaaggtttagataaaatttttattgaagcaggatttgattggagagagccaggttgctccatgtgtttagctatgaatccagatcaattaaaaccgcaagaaagatgtgcatcaacatcaaatagaaattttgaaggtagacaaggtagagaaggtagaacacatcttgttagtcctgcaatagctgctgcctctgcaatcaaaggttcttttgcaacagcagaggatttataa

SEQ ID NO: 284122 - DNA, 604 bp, Unknown
  Bacterial polypeptide expressing nucleotide sequence isolated from the Sargasso Sea
aatggaatcatttaaaacaataattggtatccctgcaccactaccaatgattaatgtcgataccgatatgattattccaaaacaatttttgaaaacaataaagagatctggtttaggtaaaaacttatttcatgaattaagatacgatattcaaggtaacataaagaatgattttgttctaaactgggacccttataaaacttcaaaaattttaattgctggggcaaattttggttgtggatcaagtagagagcatgcaccatggtcacttttagattttggttttaagtcaataattgcaccaagcttcgcagatattttctataataattgttttaaaaatggaatactgccaattaagttagatcaacaaaaagtagatatattaatgaacgaagcagaaaataaaaatgatgtttcagttgatttagaaaatcaaaaaatcacttatcaaaatgataaaacaatagaatttgaaattgatgcatttcgaaaaaaatgtttgctagagggtttggatgatattggtttgacgctccaaaaaaataaaaaaattgatgttcacgaagaaaaaatacacagtatccaaccttggatagtgtag

SEQ ID NO: 284123 - DNA, 607 bp, Unknown
  Bacterial polypeptide expressing nucleotide sequence isolated from the Sargasso Sea
atggaaaaatttattaagataaaaggaatagctgctccgttggacattctaaatatagatacggatatgataattccgaagcaattccttaaaacaataaaaagatctggtttaggaaaaaacttatttgatgaaatgagatacactacaaatggcgaagaaattaaaagttttgtattgaatcaagacccatggagaaattcaaaaataattattgcaggggataactttggttgcggttcaagccgtgaacatgcaccctgggcattgctagattttggaattagatgtgtaatttcaacaaattttgcagatatattttataataattgttttaaaaacggtattttacctattaaagtttcagaagatgaaagattatcccttttagctgatgccaaagataacgaaaaccctataattgagattgatcttcctaaccaagttatcaatagaccaaatggggtttcaataaaatttgatatagatgaatttagaaaaaaatgtttgctagaagggttagatgatatctctcttacattagagaataagacaaaaatagaaacttatgaaagcgaaagagataataataggccgtggttgtaaa

SEQ ID NO: 284124 - DNA, 1405 bp, Unknown
  Bacterial polypeptide expressing nucleotide sequence isolated from the Sargasso Sea
atgactaagcctcgtacattatttgataaaatttgggatgctcatttagtacattcagatccaaatgctgctagtattttatatattgataggcatttagtccatgaggtaacaagcccacaagcatttgaaggcctacgaaacacaaatagaaaagtacgaagtccagaaagaaccctagctgttgctgatcacaatattcctacatcaaatagaagtgaaggaataaaagatgaggaatctagaattcaagttgaaaccttagccaaaaatgcatctgatttttcagttccttatttcaatatggaggatataaggcaaggaattgttcatgtaattggaccagaacaaggatttacccaacctggcatgactatagtttgtggtgattctcatacagcaacacatggcgcatttggtgctcttgcctttggtattggaacctctgaggttgaacatgttcttgcaactcagactttaattcaaaaaccagcaaaaaacatgcttgttgaagttaatggtagccttccacctggagtaaccgcgaaagatataatacttgaaatcattggcaagataggaactgctggcggaacaggttatgtaattgaatacgcaggatcaacaatacgcgacttatcgatggaaggccgtatgacgatatgtaacatgtctatagaagcgggcgctcgagcaggtatgatcgcaccagatgaaaaaacatatgaatatttaaaaggaaaacctatgtcgccatcaggtgataattggattaaagctcttgaatggtggaaaagtctaccttctgatgaaaatgcaatttatgataaaaaaatttcaattgatgcaagtaaattagtgcctacagttacatggggaactagtccagaagatactgcaccaattactggaactgttcctgatccaaaaaatgaaaaagatttagctattaaagccaaattagaaagagcattatcttatatggatctaaaacccggtcaaaaaatttctgaaataaaaattgataccgtattcattggctcatgcacaaattcaagaatagaggatttaagggctgcttctaaaattgtaaaaggtaaaaaagtttcaaatgaaataagagcaatgattgttcctggttctggtctggtaaaagagcaagctgaaaaagaaggtttggatgctattttcaaagaagcgggctttgactggagagagccaggatgctcaatgtgtctggcaatgaatgctgataggctttcacctggtgaaagagcagcatctacttcaaatagaaattttgaaggcagacaaggacggctaggaaggacacatttagtaagtcctgaaatggcagcagcagcagctatcaaaggatatttaacagatgttagaaatttgtaat

SEQ ID NO: 284125 - DNA, 1390 bp, Unknown
  Bacterial polypeptide expressing nucleotide sequence isolated from the Sargasso Sea
atgtttgaaaaaatatggcaaaaacatttggttgcagaacctaaagaccaacctgtaattctatacattgatttacatttggttcacgaagtaacatcacctcaggcatttgaaggattaagaataagtaatagaaaagtcagaaggcctgatttaacaattgccacagtggaccataatattactactgatgatactcgaacattagaaataaaagatgaaattgctagaaaacaagttgaaactatcagagagaactgtaaatcaaatggaattacattgtttgatgtttgggatgaagagcaaggaattgttcacgtaattggtcctgaacaaggttatactcaaccaggaatgactatagtttgtggagactctcatacttcaactcatggtgcttttggatctttagcttttggaataggtacttctgaagttgaacatgttttagctactcaaactctcagacaaagaaaaccaaaaacgatgaaagtggactttaaaggagaactaaaaaaaggtgttactgctaaagatatggttttgaagctaataggtcaaataggaacagctggtggtacaggttacgtaatggaatatacaggcaatgcaattaaaaatctttctatggaaggacgaatgactatatgcaatatgtctatagaagcaggcgcaagagcaggtatgattgctccagatgaaattacatatgaatggatgaagggtagaaacaaagtccctaaaggtaaggattgggaaaaggctgtaaaagaatggaatgaacttcaaacagatgagggagcagaatttgattcatacatagaagtagattgtgacgatttagaaccacatgtttcatggggaactaatccttctcaagttttacccgtttcatcttcaattccatctcctgatgattatgaagaagtgcttgaatctcaatcttgtaataatgcacttgattatatgggacttaagccaggaacaaaaattgaagacatagaattagatagagtttttattggttcgtgtaccaatgctcgtattacagatcttagaagtgcagcaaaaattgttaagggtaaaaaagtaaactcgaatgttagagctcagattatgcctggatcaacaataacaaaattacaagctgaaaaagaaggactagacaagatttttaaagactctggatttgaatggagagaatcaggctgctcaatgtgtcttggtatgaatcctgatattattgctccaggagaaagatgtgcatctacttctaatagaaattttgaaggaagacaaggtaaaggaggcaggactcatcttgtaagtcctgaaatggctgctgcagcggcaattgaaggccattttgttgatgttagagactggtagg

SEQ ID NO: 284126 - DNA, 613 bp, Unknown
  Bacterial polypeptide expressing nucleotide sequence isolated from the Sargasso Sea
atgaagccaataaattcgatcacaggcatagcagcaccgcttctaaggaataacgtagatacagatgcgatcatccccagtcgtgaaataaaaaaaatctcaaaattaggcttagctgatggcttatttgccgagtggagatattcatctgttcaaaatagaattcctgatcagaattttatacttaataaagacccgtttcagaaatcagtaatcttattgacaggagagaactttggatgcggttcatccagagaacatgctgtatgggctcttcaagagtggggcattaaagccataattggaaaatcatttgggtcgattttctataataattgcatcaggaatggattacttgctatcacccttgaagaaaaaataatttctggattgattaaaaatgttgaagaaaatccatcggacaatcatatctttatagatttaattaagtgttcaattcaatgctgtgataaggagatcttttttgatattcatgaaaaagatcgatcacttctaattgagggtcttgatgaaatagaaaaagtcctgatatataaaaataacattgatagttttgaagctgaccataaaaaaataaggccttggctgtaat

SEQ ID NO: 284127 - DNA, 607 bp, Unknown
  Bacterial polypeptide expressing nucleotide sequence isolated from the Sargasso Sea
aatgcaaaaatttaataaacttacaagtataccggcatatcttccaatagttaacattgatacggatatgataattcctaaacaatttttaaagacaataaaaagaactggacttggaaaaaatttgttctttgaaatgagatatgatgatcagggaaatgagataaaagattttattttaaacaaaaaaccatttaatcagtctaaaattttaattgcaggaaaaaattttggatgtggttcttctagagagcacgctccatgggcactgcttgattttggtattacatgcgtaattagttcaagttatgcagatattttttataataactgttttaaaaacggaatattaccaattaaaattgatgaagaaaaaataaagcaaatctcagagtattctttaagaaaagaagaaattaaagtagatttaaatgagcaaaaaatcgtttttggaaataatgaaattaagtttgatttagatcaatttaaaaaaaaatgtttaattgaaggattagatgatattgcgttatcattagaaaaatctgaaaaaattgaattatatgaaaaaaaattaaaaatatctaaaccatggatttttaatgattaa

SEQ ID NO: 284128 - DNA, 838 bp, Unknown
  Bacterial polypeptide expressing nucleotide sequence isolated from the Sargasso Sea
aatgccacatacaatttacgataaaatttggaatgaacatctagtacatcaacaagaagatggtacttccttactttttgttgatagacatttaatccatgaagtgactagcccacaagcatttgagggcttgagaaattccaatagaaaagttagacagcctaagcttaccttagctgttgctgatcacaacgttccaacaactgatagatctaaaggaatttccgacaaagagtcgaaaatacaagttgatacattagacgcaaattgtaaagaatttggaattaagatttttggtatgaacgataaaaggcagggaatagttcatatcattggtcctgaacaaggttttactcagccgggaacaattatcgtttgtggagatagtcataccgcgacacatggagcatttggtgcattagcttttggtattggaacttctgaagttgaacatgtcttagctactcaaactttagtacaaaaaaaatctaaaaactttagaatcaatgtaaatggaaatttaccaataggtgtaacatctaaagatgtaattttacaaatcattggtaaaattggaacagctggtggaacaggatatgtaattgaatactctggtgatttaatttcatctcttagcgtagaaaatagaatgactatttgtaatatgactattgaaggaggagcaagagcaggtttaattcaacctgatcaaaaagtttttgactatttaaaagacaaaccaatgtcacccaaaaatgataactgggaaaaagctttagaatattggacaaacctcaaatcagatgaaggagcacattttgataaagaaataaattgg

SEQ ID NO: 284129 - DNA, 600 bp, Unknown
  Bacterial polypeptide expressing nucleotide sequence isolated from the Sargasso Sea
atgcaattcctatacggataactaatgttgatacagatatgataattccaaaacagtttttgaaaacatttaaaagaactggtcttggagaatatttattttttgagttaaagtttgatcaagacggtaataaaatagattcttttgtgctcaatcaagatcagtacaatggggcaagtatcttaatagcgggtaaaaattttggctgtggctcatcacgcgaacatgctccttggtcaattgctgactatggtatcaaatgcataatagcaccaagttacgctgatatattttataataattgcttcaaaaacggtattttacctataattcttgacgaagaaacagtagctaaactacaggacacagctgagaatacattgaatttcaacattgatctagaaaagcagaacataacttatttagaaaacaatgaacaaaaagaaataacattcgaaatcgatcctgttaagaagaaatgtttaattgaaggactcgatgacattggtctaactttaaataaatcaagttcgatttcagattttgaaaataatcaagcaaaagaaaccccttggttatatggaagtaaaataatatgag

SEQ ID NO: 284130 - DNA, 1405 bp, Unknown
  Bacterial polypeptide expressing nucleotide sequence isolated from the Sargasso Sea
aatgccttttacaacttacgataaaatttggaacgatcatctagttgatgaacaacctgatggtacatcacttttgtttgtagatagacatttgattcatgaagttacaagccctcaagcatttgaaggcttaagaaattcaaacagaaaagtaagacaccctaaactaactcttgctgttgcagatcataatgttccgacaactgacaggtcaaaaggtatcgcagatgaagactcgagaattcaagttgaaactttgaacaaaaactgtaaggaatttggagtagagatttttggaatggatgataaaagacaaggcattgtccatatcatagggcctgaacaaggttttacacagcctggaaatattattgtttgtggtgatagtcatactgcaactcatggagcatttggagctttagcttttggtattggaacttcagaagtagaacacgttttagcaacacaaactttagttcaaaaaaaatcaaaaaactttagaattagcgtaaatggttcattacctattggcgtaacatcaaaggatgtcatcttgcagataattggaaaaataggaacagctggtggtactggttatgtgattgagtatgccggtaaccttatatctaatctaagtgttgaacaaagaatgacgatttgcaacatgacgattgaaggtggggcaagagcaggattaattcaaccagatgaaaagattttccaatatttaaaaggtaaaccaatgtcaccaaaaggagaaaactgggaaaaagctttagaatattggcatacattaaaatctgataaggatgcaaactttgataaagaattaacgttagatggatctcaaattaagccaatggtaacttggggaacatctccccaggatgtggttgaaatagacggtaaagttcccaatcctgaaagtgaaactgacccagatagaaaaaattcaattaacagatcattaaattatatgggattaaaaccaaatacgaatattcaagatattaagattgataaagtttttataggaagctgcactaacgggagaatagaagatataagagaggcagctaaaatattaaaagataaaaaagttgcatcacatgtacatgcaatgattgttccaggttctggtttagttaaagaacaagcagagcaagagggtctggataaaatatttttagaatcaggctttgaatggagagagccaggctgttcaatgtgtctagcaatgaatgcggataagcttaaacctgaagaaagatgtgcatctacctctaatagaaattttgagggtagacagggaagaggtggtagaacacatttagttagtccagcaatggctgcagcagctgcaatttctggaaacttagatgatgttagaaaataccaaaattaa

SEQ ID NO: 284131 - DNA, 607 bp, Unknown
  Bacterial polypeptide expressing nucleotide sequence isolated from the Sargasso Sea
aatgaataaatttatctcaataaaaagtattccagcttatctacctatcgtcaatatagatacagacatgataattcctaaacagtttttaaaaaccataaaaagaactggactaggaaaaaatttattttttgaaatgagatatgatcaaagtggtaaagagatagatgactttattttaaataatagtccgtataataattctaaaattttaattgcaggaaagaattttggatgtggctcttctagagaacatgctccttgggctttaatggattttggaataacttgtgtaattagttcaagttatgcagatatattttataataactgttttaagaatgggattctcccaattacaatttcagaggatcaaatcaaagaaatttcagagtactcgaatagaaaagaggaaatttctgtaaatttgcctgagcaaacaataagttttggtaataaagaaataaaatttgaaatagatcaatttaagaaaaaatgtctaatagagggattagatgatattgctttatcactagaaaaatctgaaaaaatagtttcatacgaaaataaaattaaagaggcaaaaccttggatatttaatgattaa

SEQ ID NO: 284132 - DNA, 359 bp, Unknown
  Bacterial polypeptide expressing nucleotide sequence isolated from the Sargasso Sea
aatgcaaaaatttaatactttaaaaagtattccagcatatttaccaatagtgaatattgatacggatatgataattccaaaacaatttttgaaaactattaaaagaactggtcttggtaaaaacttattttttgagatgagatatgatgaccaaggtaaagaaattggagattttattttaaatcaaaatccatttaataattctaaaattttaatagctggaaaaaattttggatgtggttcatcgagagagcatgctccatgggcgttgttagattttggcataacatgtgtaataagttcaagttttgcagatattttttatagcaattgttttaaaaatggaattttacctattg

SEQ ID NO: 284133 - DNA, 468 bp, Unknown
  Bacterial polypeptide expressing nucleotide sequence isolated from the Sargasso Sea
aatgtcacaaacaatttacgataaaatttggaatgatcatttggttcatgaacaaaaagatggaacatcccttctttatgttgatagacatttaatccatgaagttacaagcccccaagcattcgaaggactgaggacatcgaacagaaaagttagacaaccaaagttaacacttgctgttgccgatcataatgttccaacaaccgatagatcacaaggaatatcggatgaagactctcggatacaagtagaaactttagataaaaactgcaaagagtttgatattcaattatttggtatgaatgataaaagacaaggcattgttcatataattggtccagaacaaggatttactcaacctggaaatataattgtttgtggagatagccatactgctacccatggcgcattcggtgctttggcatttggaataggaacttccgaagtagaacatgtttggcaacacaa

SEQ ID NO: 284134 - DNA, 1087 bp, Unknown
  Bacterial polypeptide expressing nucleotide sequence isolated from the Sargasso Sea
gatagttcatgtagtagcaccggaattaggcctaactcagccaggaatgacaatcgcttgcggagattctcatacttcaacccatggagcatttgggtcaattgcttttgggataggtacaagtcaagtaagagatgttcttgctacccaaaccttagccatgaacaaattgaaagtgaggcagatttggtgtgacaataaattatctaagggtgtttatgctaaggatttagtccttcatattattaataaacttggtgtaaaggcaggagtaggtttcgcatatgaattcgcagggcctgcgatcaatgcattatcaatggaagaaaggatgacgatatgcaatatgtctattgagggaggagcaagatgcggctacattaaccctgatgaaaagacctttagttacattaaaaataaattatgtgctccaaaagatgagcattgggataaagcactcacctggtggaaatcattaaaaagcgatgaaaattcaatttatgatgatgtaattaaattagatgcttctaaggtagaaccaactgtaacctgggggattactcccggccaaagtataagcattaatcaacaaatccctcttttagatgacttatccccaaatgataaattagttgcaaaagaggcttatgaatatatgagtttcaagccaggacaattaataaaagatactccagtagacgtttgttttataggtagttgcacaaatggaagaatcagtgacttaagagttgcagccaaagtattaaaaggcaaaaaagtgtcccagaatgtcaaagcatttgccgttccaggttcagaaaaagtggcaactgaagcaaaacaagaaggtattgatcagatttttaaggattctggatttcaatggagagagcctggctgctcaatgtgtttagcaatgaattcagataagctaataggtaatcaagttagtgctagttctagtaatagaaatttcaagggtaggcaaggatctcccagtggaagaacgctgctcatgagtccagcaatggtagctgctgctgcaattaatgggaaagtcagtgacgttagagaatttatcaactga

SEQ ID NO: 284135 - DNA, 1143 bp, Unknown
  Bacterial polypeptide expressing nucleotide sequence isolated from the Sargasso Sea
tatgaaaccaaaaacattatttgagaaaatatgggataaacacttaattgcatcaatcgatgctgatactaacttgttgtttattgacatgcatcttgttcatgaagttacatctccacaagcttttgatagtttgagaataagtggaaggaaagttaagtatcctgaattaactttagcaacagttgatcatggtgtccccacttctaatagagctttgggaattaaagacccgttgtcaaaaaaacaaattgatgcactagaagataattgcaaggagtttggagtaacaatttatggggttaatgatccaagacagggaatagttcatgtaattggacctgagcaaggcattactcaacccggaatgacaattgtatgtggggatagtcacactgcaactcatggagcttttggagcattagcttttggaattggaacttctgaggttgagcatgtgcttgcaacacagactttggcaatgaataaaccgaaaacgatgaaggtagaagttgttggggaaatgaatgaaacaataactccaaaagatgtgatattaggaattattagagaaataggaactggaggtggagctggccatgttattgaatactctggtgacgcaattaaaaaaatgagtatggaaaacagaatgactgtttgtaatatgtctatagagggtggtgctagagctggaatgattgctcctgatgaaattacctataaatatctaaagaataaaaattttgccccaaaaaatgaagactgggataaagctcttaatgaatggaaagaactttattctgatgatgatgctgaatttgataaaactataaaaattaatgtaaacgatttaaaaccttctatctcgtggggaacaaatccatctcaagtaatttttatagatgaagtaataccaagtccagatagcttccaaaatgaagcagataaagaagctgctgaaagagctttagagtatatggatttaaagccgggacaaaaatttgatgatatctctttggatagagtttttattggtagttgtacaaatggaaggctcgaagacttaagggctgcagcaaaggtacttgaaggaaaaaaggtccataaaaatataaatgcaatggtgtaccagggtcaact

SEQ ID NO: 284136 - DNA, 604 bp, Unknown
  Bacterial polypeptide expressing nucleotide sequence isolated from the Sargasso Sea
tatgagcaaaaaaacatcacttacgctttttgacaaagtttggaatgaccatattgtcctccaagagacaaaaagcactccagcaattttatacattgatcttcatcttattcatgaggttactacacctcaagctttcacaatgttacgagaaaattctcttaaagtaagaaagactaaatcaactattggcacaatggaccattcaacgcccaccctacctgtaaacaagttcaaagatattgaggttgcaggtgctgatgctgcaaatcaagtaagacaaatgatctctaactgcaaagaatttaacattgaattatttgactttgatagcatcaacagaggtattgttcacgtaattgggcccgaattaggattaactcaaccaggaaagacaattgtatgtggtgacagtcataccagtactcatggagcattcggcgctctcgcatttggcatcggaacaactgaggttggtcatgtcttggcaactcaatgtttactgcaacgtaaaccgaaaactttatctgtggaaatcaatggcaaactaaacaatggcgtaaccgctaaagatctggtgttagctataataggtgaactggcg

SEQ ID NO: 284137 - DNA, 469 bp, Unknown
  Bacterial polypeptide expressing nucleotide sequence isolated from the Sargasso Sea
ctggcgttttctggacgaaaaagggcaacagccaaatcctgagtttgttttgaacttcccggaatataaaggggcatcaattctgctggcgcgcgaaaacttcggttgcggttcgtcacgtgaacatgcgccgtgggcgttgaccgattacggttttaaagtggtgattgccccaagctttgccgacatcttctacggcaatagtttcaataaccaactgctgccggtgactctgagcgacgcgcaagtagatgaaatgtttaccctggtaaaagccaatccgggcattaaatttgaagtggatctggaagcgcaggtggtgaaagcgggcgataagtcctacagctttaaaatcgacgacttccgccgccactgcatgctgaacggtctggacagcatcgggctgacgctgcagcatgaagcggccatcaccgagtacgaagacaagcagccagcgtttatgcagtaa

SEQ ID NO: 284138 - DNA, 772 bp, Unknown
  Bacterial polypeptide expressing nucleotide sequence isolated from the Sargasso Sea
atggctagaactctatacgataaattgtgggatgcccatgtagtagcacaaagagaagatggcacttctttactttatatagacagacaattaatccatgaagtaacttcaccgcaagcatttgaaggcttaaaactgaatggaagaaagctttggagaagaagtgctagtaaggccaccccagaccataatgtgccaactctggatagagagaagggattaaagggtattaaagataaggtcgctaaacttcaggtaactactttagatgagaattgcaaagagtttgagattgagcagtttgatattctcgataaaaggcaaggaatagtccatgtagtaggtccagaacaaggcatcacgcttcctggaatgaccgttgtttgtggtgattcccatacttctactcatggtgcattaggtgcattagcaatgggaataggtacttcagaagttgagcatgtattagccactcagtgcttagtagccacaaaacagaaaaacatgagagtaaatctaaatggtgttttaccagaaggagtttttgcaaaagatttaacacttgccgttattggaaagataggaacagctggcgggacaggttatgcaattgagtattccggaaattgtatatctggtttatctatggaaggaagaatgactgtttgcaatatggctattgaagctggttcaagagcaggaatgattgcttttgatgaaactactatggattacgtaaaaggaaggccttactctccaaaaagattctgaa

SEQ ID NO: 284139 - DNA, 1177 bp, Unknown
  Bacterial polypeptide expressing nucleotide sequence isolated from the Sargasso Sea
attgagtcaagataccttatttgataaagtttgggatttacacaaagtttcaagtcttcctggtggttcagatcaaatctttattggtcttcacctcatccatgaagtgacaagtcctcaagcatttggtgctttaaaagacaaaaacttaaaagtgaaattccctaatagaactgttgccacagttgatcatattgtgccaacagataatcagagcaggcctttcaaagataatcttgcggaacaaatgattagcacattagagaagaattgcttacaacataaaataagattttataatattggtagtggtaatcaaggaatagtgcatgtagtagctccagaattggggctaacgcaaccaggaatgacaattgcttgtggagattcacatacttcaactcatggagcttttgggtcaattgcttttggaataggtacaagccaagtaagagacgttcttgctacccaaaccatagccatgaacaaattaaaggtaaggcaaatttggtgtaagaatcaattatctaatggtgtttatgctaaggacttagtacttcatattattaataaacttggtgtgatggctggggtgggttttgcatatgagttcgcagggcctgctatcaatgcattatcaatggaagaaagaatgactatatgcaatatgtctattgaaggaggagcaaggtgcggctacataaaccctgatgagaagacctttacttacattaaaaacaaattatgtgctccaaaaaatgagaattgggataaagcactcacgtggtggaaatcattaaagagcgatgaaaattcaatttatgatgatgtaattaaattagatgcttctaaaatagaaccaaccgtaacctggggaattactcccggtcaaagtataagcattaatcaaaaaatccctcttttagatgacttgtccccaaatgacaaattagttgctgaagaggcttatgaatatatgagtttcaagccaggacaagcaataaaagatactcctgtagaagtttgtttcataggcagttgcacaaatgggagaatcagtgacttaagagttgcagctaaagtattaaaagacaagaaagtatctaagaatgtaaaagcatttgtagtgcccggttcagagaaagtagccaatgaagcaaaacaagaagggtcttga

SEQ ID NO: 284140 - DNA, 1192 bp, Unknown
  Bacterial polypeptide expressing nucleotide sequence isolated from the Sargasso Sea
ggaattacagatgaagattctagaattcaagtagaaactttaaataagaactgtaaagagtttggaatagagatatttggaatggacgacaaaagacaaggtattgtgcatatcattgggccagaacagggatttactcaaccaggaaatattattgtttgtggtgatagtcacacagcaacacatggagcttttggagctttagcatttggtattggaacttcagaagtagaacatgttttggcaacacaaactttagttcagaaaaaatcaaaaaacttcagaataagtgtaaacggaacattacccattggagtaacttctaaagatgtaatacttcagataataggaaaaataggaacagcaggtggtaccggttatgttattgagtatgctggaaaccttatatctaatctaagcgttgaacaacgaatgacaatttgtaatatgacgatagaaggtggtgcaagagctggacttatacaaccagatgagaagatatttaaatatttaaaaggaaaaccaatgtcaccaaaaggtgaaaattgggataaggccttagaatattggtatacattgaactctgatcctgatgccaatttcgataaagagctaacattagaaggctcacaaattaaaccaatggtaacttggggaacttctcctcaagatgtagtcgaaatagatggtaaagttcccaatccggaaagcgaaagtgatccagatagaaaaaattcaataaatagatcattgaattatatgggcttaaaaccaaacacaaatattcaagatattaaaattgataaagtttttataggaagttgcactaacggtagaatagaagatatcagagaggcagctaaaattcttaaagataaaaaaattgcatcacatgttcatgcaatgatagttccaggatcaggtctagttaaggaacaagcagaacaggaaggtctagataaaatatttttacaatcaggttttgaatggagagagccaggttgttcaatgtgcttagcaatgaatgcagataagcttaaacctgaggagcgatgcgcatctacgtcaaacagaaattttgaaggcagacagggaagaggtggcaggacgcatttagttagtccagcgatggctgcagcagcagcaatatctggaaatttagatgatgtgagaaagtaccaaaataaatgaa

SEQ ID NO: 284141 - DNA, 1405 bp, Unknown
  Bacterial polypeptide expressing nucleotide sequence isolated from the Sargasso Sea
aatgtcaaaaacaatttacgataaaatttggaatgatcatcttgttcatgagcaaaaagatggaacttcccttctttttgttgatagacatttaatccatgaggtaacaagtccacaagctttcgaaggattaagaacatctaacagaaaggttagacaaccaaagttaacacttgctgttgctgatcataatgttccaacaacggatagaacaaaagggattgaagatgaagactctagaatacaagtagagacacttgaaaaaaactgtaaggaatttggtattcaactatttggaatgaatgataaaagacaaggcattgttcatataattggaccagaacaaggatttactcaaccaggcagcgtaatcgtatgtggagatagtcatacagcaacccatggcgcttttggtgctttagcatttggaataggtacttccgaaattgagcatgttttggcaactcaaacattggtgcaaaagaagtcaaaaaattttagaataagtgttaatggtgaattatcaattggtgtcactgcaaaagatgtaattttacaaattattggaaaaataggaactgctggtggaacaggatatgtaatagagtatgcaggaaatttaatatctggattaagtgttgagcaaagaatgacaatttgcaatatgactattgaaggaggagctagagctggattaattcagccagatgaaaagatatttgaatatttaaaaaataaaccaatgtctccaaaaaatgaaaattgggaaaaagctattgaatattggagcaaactaaaaacggaatctgatgcaaaatttgataaagaaattgttttagagggccaagaaataaaacccatggtaacttggggaacatcgccccaagatgttgtagaaatagatggtcaagttccaaatccagataatgaaaaagatcaagataaaaaaaactcaatagagagatcgcttaattatatgggattaaaaccaaatacaaaagtacaagatataaaaattgataaggttttcataggtagctgcacaaacggaagaattgaagatataagggaagcggcaaaaattttaaaagacaaaaaaatagcaaaacatgttaatgctatgattgttccaggttcagggctagttaaagaacaagcagaacaggaaggtttagataaaataataaaagaatctggttttgagtggagagagccaggttgttcaatgtgtttagcaatgaatgctgataaactaaaaccagaagaaagatgtgcatctacttcaaatagaaattttgaaggtagacaaggtcgaggaggaagaacacatttggttagtccggcaatggccgccgccgccgcaatctctggaaatttagatgatgttagaaagtaccgaaattaa

SEQ ID NO: 284142 - DNA, 607 bp, Unknown
  Bacterial polypeptide expressing nucleotide sequence isolated from the Sargasso Sea
aatgaaaaaatttacaaatgtgaaaagtattccggcatatcttccaatagttaatattgatactgatatgataattccaaaacaatttttaaaaacaataaaaagaactggtcttggaaatggattattttttgaaatgagatatgaccagggtggaaataaaataaataattttattttgaataataatccatataataaatccaaaatattagttacaggaaaaaattttggttgtggttcttcacgagaacacgctccgtgggcacttctagattttgggataacttgtgtaattagttcaagctttgcagacattttttataataattgcttcaaaaatggaattttacctatcactttaaaggaagaaaagattaaggaaatttctgaatattcaaatagaaaagaagaaatttcagttaatttatcagatcaaaaaattacatttggaaataaagaaatcaattttgaaattgatgaatttaaaaaaaaatgtttgttagaaggactagatgatattgctttatcattagagaaatctgaaaaaattataaattttgaaagtaaaataaaaaatacaaagccatggatttttaatgattaa

SEQ ID NO: 284143 - DNA, 607 bp, Unknown
  Bacterial polypeptide expressing nucleotide sequence isolated from the Sargasso Sea
aatgaaaaaatttatttcacttaaaagtatcccagcatatttgccaattgtgaatattgatactgatatgattatacctaaacaatttttaaaaacaattaaacgaactggtctaggaaaaaatctatttcacgaaatgaggtatgacaatgatggaaaggttattaatgattttgttttaaatacaaaaccatttgataggtcaaaaattttaattgcaggaaataattttggttgtggatcatccagagagcatgcgccatgggctcttttagattttggtatcacttgcataataagttcaagctatgcagatatattttacaataattgttttaaaaatggaatattgccaataattttgaatgaagaaaaaataaaagatctatcagaatatgcaaaaagaaaagaagaaatagaagtgaacctacaagaagaaaaaattatttatggaaataatgaactaaattttaaaatagatccatttaagaaaaaatgtttgattgaaggacttgatgacattgctctgtccttagaaaaatcttctcatattaacgattttgaaaaaaaattaaaatcctcaaaaccatggatatttaatgattaa

SEQ ID NO: 284144 - DNA, 1405 bp, Unknown
  Bacterial polypeptide expressing nucleotide sequence isolated from the Sargasso Sea
aatgccaaaaactttatacgataaaatttgggatgaccatcttgtctttcaacaagatgacggtacctcactattatatgtggatagacacttagtacatgaagtaactagcccgcaagcctttgaaggtcttaggttaaataaaagaaaagtgagaaaacctaattttactttagcagtagctgatcataacgtgcctacaacagatagaacaaaaggaattcacgatcaacagtcgaaaattcaagttgatacacttagaaaaaattgtaaagaatttggagttcctttatttgacatgaatgataagagacaaggtattgtccatattattggacctgaacaaggttttactcaaccaggaacaattattgtctgtggagacagtcacactgctacccatggggcttttggtgcactagctttcgggattggaacatctgaagtagaacatgttttagctactcaaactctattacaaaaaaaatctaaaaactttttacttaaagtagatggaaaaattccattaggggtaactgctaaagatgttattttaaaaattataggtactataggaacagctggtggaactggatttgtaattgagtattctggagatgttattaaaaactttagtatggaagagagaatgactgtttgcaatatgactattgaaggtggagcgagggcagggttaatacaacctgacgagaaaactttcaaatatttggagaacagacctttgtctccgaaaaaagataattggaaaaaagctttagattattggagcaatttaaaatctgacaaagattgtaaatttgataaagaaatagttttaaatggtgaagatgtcgtaccacaagttacttggggcacatccccacaagatgttgttccagttaatggatcagttccagatccaaaaaaagaaaaagataatgacagacgtgtggctatggaaagatcattagattatatgggtttaaaacccaatactaaaatgacagacatcaaaatagacaaagtgtttattggaagttgcactaatggaagaatccaggacttaagagaagcagctaaacttcttaaagataaaaaaatagcaggacatgtaaatgcgatggttgttccaggatcaggtcttgtaaaaattcaagctgaacaagaaggtttagataaagtatttaaagactctggttttgagtggagagaaccaggttgctcaatgtgtcttggtatgaatgaggatcagttaaaaccaagagaaagatgtgcatcaacatcaaatagaaactttgaaggaaggcaaggtcgtggaggaagaacacatctagtgagcccagcaatggcagcggtagcagctattgaagggcacttatcagatgttagaaaatttagtaattaa

SEQ ID NO: 284145 - DNA, 598 bp, Unknown
  Bacterial polypeptide expressing nucleotide sequence isolated from the Sargasso Sea
tatggaaaaatttacaaaaataaaaagtatacccgcatatattcctttaatgaatatagacactgataaaattattcctaaacaattcttaaaaacaataaaaagatcaggtttaggtaaaagcctattttatgaaatgaggtttgatgaaaaaggaaatacaataaagggtttcattttagaccaggaaccttttaatagttcaaaaattttaataacaggaaagaattttggttgtggttcatcaagagaacatgcaccgtgggctttattggattttggaattagagttattgttagcgaaagttttgctgatatcttttacaacaactgttttaaaaatggaatacttccaattgttgcaaaagatgaaactataaacgagcttaaagactattgtgagagaaaagaaaatattgaagttaaacttcaagaacaagaaattatttatggaaataaaacttttaaatttgaattagactcattcaaaaagaagtgtttattagaaggattggacgatatagctttatctctagaaaaaacaaaaaatattgaaagttttgagaataaaatgtctcaaaatagaccctggttataa

SEQ ID NO: 284146 - DNA, 259 bp, Unknown
  Bacterial polypeptide expressing nucleotide sequence isolated from the Sargasso Sea
tatgaaaactttgtacgacaaactctgggaggagcatcacgtaaccaaacttaattcaggtgaatcgcttttatacatagacaggcattatttacatgaagtaacttcaccacaagcatttgaaggactctcaaaaaaaaagttaaagccttggaggcttgatgcaaatatagctactcctgatcataatgtcccaacaataagaggaaaaactttaattctgagaatattaaagatgaaatttcaaaaatacaggtag

SEQ ID NO: 284147 - DNA, 638 bp, Unknown
  Bacterial polypeptide expressing nucleotide sequence isolated from the Sargasso Sea
taaggctgttgaatattggaatacccttaaatcggatgagggtgcacaatttgacaaagagataagccttgacggaaaagatattaaaccaatggtaacttggggaacatcaccacaagatgtattaactatagatgaaaatgttccaaatcctgaaactgaaacagacgcagatagaaaaaactctattgaaagatctttgaaatatatgggtttagaacctaatacaaagataaaagatattaaaattgataaggtttttattggaagttgtactaatggaagaattgaagatttaagggaggctgctaaaattttaaaggataaaaaaattgctggtcatgtaaatgcaatggtagttcctggctcaggtttagttaagcaacaagcagagcaagaaggattagataaaatatttataaattcaggttttgaatggagagaacctggatgttcaatgtgtttagcaatgaatgctgacaaactaaagcccgaggaaagatgcgcatctacatcaaatagaaattttgagggaagacaaggcagaggtgggagaacacatttggtaagtcctggaatggccgctgctgcagcaatttcaggaaatttagatgatgttagaaagtatcaaaactaat

SEQ ID NO: 284148 - DNA, 607 bp, Unknown
  Bacterial polypeptide expressing nucleotide sequence isolated from the Sargasso Sea
atgcaaaaatttaataaattaaagagtattccagcatatttaccaattgtaaatattgatacagatatgataattccaaagcaatttctaaaaacaattaaaagaactggccttggtaaaaatttgttttttgaaatgagatatgatgatagaggaaatataattagagagtttattttaaatcaggacccatttaacaaatcaaaaattttaatagctggtaaaaactttggatgtggttcttctcgagaacacgcaccttgggcattgttagactttggaattacatgcgtaataagttcaagttatgctgatattttttataataattgttttaaaaatggaattttaccaatcatattagatgatgataaaataaaacaaatttcagaatactcaaatagaaaagaagaaatagaagttgatttaaacaatcaaaaaattgtatttggtaacaatgaaattagttttgatatagactcttttaaaaaaaaatgtctcctagaaggtttagatgatattgcattatcattagagaaaactaacaaaatattatcttttgaaaaaaatctcaaaaatttaaaaccttggatatttaatgattaaa

SEQ ID NO: 284149 - DNA, 1399 bp, Unknown
  Bacterial polypeptide expressing nucleotide sequence isolated from the Sargasso Sea
tatgggaaaaactttatttgataaaatctgggataatcacctagttacatctattgatgagagtacaaatataatatttattgatttgcatcttgtccatgaagtcacgtcacctcaggcttttgatagtctccgaatttctgatcgaaaagtaaaatatcctgaattgactttagctacagttgatcatggtgtcccaacatccaacagactattaggaataaaagatcctctttcaaaaattcaaattgaagcactggaaaaaaattgcgaggaatttggagtcactctttttggaattaatgatccccgtcaaggaatcgttcacgttataggacctgaacaagggattactcaacctggaatgactattgtgtgtggagatagccatacagcaacacatggtgcattcggagccctagcatttggaattggcacttcagaggttgaacatgttctagctactcagactttagcaatggaaaagccaaaaacaatgaaagttgaagttattggaaacgtctcagatggagttggccctaaagatattattttaggcatcatcagaaaaattggaactggaggaggagccggtcatgtaattgaatatgtgggtgatgttataaaaaacatgagtatggagaatagaatgacaatttgtaatatgtcaatcgagggtggagcaagagcaggaatgattgctccagatgaaactactttcaattatttaaaagataaaaattatgctcctaaagactctgattggaatgatgcaataaatgagtggggtgaacttttttctgatgatgatgctacttttgataaagttgtaacaataaatgctggtgagcttgaaccatcagtatcttggggtacaaatccatcacaagttatatttattaatgacaaaattcctcatcctgataattttcaagatgaatcagataaagaagcagcaattagagctttagaatatatggatttagagcctggaataaaaattaatgaaatcaatttagatagagtttttataggcagttgtaccaatggtcgtattgaagatttaagagaggcggcccaggtagttaagggcaaaaaagttgcaaaaactgtcggtgctatggttgttcctggatcaacacttgtaaagaatcaggctgaggaggaaggattagacaaaatttttattgatgcaggctttgattggagagaagcaggttgttcaatgtgtctgggtatgaatccggatatattaagtccaggtgaacgctgtgcttctacttcaaataggaactatgaaggaagacaaggagctgggggaagaacacatttagtaagtccaaaaatggctgcagctgctgcaatccatggaaaatttgtagacataaggaatttataa

SEQ ID NO: 284150 - DNA, 255 bp, Unknown
  Bacterial polypeptide expressing nucleotide sequence isolated from the Sargasso Sea
taaaacaagcagaagaagagggaatagatataattttaaaagatgctggttttgaatggagagaggctggatgctctatgtgtcttggcatgaatcctgatcaattaaaacctggcgaaagatgtgcctcaacttctaatagaaattttgaaggtcggcaaggtcgaggtggaagaactcatttaatgagcccagaacttgcggcagcttccgctattactgggaacatttcagatataagagatttcacttaag

SEQ ID NO: 284151 - DNA, 613 bp, Unknown
  Bacterial polypeptide expressing nucleotide sequence isolated from the Sargasso Sea
aatgaaaaagtttacttcattaaaaagcattcctgcttatttaccaattgtaaatattgatacagatatgattatccctaaacaatttctaaaaacaattaaaagaactggtttaggaaaaaatttattttatgaaatgagatatgacaatgatggaaaagttattgaaaattttgttctaaataaaaaaccatataataattctaatatattaatagctggcaataattttggctgtggctcatcaagggagcatgcaccttgggctcttttagattttggaattacctgtgtaataagcacaagttacgctgatatattctataataattgctttaaaaatggaattttaccaatagttcttgatgaagataaaattaaagaattgtcagaatactcgaatagacaagaagagattcttgtagatcttaaagatgaaaaaattacttacggtaacaatgaagtaagttttaaaattgatccctttaaaaaaaaatgtttaatggaaggattggacgatattgcactttcactagaaaaatcagataaaataaaatctttcgaagataaattaaaaattaaaaaaccatggttgtttaatgatcaaagttaa

SEQ ID NO: 284152 - DNA, 430 bp, Unknown
  Bacterial polypeptide expressing nucleotide sequence isolated from the Sargasso Sea
tatgggtcttaagccagatacagctgtaaaggatatcaaaattgataaagtatttattggaagttgtacaaacggtagaattgaagacttaagagaagctgcaaaaattttaaaagagaagaaaaaagcttcacatgtgcatgctatggttgttcctggttcgggactagtaaaagagcaagcagaacaagagggattagataaaatatttataaactctggttttgagtggagagagccaggatgttcgatgtgccttgcaatgaatgcagataagttaaaaccagaggaaagatgtgcctcaacatcaaacagaaattttgaaggaagacaaggtagaggtggaagaactcatttagttagcccaggaatggcagcagcagcagctatttcaggaaaccttgacgatgtaaggaaatataataattaa

SEQ ID NO: 284153 - DNA, 268 bp, Unknown
  Bacterial polypeptide expressing nucleotide sequence isolated from the Sargasso Sea
aatgctgtatagaacactatatgacaaaatctgggactatcatcttataaatgaacaagataatgatagttccctaatttatattgatagacatctggttcacgaagtaactagtccacaagcttttgaaggcttaagaatgaatggaagaaaagttaattctccattgagaactcttgctgttgctgaccacaatgtgccaactttaaacagagaatcaggaatagaagaagaagactctagaattcaagttgaagagttagataaa

SEQ ID NO: 284154 - DNA, 1415 bp, Unknown
  Bacterial polypeptide expressing nucleotide sequence isolated from the Sargasso Sea
ctttttttcaatgtccaaaactctttacgataaaatatggaatgatcacttagttgatcaacaagatgatggaacagcccttctttttgttgatagacatttagttcatgaggtcacaagtccccaagcatttgaaggattaagaaattcaaatagaaaagtaaggcatcctaatttaacattagcagttgcagaccataatgttccaactacagataggacaaagggaatagctgatcaagaatcaaaaatacaagtagacactttagatgcaaattgtaaagaatttggcatccaactttttggaatggatgatagacgacaggggattgtgcatattataggtcctgaacaaggctttactcaacctggaacagttatagtatgtggagatagccacaccgcaactcatggagcttttggagctttagcatttggaattggaacttcagaggttgaacatgttttagcaactcaaacactagttcaaaaaaaagcaaaaaattttaaaatagatgttaatggcaaacttccattaggcgtcacttcaaaagatgtaattcttcaaataattggaaaaattggaactgctggtggtacaggttgtgtaatagagtatgcaggcgatttaattagatcattgagtgttgagcaaagaatgaccatatgcaatatgacaatcgaaggtggtgctagagcaggactcattgcaccagacgaaaagatatttgattacttaaaaggcaaaccaatgtcgcctaagggtgaaaattgggaaaaagccttaaattactggaatagtttaaaaactgacaaagatgcaaattttgataaggaaataaatctaaatgcaactgaaatcttaccaatgataacttggggaacatcaccacaagatgtaatcacaattgatggaaaagttcctaatccacaaagtgaaacagatgaagacaaaaaaaattcaattgaaagatcacttaaatatatgggattaaaacctgatatgtcagcaacagacattaagattgataaagtatttataggaagctgcacgaacggtagaattgaggatttaagggaagcagcgaaaattctaaaagataaaaaaatatcatctcatgttaacgcaatggtggttccaggatcaggactagttaaagagcaagcagagcaagaaggtttagacaagatatttataaattcaggatttgagtggagagaacctggttgttcaatgtgcttagctatgaatgcagataaattaaagccagaagaaagatgtgcctctacttcaaacagaaattttgaaggaagacaaggtaggggtggcagaactcacttagtaagcccaggaatggctgcagcagcagcaatttcaggcaacctagatgatgttagaaagtatcaaaattaaa

SEQ ID NO: 284155 - DNA, 607 bp, Unknown
  Bacterial polypeptide expressing nucleotide sequence isolated from the Sargasso Sea
atgcagaagtttaataaattaaaaagcattcctgcatatctgccgatagttaatatcgatactgacatgattataccaaagcagtttttaaaaactattaaaagaactggtcttggaaaaaacttattttttgagatgagatatgatgatcaaggaaaagagattgatgattttatccttaataaaactccatataataaatctaagattcttatagctggtaaaaattttggatgtggttcatcaagagaacatgcaccttgggccttattagattttggtattacttgtgtgataagttcgagttatgcagatattttttatagcaattgttttaagaatggtattttgcccataattcttaaggaggaaaaaataaaagaactttcagaatatgcgaatagaaaagaggatatatctatcgatttaaatgaggagaaagttatttatggtaataatgagattaaatttgaaatagacccatttaaaaaaaagtgtttacttgagggcttggatgatattgccttatcgttaaaaaaatcagaaaaaattcaaaaatttgaaaacaatttaaaacagcaaaaaccatggatatttgatgattaaa

SEQ ID NO: 284156 - DNA, 598 bp, Unknown
  Bacterial polypeptide expressing nucleotide sequence isolated from the Sargasso Sea
atggaaaagttcacaaaaattaaaagtatacctgcatatattccattaatgaatattgatacagacaaaataattccaaaacaatttttaaaaactatcaaaagatctggtttaggcaaaagtttattttatgaaatgagatttgatgaaaaaggaaatccagtaaaaggttttaccttagatcaaaaaccattcaaaaattctaaaatattgataacaggaaaaaattttggttgcggctcgtctagagaacatgcgccatgggctttactcgactttggtatcaaagttattataagtgagagttttgcagatattttttataataattgttttaaaaatggaatacttccgattgttgcaaaagaagaaattataaaagaattaaaagactactcctctaggaaagaaaatattgaagttaggcttgaagaacaagaaattacctatggtaataaaacttttaaattcaaattagattcttttaaaaagaaatgcttactagaaggtttggacgatatagctttgtctcttaaaaaagtaaaaaatattgaaagttttgagaataaaatgtttcaaaacaaaccttggttgtaat

SEQ ID NO: 284157 - DNA, 1207 bp, Unknown
  Bacterial polypeptide expressing nucleotide sequence isolated from the Sargasso Sea
tatgagcgcgccaaaaactttgtatgataaaatatggtataaccatatcgtttccattaatgatgatggaactacaatactttatattgaccgacatcttgtccacgaggtaactagtccacaagcctttgagggattgcgaatgagcggtagaaaagttagaagacctgaatttactctagctacagcagaccataatgtgcccactatggatagggataaaggcatagcagacccagactcaaaattacaagttgaaacattagagaggaacgctagggaaaacaatattacttacttaccgatgtcagataagcggcaaggtatagttcatattgttggtcccgagcaaggatttactcaacctggaatgacaatagtttgtggagatagtcatacatccactcatggtgcttttggagctttagcgtggggcataggaacatctgaagttgaacatactcttgctactcaaactctgattcaaacaaaagctaaaaatatgtgcattaaaattacaggtgaggttatggatggagtaactgcaaaagacataatattagcaattataaaaaaaataggaactgctggtggaacaggttatgtgattgaatatacaggtgacgtaattagaaatttatcaatggaaggcagaatgacagtttgcaacatgtctattgaggcaggcgcaagagctggtttaatcagtcctgatgagaaaacttgggaatatttaaagggcagaccgcttgctccttctggagttgagtttgaaacagctattaggtattggcaatcgcttgctactgatgaaggcgcacaatatgacgagatcgtagaaataaaagcggatgaaattattccccaagtcacttggggaacaagtccagaagatgttgtctcgatcgatggctatgttcctgatccgaaaaatgcaagtagtgatgaaaaaaagagatctattgaaagagcgcttaactatatgggtcttaaacccaatacgccaattaatgaaattgaagtaaataaagtttttatcggatcttgcacgaatggacgaatagaagatttaagggccgtatctaaaattgcaaaaggtcgcaaagttgaaaaaaatgttcatgcaatgattgttccaggttcaggacttgtgaaagaacaggcagaaaaagaaggcttagataaaatatttatgaagcagggttga

SEQ ID NO: 284158 - DNA, 1400 bp, Unknown
  Bacterial polypeptide expressing nucleotide sequence isolated from the Sargasso Sea
aatgaagactttatacgacaaactctgggaagagcaccatgtcacccaactcgattcgggagagtcacttttatatattgatagacattatttgcatgaggtcacatctcctcaggcattcgagggactaatcaaaaaaaatttaaagccttggaggcttaatgccaatattgctactcctgatcataatgtacctacaacaagaggtaataattttaattctgaatcaataactgatgaaatctctaagattcaagtagttgaattagataaaaattgtaataaatttggtattaaacaatttgatatagagtcaaataaacagggtattgttcatgttataggacctgaactaggttttactatccctggaatgaccattgtttgtggagattcacacacgtctacacatggagcgcttggttgtttagctatgggtataggaacttctgaagttgagcacgttcttgcaacccagtgcctaaaagtttctaaattaaaaaatatgaatgttagatttgaaggagaggtagatgagcatgtttcttcgaaagatattgtcttatatttgattggacaaatcggtactgctggtggaactggttacgccattgaattttcaggatcttatataagtagcatatctgtcgagggaagaatgaccatttgtaacatggctattgaagcaggggctaaggttggattaattgccccagacaataaaactattgagtatgttaaaagtaaatcatttcttgatgatgacacttttaatcatgcaaaagagtattggaaaactctaaagtcagatgatgatgcaaaatttgataaagaaataactatagatgtatcaaaaatcaaaccacaagttacatggggtacttcacctgagatggtattgaattatgatgaatcaattccaacagtatttgataccaaagatgaaaacaagaagaatgttgagttggcaagagactatatgggcattgaaaatgaaacaaaattatctgatttaacattcgataaagttttcattggatcttgtacaaattctagaattgaagatttaagacaagctgctgaaatagttaagggtaaaactattgcatcaaatatttcagaagctattgttgtgcccggatctggccttgttaaagaacaagcagaaaatgaaggattagataaaatttttactgatgcaggttttatttggagagatcctggatgttcaatgtgtctcggaatgaatccagatcaactcaaaccttatgaaagatgtgcatcaacctcaaatagaaactttgaaggaagacaaggatacttaggtaggacccatttgatgagtccaattatggcagcctatacagcaattaatggaactataggagacccttatgaaa

SEQ ID NO: 284159 - DNA, 598 bp, Unknown
  Bacterial polypeptide expressing nucleotide sequence isolated from the Sargasso Sea
aatggaaaaatttactaaaattaaaagcattcctgcttatattccgttaatgaatattgatacggataaaataattcctaaacaatttttaaaaacaattaaaagatcaggtttaggtaaaagtttattttacgagatgagatttgatgaaactggaaatccaataaaaggtttcattttagaccaggaaccattcaataattcaaaaattttaattgtaggaaaaaactttggttgtggctcatccagggaacatgctccttgggctttacttgattttggaattagagtaattgtcagcgaaagttttgcagatattttttataataattgttttaaaaatggaatacttccaattgttgcaaaagaagaaattataaacgaattaaaagcatactcttcaagaaaagaatacattgaagttaagcttaaagagcaagaaattgtttatggaaataaaaatttcaaatttgaactagattcttttaaaaagaaatgcttattagaaggtttagatgatatagctttatctcttgaaaaagctaaaaatattgagaattttgaaaaaaaattagacacagaaaaaccttggatttaa

SEQ ID NO: 284160 - DNA, 1178 bp, Unknown
  Bacterial polypeptide expressing nucleotide sequence isolated from the Sargasso Sea
ccatgagtctaaaatccaagtcgaaactctagaggctaattgtaaagaatttggaattaaactttttggaatgagtgataagagacaaggaattgtccatgtgactggtcctgaacaaggtttcactcaacctggtacagttattgtttgtggtgatagtcatacagcaacacatggtgcgtttggtgcattagcatttggtattgggacttcagaagtagagcatgttttagcaactcaaacattagtacaaaaaaaagctaaaaattttagaataaacgtcaacggcacacttccattgggcgttacatccaaagatgtaatacttcaaataattggaaaaataggcactgcaggtggaacaggttgtgtaatagaatatgcaggcgatctaattagatcactaagtgttgagaacagaatgacaatttgtaatatgacgattgaaggaggtgctagagcaggattaatagctcctgacgaaaaaatatttaaatatttagagggtagaccaatgtctccaaaaggaaaagattgggataaagctttagaaaattggaaaaatctaaatactgatgaaggtgctcagtttgataaggaaataaacttaactgcaaatgaaatctcaccgatgataacttggggaacttcacctcaagacgtaattacaattgatgaaaaagtaccgaacccaaaaaatgaaaaggatgaggataaaaaaaattctttagagagatctttaagttatatgggtttaagaccagatatggcagctaaagatattaagattgataaagtttttattggaagctgtacgaatggcagaatagaggatttaagagaggctgcaaaaattcttaaggataaaaaaatagcctctcatgttcatgcaatggttgtacctgggtccggtttagtaaaagaacaagcagagcaagaaggattggataaaatttttgtaaattcagggtttgaatggagagaaccaggctgttcaatgtgtttagcaatgaatgcagataaattaaaaccagaagagagatgtgcttcaacatcaaatagaaattttgaaggaagacaaggaagaggtggaagaactcacctagttagccctggcatggctgcagcagcagcaatctcaggaaatcttgatgatgtaagaaaatatcaaaattaat

SEQ ID NO: 284161 - DNA, 607 bp, Unknown
  Bacterial polypeptide expressing nucleotide sequence isolated from the Sargasso Sea
atgcaaaaatttagtactttgaagagtataccagcatacctaccaatagtgaatattgatacggatatgattattccaaaacagtttttaaagacaattaaaaggactggactaggtaaaaatttattttttgagatgaggtatgatgacaaaggtaaagaaataaatgactttgttttaaatcaaaaaccatacactaattcaaagattttaattgctggtaaaaattttggatgtggctcatcaagagagcatgcaccttgggcattattagattttggtattactagtgtaataagctcaagttttgcagacattttttataataattgttttaaaaatggaattttaccaattattcttaatgatgaaaaaattaaagaattatcagagtatgcaaaaagaaaagaagaaatttttatagatctaaaggaagaaaaaattatttttgggaataatgaaacaaaatttaaaatagacccattcaaaaaaaaatgtctattagaaggtttggatgatatagcattatctctagaaaaaaatgataagatagaaagttttgaaaaaagtttaaaaattaaaaagccatgggtgtttcatgattaaa

SEQ ID NO: 284162 - DNA, 628 bp, Unknown
  Bacterial polypeptide expressing nucleotide sequence isolated from the Sargasso Sea
atgattgatggaatcgttagttatatcgatagagataatatagatacagatcaaataatcccaacagaatatttaaaatcaataaagaagtttggttatgaagattatttatttgatggttggagatataaagatgatggaaagttaggagttaaaaaagaagaacgagatataaataaagatttcattctcaataacaaaccatttagtgagtctaaaattcttctaacaagagacaactttggatgtggctcttctagagagcatgctgtatgggccttaagagactttggcatcaaagcggttatagcatcctcatttggagatattttttacaataattgttttaagaatggagtcctgccaatctatttagaaaaaaaccaaattgaaaaactttttggtttagtaaaaaaagaagttgttgaattatcaatagacctccaaaaaagaataatttttttaaacaatcaggatgaaattaattttgaggtagatgatcatctaatcgaacgaatcatattcggattagacgatattgatattactttaaaagaaaaagacaagatttctaattttgaaaaaaatagaaaaataacaagaccatggatttatgcaaatgagtaag

SEQ ID NO: 284163 - DNA, 559 bp, Unknown
  Bacterial polypeptide expressing nucleotide sequence isolated from the Sargasso Sea
agatattaaaccaatggtgacttggggaacttcaccccaagatgttgttacaattgatggaaaagttccaaatccaaaaaatgaaactgatccagataaaaaaaattcaatagaaagatcgttaaaatacatgggtttaaattctgatgtttcggtgcaagacattaaaattgataaagttttcattggtagttgtacaaatggtaggattgaagatttaagagaagcagcaaaaatattaaaagataaaaaaattgcaaaacatgttaatgcaatggttgttccaggttcaggattggttaaggaaaaagcagaacaagaaggtttggataaaatttttataaattcaggttttgaatggagagaacctggatgttccatgtgtttagcaatgaatgcagataaattaaaacctggtgaaagatgtgcctctacctcaaatagaaactttgaaggaagacaaggaagagggggaagaacacatttggttagcccaggtatggcagcagcagctgcaatttctggaaatttagatgatgttagaaagtatcaaaattaa

SEQ ID NO: 284164 - DNA, 607 bp, Unknown
  Bacterial polypeptide expressing nucleotide sequence isolated from the Sargasso Sea
aatgcaaaaatttaataaacttacaagtattcctgcatatttaccaatagttaatattgatactgatatgataattcccaaacaatttttaaagacaataaaaagaactggtcttggaaaaaatttgttttttgaaatgaggtatgatgacgaagggaatgagataaaagattttgttttaaatcaaaaaccatttaatcagtctaaaattttaattgcaggaaaaaactttggatgtggctcttccagagaacacgcgccttgggcattgcttgattttggaattacatgtgtaattagctcaagctatgcagacattttttataataattgttttaaaaatggaatactaccaattaaaattgatgaagaagaaataaaacaaatttctgagtattctttaagaaaagaagaaattaaaatagatctaaatgaacaaaaaataatttttggaaataatgaaattaaatttgatttagatcaatttaaaaaaaaatgtttaattgaaggattggatgatattgcattatcattagaaaaatctgaaaaaattgaatcttttgaaaaaaaattaaaaatatctaaaccatggatttttaatgattaa

SEQ ID NO: 284165 - DNA, 931 bp, Unknown
  Bacterial polypeptide expressing nucleotide sequence isolated from the Sargasso Sea
atgcccaatactctttacgataaaatttggaacgatcacctaatagatcaacaggctgatggaacagctttattgtttgttgataggcatttggttcacgaagtaactagcccacaagcttttgaaggtctaagaaattcaaataggaaagttagacatccaaaacttactctagctgttgcagaccacaatgtaccaacaactgatagatcaaaaggaatatctgataaagagtctaaaattcaggtagatacattagaagcaaattgtaaagagtttggtattaaattatttggaatgggtgataagagacagggtatagttcatataatcggacctgagcaaggtttcacacaaccgggaacagtaattgtttgtggagatagccatacagcgacacatggtgcctttgggtctttagcttttggaattggaacatcagaggtagaacatgttttagctacccaaacattagttcaaaaaaaagcaaaaaatttaagaattaatgtagaaggtaaacttccattaggggtaacatcaaaagatgtaattcttcaaataataggaaaaattggaactgctggtggaactggatttgttatagaatatgctggagacttaattagatctttgagtgttgagcaaagaatgactatttgcaacatgactatagaaggtggagctagagcaggactgattgcccctgatgaaaaaatatttaaatatcttgaaggcaaacctatgtcaccaaaaggaaaaaattgggaaaacgctttagaatattggagaaatttaaagtcagatgatggagcaaaattcgataaagaagttaatttaaaagtcggaagaaattttaccaatgataacttgggggacctctccacaagatgtaatcacgatagatggcaagattcccaaccctcaaaatgaa

SEQ ID NO: 284166 - DNA, 304 bp, Unknown
  Bacterial polypeptide expressing nucleotide sequence isolated from the Sargasso Sea
atgcaaaaatttagcacacttaaaagtattccagcatatttaccgattgtcaatattgatactgatatgattattcctaaacaatttcttaaaactattaaaagaactgggttaggtaaaaatttattctttgaaatgagatatgatgataaaggtaaagaaattaatgaatttgttttaaataaaactccatttaataaatcaaaaattttgatagctgggaaaaattttggatgtggctcttcaagggagcatgcaccctgggcattgttagattttggtattacatgtgtgattagctcaa

SEQ ID NO: 284167 - DNA, 430 bp, Unknown
  Bacterial polypeptide expressing nucleotide sequence isolated from the Sargasso Sea
atgggcttaaaacctaatatggctgcaaaagatattaaaatagataaagtttttataggaagctgcactaatggtagaattgaagacctaagagaggctgcgaaaattctgaaagacaaaaaaatagcctcccacgttcatgcgatggttgttcctggatcgggtttagtaaaagagcaagcggagcaggaaggattggacaaaatatttgttaactcaggttttgaatggagggaaccaggttgttcaatgtgcttagcaatgaatgctgacaaattaaaacctgaggaaagatgtgcatctacttcaaatagaaattttgagggaagacaaggtagaggtggaagaacacaccttgttagtccaggaatggccgctgctgcagcaatatctggtagtcttgatgatgtgagaaagtaccaaaattaga

SEQ ID NO: 284168 - DNA, 1408 bp, Unknown
  Bacterial polypeptide expressing nucleotide sequence isolated from the Sargasso Sea
ttatatcagaaaatttaccaaagccatgtagtggctccggtcaatggcagtaccgacttattgtttgtcgaccgccatttaatccatgaagtgaccagccctcaggcttttgccggtttacgtcaggctggccgcactgtgcgccgtccggatttaacttatgccactatggaccataacgtctcgactcagctgcgcagcatagacgccgcgggggaaacttcccgtaaacagttagaagcactggcagccaactgcaaagagtttaatgtgcctttgctggatttactgcatccggatcaaggcatagtgcatgtgataggccctgagctggggttaactcagccgggcatgattattgtctgcggtgattctcacacctccactcatggtgcttttggcgctatcgcctttggtattggcacctcagaagtcgagcatgtgctggccactcaaaccttgcagcagcaagtggcaaaaaccttaaaagtggaagtcactggcaccttatcgccttttgttacccctaaagatgtgattatggcggtgataggccagttaggtacggccggtggtaatggttatgtggctgaattctgcggctcagctattcgtggcatgagcatggaaggccggatgacgctatgcaatatgagcattgaaatgggtgcgaaggccggtttaatagcaccggatgaagtgacctttgcttatctgaaaggcaaacctcatgcaccacaagcagagcattgggatgcagcagtaacctactggcaaagcctgtattcagatgaggatgcggtgtttgataaaacagtgactatcgccgcagaaaacatcaggccgcaagtgacctggggcactaaccctgagcaggtcatcgccgtcgatcaacctattcctgctccagagtccttcagcgatttaattaaggccgatgccgcgcgccgagctttgacctatatgggtattgaagcgggtcagaaattaactgatctgaaagtcgatgtcgtctttattggctcctgcaccaatagccggattgaagatttacgtcaggccgccgctgtagtgcaaggcaaacaagtggcttccggtgtccgagctttaatagtgccaggttcaggtcaggtcaaacgtcaggccgaagccgaaggcttagccgatatctttaaagcctctggttttgagtggcgtgagccaggctgctctatgtgtttaggtatgaacgacgatcgtgttgaagcaggccaacgttgtgcttccacttcaaaccgtaactttgaaggccgtcagggtcgcggcagccgtacgcatttagtcagccctgctatggccgcagccgctgctattgcaggtcgttttgttgatatttcatctgtagagcgcacagcaggagcgaactaat

SEQ ID NO: 284169 - DNA, 475 bp, Unknown
  Bacterial polypeptide expressing nucleotide sequence isolated from the Sargasso Sea
aatgagccagatttttgcacaagggctggtttgccctttagataaaaacaatgtcgataccgaccaaatcattccaaaacagtttttgacgtcagtcagccgcgacggttttgcagaggccttgttttatgactggcgttatctggcgaatgaacaacccaacccggattttgtattaaacgcccctcactacaaaggtgcttcgattctgctgacccgcgctaactttggctgtggttccagccgtgaacatgcgccctgggctatccagcagtatggttttaatgtgatcattgccgaaagttttgctgatattttctttaataacagtattaacaacggcatgttattgattagcctgagtgcatccaatatcgagtttttattcagtcgctgccagcaaggcacacaggaatggaaaattgatttagcgggccagcaaattattctgggcaataacgcagcagtaggtttt

SEQ ID NO: 284170 - DNA, 367 bp, Unknown
  Bacterial polypeptide expressing nucleotide sequence isolated from the Sargasso Sea
tcttgtactaattctaggatagaggacttgagatcagcagctagaattattgaaggtaaaaaagtaaaacaaggcataagagctatggttgttcctggatcaggattagttaaagcccaagctgaagaagaaggtcttaacttaatgtttacagaagcaggttttgaatggagagagcctggttgttcaatgtgtttagcgatgaatgaagataaattacagcctggagaaagatgcgctagtacttcaaatagaaattttgaaggtagacaaggaaaaggtggaagaactcatttggtaagtccacagatagccgctgcttctgcaataactggaaaattaacagactgtgattcattaagctaat

SEQ ID NO: 284171 - DNA, 948 bp, Unknown
  Bacterial polypeptide expressing nucleotide sequence isolated from the Sargasso Sea
catcagaagtagaacatgtattagctacacaatgtctaaagacttccaaattaagaaacatgaaagtagtaattgacggtgaactgtctcctggtgttacacccaaggatgttactttagctgtaataggaaaaataggaacagctggtggtacgggctttgccattgaatattctggatctgtcatagaagcaatgagcattgaaggtaggatgactgtatgcaatatgtctattgaagcaggagcaagagtgggcttagtcgccttcgacaatattactgaagaatatgtaaaaaatagaccatttactcctaaaggaagtgagtggaaattagctttatctcaatggaaggatttaaaaagtgatgatgatgcacatttcgaagagattattcacatagacggatcaacccttaaacctcaggtcacttggggcacttctccagagatggttatagatattgatggaaaggttcctgaagccaattcagagtctatacagcatgccttggaatatatgaacttagaagctggaatgaaaatttctgatattaaattggatcaaatttttataggctcatgtacgaattctaggattgaagacctaagaatggctgcaaaagttgttgaaggaaagaaaatttcatctgagattaagagagctattgttgtaccaggatcaggcttggtggctgaacaagctgctgaagaaggtttagataaaatttttatagagtctggtttcgagtggagagcacctggatgctcaatgtgtctagcaatgaatcctgatcatcttggagaaggagaacattgtgcttcaacttcaaaccggaattttgaaggaagacaaggatatggtggaagaacccatttagtaagtcctgctacagcagcggcttcagctatagagggaaagtttgttgatgtaagggagttgttctaat

SEQ ID NO: 284172 - DNA, 646 bp, Unknown
  Bacterial polypeptide expressing nucleotide sequence isolated from the Sargasso Sea
atgaaaaatcaatacattttccattctggaaagactcttcctttatctagggataatgtagatacagaccagattattcctaagcagttcttgaaatccattaagaaaagtggttttggacctaatttattcgatgcttggagatatgaagatgaagggtatcttggccaagataatgacaatagacctaaaaatgatagttttgttcttaatcaagaaaaatatcaaggagctgatatattaattagtaaaaagaattttggatgcggttcgagtagagaacatgcggtttggtctctaattgactacggttttaaagttgtgattgctgagagtttcgctgatatcttttacaacaactgctttaataatggtttattaccaatccaacttcctgaagaagtaattttaggattaatagctctttcagaggaaagtaaagagattgaaattgatttaattgaacaaataatttcatgtgaaggtaatgaattaactagttttgatattgatccatttagaaagcaatgtatcttagaaggtttggacgagataggacttagtttaaaacatgctgatgcaattaaagaatacgaactaaaaagagctaaagagtctccttggatctttaatacttatgagtaag

SEQ ID NO: 284173 - DNA, 901 bp, Unknown
  Bacterial polypeptide expressing nucleotide sequence isolated from the Sargasso Sea
aatgtccacaactctttacgataaaatatggaatgatcacttagttgatcaacaagatgatggaacagcccttcttttcgttgatagacatttagttcatgaggtgacaagcccacaagcatttgaaggattaagaaattcaaataggaaagtaagacaccctgatttaacactagcagttgcagatcataatgttccaactacggataggactaaaggaatagctgatcaagaatctaaaatacaagtagatactctagatgcaaattgtaaagaatttggtgtccaaatttttggaatggatgacagaagacaaggtattgtacacatcataggtcctgaacaaggctttactcaaccaggtactgttattgtatgtggagatagtcatacagcaacacatggagcctttggagccttagcatttggaatcggaacatcagaagttgaacacgttttagcaacacaaacactagttcagaagaaagcaaaaaattttagaataaatgttaatggtaaacttccgttaggtgtcacttcaaaagatgtaattcttcagataattggaaaaattggtacagccggtggaacaggttgtgtaattgaatatgcaggagatttaataagatcattgagcgttgagcaaagaatgacgatctgcaacatgacaattgaaggtggagcaagagcaggattgattgcaccagatgaaaaaatatttgaatatttaaaaggtaaacctatgtcacctaagggtgaaaattgggaaaaagctttgaattattggaatggtctaaagactgacagcgaggcaaattttgataaggaaataaatttaaatgcatcagaaattttgccaatgataacatggggaacttctccaccaagatgttattacaat

SEQ ID NO: 284174 - DNA, 1411 bp, Unknown
  Bacterial polypeptide expressing nucleotide sequence isolated from the Sargasso Sea
gttgagtaactctggaaaaacactatttgaaaaggtctggaacgatcatttggttcttcaggagactgaagagacaccagcaatactctatattgaccttcacctcattcatgaagttacaacgcctcaagcatttcagtccctgagagatcaaggtttgtctgtaagggatccaaacaaagttttggcaacaatggatcattccactccgactctgccagtcaaaagtttaagagatctcgacatagttgctgaaaaagggcctgccgatcaaatcagagacatgataagaaattgtgaagaatttggaattgagcttcatggttttgactcagataaaagaggaatagttcatgtgattggaccagagttaggtgctactcaaccaggaaaaacgattgtttgtggcgatagccatacaagcacacacggtgcgtttggtgcacttgcatttggcataggaacaacagaggttggtcacgtcttggcatcacaatgtattctgcagagaaaaccaaggacattagcagtcaatatgaatggtgctctcaaatcgggggtatctgcaaaagacatcatattaagaatcattcaaaagcttggagttgatggtggcgttggacatgtcattgagtacagaggatcaacagcgagcattctctcactggaagagagaatgaccatatgcaacatgagcattgaagcaggtgcaagagctggaatgtttgcacctgatgacaaaacttttaattacttaattgataaaccaatgtcacctaaaggattagcttgggatcaggcagttgaaaaatggtcaacattggtaagcgatgacaattgtgaattcgataaggaagtagatattgatgttgatcatttatctccaatgattacatatggaaccaatcctggaatggctattcagattgatgacattgtcccagaatcaaattccgatcttggctataaaaaatcactgaactacatgcagattgaagctggcagacctctccttggaaaagaaatcgatgttgtttttatagggagttgtacgaattcaagaatatctgatttagaagatgcagccgagatacttcaaggtcaaaaagtggcaaatggtataagggcattgattgtgccaggatctcaagcagttaagaaagaagcagaaagccttggacttgataaaatttttgaatctgcgggcgccgaatggcgagaatccgggtgttcaatgtgtttaggaatgaatggggatactgtcggaaatggacaacttgctgtcagcaccagcaatcgaaactttgagggccgacaagggaaaggagcaaggacgatcttggcaagtcctaaaactgctgctgcatctgcaattgctggctctgttgaggatcctagaaaatatagttaa

SEQ ID NO: 284175 - DNA, 311 bp, Unknown
  Bacterial polypeptide expressing nucleotide sequence isolated from the Sargasso Sea
gatgaaaaatcctaatcctaaaactctttttgataaaatttggcatcaacaccttgttaaccaacaagaagatggaacatgccttatatatatagatcgtcatctagttcatgaagtaacaagcccacaagcatttgagggtttaagagataacaatagaaaggttcatcgtccagaaagcacatttgctgttgctgatcataacgtgccaacatctgataggtctaaaggaatcgataacgaagaaagtagaattcaagtagaaacacttgaaaataattgtaaagaatttggtgtaacaatatttcctc

SEQ ID NO: 284176 - DNA, 1396 bp, Unknown
  Bacterial polypeptide expressing nucleotide sequence isolated from the Sargasso Sea
tatggcaaaaactctgtatgataaattatgggatcttcatgaagttggtcaaagagaagatggtacttcattgttatatattgataggcatttaattcacgaagtcacatcacctcaagcttttgaagggttaaagttagcaggaagagagccttggaggatttcagctaatatcgctacaccagatcacaatgttcctacaacaaatagaaaagaaggaatagagggcattgaagatgaggtggcaaggctgcaggtagttactttggatgagaattgtaaagacaacaagatacttcaatttgatattcatgatagacgccagggtattgtgcatgttgttggacctgaacaaggcctaactttgccaggtatgactatagtttgcggggattctcatacttcaacgcatggcgctttagctactttatctatgggtattggtacatctgaagttgagcatgttttagcaactcagtgtttaaaaacctctaagctaaaaaatatgagaattaaaatctctggggaattacaaagcggcgtatcccctaaagatgtaacacttgcagttataggaaaaattggcactgcaggaggcactggttacgcaattgaatatgctggatctgttatagaaaacatgtctatagaaggtcgaatgacagtgtgcaatatggcaattgaggcaggagcacgagctggtttagtggcttacgattccgtcacagaagaatatgtaaaagatcgaccttttgctccatctggagatctctggacagacgctgtgtgccaatggaaaaagcttgtaagtgataaagatgcaaagtttgatagggagatagaaatcgatggctctttgatagcgcctcaagttacttggggaacttcacctgaaatggtcagcgatatagacggattgattcctcatcctgaaaatgaatcaattgaacatgctcttgattatatgaatttagaaccaggtaaaaagattacggatatacagcttgatcaagtttttataggctcgtgcacaaattcgcgcatcgaggatctcagagaagcggcaaaaattttgaaaggaaaaaaaatctcatcatccatcaaaagagccatagtggtacctggatccgggcttgtttcaaagcaagcagtcgacgaaggtttagatacgatctttatggatgcaggctttgagtggagagctcccggttgttctatgtgcttagctatgaaccctgatcaactcggcgaaggtgagcattgtgcttctacttcaaatagaaattttgaaggaaggcaaggctatggtggtagaactcatctggtttcaccgtcaactgcagcagcatctgccgtcgaaggccgttttgttgatattagggagtttatgtcatga

SEQ ID NO: 284177 - DNA, 655 bp, Unknown
  Bacterial polypeptide expressing nucleotide sequence isolated from the Sargasso Sea
catgaaaaatacttctgtttttcataagggactcggtgttcctcttgatagggacaacatagatactgatcaaatcattcctaagcaatttctgaaatcaataaaaaagagcggatttggaccaaaccttttcgatgcttggagatataacgatgaagggtatcctggtcaagactctgaaatgagagtagttaacgaaaactttattttgaataatgagaaatttaagagctccgatattctaattacaaaaaagaactttggttgcggatcaagtagagaacatgcagtctggtctttaatggattatggtttcaaagctgtcattgcggagagctttgcagatatctttctcaataattgttttaataatggccttcttcctatagccctaactcaatcagagattgaaatactcatggaattggccgaacaaggtaaagaaatagagattgatcttgaaaatcagataattttttcagacgaaacacaaatagccacttttgaaatagatccatttcaaaaaaaatgtattttagagggtttagacgaaataggcttaagccttactcactcccatcaaataaaagagtttgaaaagcgaagaatgagtgaatctccttggatctttaatagtattgataccaatgactga

SEQ ID NO: 284178 - DNA, 1030 bp, Unknown
  Bacterial polypeptide expressing nucleotide sequence isolated from the Sargasso Sea
ttgtggagatagtcacacagctacacacggagcgtttggtgctttagcatttggaataggaacttcagaggttgagcacgtgttagctactcaaacactagtccaaaaaaaggctaataattttaggattaatgtaaatggtaaacttcctttaggtgttacttctaaagatgtaatacttcaaataattggaaaaattggtactgctggtggaacaggatgtgttgtagaatacgctggagatttaattagatctttaacagtcgagcaaagaatgacaatctgtaatatgacaattgaaggtggcgcaagagcaggattaattgcacctgatgaaaaaatttttgaatatttaaaagggaaaccaatgtctccaaaagatgaaaattgggagaaagctgtaaattattggcaaactttaaaaacagatactgatgcaagttttgataaagaaattagtttaaatgcagatgaaattttacctatgattacatggggcacatcacctcaagatgtaattacaattgatggaaaagttcctaatcctgacaatgaatcggatcaggataaaaagaactcaattgaaagagcacttaactatatgggtttaaagcctgacatggcagctacagatataaaaatagataaggtatttattggtagttgtactaatggcagaattgaagatttaagagaagcagcaaaaattttaaaggataaaaaaatttcctcacatgtaaatgctatcgtggttccaggctctggtttagtaaaagagcaagcagaacaagaaggattagataaaatttttgttagctcaggcttcgaatggagagaacccggttgttctatgtgtttagcgatgaatgccgataaattaaaacctgaagaaagatgtgcttctacatcaaacagaaattttgaaggcagacaaggacgaggtggaagaacacatttagttagtcctgggatggcagctgctgccgctatatcaggcaatcttgatgatgtaagaaagtatgaaaattaa

SEQ ID NO: 284179 - DNA, 607 bp, Unknown
  Bacterial polypeptide expressing nucleotide sequence isolated from the Sargasso Sea
aatgcaaaaatttaataaattaaagagtattccggcttatcttccaatagttaatattgatacggatatgataattccaaaacaatttttaaaaacaataaaaagaacaggacttggaaaaaatttgttttttgaaatgcgatatgacgaccaaggaaaagaaatcaacgattttgtattaaacaatgatccttataaacagtcaaaaattttaattgcaggaaaaaattttggatgtggatcatcaagagaacatgctccttgggcactgttagattttggtattacttgtgtaataagctcaagttatgcagatattttttatagcaattgttttaaaaatgggattttacctataatccttgaagaagaaaaaataaaagagctgtctgattatgcaaatagaaaagaagaaatccatattgatttaaatgaagaaaaaatagtttatggaaacaatgagctaaagtttgagattgatccgtttaaaaaaaagtgcttgcttgaaggactggatgatattgctttatcattaaagaaatcagaaataatagaaaaatttgaaaataatctaaaaaacgaaaaaccttgggtgtttaatgattaa

SEQ ID NO: 284180 - DNA, 607 bp, Unknown
  Bacterial polypeptide expressing nucleotide sequence isolated from the Sargasso Sea
atgcaaaagtttagtacattaaaaagtatccctgcatacttatcaacagcaaatgttgataccgatatgatcattccaaagcaatttttaaaaacaattaaaagaacaggtcttggaaaaaatttattttttgagatgagatatgatgataaaggagctgaattaagtgactttgtattaaataaaaatccatataataattctaaaatattaataacaggaaaaaactttggttgtggctcttctcgagagcacgcaccgtgggctttattagattttggaataacttgtgtaataagttcaagctttgcagatatttttcacaataactgttttaagaatggcattttgccaataacgcttgatgaagaaaaaattaaagaattatctgaatatgctaatagaaaagaagaaatttctgtagatctagttgaggaaaaagttttttttggaaataacgagattaaatttgtagtcgatcaattcaagaaaaaatgcttactagagggtctagatgaaatagctttatctcttaagaagtcaaataaaattgaaagttttgaaaataatttaaaatctaaaaggccctgggtttttaatgattaag

SEQ ID NO: 284181 - DNA, 429 bp, Unknown
  Bacterial polypeptide expressing nucleotide sequence isolated from the Sargasso Sea
tgggtctaaaacctgatatggctgctacagacatcaagattgataaagttttcattggaagttgcacaaatggaagaattgaagatttaagagaagcagctaaaattttaaaagataaaaaaatttctacacacgttgaggcgatggtagttcctgggtcaggtcttgttaaagaacaggcagagcaagagggactagataaaatttttattcaatcaggatttgattggagagaacctggatgttctatgtgtttggccatgaatgctgataaacttaaaccagaagagagatgtgcctctacatcaaatagaaattttgaaggaagacaaggaagaggtggtagaacacatttagtaagtcctggtatggctgccgctgcagcaatttctggtaaccttgaagacgtaagaaagtttcaagattaat

SEQ ID NO: 284182 - DNA, 475 bp, Unknown
  Bacterial polypeptide expressing nucleotide sequence isolated from the Sargasso Sea
gcgtaagaaagaagaaagaattataaataaagaatttatccttaataatgaaccttttaataaatctaaaatacttttatctagagataattttggttgtggttcttcaagagaacatgcggtatgggcattaagagattttggaataaaagccgttatagcatcttcctttggagatattttctataataattgttttaaaaatagcgttttgccaattaaattagaaaaaaattatatagagatgatgtttaacgaaactaaagatgatcttcttgagatttcaatcgatatacaaaagaaagaaattaaccttaagcaaaaaattattaaatttgaagtcgatgactttttaattgatagaattatttatggtcttgatgatgtagacgtaactcttaaagaaaagaataaaattatgaatttcgaaaaagaaagaatcaaaaataagccttggatttttgctaatgactaa

SEQ ID NO: 284183 - DNA, 406 bp, Unknown
  Bacterial polypeptide expressing nucleotide sequence isolated from the Sargasso Sea
atgtcacaaacaatttacgataaaatttggaatgatcatctggttcatgaacaaaaagatggaacttccttgctttttgtggatagacatttgatccatgaagttacaagcccacaagcttttgagggattaagaacttcaaaaaggaaagttagacaaccaaaattaacacttgctgttgctgatcataatgttcctacaactgatagatcgaaaggaatatcagatgaagactctagaatacaagtagaaactttagataaaaattgtaaagagtttggaattcaattatttggtatggatgacaaaaggcaaggcattgttcatataattggtccagaacaaggatttactcaacccggaaatataattgtttgtggagatagtcataccgctacacatggtg

SEQ ID NO: 284184 - DNA, 610 bp, Unknown
  Bacterial polypeptide expressing nucleotide sequence isolated from the Sargasso Sea
tatggaaaagtttaataatttaagatcaataccatcatatttatcactacaaaatattgatacagatatgattatcccaaagcaatttttaaaaaccatcaaaagaacaggtttaggaaaaagtttattttatgaaatgcgttatgatgaaaatggaaaaaggaatgaggatttcattctaaatagggaaccttacgacaaatcaaaaattcttttagcaggaaaaaattttggatgcggatcatcaagagaacacgctccatgggctttatctgattttggtataaagtgtgtaataagtgcgagttttgcagatattttttacaataattgttttaaaaacggaattcttccaattaagattgatgataaaatcgttattgaactagccgaatactctaacaggaaagaggaaattgaaattagtttagagaagcaagaaataaaatatggaaacaaagttgcaaattttgagctggatccctttaaaaagaaatgtttgatggaaggtctagatgatatagcactttcaatggaaaaaatttccagcatagacgactacgaaaaaaaactacaatccacaaaaccttgggttctaaataatggctaa

SEQ ID NO: 284185 - DNA, 607 bp, Unknown
  Bacterial polypeptide expressing nucleotide sequence isolated from the Sargasso Sea
atgcaaaaatttaataaattaaaaagtatcccagcttatttaccaattgtaaatattgatacagatatgataattccaaaacagtttttaaaaactatcaaaagaactggtcttggaaaaaatttgttttttgaaatgagatatgatgatcaaggcaaagaaataaatgattttgtgttaaacaaagatccatttaatcaatctaaaattttaattgctggaaaaaactttggatgtggttcatcaagagaacatgctccttgggctttattagattttggaattacttgtgtaattagttcaagttatgcagatattttttttagtaattgttttaaaaatggaattttgcctataatccttgaagaagaaaaaataaaagagctatctgagtatgcaaatagacaagaagaaatttctattgatttgaaagaggaaaaaatagtttatggaaataatgaactaaaatttgaagttgatccgtttaagaaaaaatgtttgttagaagggcttgatgatattgctttatcactaaaaaaatcagaaaaaatagagaagtttgaaacaaatttaaaaaacgaaaagccttgggtgtttaatgattaaa

SEQ ID NO: 284186 - DNA, 607 bp, Unknown
  Bacterial polypeptide expressing nucleotide sequence isolated from the Sargasso Sea
gatgcaaaaatttaattcattgaaaagtatccctgcttatttgccaatcgttaatattgatacagatatgataatcccaaaacaatttttaaaaactattaaaagaaccggtttaggcaagaacttgttttttgagatgagatatgatgacaatggaaatgaaattaaagattttgttttaaatcaaaaaccttttagtaaatcaaaaattttaatagcaggtaagaactttgggtgtggttcctcaagggaacatgctccatgggcgttactagattttgggattacctgcgttattagttcaagtttcgctgatatattttacagcaattgctttaaaaacggaattttacctattattcttgatgacgaaaaaattaaagagctttcagaatatgcaaacagaaaagaagaaatttcaatagatttaagcgaagaaaagattatttatggaaacagtgaagttaatttcaaaatagactcatttaaaaagaaatgtttattagagggattagatgacatagctttatctttaaaaaaatcagataagattcaaacttttgaaaatgatttaaaaggtagaaagccctggatttttaatgattaa

SEQ ID NO: 284187 - DNA, 400 bp, Unknown
  Bacterial polypeptide expressing nucleotide sequence isolated from the Sargasso Sea
tttgcttacaagagataattttggatgcggctcaagtagagagcatgcagtttgggctctcagagacttcggtattgaagttgttatagcaagctcatttggcgatattttttataataattgtttcaaaaatggtgttttaccattaaagctcaaaaaaactgaaattgaagaactattttcattgtctacagataatccagtaactatttcagtaaatataaaagataaagttatactttttaaagataagctctctatttattttgatcttgatgataatttggctgaaagaatcatttatggccttgatgagatcgatattactcttaaagattcaaaactaattaagaaatttgaagaacatagaaaagaaaataacccatggattttcgaatga

SEQ ID NO: 284188 - DNA, 604 bp, Unknown
  Bacterial polypeptide expressing nucleotide sequence isolated from the Sargasso Sea
atgcaaccatttgtaactttaaatagtattgctgccccattaccaatgattaatgtagatacagatatgataataccaaaacaatttttaaaaactattaagagatcaggtttaggtaaaaatttatttcatgagttaaggtatgatatgcaaggcaatgtaaaaaatgattttgttttaaattgggatccatataaaaactcaaaaattttaattgcaggtgctaattttggatgtggatcaagtagagaacatgcaccttggtcacttttagattttggttttcgatcaattgttgcaccaagttttgctgatatattttataataattgtttcaaaaatgggattttgccaattaaacttgatcaagtaaaagttgatctactaatgaaagaggcagaagaaaaaaaagaaatatcagttaatttagataaacaaattatagtttttcaaaatgacaaaactatagactttgaaattgatgaatttcgaaaaaaatgtttaattgagggcttagacgatattggacttactctacaaaagaacaataaaatagatatccacgaagaaaaaattcatactatccaaccttggatagtctaat

SEQ ID NO: 284189 - DNA, 1005 bp, Unknown
  Bacterial polypeptide expressing nucleotide sequence isolated from the Sargasso Sea
attgagtaaagataccttatttgataaagtttgggatttacacaaagtttccagtcttcctggtggctctgatcaagtttttattggtcttcatctcatccatgaggtaacaagtccacaagcatttggtgctttaaaagataaaaatttaaaagtaaaattccccaatagaactgtcgctacagttgatcatattgtgccgacagataatcaaagcaggcctttcaaagataatcttgcagagcaaatgattgaaacactagaaaaaaactgcttaaaacataaaataagattttttaatattggtagtggaaatcaaggaatagtgcatgtagtagctccagaattgggtcttactcagcctggaatgacaatagcttgtggagattctcatacttcaactcatggagcttttgggtcaattgcttttgggataggtacaagtcaagtaagagatgttcttgccactcaaaccatagcaatgaataaattgaaggtacggcagatttggtgtgaaaataaattatctcatggtgtttatgcaaaagatttagtactgcatattattaacaaacttggagttaaggcaggagtaggttttgcgtatgaattcgcagggcctgcgatcaatgaattatcaatggaagaaaggatgactatatgcaacatgtctatagaaggaggagcgagatgcggttacataaaccctgatgaaaagacttttagttacattaaaaataaattatgtgctcccaaaaatgaggattgggataaagcactcttatggtggaaatcattaaaaagcgatgagaattctaattttgatgatttaattaaattagatgcttcagaagtagaaccaaccgtaacttggggaataactcccggtcaaagtgtaggaataaatcaacaaattcctgtttttagaaaattatctccaaatgaccaatttgttgcccaagaggcttatgaatatatgggaatcaagcctgggcaatcaattaa

SEQ ID NO: 284190 - DNA, 376 bp, Unknown
  Bacterial polypeptide expressing nucleotide sequence isolated from the Sargasso Sea
tttataggatcttgtacgaatggtaggattgaggacttgcgtgctgcatctgaaatcctaaagggcaagaaagttaaggacggtatgcgtgcaatggttgtaccaggttctggactggtccgaatgcaagcggaagaagaggggatcgcggaaatatttcgcgaggctggttttgagtggaggctggcgggatgttcaatgtgtctggctatgaatccagatcagctggctgaaggagagcgttgtgcatcaacttccaatcgcaactttgaggggcgccagggttatcgtggaagaacacacttggtctctcccgcgatggcggcagcagcggcaattactgggaagcttaccgatgtgagggagatccattaat

SEQ ID NO: 284191 - DNA, 1056 bp, Unknown
  Bacterial polypeptide expressing nucleotide sequence isolated from the Sargasso Sea
aattcatgaagttactagtccacaagcatttgaaggtttaagaaattctaatagaaaagttagacaaccttctttaactttagcagtagcagatcacaatgttccaacaacggatagatcagtgcctattactgacaaagattcaaaaatacaaatcgagacactagaaaaaaactgtgcagaattcggaataaatctttttggaatgaacgataaaagacaaggaatagttcatattattggtccagaacagggatttacacaaccaggaacgattatcgtttgtggtgatagtcacactgctactcacggagcatttggtgcattagcattcggaattggaacttcggaagtggaacatgtcttggcaacacagactttagttcaaaaaaaatcaaaaaattttagaataaacgttaatggatctcttcctgttggagtaacatctaaggatgtaatattacaaataatcggaaaaattggtacagctggtggaactggttatgtaattgaatatgctggaaacttaatttcgaatttaagtgtcgaacaaagaatgacgatttgcaatatgacaattgaaggtggagcaagggctggattaatagagccagatgaaaaagtttttaattatttaaaaggtaaaccaatgtctccaaagaattcaaattgggacaaagcattagaatattggagtaaattaaagtctgatggtgatgcagtatttgacaaagaaatcagtcttgagggcaaagatattaaaccaatggtaacttggggaacttcgcctcaggatgtagtagatattgatggaattgtccctgatcctgaaaatgagcaaaacgaagacagaaaaaattctattaacaggtcattaaaatatatgggtttaaagccgaaaactaaaataaaagatattagaattgataaagtttttataggaagttgcacaaatggaagaattgaagatttaagagaagctgcaaaaatcttaaaagataaaaaaattgcttctcatgtaaatgcaatgatagttcctggttcaggattagtaaa

SEQ ID NO: 284192 - DNA, 472 bp, Unknown
  Bacterial polypeptide expressing nucleotide sequence isolated from the Sargasso Sea
aatgcgctttaacgaagacggatcagaaaaaccggattttgtgctaaataaggcggcctaccggggctccaatattatcgtagctggcgataactttggatgtgggtcttcgcgagaacatgcaccttgggcgcttttagactttgggataaagtgtgttatttccacaagctttgcggatattttttataacaactgtttcaagaacggcattctgcctattgttgtgaataaacagcaactagaacagttaatggacgatgcagaaaatggcgccaatgcagtgttggatatagatctagaggcgcaagaaattactcgaccaaatggagagagtgttacttttgaaattgatgagtttagaaagcactgtctaataaatggtttagatgatatcggtctcacaatggagaaagaaaaaaatatagatagttttgaaaagaaaagagctacggaacaaccatgggcctga

SEQ ID NO: 284193 - DNA, 1405 bp, Unknown
  Bacterial polypeptide expressing nucleotide sequence isolated from the Sargasso Sea
atgcctaatactctttacgacaaaatttggaaagaacacttagttgatcagcaagatgatggtacagctttattatttgttgataggcatctcgttcatgaagtgaccagtccacaagcatttgaaggtttacgaaattctaaaagaaaagtaagacacccaaagcttacattggccgttgcagatcacaacgtcccaactactgatagaaccaatggtatttcagataaagaatctaaaattcaagttgatacattagaaaagaattgtaaggaatttgatatccaactctttggaatggaggataagcgtcaaggcatagttcatataattggtcctgaacaaggatttactcaacctggaacagttatagtttgtggagatagtcatacagctacacatggagcgtttggtgctttagcatttggtataggcacctcagaggttgaacacgtgctagcaacacaaactttagtgcaaaaaaaagcaaaaaatttcagaattaatgttaatggaaaacttccgttaggtgttacttcaaaagatgtaattttacaaataattggaaaaataggaacagcaggtggaacaggatgtgttattgagtatgctggtgatttaatcagatcattgagtgttgagcaaagaatgactatatgcaacatgactatagagggtggagcaagagcaggtttgattgcaccagacgaaaaaattttcaagtatttggagggaaaacctatgtcacccaaaggtgaaaaatgggataaagctttagcgtactggagaagtttaaaatctgatgatggtgcaaattttgataaagaaataagtcttcaagctaatgaaatttcaccgatgattacctggggaacttcacctcaagatgtcattactattgaggataaagtaccaaacccagacaatgaaaaggatgaggatagaaaaaattctattgaaagagctctaaaatatatgggtttaaaacctgatatggctgctaaagatattaagatagataaggtttttataggtagttgcacaaatggaagaattgaggatttacgagaagcagcaaagattttaaaagataaaaaaattgcctctcatgttcatgcaatggttgttccaggatctggtttagtgaaagaacaagcagaacaagaaggtttaaataaaatatttgaagagtctggttttgaatggagagaaccaggatgttctatgtgtttagcaatgaatgctgataaattaaaaccagagcaaagatgtgcatcaacatcaaacagaaactttgaaggaagacaaggtcgaggtggaagaacacaccttgtgagcccaggaatggcagcggcagcagcaatttctgggaatttggatgatgtaagaaagtatcaaaattaat

SEQ ID NO: 284194 - DNA, 1405 bp, Unknown
  Bacterial polypeptide expressing nucleotide sequence isolated from the Sargasso Sea
aatgcctcaaacactttacgataaaatttggaatgaacacttagttcatcaacaggaagatggaactgctttactatttgttgatagacatttagttcatgaagtaacaagtccccaagcttttgagggtcttagaaattcaaatagaaaagtaagacaaccaaaccttaccttagctgttgcagaccacaatgttccaaccactgatagaagtaagggaatagatgataaagagtctaaattacaagtagataccttagaaactaattgtaaagagtttggtattcaactttttggaatgagtgataagcgacaagggattgttcatataattggtccagaacaaggtttcactcaacctggaacagtaattgtgtgtggggacagccatactgcaacgcatggtgcttttggagccttggcttttggtattggaacatctgaggtcgaacatgtattggcaacacaaacattagtacaaaaaaaagcaaaaaattttagaattaatgtaagtggcaaacttcctataggagtaacatccaaagatgtcattttgcagattattggaaaaattggtactgcaggtggtacaggatgcgttattgaatattcaggaagcttaatatcttctctaagcgttgaacaaagaatgaccatttgcaatatgaccattgaaggtggtgcaagagcaggacttatagaaccagaccaaaaaatttttgattacttaaaaaataaacctatgtctccaaaaaaagaaaattggagcaaagcattagataattggaaaaatttaaaatcagatagcggagcaaattttgataaagaattaaatttagaagcccacgaaattatgccaatggttacatggggaacttctcctcaggatgtaattactattgatggaaaggttcctaatccaaacgatgaaaaagatttagataaaaaaaattcaattgagagatcattaaaatatatgggtttaaaaccaaatacagccgcaaaagacattaaaattgataaagtttttattggcagttgtacaaatggaagaattgaggatttaagagaggctgcaaaaatattaaaaaataaaaaaaaagcatcccatgttgaagcaatggtggtcccaggatctggcttagttaaacagcaagcagaacaagagggattagataaaatttttattaactcaggatttgaatggagagagcctgggtgttcaatgtgtcttgctatgaatgctgacaaattgaagccagaagaaagatgcgcgtctacttcaaatagaaattttgagggaagacaaggaagaggtggaagaacacatttagtaagcccaggtatggccgcagctgctgctatttctgggagtctcgatgatgttagaaagtatcaaagttaa

SEQ ID NO: 284195 - DNA, 607 bp, Unknown
  Bacterial polypeptide expressing nucleotide sequence isolated from the Sargasso Sea
aatgcaaaaatttacttttataaaaggtattccatcatatttacctatagtaaatattgatacagatatgattattcccaagcaatttttaaaaactataaaaagaacagggttaggaaaaaatttattttttgaattaagatatgatgacaaaggaaatgaaattaaagattttattcttaataataaaccacataataattcaaaaatattaattacaggtaaaaattttggttgtggatcatcgagagaacatgctccttgggcattgctagattttggaataacttgtgttatcagttcaagttatgctgatattttttacaataattgttttaaaaatggaattttaccaattattttaaaagaagacaaaataaaagaactatcagagtattctaataggaaagaagaaatatcaatcgatttaaaagaacaaaaaattatttatggtaataacgaaattcaatttgatatagatcaatttaaaaaaaaatgtttattagagggacttgatgatattgctctatctttagaaaaatcagacaaaataacgttgtttgaaaaaaatttaaaaaatacaaaaccttggatatttaatgattaa

SEQ ID NO: 284196 - DNA, 517 bp, Unknown
  Bacterial polypeptide expressing nucleotide sequence isolated from the Sargasso Sea
tttttaaaaaccataaaaagatcaggtttaggtaagaatttattctacgaaatgagatttgacgagaaaggaaagccaatttcaggatttattttggataacgatccttacaataagtctaaaatcttaataactggaaaaaattttggatgcggatcctcgagagagcatgctccgtgggcattattagattttggtattagagtaattatcagtgaaagttttgctgatattttttataataattgtttcaaaaatggtattttaccaatagttgcaaatcaaaatattataaatgaattatcagaatattcttccagaaaagagaatattgaggtcaagttaactgaacaagaaattctatatggaaataaatcttttaagtttgaattagatccattcaaaaaaaaatgtttactagaaggattagatgatattgcattatctcttaataaagctgagagcatcaaaagttttgaaaacaaaatgactcaagataaaccttggatattataaa

SEQ ID NO: 284197 - DNA, 1267 bp, Unknown
  Bacterial polypeptide expressing nucleotide sequence isolated from the Sargasso Sea
aatggcgggcagaaatgttcgacatcctgataaaactctagctgtcgccgatcataatgttcctacaacagatagatctgtagaaatagaagatgaagaatcaaaaatccaaattgaggcacttaaaaataattgtgctgaatttggtattaactttattgatatgagtgatattagacagggcattgttcacattataggtcctgaacagggctttactcttccaggctccacaattgtttgtggggatagtcatacttcaactcatggagcatttggagcattagcacatggtattggaacatctgaggtagagcatgttttagcttctcagacactaatacaaaaaaaagcaaaaaattttaaagttgagatagttgggacactaaccgactctatatccgcaaaagatcttgcgctatcagtaattggagcgattggaactgcgggtggtactggctatgttattgagtacatgggtaatgcagttgaaagccttagtatggaaggtagaatgacattatgtaatcttacaatagaagctggtgctagagcagggttaattgctcctgatcaaaaaacttttgactatttaaaggatcgaccgttagctccaaaaggtgatatttgggataaagcagtcagttattggaaaactttaccaagtgatcctggggcacattatgataattcaataaaaattgatattgataacctttcgcccttagtaacctggggaactagcccagaggatgtcattgatattgatggaaatataccaaaacccgaggatatagaagatgaagcaaagaagaatgcaataaggcgatcgctagattatatgggtttggaagcaggtgagccgattaaaggtacaaaaattgataaggtttttattggatcatgtacaaatggaagaattgaagatctaagagcagcggcatcaatagtaagtcaaaacaaggtttctgatcatgttaacgcaattgttgtgcctggatcaggacttgtaaaggcccaggcagaaaatgagggtctggataaaatatttatagaagcagggtttgaatggagggaaccaggttgttctatgtgtttggccatgaatgccgacaaactccttcctaatgagagatgtgcctcgacttcaaatagaaattttgaaggaagacaaggtagagggggaagaacacatcttgtgagtccaaaaatggcagcagcagcagccatagcgggatgtttggccgatgttagggattttagttaa

SEQ ID NO: 284198 - DNA, 631 bp, Unknown
  Bacterial polypeptide expressing nucleotide sequence isolated from the Sargasso Sea
tatggaaaagtttagtaaaataaaaggtatcgctgcaccaatgctttcttctgatggtaatcaattttcaatgatgattaatattgatacagatatgattatccccaaacaatttttaaaaacaattaaaagaactggtcttggtaaaagcttattccatgaaatgcgatatgattttgaaggtaatgaaatcgagagctttatattgaataaggatatttatagagactcaaagattattcttgcaggaaataactttggatgcggttccagtcgtgaacatgctccatgggccctgcttgattttggtattagagtaattattgcaccttctttcgctgatattttctataataattgctttaaaaatggtattttacctattcaactttcagaaaagttaatcaaggagataagtgaatctgctttaaagggaaatgaattgcaggtctcactaagcgaccaaataataaattgtgataacaaagaatttagttttgaaatagatccatcaaataaaaattttttgatggaaggtcttgatgatatcggtttgactcttaaagatacaaatttaattgatagctacgaaaaggatgctgataataatttaccttggtatactttataa

SEQ ID NO: 284199 - DNA, 717 bp, Unknown
  Bacterial polypeptide expressing nucleotide sequence isolated from the Sargasso Sea
cgggtttaattcaacctgatgacaaaatttttgaatatttaaaaaataaaccaatgtctccaaagaaagataattgggataaagcattagaatactggagttctctaaaaactgatagagatgcaaaatttgataaagaaatttcattagatggttcccaaattaaaccaatggtaacatggggtacatcgcctcaagatgtagttgaaatagatggaaaagttcctaatccagataatgaaagtgatattgataaaaaaaactcaataagtagatcattgaattatatgggtttaaagccagacacaaatattaaagatattaaaattgataaggttttcataggaagttgtactaatggaagaatcgaagacataagagatgcagcaaaaattttaaaaaataaaaaaatttcttctcatgtagaagctatggtagtgcctgggtcaggtttagtgaaagaacaagctgaacaagaaggtttagataagatttttaaagactcgggttttgaatggagagagccaggctgttcaatgtgcttagcgatgaatgctgataaattaaaacctgaagaaagatgtgcatctacatcaaatagaaactttgaaggtagacagggaagaggaggaagaacacaccttgtgagtcccgctatggctgcagctgcagcaatttctggaaatttagacgatgttagaaagtatcaaagttaaa

SEQ ID NO: 284200 - DNA, 472 bp, Unknown
  Bacterial polypeptide expressing nucleotide sequence isolated from the Sargasso Sea
atgaccaaaaatggaaacttaattgatgattttattttaaatacaatcccatataataattctaaaattttgattgctggtaaaaattttggttgtggttcttctagagaacatgctccatgggcacttttggattttggaattacatgtgtaattagctcaagttatgcagatattttttataataattgttttaaaaatggaattttaccaataaagatttctgatgaagaaatcaaagaaatttctgaatattcaaaaagaaaagaagaaatttctgtagatttattaggacaaaaaattgtttttggaaataaagaaattacatttgaaatagatgaattcaaaaaaaaatgtttaatagaaggactagatgatattgcattgtcactggaaaaatctgataaaatcatttcttttgaaaaaaaaataaaatcttcgaaaccctggatatttaatgatcaaagttaaa

SEQ ID NO: 284201 - DNA, 733 bp, Unknown
  Bacterial polypeptide expressing nucleotide sequence isolated from the Sargasso Sea
aatgggatataccatatatgacaagctctggaatgagcacttaataagatcctatgatgatggagactcgctaatttatattgatagacattttcttcatgaagtaacatctcctcaagcttttgagggcctcaaaaaaaaatcactcaaaccatggagaattaatgcaaacattgctactccagatcacaatgttccaactacaaggggtaacgaatttagcatagagaacattgaagacaatatctcaaagttgcaggttgtcgagttagataaaaattgtaacgatttcggtataaaacaatttaatatcaactcaaataatcaaggcatagttcatgtaattgggccagaattaggcttaacgcttcccggaatgagtattgtttgtggcgactcgcatacttcaactcatggtgcttttggttgtcttgcaatgggaattggaacatctgaagtggagcatgttcttgcaactcaaagtttaaaagtaaggaagcttaaaaatatgagaataaattttgaggggtcgatacaagaaggagtgtcctcaaaagatattattttatatctaattaggacaataggaactgcaggtggaacaggatatgcagttgaatttgcgggatcatatatacgaaatatctctatggaagccagaatgacaatatgcaatatgtctattgaagcaggagctaaagtaggattagtgtctgttgacgacaaaactatt

SEQ ID NO: 284202 - DNA, 1051 bp, Unknown
  Bacterial polypeptide expressing nucleotide sequence isolated from the Sargasso Sea
gatcgggaaaaaggaattgaggggatagaagatgcagtagcgaaactccaagtaaaaactcttgatgagaactgttctgatttgggtattcttcaatttgatattctagataaaagacaaggtattgttcacgtagttggaccagagcaaggagttactctaccaggcatgactcttgtttgtggtgattctcatacatcaacacacggagctttggctacccttgctatgggcataggaacttcagaagttgaacatgtattagcaactcaatgcttaaaagcctctaagttaagaaatatgaaagttgtaattgatggtgagctttctcccggagtaactccaaaggatgttaccttagcagtaataggacaaataggaacagctggaggaactggctttgcaatcgaatattctgggtcagttatagaaaaaatgagcattgaaggcaggatgactgtatgtaatatgtctattgaagcaggagcaagggtgggtttagttgcattcgacagtattactgaagaatatgtaaaaaatagaccctttacccctaaaggagatgaatgggaattagctttatctcaatggaaagaattaaaaagtgatgaaggtgcgcattttgaagaaactatttacatagatggatctgatcttaaacctcaagttacttggggtacttctccagaaatggttatagatgttgatggagaaattcctgtagctaactctgagtctatacaacatgcacttgaatatatgaacttagaaccaggaatgaaaatttctgatatcaaattggatcaagtctttataggttcatgtacaaattctagaattgaagacttaaggttggctgcaaaggtagttgaaggaaagaaaatttcatctaatatcaaaagagctattgtagtaccaggatctggcctagttgctgaacaagcagttgacgagggcctagataaaatttttttagagtctgggcttgagtggagggcccctggatgttcgatgtgtcttgcgatgaaatccgatcagcttggagatgaag

SEQ ID NO: 284203 - DNA, 607 bp, Unknown
  Bacterial polypeptide expressing nucleotide sequence isolated from the Sargasso Sea
atgaaaaaatttaattcattaaaaggcatacctgcgtatttaccaatagtaaatatcgatacagatatgattattccaaaacaatttttaaaaactatcaaaagaacggggcttggaaaaaatttattttttgaaatgagatatgacaaccaaggtaaagaaattactgattttgtattaaaccaaagtccatacaatgattcaaaaatcttaattactggtaaaaattttggatgtggttcttcaagagaacatgcgccatgggcattattagattttggaataacttgtgttattagttctagctacgcagacattttttttagcaattgttttaaaaatggaattttacctattattttagaggaagaaaaaattaaagaattgtcagaatacgcaaatagaaaagaagaaatttctgttgatttaaatgaagaaaaaatagtttatggaaataatgaaattaaatttcaagtagatccatttaaaaaaaaatgcttattagaaggtcttgatgatattgctctttctttaaagaaatcagataaaattgaaaattttgaatcaaacttaaaaaataagaaaccatggatttttaatgattaaa

SEQ ID NO: 284204 - DNA, 1393 bp, Unknown
  Bacterial polypeptide expressing nucleotide sequence isolated from the Sargasso Sea
catgcctaagactctttacgataaattgtgggattctcatgaggttgctcaaagagaagatggttcatttttgctatatattgataggcatctaatacatgaagtaacatctcctcaagcctttgagggtttaaagatggcaggtagagaaccttggagggtgtcttcaaatatagcgactcctgaccataacgtacctactacaaatagagaaaaaggaattgaaggaatagaagatgaagtatcaaaacttcaggtgacaactctagataaaaactgttctgatttaggtattcttcagtttgatattttagacaaaaggcaaggtattgttcacgtagtaggtcctgaacaaggagtaacattacctgggatgactttagtttgcggcgattcccacacttctacacatggagctttagcaactcttgctatgggaataggtacttccgaagtggaacatgtattggcaactcaatgcttgaaagcttctaaattaaaaaatatgaagattgtaattgatggacagttatctcgaggagtaactcccaaggacgtcactctagcggtaattgggaaaataggaacagcaggaggaacaggttttgcgattgaatactcgggatcagttatagatgaaatgagcatcgaaggcagaatgaccgtttgtaatatgtccattgaagcaggagcaagggttggattagtagcctttgataaaacaactcaagaatatgttcagggtagacctttttctccgaaaggaaaagaatgggaattggcactatctcactggaaagatttaaaaagtgacgatgatgcccattttgacgaaacaatttttatcgatggatctgctcttaagccgcaagtgacttggggaacttctcctgagatggttttggatattgatggaaccattcctgaagcaaagtccgaatcaatagagcgtgccctagaatatatgcaattgaaagcaggaatgaaaatttctgatattaaattagatcaagtcttcataggatcttgcacaaattccagaatcgaagatctaagattagctgcaagtctagttgaaggtaagaaaatttcttctggaattaaaagggcaatagtcgttcctggttctggtcttgtggctgaacaggcaataagagaaggattagacaaaatcttcattgaatctggctttgagtggcgagctcctggatgttcaatgtgccttgcaatgaatcccgatcagcttggagaaggagagcactgcgcttcaacttcaaaccgaaattttgaaggaagacagggatatggaggaaggacccacctagtcagtccagctacagctgcggcttctgctatagaaggaaaatttgttgatgtaagggagctgttctaa

SEQ ID NO: 284205 - DNA, 607 bp, Unknown
  Bacterial polypeptide expressing nucleotide sequence isolated from the Sargasso Sea
atgaaaaaatttagttcaatcaaaagtattcctgcttatcttcctatcgtaaacatagatacagatatgataattcccaaacagtttttaaaaactattaaaagaacaggattaggaaaaaacttattctttgaaatgagatatgaccaaagtggtaaagaaattaatgattttattttaaataatagtccttacgataattcaaaaattttaatagcaggaaaaaattttggatgcggatcttcaagagaacacgcaccttgggctttgttagattttggaattacttgtgtgataagttctagttatgcagacatattttacaataactgttttaaaaatggcatcttgccgattacaatttcagaagaccaaattaaagagatctcagaatattcaaaaagaaaagaggaaatttctgtaaatttgcctgaacaaacaataaattttggaaataaagaaatcaaatttgaaatagatcaatttaagaaaaaatgtttgatagaaggacttgatgatattgcattatcattagaaaagtcagacaaaataatttcctatgaaaataaaataaaaacatcaaagccttggatttttagtgattaaa

SEQ ID NO: 284206 - DNA, 1372 bp, Unknown
  Bacterial polypeptide expressing nucleotide sequence isolated from the Sargasso Sea
atgaagaccttatacgacaaactctgggaagagcatcacgttacccaactggattcgggcgagtcattactatatattgatagacactatttacacgaagtaacttcacctcaagccttcgagggactttcaaagaaaaatttaaaaccatggagacttgaagctaatattgctacaccagaccacaatgttccaactacaagaggagatgactttgattctgaaaaaattaaggatgagatatcaaaaattcaagttattgaattagataaaaattgtaatacctttggaatcaaacaatttgatattaaatcaactaaacaaggtattgttcatgttattggcccagagcttggatacacattgcctggaatgacaattgtttgtggtgattctcatacatcaacacacggtgctctaggctgccttgctatgggaataggcacctcagaagttgaacatgtgttagcaacacaatgtcttaaagtatcaaaacttaaaaatatgctagttaaattcgaaggcataccagctgaaaatgtttcatcaaaagatatagttctgtattttattgggcaaattgggactgctggcggcacaggatatgcaatagaattcgctggaagttacatcgaacaaatatcaattgagagcaggatgaccatttgtaatatggctattgaagctggtgcaaaggtcggcttagtggctccagatgataagactataaactatattagaaaaaaatcttttctagacaaagagctattaatagaagcagaggattattggtctagtttgaaatcagatgatgatgcattttttgataaagagataactatagatatttctaaaattaaacctcaagtaacttggggaacatctccagaaatggtggtcaattttgatgatgatattccaagaacatcagactattctgaacaaaataaaaaaaacatagaacttgcaagggactatatgggcattaaagatgaggctaagctttctgatttagtatttgataaagtttttataggctcatgtactaactctagaattgaagatcttagacaggccgctgaaatagttaaaggaaaatttgttgccaaaaatataagtgaagcaatagtggtacctggatcaggtatggttaaagagcaagctgagttagaaggtttagataaaatctttaccgaagctggatttatttggagagatcctggttgttctatgtgccttggaatgaatcctgatcaattaaaaccttatgagagatgtgcttccacttcaaacagaaactttgagggtcggcagggatatctcggcagaacacatctaatgagtcctattatggctgcatacactgcaataa

SEQ ID NO: 284207 - DNA, 766 bp, Unknown
  Bacterial polypeptide expressing nucleotide sequence isolated from the Sargasso Sea
atgacagaagcaaaaacaatttatgataaaatctgggatgcgcatttagttgctgataaggataattattcattattatatattgatcgacatttaattcatgaagtaacaagtccacaagcttttgagggtttaagaatggcgggtagaaatgttcgacatcctgataaaactctagctgtcgccgatcataatgttcctacaacagatagatctgtagaaatagaggatgaagaatcaaaaatccaaattgaggcacttaaaaataattgtgctgaatttggtattaactttattgatatgagtgatattagacagggcattgttcacattataggtcctgaacagggctttactcttccaggctccacaattgtttgtggggatagtcatacttcaactcatggagcatttggagcattagcacatggtattggaacatctgaggtagagcatgttttagcttctcagacactaatacaaaaaaaagcaaaaaattttaaagttgagatagttgggacactaaccgactctatatccgcaaaagatcttgcactatcagtaattggagcgattggaactgcgggtggtactggctatgttattgagtacatgggtaatgcagttgaaagccttagtatggaaggtagaatgacattatgtaatcttacaatagaagctggtgctagagcagggttaattgctcctgatcaaaaaacttttgactatttaaaggatcgaccgttagctccaaaaggtgaatatt

SEQ ID NO: 284208 - DNA, 1420 bp, Unknown
  Bacterial polypeptide expressing nucleotide sequence isolated from the Sargasso Sea
atgtcgaaacgaaccctctatcagaagcttgtcgattcgcacctcgtgtcgcgaatcgatgaacagaacgtgctgctgtacgtcgatctccatctgatgaacgagtacaccagtccgcaagcgttcagcgcgctcgacgcgcgtgggcggagcgtgcgccggccgcgtcagcagatggctgtcgtgagccatatcattcccacgcacgccgaatcgccgcgggtcattcgcgacgccgcgtcgctgctgcaagcgcaaaacctcgcacgcaactgcgagcgcgccggcatccggctgttcgcggccgacgacccactgcagggcatcgagcacatcgtcgcgcccgaactcggactgatccgcccgggcatggtcgtgctgtgcggcgatagccacaccaccacgtatggcgcgcttggcgcgctggggttcggcatcggcacctcggaagtcgagcatgtgctggcgacgcaaacgctcgtctaccgggtggcgcagaccatgcgtatcacgatcgacggcgcgttgccgtacggcacgtcgtcgaaggatgtggtcatctggctgatcagccagatcggcgcccagggtgcgcgcggctatgccgtcgagttcagcgggtcgaccatcgcgtcgctctccgccgaggcgcgcatgacgttgtgcaatatgaccgtcgaagcgggcgcacgcgccgcgctgatcgcgcctgatcagaccaccttcgattacgtgcgtgcccacacgccttcgctcgatcaggcggcctggcaaaacgcgctcgacgactggcgcaacctgtattccgacgccgatgccagcttcgacgccgagtaccgcttcgacgcgcacgagattgcaccgtttgtcacgtggggcacgagtcccgatcaggccgttgcgatcgatcagcctattcccgacgaatcgatgcaagcgacacccgaagccgccgcatcgctgcgccgtgcgctcgactacatggggctgtccgcgcggcaagcacttacgggcacgcacatcgaccgcgtgtttatcggctcgtgcaccaacgggcgtattgaagatttgcgcacggtcgccgcgctcgtgcgaggcaagcacgttgccgacggcgtgcgcgcgatggttgtgccggggtcggagagcgtgcgccgcatcgccgaacaggaaggcattgcgcagacgttgatcgatgcaggcttcgaatggcgtgagccgggctgctcgatgtgtctcgcgatgaacgacgacgtgctagaagccggcgaacgctgcgcttcgacaaccaaccgcaatttcgagggccgccagggacgcggtggccgcacgcacctgatgagcccggcgatggcggccgcggcggcattgaccggctgcatcaccgatgtccgcactctggaggcacaaacatcatgac

SEQ ID NO: 284209 - DNA, 530 bp, Unknown
  Bacterial polypeptide expressing nucleotide sequence isolated from the Sargasso Sea
tatggaaaaatttaaaaatattagaggtatagctgctccatttaattttataaatgtagatacagacaaaataattcctaaacaatttttaaagacaattaaaagaacaggtttaggtaaacatctttttgatgagatgagatttaatgatgacggttctgaaaaagaagagtttgttttaaatagagagccatatagaaaatgtaatattcttgttgcaggtgataactttggatgtggttcaagtagagaacatgcaccttgggctttatctgattttggaataaaatgtattatttcaacatctttcgcggatattttttataataattctttcaaaaatggtcttttacctattaaagtttcatctgacgaaagagatgctttattggcagattcaaatgatatggaaaatcctgaactagaaattgaccttccatctcaggaaattagaaggcctaatggagcagttattaaatttgaaatcgacccttttagaaaaaaatgcttacttgaaggattagatgata

SEQ ID NO: 284210 - DNA, 607 bp, Unknown
  Bacterial polypeptide expressing nucleotide sequence isolated from the Sargasso Sea
aatgaacaaattctcaacattaaaaagtattcctgcatatttaccaattgtaaatatcgatacagatatgattattccaaagcaatttttaaaaacaataaaaagaacaggacttggaaaaaatttgttttatgaaatgagatatgatgaaaaaggtaaagtagtagatgactttattttaaataaatctccatatgataattctaaaattttaattgcggggaataattttggatgtggttcatctagagaacatgcaccatgggcacttttagactttggtatcacttgtgttataagtacaagttacgcagatatattttataataattgttttaaaaatggaatattacctattaaagttaatgatgaacaaataaaggaactttctgaatactctaagagacaagaagaaattgcgataaacttaccagatcaaaaaataatttttggaaataaagaaatcaaatttgaattagacgaattcaaaaaaaaatgtttaattgaaggactagatgatattgccctatctttggaaaagtctaataaaataatttcatttgaagaaaaattaaaatccactaagccctggatatttaatgattaa

SEQ ID NO: 284211 - DNA, 1390 bp, Unknown
  Bacterial polypeptide expressing nucleotide sequence isolated from the Sargasso Sea
atggctaaaacactctttgataaagtttgggattcgcatgtaattgaaaaaataaaagatggtccagatgttctttttattgacagacactttattcatgaagttacaagtccagtagcgtttgttgggctcaagaacaggggtctaaaagtaatgtttcctgataaaacttttgctaccgctgaccataatacaccaactataaatcaacatctgccaattaaggataaattatccgctatgcaggtaaaaactttagaaaaaaactgtattgagcatggtattgatttttggggacttggtcataataaaaatggaattgtacatgttattggtccagaaaatggtatcactcagccaggacttacaattgtatgtggagattctcatacatctactcatggtgcatttggagctattgcatttggtataggaacctctgaagttgaaatggttcttgcatgtcagtctataatgcaacaaaagcctttaaaaatgagaataaacattgatggatctctaaattctcatgttacacccaaggatgttgctatatatattatatcaagactttcttcctctggtgcaactggatattttgtagaatattcaggagaagtttttaaaaatatgagtatggagggtagaatgactgtttgtaatcttagtattgaaatgggtgcaagaggtggaatgattgccccagatgagaaaacatttgaatacataaaaggtagagaatatgctcctaaaggaaatgattgggaaaaagccctatcatattggaaatctttaaagactgataatgatgcaatttttgataaagaatttaactttaatgcaagtgatattgaacctatgattacttatgggactaatccaggtatggctattcccatttctaaatcaattccaggttccggttcagactcagaatcatcatatcaaaaggcactcgattatatggagtttaaggaaggtgaaatgatgattggtaaaaaaattgactatgtcttccttggaagctgcacaaacggtagaattgaagattttagaacatttgccagcttaataaaaggtagaagaaaatctgatgatgttgatgcttggcttgtacctggatcacataaagtattaaaaagcattaaagatgaaggaatcttagatatcttaacagattccggttttcaattgagagaacctggttgttctgcatgtctagcaatgaatgatgacaaaatacccaagggaaaatatgcagtaagtaccacaaatagaaattttgaaggaagacaaggacctggtgctagaactttacttgcaagccctttggtcgctgctgctactgctattactggaaaaataactgatccaagagaaattatttaaa

SEQ ID NO: 284212 - DNA, 598 bp, Unknown
  Bacterial polypeptide expressing nucleotide sequence isolated from the Sargasso Sea
atggcttacgataaatttaacattctaaacagctcagctgttccacttaatatcgataatgtagatacagatcaaattatcccagcaagatttttgaaagcaactgaaagaaaagggtttggtgaaaatctttttaaagattggagatataactcagatgatactactattgattcatttcctttaaacaataaaatctacaatggaaagatacttgttgcgggcaaaaattttggatgtggatcttcaagagagcatgcagtttgggcaatatatgattacgggttcagagctgtggtatcaagtttttttgctgatatattcaaaaataactgtttgaatattggtgttcttcctgttcaagtttctgaggaatttttaatagatatttttgcccaaattgatacaaatcctaaaagtaattttgaggtaaacatagaaattcaagaatttaagattattgagactggaaagtttgaaaaatttaatattagctcttacaaaaagagcaacatgtcaaatggttttgatgatatagattaccttataaataaaaagcaagaaatttctaaatttgccaataattctccatactaat

SEQ ID NO: 284213 - DNA, 352 bp, Unknown
  Bacterial polypeptide expressing nucleotide sequence isolated from the Sargasso Sea
atgtctcttacaacttacgataaaatttggaatgatcacctagttgatgaacaaccagatggaacatctttattgtttgtagatagacatttaattcatgaggtgaccagccctcaggcatttgagggactaagaaattctaacagaaaagtcagacatccaaaattaacacttgctgttgcagatcacaatgttcctactactgacagatcagagggaattgctgatgaagattcaagaattcaagttgaaactttgaataagaattgtaaagaatttggagtagagttattcggaatggatgataaacgacaaggtattgttcatatcattgggccagagcagggattta

SEQ ID NO: 284214 - DNA, 340 bp, Unknown
  Bacterial polypeptide expressing nucleotide sequence isolated from the Sargasso Sea
atggaaaagttcaataaattaaaaagtataccttcgtatttatcattacaaaacatcgatactgatatgataatccctaaacaatttttaaaaacaattaaaagaacgggtttaggaaaaagtttattttatgagatgcgttatgatgaaaatggaaaaataataaaaaactttgtgttaaataaagaaccgtataataaatctaaaattttattagcaggtaaaaattttggttgtggatcttcaagagaacatgcaccttgggcattatctgattttggaatcaggtgcgttaatagttctagttttgcagatatattttataaccaattgttttaaa

SEQ ID NO: 284215 - DNA, 643 bp, Unknown
  Bacterial polypeptide expressing nucleotide sequence isolated from the Sargasso Sea
atgattaatccaataatctcaggcatagttgcaacctttgatagggacaacattgatacagatcaaattatccctaccgaataccttaagtctattaaaaaatttggttttggagacttcctttttgatggttggagatatttagatgagggacggcttgacatgacctcagaggatcgttcaaaaaattatgattttatcctaaataaagagccctatactaagtctcaaattctattaacacgtgataactttggttgcggttcaagcagagaacatgcagtctgggctttaagagattttggttttaaagcggtaatcgccagttcatttggagatattttttataacaattgttttaagaactcagttctaccaattaagctgactattgaagagattaatcatctatttgaaattactgcaacttctccaattagctttgagattgatttagcaaaaaaaactattaaatatgatcaagtctccagctactcattcgatgtaaaggaaagcctgcttgagcgaattattcataatctagatgatgtagatattaccctaaaacataaagaacagattgaagcttatgaactttcaagaagacagcaaagaccgtggctctttgattacagtaattaac

SEQ ID NO: 284216 - DNA, 1405 bp, Unknown
  Bacterial polypeptide expressing nucleotide sequence isolated from the Sargasso Sea
aatgacagaagcaaaaacaatttatgataaaatatgggatgctcatttagtcgctgataaagacaattactcactattatatatcgaccgtcatttaatacatgaagtaacaagccctcaagcctttgaaggtttaaggatggctgaaagaacagttaggcatccagaaaagactcttgctgtcgcggatcacaatgttcctacaacagatagatcgattgagattgaagatgaagagtcaaaaattcaaattgaagccctcaaaaataattgtgaggaatttggtattaacttcatagatatgaccgatattagacagggtattgttcatattattggtcctgaacaaggatttacacttccaggttctacaattgtttgtggtgatagccatacctcaacacatggagcatttggagcactagctcatgggatcggaacttcagaagtagagcatgttttagcttcacagacattgatacaaaaaaaagcaaaaaactttaaagttgaaattgtagggactttaacagactctatctcggcaaaggatcttgcattatctgttattggagccattgggaccgctggcggtactggttatgttattgaatatatgggaaatgcagttgaaagccttacaatggaaggaagaatgaccctatgtaatcttacaattgaggctggcgcaagagcaggtttgattgctccagatcaaaaaacttttgattatttaaaggatcgcccattagttccaaaagatgaaatctgggacaaagcagtaagttattgggaaactctaccaagcgacccaggagcgcattatgataattctatcaaaattgatattgataaccttgctccattagttacatggggaacaagtcctgaagatgttgtagatattgacggtaacattcctaagccagaggaaattgaagatgaagccaagaaaaatgctataaaaagatcgctagattatatgggtttagaagcaggcagacctattaaaggaacgaagattgataaggtatttataggatcatgtacaaatggaagaattgaagacttaagagcagcagcttcaatagtaagtgaaaataaagtttctgatcatgttaatgcaattgttgttcccggttcaggacttgtaaaggctcaagcagaaagcgagggtttagataaaatctttataaatgctggatttgagtggagagagccaggttgctcaatgtgtttagcaatgaatgcggacaaacttctgccagaagagagatgtgcttctacttctaatagaaattttgaaggaaggcagggtagaggaggaagaactcatcttgtaagtccgaaaatggcagcagcagcagctatagctggatgcttagctgatgttagggattttagctga

SEQ ID NO: 284217 - DNA, 631 bp, Unknown
  Bacterial polypeptide expressing nucleotide sequence isolated from the Sargasso Sea
tatggaaaagtttgatacaataaaaggtattgctgcgccaatgctcgcttccgacggtaatcaattttcaatgatgataaatattgatacagatatgattattcctaaacaatttttaaagacgattaaaagaacaggattaggtaaaagtttatttcatgaaatgcgatatgattatgaaggaaatgaagttgaaaattttatattaaataaaaatgaatatagagactcaaagattatactcgcaggaaataactttggctgtggttcaagtcgtgagcatgccccttgggctttactagattttggtattaaagttataatagctccgtcattcgcagatattttttataataattgctttaaaaatggcattttaccaattcagctttcagaaaaggtaatcaaagagataagtgaatctgcattaaaaggaaatgagttagaggtctctttaagcaaacaaataattttgtgtgaaaataaagaaattaatttcgagattgatccttctaacaaaaattttttaatggaaggtctagatgatattggtttaacattaaaggacacagatcttatagatatttatgaaaaggatgccgatgataatttaccttggtattccttataa

SEQ ID NO: 284218 - DNA, 715 bp, Unknown
  Bacterial polypeptide expressing nucleotide sequence isolated from the Sargasso Sea
atgccttttacaacttacgataaaatttggaacgatcatctagttgatgaacaacctgatggtacatcacttttgtttgtagatagacatttgattcatgaagttacaagccctcaagcatttgaaggcttaagaaattcgaacagaaaagtaagacaccctaaactaactcttgctgttgcagatcataacgttccgacaactgacaggtcaaaaggtatcgcagatgaagactcgagaattcaagttgaaactttgaacaaaaactgtaaggaatttggagtagagatttttggaatggatgataaaagacaaggtattgtccatatcataggacctgaacaaggttttacacagcctggaaatataattgtttgtggtgatagtcatactgcaactcatggagcatttggagctttagcttttggaattggaacttcagaagtagaacacgttttagcaacacaaactttagttcaaaaaaaatcaaaaaactttagaattagcgtaaatggttcattacctattggcgtaacatcaaaggatgtcatcttgcagataattggaaaaataggaacggctggtggtactggttatgtgattgagtatgccggtaaccttatatctaatctaagtgttgaacaaagaatgacgatttgcaacatgacgattgaaggtggggcaagagcaggactaattcaaccagatgaaaaga

SEQ ID NO: 284219 - DNA, 475 bp, Unknown
  Bacterial polypeptide expressing nucleotide sequence isolated from the Sargasso Sea
gatgagatatgatgaaaaaggaaagataattgaagattttgttctacacaaagagccatataataaatcaaaaattttaattgcaggtaagaattttggatgcgggtcgtcgagagaacatgcaccgtgggcacttctagactttggtattaaatgtgtgatcagttctagttttgcagatatattttataataattgttttaagaatggaattttgccaattagattagatgagaaaattattttacaattggctgaatactctaatagaaaaaaagaaattgaagtagatttagaggaacaagtagttaaatttggaaatgagattgtaaactttgaggtagatggatttaaaaaaaagtgtttgttggaaggtttagacgatatagctttatctatggaaaaactaaatctggttgaaaattttgaaaaaaaagtaaaggaagataggccttggctacttaaaaatgattaa

SEQ ID NO: 284220 - DNA, 1138 bp, Unknown
  Bacterial polypeptide expressing nucleotide sequence isolated from the Sargasso Sea
aaataattgtaaagaattcggtataaaacttttttatgtgaacgacaaacgtcaaggtattgtccatattataggtcctgagcaaggattcactcaacctggaacagttattgtatgtggagatagtcatacagctactcacggagccttcggtgcattagcatttggaattggaacttcagaggtagaacatgttcttgctacccaaactttaatccaaaaaaaatcaaagaattttagaattaatgttaatggagaattgcctaagggagtaactgctaaagacgtaattctaaaaattataggaaaaattggtacagctggaggtaccggatatgtagtagaatttgctggtaacgttatacgtagccttagcatggaagagagaatgacagtatgtaatatgactatagaagctggagctagagcaggattaatagcaccggatgaaaaaacatttgattatctaaagaacaaatctatgtcacccaaaggagaaaactggttaaaagcagttaaattttggaaaacactatactcagataaagaatgtaaatttgataaagaaataaatattgacggtaaagacattgaaccattagtaacttggggaacttctccacaagatgtatccccagtgactggtattgtaccagatcctgaagaagaaaaaaatgaggatagaaaaatggctatgaaaagatctcttgagtatatgggtcttaaagcaaatactaaaatttcagatattaaaatagataaaatttttataggtagttgcacaaatggaagaattgaagatctaagagtagcagcagaacttttgaaaggtaaaaaaattgctaataatgtcagtgcgatggttgttcctgggtcaggattagtcaaggagcaagctgaaaaagaagggctagataaaatttttaaagaggctggatttgaatggagggagcctggctgttctatgtgtttaggaatgaacccagatcaattgaagccaaaagaaagatgtgcttcaacatctaatagaaattttgagggtagacaagggcgaggagggagaactcatttagttagccctggtatggccattgccgctgcaattaatggtcatttaacagatgtcagagagatataa

SEQ ID NO: 284221 - DNA, 610 bp, Unknown
  Bacterial polypeptide expressing nucleotide sequence isolated from the Sargasso Sea
aatgcaaaaattttctaacttaaaatcaataccatcttatttatcacttcaaaatattgatactgatatgataattccaaagcaattcttaaaaactattaaaagaacaggtttaggtaaaagcttattctatgaaatgagatatgatgaaaatggaaaaataaacaatgattttattttaaataaagagccttataataaatcaaggatattgttagcaggaaaaaattttggatgtggatcatcacgagaacatgctccttgggctttgttagattttgggattaagtgtgttattagctctagctttgcagatatattttataacaattgttttaaaaatggaattttaccaattaaaattgatgataaaacagttcaagaacttgctgaatactcaaaaagaaaagaagaaatcgaaataaatttagagaaacaagaaatctcttacggcaacaaagttgttaagtttgaagtagatgcttttaaaaaaaaatgtttaatggaagggttagatgatattgctttatcaatggaaaaaatatcccaaatcgataattttgaaaaaaaacttattcaagaaaagccctggctaataaaaaatgattaa

SEQ ID NO: 284222 - DNA, 499 bp, Unknown
  Bacterial polypeptide expressing nucleotide sequence isolated from the Sargasso Sea
tatgaactacgatatgatgagaatgataataagatttctaattttgttttaaatcaagatcagtacaaagattctcaaattttaattactggaaagaattttggatgtggatcgtcgagggaacatgcgccatggtcaatagcagattacggtattaaatgtatagttgcttcaagctatgctgatattttttacaacaactgttttaaaaatgggatattacctataatacttcctgaagatcaggttcaacaactattacaagcggctgaagaaagtctaaattttgaggtagatttagaaaatcagaaaatttcatatattttaaataatgaagctaaaagcttagaatttgatatagaccctgccaaaaaggcttgtttaattgaagggattgatgacattggattgacacttaataaggtaagccatatttctgattttgaaaataaacaaaaatcaatgaatccatggctttatagccaaaagataacatgac

SEQ ID NO: 284223 - DNA, 918 bp, Unknown
  Bacterial polypeptide expressing nucleotide sequence isolated from the Sargasso Sea
tatgtctaaaacattatttgataaagtctgggatgctcacgtcgttaaaaggataaagaatggacctgatgttctattcatcgacaggcacctagttcatgaagttacaagccctgttgcatttttgggattgcaaaatcgtaaacttgatgttttatttcctgataaaacttttgcaacagcagatcataacactccaacaaaaaatcaaaatttaccgataaaggatcccctatcagcaaagcaattgcaaactttaaaattaaactctaaaaaacataaaattcctttctggggactaggacataaaaaaaatggcattgttcatgtcatagggccagaaaatggaataacattacccggcgccaccattgtttgtggcgactcacatacatcaactcatggtgcatttggagcaattgcatttgggattggaacgtctgaagtcgaaatggttttgacaactcagtgtgttttacaaccaaagccaaagaaaatgagaataataataaatgggaaactaaacaattatgtgacgccaaaagatgtagcactttatatcatatctaaaatttcaacatcgggagcaacaggtcattttgttgaatattctggtgatgttttcgaagcaatgagtatggaaggcagaatgacagtttgtaacttatccatagaaatgggtgctagaggtggtatgattgctcctgataaaaaaacaataaattacattagagacagagaatttacacccaagggtgatgtgttcttaaaactattaaaatactggaatagtctcaaaacagaaaaagatgccacttttgatagggaatatgtatttgaaggggataaaattgaaccaatgataacttatggaactaatccaggaatgggtacttcaattagcgatggaattccata

SEQ ID NO: 284224 - DNA, 745 bp, Unknown
  Bacterial polypeptide expressing nucleotide sequence isolated from the Sargasso Sea
attgagtaaagataccttatttgataaagtttgggatttacacaaagtttccagtcttccaggtggctcagatcaaatttttataggtcttcacttaatccatgaagtgacaagtcctcaagcatttggcgctttaaaagacaaaaatttaacagtaaaatttcctagtagaactgtggctacagttgatcacattgtgccaacagataatcaaagcagacctttcaaagataatcttgcagagcaaatgattgaaacacttgaaaagaactgcttacagcataaaataaaattttttaatattggtagtggaagtcaaggaatagttcatgtagtagctccagaattggggctaactcaaccaggtatgacgatcgcttgtggagactcacatacttcaactcatggagcttttgggtcaattgcttttgggataggtacaagccaagtaagagatgttcttgcaacccaaaccatagccatgaataaattaaaggtaaggcaaatctggtgcgaaaatcaattatctaatggggtatatgctaaggatttagtacttcatattataaataaactcggtgtaaaggctggggttggttttgcatatgagttcgcagggcctgcaatcaatgtattatcaatggaagaaagaatgactatatgcaatatgtctattgaaggaggagctagatgcggctacataaaccctgatgaaaagacatttagttacatgagaaataaatta

SEQ ID NO: 284225 - DNA, 397 bp, Unknown
  Bacterial polypeptide expressing nucleotide sequence isolated from the Sargasso Sea
aatgcctaagactttatatgacaaaatttggaatgatcacttagttcatcaacaagatgatggaacctctttattgtttgttgatagacatttaatacatgaagttacaagcccacaagcctttgaaggtttaaggaattcaaatagaaaggttagacaaccaaaactaacacttgctgttgttgatcataatattcctacaaccgatagatcaaaaggaattgatgacaaagattcaaaaattcaagtagaaactttagaaaaaaattgtagagaattcggtgtcaaattatttggaatggatgataaaagacaaggaatagttcatatcgtagatccggaacaaggttttactcaacctggaacagtaattgtctgtggagatagccatactgca

SEQ ID NO: 284226 - DNA, 1246 bp, Unknown
  Bacterial polypeptide expressing nucleotide sequence isolated from the Sargasso Sea
ccaaatttaactttagcagttgcagatcataatgttccaacaactgacagatcaaaaggtatttcagatgaagattcaaaaattcaagtagatactttagaggcaaattgtagagaattcggtgttcagttatttggtatggatgataagaggcaaggtatcgttcatattattggacctgaacaaggttttactcaaccaggtacagttattgtttgtggagacagtcataccgcaacgcatggagcatttggtgctttagcatttggaataggaacttcagaagttgaacatgttttagcaacccaaacactagttcagaagaaagctaaaaattttagaattaatgttaatggtgaacttcctttaggagttacttctaaagatgtaatacttcaaataattggaaaaataggtacagcaggtggaacaggatctgttgtggaatatgctggagatttaataagatctttaagtgttgagcaaagaatgactatttgcaatatgacaattgaaggtggtgcaagagcaggattaattgcaccagatgaaaaaatttttgaatatttaaaaggaaaaccaatgtcaccaaaaagtgaaaattgggataaagctttgaactattgggaaactttaaaaacagactctgatgctagttttgataaagaaattagccttaatgcaaatgaaattttacccatgattacatggggtacgtcaccacaagatgtaataacaattgatggaaaagttccaaatccaaataatgagactgatgaagataaaaaaaattcaattgaaagagctttaaagtatatgggtttaaaacctgacatggcagccacagatataaaaatagataaagtatttattggtagttgtactaatggcagaatagaagatttgagagaagcagcaaaaatcgtaaaagataaaaaagtatcatcgcatgttaatgctatagtagttccaggctcaggcttagttaaagaacaagcagagcaagaaggactagataaaatttttgttagctcagggtttgaatggagagaaccaggttgctctatgtgtttagcgatgaatgccgataaattaaagccagaagaaagatgcgcctctacatcaaatagaaattttgagggaagacaaggtagaggtggtagaacccatctagttagtccaggaatggcagcagcagctgcaatttcaggtaatttagatgatgtcagaaagtatcaaaattaaa

SEQ ID NO: 284227 - DNA, 607 bp, Unknown
  Bacterial polypeptide expressing nucleotide sequence isolated from the Sargasso Sea
aatgcaaaaatttaataaattaaaaagtatcccagcttatttaccaattgtaaatattgatacagatatgataattccaaaacagtttttaaaaactatcaaaagaactggtcttggaaaaaatttattttttgaaatgagatatgatgatcaaggcaaagaaataaatgattttgtattaaataaagatccatttaatcaatctaaaattttaattgctggaaaaaactttggatgtggttcatcaagagaacatgctccttgggctttattagattttggaattacatgtgtaataagttcaagttatgcagatattttttttagtaattgttttaaaaatggaattttgcctataattcttgaagaagaaaaaataaaagagctatctgaatacgcaaatagacaagaagaaatttctattgatttgcaagaggaaaaaatagtttatggaaataatgagctaaaatttgaagttgatccgtttaagaaaaaatgtttgttagaagggcttgatgatatcgctttatcactaaaaaaatcagaaaaaatagaaaagtttgaaacaaatttaaaaaacgaaaagccttgggtatttaatgattaa

SEQ ID NO: 284228 - DNA, 691 bp, Unknown
  Bacterial polypeptide expressing nucleotide sequence isolated from the Sargasso Sea
atggctaaaaccctttacgataaattatggagtgatcatttagttgatcaacaagaagatggaacttctttaatctttgtaggtcgacatctagttcatgaggttacaagcccacaagcctttgaaggtttaagaaattcaaaaagaaaagtaagaaatccaaatttaactctagcagttgcagatcataatgtaccaaccacagacagatcaaaaggtatttctgacaaagagtcaaaaattcaagttgatactttagcagctaactgtaaagagtttggcattcaactgtttggaatggatgataaaagacaggggatagttcatatcattggaccagaacaaggttttactcagccaggtaccgtaatagtttgtggagatagtcatacagcaacccatggagcatttggtgctttagcatttggaataggaacatcagaggttgaacatgttctagcaacccaaacactcgtacaaaaaaaaggaaaaaattttagaattaacgttaatggacagcttccattaggtgttacttctaaagacgtaattttacaaattattggaaaaattggtacagctggtggaacaggttatgttttagaatatgcaggtgatgtaatcacatcactaactgttgaacaaagaatgactatttgtaatatgacaatagaagctggtgcaagagcag

SEQ ID NO: 284229 - DNA, 803 bp, Unknown
  Bacterial polypeptide expressing nucleotide sequence isolated from the Sargasso Sea
gcctgcggtggcagctctttccatggaggagcgcattaccctgtgcaacatggcgatcgagggtggtgcccgctgtgggtacgtcaatcctgatgacgtcacgttcgactatctgctcggtcggtcccatgctccgaccggagaggcctgggatcgggccgtgacctggtggcgttcgctggccagtgggtctgatgccgtggtggatgacgaggtggttttcgatgcctcctccatcacgcccaccgtcacctgggggatcacgccaggacagggactcggcatccaggagctcattcccgcccccgagcagctgccggcgggggatcgccccattgcggaagaggcttaccgctacatggatctgaagccgggcacggccattgccggactgccggtggacgtctgcttcatcggcagctgcacgaacgggcgactcagtgatctccgggccgcggcggcggttgcccgtggtcggatggttgcggacgggatccgcgcctttgtggtgccgggttccgagcaggtggcccgggcggcggaggcggaaggcctcgatgccgtcttcatcgacgccggattcgaatggcggcagccgggctgctcgatgtgcctggcgatgaatcccgatcggctgcagggtcgccagatcagtgccagctccagcaaccgcaacttcaaaggtcggcagggatcggcaagcggacggaccctgctgatgagtcctgccatggtcgccgctgccgccatccacggtcgggtgaccgatgtccgcactctcctcaagccgcacgccagctgat

SEQ ID NO: 284230 - DNA, 631 bp, Unknown
  Bacterial polypeptide expressing nucleotide sequence isolated from the Sargasso Sea
gatgaaagattttattgaaggcatcgtagctccaattgatagagataatatagatactgatcagattatcccaacagaatatttaaaatctattaaaaaatttggatacgaggattatctttttgatggctggagatataaagatcagggtcgtcttggaatgaaaaaggatgaaagaaaaatcaatcatgagttcattcttaacaattcgccttatgatgaatctaaagttttgcttacaagagataattttggatgcggctcaagtagagagcatgcagtttgggctctcagagactttggtattgaagttgttatagcaagctcatttggcgatattttttataataattgtttcaaaaatggtgttttgccattaaagctcaaaaaaactgaaatcgaagaactattttcattgtctacagataatccagtaactatttcagtaaatataaaagataaagttatgctttttaaagataagctctctattgattttgatcttgatgataatttagctgaaagaatcatttatggccttgatgagatcgatattactcttaaagattcagaattaattaagaaatttgaagaacatagaaaagaaaataacccgtggattttcgaatga

SEQ ID NO: 284231 - DNA, 418 bp, Unknown
  Bacterial polypeptide expressing nucleotide sequence isolated from the Sargasso Sea
ttcattttaaatgattcacgttataagacctctcaaatccttgttacaaatgaaaattttggttgcggttcgtcaagagaacatgcagtttgggctttgaaagattttggttttgatgtgatcatatctccttcatttgctgatattttctacagtaattgcttcaaaaatggcgttttaccaattattttagatattgaaaatattaagaaattattacaattcaagagtgcaattgaacttgatttagagtctcaaacaatcatttttggtgatgaatctataaacttcaaaattgattctcataggaaaatcagattgttagaaggattagacgatattgatcttactctcaaagaagacacaaaaatagaaaattttgaaaaaaaatctactagaatatcaatttttgaataat

SEQ ID NO: 284232 - DNA, 481 bp, Unknown
  Bacterial polypeptide expressing nucleotide sequence isolated from the Sargasso Sea
aaagaaaaaaataacgatagacgtgtagcaatggaaagatcactagactatatgggattaaaaccaaatactaaaatgacagatattaaaattgataaagtttttataggaagttgtacaaacggaagaatccaggatttaagagaagcagcaaaacttttgaaagataaaaaaatagctgaacacgttaatgctatggttgtcccaggatctggacttgtaaaaattcaggctgaacaagaaggtttagataaagttttcaaagattcaggttttgaatggagagaaccaggctgctcaatgtgtctaggaatgaatgaagatcagctgaagccgagagaaagatgcgcatcaacttcaaacagaaattttgaaggtagacaaggccgtggaggaagaacacatttagttagtccagcaatggcagctgtcgcagctatcgaaggacatttgtcagatgttagaaagtttaatagataat

SEQ ID NO: 284233 - DNA, 598 bp, Unknown
  Bacterial polypeptide expressing nucleotide sequence isolated from the Sargasso Sea
atggataaatttaaacttataagaagtatacctgcctatattcctttaatgaatattgatacagataaaattattccaaaacaatttttaaaaactattaaaagatctggactaggcaaaagtttattttatgaaatgagatttgatgaaaaaggaaatccaattaaaggtttcatattggaccaagaaccatttaagaattcaaaaatattaataacaggaaaaaattttggttgtggatcgtcaagagagcacgcaccttgggctttgcttgattttggcattaaggtaatcataagtgaaagttttgcggacattttctacaataactgttttaaaaatggaatacttccaattgttgtcaaagacgaaactattaatgaactcaaagattactcttcaaggaaagaaaatatcgaagttaagcttgaagaacaagaaattatttatggaaacaaaagttttaaatttgaattagactctttcaaaaaaaagtgtttgttggagggcttggatgatattgctctatcactcaaaaaagtaaaaaatataacaaattttgagagtcaaatgtctcaaaataaaccgtggttataat

SEQ ID NO: 284234 - DNA, 397 bp, Unknown
  Bacterial polypeptide expressing nucleotide sequence isolated from the Sargasso Sea
tttaattgcaggaaagaattttggatgtggctcttctagagaacatgctccttgggctttaatggattttggaataacttgtgtaattagttcaagttatgcagatatattttataataactgttttaagaacgggattctcccaattacaatttcagaggatcaaatcaaagaaatctcagagtactcgaatagaaaagaggaaatttctgtaaatttacctgagcaaacgataagttttggcaataaagaaataaaatttgaaatagatcaatttaagaaaaaatgtctaatagagggattagatgacattgctttatcactagaaaaatccgcaaaaatagtttcatacgaaaataaaattaaagaagcaaaaccttggatatttaatgattaa

SEQ ID NO: 284235 - DNA, 268 bp, Unknown
  Bacterial polypeptide expressing nucleotide sequence isolated from the Sargasso Sea
atgcagtctttcacaaagcattcgggtgttgtcgcagcgatggatcggtcgaatgttgataccgatcagataataccgaaacaatttttgaaacgaatagagcgaactggattcggtcaatttttgtttaatgattggagatttctctccgacggtacgccagaccctagctttgaactcaatcgtcctgaggcagaggaagcaacaattctccttgccagaagtaactttggttgtggttcgagtagagagcatgctccttgggctt

SEQ ID NO: 284236 - DNA, 868 bp, Unknown
  Bacterial polypeptide expressing nucleotide sequence isolated from the Sargasso Sea
atgccatatactatttacgataaaatctggaatgatcatcttgttgatgagcaatcagatggaacatctttactttttgtcgataggcatttaatccatgaagttacaagcccccaagcttttgaaggattaagaaattcaaatagaacagttagacaaccaagtttaacacttgcagtggcagatcataatgttcctacgactgatagatctaaaggcatttcagatgaagaggctagaatacaagtcgaagctcttgaaaataattgtaaggaatttggtatccaactttttggaatgaacgataaaagacaaggaattgttcatataactggtccagaacaaggatttactcaacctggtaatataattgtttgtggagatagtcatacagctacccacggagcatttggagctttagcttttggcattggaacttcagaagtagagcatgttttagcaactcaaactctagtacaaaaaaaatcaaaaaattttagaattaatgttaacggatcattaccaataggtgttacatctaaagatgtaattttacaaattataggaaaaataggaaccgcaggaggaacaggttatgttattgaatatgctggtaacttaatttcaagtctaagcgttgaacaaagaatgacaatttgtaatatgacaatagaaggaggtgcaagagctggactaattcaacctgatgaaaagatttttaattatttaaaagataaacctatgtcacctaaaaaagaaaattgggataaagcaatagaacattggaataaattaaaatctgatccagacgcaaattttgataaagaaatttctttagaaggatctcaaattaaacctatggtgactt

SEQ ID NO: 284237 - DNA, 1399 bp, Unknown
  Bacterial polypeptide expressing nucleotide sequence isolated from the Sargasso Sea
atgaagactttatacgacaaactctgggaagagcatcatgttacccaactcgactcgggagagtctcttttatacatagatagacactatttacatgaggtcacatctcctcaagcgtttgaaggattatcaaaaaaaaatctaaagccctggaggctcgatgcaaatatagctactcccgatcataatgtgcccacaacaagaggtaataattttacatccgatttgattaatgatgagatttcaaaaattcaagtagtagaattagataaaaactgtaacaaatttggaattaaacaatttgatattcaatcaaataaacaaggaattgttcatgtaattggacctgaattaggttacacacttccaggcatgacgatcgtttgtggtgattcacatacttcaactcatggtgcattaggttgtttagctatgggtattggtacatcagaagttgaacatgttcttgcaacgcaatgtctcaaagtgtctaagctcaagaatatgaatgtaagatttgagggtgtgccacaggtgaatgtttcgtctaaagatattgtcttatatttgattggaaagataggcactgctggagggactggctatgccattgagttttcaggttcatatattgataaattatctgttgaggggagaatgactatttgcaacatggctattgaagcaggagcaaaggtgggattaatcgcacctgatgaaacaacaatcgattatgttaaaaaaaattctttcttagatgacgaattattcaatcaagcgaagcaatgttggaagagccttcgaaccgatgataaagcagtatttgataacgaaatagaaatcgatgtatctaaaattaaaccacaagtgacatggggaacatctccagaaatggtagtaaactttgatgacccaattccaacaattattgattcaaatgaagagagcaaaaagaatgttgagcttgctagatcttatatgggtattcaaaatgaatcaaaattgtctgatcttgtatttgacaaagtatttattggatcatgcacaaattccagaattgaagatttaagacaagctgcagaaattgttaaaggtaaaacaattgcagagaatatctctgaggctattgttgttccaggatcgggtttggttaaagaacaagctgaaaatgagggattggataaagtttttactgatgcgggttttatatggcgcgatccaggttgttcaatgtgtctgggcatgaatccagatcaattaaaacctcacgaaagatgtgcttcaacatcaaacagaaattttgagggcagacagggttatttgggtagaacgcacttaatgagtcctattatggctgcatttactgcaataaatggaacagttggtgacccatcatgaa

SEQ ID NO: 284238 - DNA, 643 bp, Unknown
  Bacterial polypeptide expressing nucleotide sequence isolated from the Sargasso Sea
atgaaatctaacagcgaaggattaataattgatggtgtagttgctcacatagacagagataacattgatactgatcaaattattccaacagagtacttaaaatcaattaaaaaatttggatttgaagactatctatttgatggctggagatataaagatgatggaaagcttggggttacaaaagaagaaagaatcatcgatgaaagctttatattaaataaggagccatataacgaatctaaaatacttctctcaagagacaattttggatgtggttcatccagggaacatgcagtatgggcattaagagatttcggaattaaagctgtcattgcgtcatcattcggagacattttttataataattcttttaaaaatggacttttgccgattatcttagataagaatgaaatagaatttttatttagtgagactaaacaaaatgttcttgaactatctttagacttagaaaaaaaagagattatttacaatcaaaaatgtataacattcgaagttgaaaaacatctaatcgatagaatcatatttggtttagatgacattgatataacatttaaagataaagacaaaataattgattttgaaaaaaacagaatctctacaaggccttggatattcaaatgag

SEQ ID NO: 284239 - DNA, 1405 bp, Unknown
  Bacterial polypeptide expressing nucleotide sequence isolated from the Sargasso Sea
aatgtctaatactctttacgataaaatctggaatgatcacttggttcatcaacaagatgatggaacagcgttgttatttgttgatagacatttagttcatgaagtgactagtccacaagcatttgaaggtcttagaaattctaaaagaaaagttagacatcctaatttaactttagcagtagcagatcataatgttcctacgacagatagatctaaagggatatctgataaagaatcaaaaatacaagtagatactttagagtctaattgtaaagaatttggtgttcaactttttgggatgaatgataaaagacaaggtattgttcatataattggacctgagcaaggttttactcaaccaggcactgtaattgtatgtggagacagtcatacagcaacccatggagcttttggtgcgttagcatttggaattggtacttcggaagttgagcatgtattagcaacgcaaacattagttcaaaaaaaagcaaaaaattttataattaatgttaatgggaaacttcctttaggagttacatctaaggatgtaatacttcaaattatcggaaaaattggaacagctggaggaacaggttgtgttgtagaatatgctggagatttaataagatcattaagtgtagagcaaagaatgacaatatgtaatatgacaattgaaggtggagctagagcaggattaatagcaccagatgaaaaaatatttgattatttaaaagaaaaaccaatgtccccaaaaggagaaaattgggagaaagcaattaattattggaatagtcttaaatcagatagagatgcaagttttgataaagagattaaattagatgctagtgaaattttacctatgattacatggggtacgtctccacaagatgtaattgcaattgatgataaagttccaaatcctgaaagtgaaaaagatgaagatagaaaaaattcaatagaaagagctttaaaatatatgggtttaaaaccagatatggctgcaacagatattaagatagataaagtttttattggaagttgtactaatggtagaatagaagatttaagagaagctgccaaaattttaaaagataaaaaaatatcatctcatgttaatgctattgttgttcctggttcaggactagttaaagaacaggcagaacaagaaggattagataagatatttattaattctggttttgagtggagagaacctggttgttcaatgtgtcttgcaatgaacgcagataaattaaaacctgaagaaagatgtgcttctacttcaaatagaaattttgaaggaagacaaggaagaggcggaagaactcacttagttagtcctggaatggcagctgctgcagcaatttctggaaatttagatgatgttagaaaataccaaaattaa

SEQ ID NO: 284240 - DNA, 607 bp, Unknown
  Bacterial polypeptide expressing nucleotide sequence isolated from the Sargasso Sea
aatgaaaaaatttaatacattaaaaagtattcctgcatatttacctatagtaaatattgatactgatatgataattccaaaacaatttttaaagactattaaaagaactgggcttggaaaaaatttattttttgagatgagatatgatgatcaaggaaaagagattaatgactttgttttaaatcaaagcccatacaataattcaaatattttaattgctggtaaaaactttggatgtggttcttctagagagcatgctccttgggcattattagattttggaattacttgtgtaattagttcaagttatgctgatatattttatagtaattgttttaaaaatggaattttaccaataattattgaagaagaaaaaatcaaagaattatctcaatatgctaatagaaaagaagaaatttctattgatttaaaagaagaaaaaattgtttacggaaataatgaaattaaatttaaaatagatccatttaagaaaaaatgtttacttgaaggattagacgacatcgctttgtctttaaaaaaatcagacaaaatagaagattttgaaaaaaaattaaaaattaaaaaaccttggatttttaatgattaa

SEQ ID NO: 284241 - DNA, 454 bp, Unknown
  Bacterial polypeptide expressing nucleotide sequence isolated from the Sargasso Sea
tatgagtactccaaagacattatacgataaaatatggaatgatcatttagtgtcagaaaatgaagaaggaacatcaatcatttatattgacagacatcttgttcatgaagttacaagtccccaagcatttgaagggctaaaaattgcaaacagatcagttagaaaacctaattttacattagccactgctgatcacaatattcctacaacaaatagagatgagggaatatcagatccagagtctaagttacaggtagatactcttgaagagaattgtaaggagtacggaattacttttctttctatgtctgataaaagacagggcatagtccacattatcggaccggagcaaggtttcacacaaccaggaatgactatcgtttgtggtgatagccatacgtcaacacacggtgcctttggtgctcttgcatggggaattgaacttctgaagtag

SEQ ID NO: 284242 - DNA, 1134 bp, Unknown
  Bacterial polypeptide expressing nucleotide sequence isolated from the Sargasso Sea
attgtgaggagttcggtgttacattgtttggaataaatgatccgcgtcagggtatcgttcatgtaattggacctgaacaaggtataacacagcctggaatgacaattgtatgtggggacagtcatacggctactcatggtgcatttggagcgctagcgtttggcattgggacgtctgaagttgaacatgtgcttgctactcaaaccttagccatggcaaagccaaaaaccatgaaagtcgaagttgtaggagatgtctctgatggtgtagggccaaaagatataatattaggaattatcagaaaaattggtacgggtggtggagctggacatgttattgagtacgttggtgatgtaataaaaaatatgagcatggaaaatagaatgactatttgtaacatgtcaatagaagggggtgcaagagcaggaatgattgcacctgatgaaacaacttttaattatttaaaagataaaaattttgctccaaaaaacaaagattggaatgatgcaattagagaatggagtggtctttattctgataatgatgcagtgtttgataagatcgtaactataaatgctagtgatcttgaaccctctatttcctggggtacaaacccgtcacaggtaatttttgtaaatgatactatcccttatcctgaagattttaaagatgagtctgataaggaggctgccagtagagctctggaatatatggatttgcaagctggagaaaaaataaacgaaattaatttagatagagtgttcattggtagttgcacaaacggtcgtattgaagatctaagagaagctgctcaaatagtaaaagggaaaaaagttgcaaaaactattggtgcaatggttgtgcctggttccacccttgtaaaaaatcaagcggaggaagaaggtttggacaaaatttttattgaagcaggatttgattggcgtgaggcaggatgttctatgtgtcttggtatgaatccagacatattgaatccaggagagagatgtgcatcaacatcaaatcgaaactacgagggaagacagggtgctggaggaagaactcatttagtaagtccaaaaatggcagctgcagctgcactgcacggaaaatttgtagatattagagatctttaaa

SEQ ID NO: 284243 - DNA, 619 bp, Unknown
  Bacterial polypeptide expressing nucleotide sequence isolated from the Sargasso Sea
tatgaaaaaatttacaattataaaaggtattgctgctgttttgccagatataaatatagatacagatgctattattccaaaacaatttcttaaaacaatacatagaaaaggattgggaaaaagtttgttttataatgaacgttatactgaaggatataataaaaatgtagattttattttaaataaagatccatggtcaaatagtaatattattattgcaggggaaaactttggatgtggatcttctagagaacatgctccttgggccttattagattttggtatacaatgtatcatttcaaattcttttgctgatatattttttaataattctgttaagaatggcttattacttattaaattaaataaaaatgaaatacaaaaattaagtgcattagcaatgaaaaaagaaagttttactgtggatttaataaatcaaaaaatagcagttaaaaataatgagattaattttaatgttgacccaattattaaagatagattaatccatggctatgatgacatagaaattactttaaaaaataaacaattaatagttgattatgaaaacaacaaaaataaatttcatatttggaagaatatagtttatgaaaaacagtga

SEQ ID NO: 284244 - DNA, 829 bp, Unknown
  Bacterial polypeptide expressing nucleotide sequence isolated from the Sargasso Sea
agggacagcagggggaaccggatatacgatagagtttggaggcgaggtcatcaaaaatctatcaattgaagggcgtatgactgtttgtaacatggccattgaggcaggagcccgtgctggtcttattgctgttgatcaaaagacactggattacgttaaaggacgtccatttgctcccagtggagacatgtgggcgcgggcctcggaggcctggaaaaccttggtgtctgactcaaatgcgaaattcgatagaacagtactaatcgatggaagcgaaattgaaccacaagtaacgtggggaacttcgccagagatggtcgcgccggtctcagggtcgattcctgatccggccttagaaaccgacccaacaaagaaggggaacttagagcaggcattgaaatatatggggcttaaggcaggtactgaaataaaaaacatccaattggattatatattcataggctcatgcacaaactcgaggatagaggacctcagagaggctgctcaagtagtgaaagatagaaaggttgctgaaaatatcgaggttgcgatggtggtcccgggttctgggttggttaaaaagcaggcagaggaagaagggttggatcaaattttcaccaatgcgggtatacaatggcgtgaacctggctgttctatgtgtctagccatgaattcagatcaactcggagagggcaagcattgtgcatctacatctaaccgcaactttgaggggcgacaaggttttggggggagaactcatctagttagtccagctatggctgccgcagctgcgattcatggtcattttgttgatgtaagtaagatctga

SEQ ID NO: 284245 - DNA, 336 bp, Unknown
  Bacterial polypeptide expressing nucleotide sequence isolated from the Sargasso Sea
aatgaaaaaatttgtagtagaagaaggtttagtcatgcccttggatagggcaaacgtagatacagatttcataatacctaaacaatttctaaaatcgattaaacgctcgggctttggtgtcaacctttttgatgaacatcgttacttagataaaggtgtgccagatgcggacaatagcaatcggcctctgaaccccgatttcgtgttgaatcaagcgcgatataaaggatgcaaaatacttctagcaaggaagaactttggttgtggttcctcgcgagagcatgcgccatgggccttagatgattatggttttagagttattttggctccaagttt

SEQ ID NO: 284246 - DNA, 613 bp, Unknown
  Bacterial polypeptide expressing nucleotide sequence isolated from the Sargasso Sea
tatgaagccaataaattcgatcacaggcatagcagcaccgcttctaaggaataacgtagatacagatgcgatcatccccagtcgtgaaataaaaaaaatctcaaaattaggcttagctgatggcttatttgccgagtggagatattcatctgttcaaaatagaattcctgatcagaattttatacttaataaagacccgtttcagaaatcagtaatcttattgacaggagagaactttggatgcggttcatccagagaacatgctgtatgggctcttcaagagtggggcattaaagccataattggaaaatcatttgggtcgattttctataataattgcatcaggaatggattacttgctatcacccttgaagaaaaaataatttctggattgattaaaaatgttgaagaaaatccatcggacaatcatatctttatagatttaattaagtgttcaattcaatgctgtgataaggagatcttttttgatattcatgaaaaagatcgatcacttctaattgagggtcttgatgaaatagaaaaagtcctgatatataaaaataacattgatagttttgaagctgaccataaaaaaataaggccttggctgtaa

SEQ ID NO: 284247 - DNA, 659 bp, Unknown
  Bacterial polypeptide expressing nucleotide sequence isolated from the Sargasso Sea
aatgccatatacaatttacgataaaatttggaatgaacatcttgtacacgaacaagaagacggaacctcattactttttgttgatagacatttaattcatgaagtaactagcccacaagcatttgaaggtttaagaaattcaaaaagaaaagttagacaacccaaacttactttagctgtagcggatcataatgttccaacaacggatagaacaaaaggaatttcagatcatgaatcaaaaatacaggtagaaacactagataaaaattgtaaagaatttggaattcaaatttttgaaatgaatgataaaagacaaggtatagttcatatcattggtccagaacaaggttttacacagcccggaactattattgtttgtggtgatagtcatacagcaactcatggagcatttggagctttagcatttggtattggaacttctgaagtagagcatgtattagctacacaaactttagtccaaaaaaaatcaaaaaactttagaattaatgtaaatggaaatttaccaattggtgtaacttcaaaagatgtaatattacaaatcataggtaaaattggaacagctggcggaacaggttatgtcattgaatatgcgggagacttaatttctaatctaagcgtagaaaatagaatgacaattt

SEQ ID NO: 284248 - DNA, 1405 bp, Unknown
  Bacterial polypeptide expressing nucleotide sequence isolated from the Sargasso Sea
atgagctacagcgagcctagaactttatttgaaaaaatatggtcccgacatgaaatattgactcgcgacgatggcgtttcattgctgtctatcgacagacacttatgccatgaaggttcttttcatgcatttgataaacttaaaatggaaaatagaactgttcggtgtccggaacttaccgtcgctatcgctgatcattacgtatcaactagcttcccagaaaaaggaaatgaggtggaagcgctcagagtaccaatcgagaaactcgaaattaattcaaaagatgctggtataagactttacggtgttggatctaaagaacaggggattgttcatgttgttggaccggaacaaggcctaaccattccagggatcaccctggtatgcggcgatagtcacacggcaacgcatggtgcattcggctgcctagcatttggaataggcgcttctgaagttgcccacgtactggccacccagactctctggcaaacaaaaccaaaaacaatgcgtatcaatataaacggttcattatcagatggcgtagtagcaaaggacatcattctacatttgatttcagtcataggcgcaaatggtgcaagcgggcatatgattgaatatgccggctcgacaataagaaatctctcaatggaagggcgaatgactatctgtaacatgtctattgaagctgggggtcgcgccggaatggttgaatccgatcaaaaaactttcgactacttaaaaggaagaaagcatgctccaaaactaaaagattgggatctagcaataaaggactggaaaacacttgggacagagcctggggcgatatttgataaagaagttacggtggatgcaggagaaatagcaccgtctttaacgtgggggaatagcccggaagaaacgctgcctgtaactggatatatcccaagtccagaagacgaatcggacattagcaaacgagaaactttagaaggcaccctagaatatatgggtttagcacccgggcaaaaactcactgatattactattgatcgtgtatttataggttcatgcactaactcgcgaatagaagatcttcgttcagcagcacgtatcgctcagggaaaaaaggcactagttccagcaattatagtacccggttccactctaataaaagagcaagcagaggctgagggattagataaactttttctagatgctggtttcgaatggcggtccacaggttgttctatgtgtgttggtatgaatggtgatatcacgccgcctggagagaggtgtgcctcaaccagcaatagaaactttaaggggcgacaaggaccaggcagcagaacgcatttaatgagcccggcaatggcggcagcagcagcaatatccggtcgcgtcaccgacgccagagatttcagctagg

SEQ ID NO: 284249 - DNA, 1327 bp, Unknown
  Bacterial polypeptide expressing nucleotide sequence isolated from the Sargasso Sea
aaaatttggaatgaacatcttgtttatcaacaagaagatggaacatctttgttatttgttgatagacatttaattcatgaggttacaagtcctcaggcatttgaaggtttaagaaattcaaatagaaatgtcagacaacctagcttaacattagctgttgcagatcataatgttccaacaacagacagaagcaaaggaatagatgataaagaatccaaaatacaagtagatactttggaagctaactgcaaacaatttggaataaaactttttggaatgaacgataaaagacagggtattgttcatataattggtcccgagcaaggctttacacaacctggaacagttattgtttgtggtgatagtcatacagcaacacatggagcttttggatcattagcttttgggataggaacatctgaagttgaacatgtattagcaactcaaacattggtacaaaaaaaagcaaaaaattttagaattaacgtaaatggaaaacttcctttaggagtaacctcaaaagatgtaattttacaaattataggaaaaattggtactgctgggggtacaggatgtgtaattgaatattctggaagcttaatatcgtctttaagcgtcgaacaaagaatgacaatttgtaatatgacaattgaaggaggagctagagcaggacttatagaacctgatcagaaaatttttgattatttaaaagataaaccaatgtctccaaagaaagaaaattgggacaaagcattaaataattggacaaatttaaaatctgataatgatgcaaaatttgataaagaaataagcttagaaggtagagaaattttaccaatggttacatggggcacttctcctcaagatgtaattaccattgaaggcaaagtaccaaatccaaaaaatgaaaaagatgaagataaaaagaattcaatggagagatctttaagatatatgggcttaaagcctgatacagcagcaaaagatattaagattgacaaagtttttattggaagttgtaccaatggaagaattgaagacttaagggaagctgcaaaaatacttaaaaataaaaataaagcttcgcatgttcaggcaatggtagtaccaggttctggattagttaaacaacaagcagaacaggaaggattagacaaaatttttattaattctggatttgaatggagagagcctggctgttcaatgtgtcttgcaatgaatgcagacaaattgaaacctgaagaaagatgtgcatctacgtcaaatagaaactttgaggggagacaaggcagaggtggaagaacacatttagttagtccaggaatgg

SEQ ID NO: 284250 - DNA, 598 bp, Unknown
  Bacterial polypeptide expressing nucleotide sequence isolated from the Sargasso Sea
tatggcttacgaaaaatttaatatattgagcagtactgctgttcctttaaatattgacaatgttgatacagatcaaataatacctgctagatttcttaaagctaccgaaagaaaaggatttggtgataatctttttagagattggagatataattcggataatacatcagtagattcatttcccttaaacaataaaaaatatgaaggaaaaattttagttgctggtaaaaattttggttgtgggtcatcaagagagcatgctgtgtgggcaatttatgactatgggttcagagctgttgtatctagcttctttgctgatatatttaaaaataattgtttaaatattggagtattaccagttcaagttagtgactcatttttatcagaaattttttcagaaattgatgaaaattccaaaaatgtatttgaaataaatttagataatcaggaatttaaaattaaaagttccagtaaaaaagagaaatttaaaattagcacttataaaaaaagtaatatgtcaaatggttttgatgatattgattatctcattaacaaaaaagatcaaatttcagcttttgcaaataaattaagatactaa

SEQ ID NO: 284251 - DNA, 520 bp, Unknown
  Bacterial polypeptide expressing nucleotide sequence isolated from the Sargasso Sea
ccggggcaggtgatcgccgtcaatgaacccattccggcgccggaatccttcagcgatctgatggagcagcagtccgcccgcaaggcgctggcctacatggacctgcagccgggccagaagctctccgatgtcgccatcgacaaggtgttcatcgggtcgtgcaccaacagccgcatcgaggatctgcgcgccgccgccgccatcgcccgcggtcgcaaggtcgccgctggcgtgcaggcgctggtggtgccgggctccgaacaggtgaaggcccaggccgaagccgagggtctggacaagattttcatcgaggcaggctttgagtggcgcctgcccggctgctccatgtgtctggccatgaacaacgaccggctgcaaccgggggagcgctgcgcctccaccagcaaccgcaactttgaagggcgtcagggccgcgccggccgcacccatctggtgagcccggccatggctgctgccgccgccgtcaccggccgcttcgccgatattcgcgcgttgtaat

SEQ ID NO: 284252 - DNA, 520 bp, Unknown
  Bacterial polypeptide expressing nucleotide sequence isolated from the Sargasso Sea
aatggtcacacctgtcggtagcaaaattccaacacctgacactgtgaccaatgaacaggagtatatggatacgctaaattatatgggtcttgaaccaggtgtagaaattaattcaatacctcttgataaaatatttataggctcttgcactaattctagaatagaagacttgagagatgcctcacaagttgttaaaggtgaaaaaatatcaagcagtatcaagcaggctatagttgttccaggctcaggtcttgtaaaagcgcaagcagaagcagagggcttagataaagtattcattgatgctggctttgaatggagagatccaggatgttcaatgtgtttaggcatgaatgatgacttcttacaaccatatgaacgatgtgcgtcaacatctaatagaaatttccaaggtcgacaaggagataaaggtcgaacacatcttgttagtccagccatggcagcagttgctggcattaaaggtcatttttataatgttaaggaattcatgaatgaaaaataa

SEQ ID NO: 284253 - DNA, 652 bp, Unknown
  Bacterial polypeptide expressing nucleotide sequence isolated from the Sargasso Sea
aatgaaatcttgggataaagcagttgaatattggagtaaacttaattcagataataacgctaattttgataaagaagttacacttaaaggagaagacatacagccgatggttacttggggtacatcaccacaagatgtcattactatagatggaaaagtccctaatccttctgatgaaaaagataatgacagaagaaactcgattgaaagatctttaaaatatatgggtctcaaaccaaatacattaattaaagatataaaaattgacaaagttttcataggtagctgtacaaatggtagaattgaagatttaagagatgcagcaaaaattctaaaggataagaaaattgcatctcatgtaaaagccatggtcgttccaggatcagggttagtaaaagaacaagctgaacaagagggtttagataaaatatttttaaattctggatttgaatggagagaaccaggatgttccatgtgtttagcaatgaatgctgataaacttaaaccagaggaaagatgcgcatcaacatctaacagaaattttgagggtagacagggtagaggtggtagaacacatttagttagcccagctatggcagcagctgcagcaatttctggaaattttgatgatgtaagaaagtataaaaattaa

SEQ ID NO: 284254 - DNA, 607 bp, Unknown
  Bacterial polypeptide expressing nucleotide sequence isolated from the Sargasso Sea
aatgaaaaagtttaataaattaaaaagcattcctgcatacataccaatagttaatatcgatacggatatgataattcctaaacaatttttaaaaactattaaaaggacaggtttaggaaaaaatctttttttcgagatgaggtatgatgatgagggtaaagaaatttctgactttgttctaaataatgaaccttacaatcaatcaaaaatattaatcactggtaaaaattttggatgtggctcgtcgagagaacatgcgccttgggcacttttagattttggtattacttgcgtaataagttctagttatgcagacatattttacaataattgtttcaaaaatggtatcttaccaataactatcaaagaggaagtaataaaagaattatctgaatattctacaaggaaagaagaaatatccataaacttggaggaccagtctataaaatttgggaataatgaaattaagtttgaaattgatgagtttaaaaaaaaatgccttctagaaggtttagatgatatctctctttcgttagcccagtcttcaaagatttcagcctatgaaagcaaaataaagtcatcgaagccttggatttttaatgattaa

SEQ ID NO: 284255 - DNA, 1399 bp, Unknown
  Bacterial polypeptide expressing nucleotide sequence isolated from the Sargasso Sea
aatgggaaaaacattatttgataaagtatgggactctcatgtcgtaaaaaaaatagatgatgggcctgatgtcctttttattgatagacatatggttcatgaggttactagcccagttgcttttcttggattaaaaaatagaaatataaaagttctttttcctgaaaaaacatttgctacagctgatcacaacacacccactagaaaccagcatttaccagttaaagatattttatcatcaaaacaactaaaagctctagaaattaatgctaaatatcatggtatttcatactggggtcttggtcatgagaaaaacggtattgttcatgttattggtcctgaacatggtataacacttccaggagctaccattgtttgtggcgattcacatacatctactcacggagcttttggagctattgcttttggtataggaacatctgaggttgaaatggttctttcaactcaatgtattatgcaaccaaagccaaaaaaaatgaggataacgattaatggcaaactcaataaagccgttacacccaaagatgtagccttatatattatatcccaattatcaacatctggtgctacgggctattttgttgaatacgccggagaagtcttttcagatatgacaatggaaggtcgaatgactgtttgtaatttgagtatagaaatgggtgcaagaggaggtatgatagctcctgataaaaaaacatttaattatatccaagggagagaatttacacctaaaaatgatgattggaacaaggcaatgaaatactggtcaaatttaaaaactgatgatgaggctatttttgacaaggaaatttcatttgatggatctaaaattgaaccaatgattacatatggcacaaatcctggaatgggaatgtcaattaatggaggtattcctaattctaatcagcatgagggaaataaaaaaacatttttaaagtcattagaatatatggattacaaggaaggcgaaaaagtattaggaaaaaatattgactttgtttttctaggtagttgtacaaatggaagaattgaagattttagagcatttactgaagttgttaaaggaaagaaaaagtctccaaatgtaacagcatggttagtcccaggatctcacaaggttgaaaaagcgatcaaagatgaaggcttattatctattttaaatgaatctggattcgaattaagggaaccaggttgttctgcatgtctagctatgaatgatgacaaaataccaagtggaaaatatgcggttagcacttcaaatagaaactttgagggaagacaaggaccaggttcacggactttacttgcaagcccaatcgttgctgctgctgctgcaataacaggaaaaattactgatcctagagaattaataacttga

SEQ ID NO: 284256 - DNA, 607 bp, Unknown
  Bacterial polypeptide expressing nucleotide sequence isolated from the Sargasso Sea
aatgaaaaaatttataacattaaagagcattccagcttatcttccaattgttaacattgatacggacatgataattccaaaacaatttttaaaaacaattaaaagaactggactaggcaaaaatcttttttttgagatgagatatgacgataacggaaaaaaaattgaagattttattttgaataaagaaccatttaacaaatcaaatattttaataacaggaaaaaattttggttgtggatcctcaagagaacatgcaccttgggctcttttagattttggtattacttgtgttattagtcaaagttatgcagacatattttataacaattgttttaaaaatggaattttaccaataaccatttcagaagaagaaattaaagagttatctgagtattcaataagaaaggaagagatcagtataatgttagaagatcaaaaaatattatttggaaacaaagaaataaaatttgaaattgatcagtttaaaaaaaaatgtttaatagaaggtttagacgatatagctctttcacttgaacaaaaaactaaaattgagatttttgaaaaagatttaaaatcaagtaaaccatggatatttaatgattaa

SEQ ID NO: 284257 - DNA, 544 bp, Unknown
  Bacterial polypeptide expressing nucleotide sequence isolated from the Sargasso Sea
atgaataaatctatttcaaatattttttctggagaggcagtgttcttggataaagctaatgtggatacagatcaaataatccctaagcaatttttaaaatctataaagcgaactggctttggtccaaatttattcgatgcctggagatatcttgataaaggtgatttgaattcagataactcaaaaagaaaattaaatcctgattttattcttaatcatgatctttataaatcttgcaatattttaataaccagagaaaattttggttgcggatcaagtcgggagcatgctgtttgggctttaactgattacggctttacaactatcattgctccatcttttgctgatattttcaaaaataattcctataaaaatggtctcttactcattgaaatagataaagaaaaaattgatgaaatttttaaacaaataacagagaaaaaaactattaacattgaagtagatgttcataatcaatttatttatctagaggaaaagcattcccgtttgaattggatgattttaagaaaaagtttcttttaga

SEQ ID NO: 284258 - DNA, 1264 bp, Unknown
  Bacterial polypeptide expressing nucleotide sequence isolated from the Sargasso Sea
aatagaaaggttagacaacctaatttaactcttgctgttgcagatcataatgttccaacaacagatagaacaaaaggaattgaagatgaggactctaaaatacaagtagaaacacttgaaaaaaactgtaatgaatttggtatcgaattatttgggatgaatgataaaagacaaggtatcgttcatataattggacctgaacaaggatttactcaaccaggaagcataattgtatgtggagatagtcatacagcaacccatggagcttttggtgctttagcttttggaataggtacatcagaaattgagcatgttttagcaactcaaacacttttacaaaagaaatcaaagaattttataattaatgttaatggaaatttaccaacaggcgttacttcaaaagatgtaattcttcaaattataggaaaaataggaaccgcaggtggcacgggttatgttattgaatattctggaaacttaatttcaagtcttagcgttgagcaaagaatgacaatttgtaatatgacaattgaaggaggtgcaagagctggattaattcagcctgatgaaaagatttttaaatatcttaagaacaaaccaatgtctccaaaaaataataattgggacaaagcacttgagtattggagcaacttaaaatctgattctaatgctaattttgataaagaaattaatattgaaggttctgaaattaagccaatggtaacttggggaacttcacctcaagatgttgttgaaatagatggtaaagttccaaatccagaaaatgaaatcgatccagatagaaaaaactcaataaatagatcattaaattatatgggcttaaaaccaaacatgaaaatcaaagatattaaaattgacaaggtttttattggtagttgtacgaacggtagaattgaagacataagagaggctgcaaaaattttaaaaaataaaaaaatagcttcgcatgttaatggtatggtagttcctggatctggattggtaaaagagcaagcagagcaggaaggtttggacaaaattataaaagagtcgggttttgaatggagagaacctggttgttcaatgtgtttagctatgaattctgacaagctaaaaccagaagaaagatgtgcatctacatcaaacagaaattttgaaggtagacaaggaagaggaggaagaactcatcttgtaagtcctgcaatggcagcagcagcagcaatttcaggtaatttggatgatgttagaaagtatcaaaattaaa

SEQ ID NO: 284259 - DNA, 607 bp, Unknown
  Bacterial polypeptide expressing nucleotide sequence isolated from the Sargasso Sea
atgaaaaaatttatatcaattaaaagtattcccgcttacctaccgatagtaaatattgatacagatatgataatccccaaacagtttttaaaaactataaaaagaacaggacttggaaagggtttattttttgaaatgagatatgatcagaatgaaaatttagtcgaagattttattttgaataaaagtccttacaacaaatctgaaattttaattgctggaaaaaattttggttgtggatcttctagagaacatgctccttgggcacttttagactttggaatcaaatgtattattagttcaagttatgctgatattttttataataattgttttaaaaacggaattttaccgataatgattactgaagaagagataaaagaaatttcagattattcaaaaagaaaagaagaaatttttgttaatctaccagatcaaaagattatttttggaaataaagaaataaaatttgaaattgatgaattcaaaaaaaaatgtttgatagaaggtttggatgatattgctttatcattagaaaaatctgaaaagattatttcttttgaaaaaaaaataaaatctacaaaaccatggatatttaatgattaaa

SEQ ID NO: 284260 - DNA, 626 bp, Unknown
  Bacterial polypeptide expressing nucleotide sequence isolated from the Sargasso Sea
tgtacaattttggaaaactttgtattcagataaagactgcaaatttgataaagaaattaatatagatgggaaaaatatagaaccattggtaacttgggggacttcacctcaagacttttcaccagtaactggcattgtgcctgatcctgaaaatgaaaaaaatgaagatagaaaaatggctatgaaaagatcgcttgaatatatgggtttaaaagcaaatactaaaatttcagatataaaaattgataagatttttattggtagttgtacaaatggaagaatagaggatctaagattggctgccgatcttttgaaaggtaaaaggattgccgataatgttagtgcaatggtcgtaccgggatctggattagttaaagagcaggcagaaaaagagggattagataaaatttttaaaaacgcaggctttgagtggagagaacccggttgttctatgtgtttaggaatgaatccagaccaattaaaaccgaaagaaagatgcgcatcaacatcaaatagaaattttgaaggcagacaaggtcgtggtggaagaacacatctagttagtccaggtatggctattgcagctgcaattaaagggcggttaacagacgtaagagaaatataga

SEQ ID NO: 284261 - DNA, 610 bp, Unknown
  Bacterial polypeptide expressing nucleotide sequence isolated from the Sargasso Sea
atggaaaaatttaataatctaaaatcaataccatcatatttatcattacaaaatattgatactgatatgattatccctaagcaatttttaaaaactattaaaagaacaggtttaggaaaaagtctgttctatgaaatgcgatatgatgaaaacggaaacaaaatttcagattttattcttaacaaggaaccatataacaaatctaaaattcttttagctggcaaaaattttggatgcggttcatccagagagcacgccccatgggccctttctgattttggtataaaaagtgtaataagctcaagttttgcggatattttttacaataattgttttaaaaatggaattcttccaattaagatcgacgaaaaaattgtcgttgagctagctgagtattgtaagagaaaagaagaaatcgaaataagtttagaaaagcaagaaataaaatacggtaataaagttgctaaatttgaactggatgcttttaaaaagaagtgcttgatggaaggactagatgatatagctctttcaatggaaaaaatttctaaaatagatgactatgaaaaaaaattacaaaatacaaaaccctgggttttaaataatgtctaaa

SEQ ID NO: 284262 - DNA, 1426 bp, Unknown
  Bacterial polypeptide expressing nucleotide sequence isolated from the Sargasso Sea
atgacgactccttcaacatcaattgctccgaaaaccctgtatcaaaaggtgtgggatgcccacgttgtggcaaccccagagggcgaagcgccgatcatttatgtcgacagacatttggttcacgaagtgacatcaccccaagcctttagtggcttaaaagtggcggggcgtaagttacgtgctccagagaaaaccttcgcgaccatggatcacaacacttcgacgcgcagtgctagcttagatgctttaagccctatggcgcgcactcaggtcgagaccttggcgcaaaactgtaaagacttcggcgtgcgcttatatgacattcatcatcctaatcaagggattgtgcatgtgatggggcctgagcttgggattaccttacccggcactgtcattgtgtgtggtgattcccatacggcgactcatggtgcatttggcgccttggctttcggtattggcacttccgaggttgagcatgtgctggcgacgcaaaccctgcgacaattaaaagccaagaccatgaaaatcgaagtccgtggtcaggtcaccgatggcgtcactgctaaagatatcgtactggcgattatcggtaagataggtatggatggcggcactggctatgtggttgagttttgcggcgaggccattgaagcgctgtcgatggaagggcgcatgactgtctgcaatatggcgattgaaatgggcgctaaggcgggcatggtggcgccggatcaaaccactttcgattacttagaaggccgtgaatttgcaccaaagggcgaagattgggtagaggccgtcaccgcttggaagacgctgaaaaccgatgtcggcgctgagtttgatgccaccgtcgtgttggatgcggccgatatcgcgccgcaactgacttggggcaccaaccctggacaagtggttgccatcgatgcgcctgtgccgaatcctgccgatgaggcaaatccgacgattcgcgctagcatggaaaaagcgctggactatatcggcttgaccgcaggcacgccgatgacagacgtcgcgattaacaaagtctttattggttcttgcactaactcgcggattgaagatttgcgcagcgcggcgaaacaggccaaagggcgtaaagtggcttcgggcgttacggcaatcgtagtgccgggctctggccaagtgaaggcacaggccgaggccgaagggctagataaaatctttatcgaggccggattcgaatggcgcttaccgggttgctctatgtgtttggcgatgaacgatgacagattagaagcgggcgatcgctgcgcctcgaccagtaaccgtaacttcgaggggcgccaaggtcgtggtagtcgtacccatttggtgagtcctgcgatggcggcagcggcggcgatcgctgggcattttgtcgatatccgcaaaccttactaac

SEQ ID NO: 284263 - DNA, 610 bp, Unknown
  Bacterial polypeptide expressing nucleotide sequence isolated from the Sargasso Sea
aatggataagtttcattctttaaaaggtatcgcagctcctttaccaattgttaatatcgatactgatatgatcatcccaaagcaatttctcaaaacaattaaaagaactggtcttggtgtaagtttgttttatgagatgagatatgataacgatggaaacctcattaaagattttgttttgaatacatctccttttgatcagtcaaaaattttggttgctggtgataattttggttgtggatcaagtagagaacacgccccttggtctcttaaagattttggaataagaagcgtaatttcaacaagttttgcagatattttctataataattgctttcaaaatggaattttaccgatagttgtcagccctgaaaacctcgatcaattaatgacagcagctaaaaatcaaattgagttcactatcgaccttccggagcaaatcattaaagctggcaatcatacaatcaattttgaaattgaagaattcagaaaagaaagacttttacagggattagacgatataggcattacccttggttaccaagacaaaattaatgcatacgaagaggataaaaaaaataaaaaaccttggttatttaaaaaaaattaa

SEQ ID NO: 284264 - DNA, 1144 bp, Unknown
  Bacterial polypeptide expressing nucleotide sequence isolated from the Sargasso Sea
tttaagaaataactgcaaagaatttggaataactctatttgatttgggggacgagcgttcaggaattgtgcatgtgataggaccagaacaggggctgacgctaccttggtcaactatagtctgtggggattcccacactgcgactcatggagcttttggtgcactggcttttggcattggaacttctgaagtagagcatgtactggccacacagaccttgcagcagaagaaaccaaaaaccatgctcgttgaagttgagggcatgcttccaaaaaatgtaactccaaaagatattattctttcaattattgggaaaataggtactgctggaggcacaggttacgtcattgaatatgcaggagatgcaattcgaagcatgtcgatggagggacgaatgaccctttgcaatatgacaattgaggctggtgcacgtgctggtatggttgctccagatgaaacaacatttgaatatcttaaggacaagcctttttctcctaaaggggatgctttttttgatgcaatttcagtttggaaaaaactgccaagtgacgaagatgcagaatttgatatttcggtgaatatcaatgcacaagatgtgttgccccaggttacatggggaacaagccctggcatggttacagatataaacaacaaagtcccagacccagcgaagatacaaaatccttccgaaaggaaatctgtggaaaatgctttgaaatatatggatctaaaggcaaacatacctatcaaggaaataagtattgatagggtttttattggctcatgcacaaattcacgcatagaagatcttcgttctgtagcagagtttgtaaaaggacgtaaagtaagtgacgaagtctctgccatgatcgttcctgggagcggtttgatcaagcagcaagcagagcaggaaggattggatgaaatatttattgcagcaggctttgaatggcgacaaccaggatgttccatgtgcctagcgatgaatgatgatatacttaaacctggtgagcgttgtgcttcaacaagtaatagaaactttgaaggccgtcagggtaagggaggacgtacccatctagtaagcccattgatggcagcggctgccgcggtagcgggacattttgttgatccacgcacctactag

SEQ ID NO: 284265 - DNA, 414 bp, Unknown
  Bacterial polypeptide expressing nucleotide sequence isolated from the Sargasso Sea
aatgcccaatactctttacgataaaatttggaaagatcacttagttgatcaacaaaatgatggtactgccttattgtttgttgatcgacatttagttcatgaagtaacaagtccccaagctttcgaaggacttagaaatactaatcgtaaagttagacatccaaaattaactctagcagttgcagatcataatgtccctacaactgacagatctaaaggtatttccgatcacgagtctaaaattcaagttgatactttagagtctaattgtaaagaatttggggttcagctatttggaatgaatgataaaaggcagggaattgttcatattattggacctgaacaaggatttactcagccgggcacagtaatagtttgtggagacagtcacacagcaactcacggagcatttgg

SEQ ID NO: 284266 - DNA, 1399 bp, Unknown
  Bacterial polypeptide expressing nucleotide sequence isolated from the Sargasso Sea
atgtctaaaactctatacgataagatatgggaaaaccatcttgttcatgaacagagcgatggaacgtcattaatttatgttgatagacatttagtccatgaagttacaagccctcaagcttttgaagggctcagattacaaaaaagaaaagttagacgaccagaattaactcttgcagtgcctgaccacaatgttcctactaccgacaggtcaaaaggtataaatgatgcggactctagaattcaagtagaaacattaagaaaaaactgcaaagactttggagtagaactttttgatgttaatgataagcgtcagggcatagtccatattataggaccagaacaaggttttacacagccaggtacagtaatagtatgtggagatagccatactgctacacacggagcattcggtgcattagcttttggaatagggacatccgaagttgaacacgttcttgctacacagactttaatgcaaaagaaatcaaaaaatttgagaataaacgttaatggtaatttacccaaaggagttaccgcgaaagatgtaattttaaaaattattggcacgattggaactgcaggtggaactggatacgtcgttgaatttgccggcgatgtaattaaaagtttaagcatggaagagagaatgactgtttgtaatatgaccattgaagcaggggcaagagctggattaatcgcaccagatgaaaaaacatttagttatttaaaaggtaaaactatgtcaccaaaaggagaaaattgggataaagctgtagaattttggaaaactttgtactcagataaagactgcaaatttgataaagaggtaaatattgatggcaaaaatatagaaccacttgttacttggggcacttcacctcaagatgtatcaccagttactggtgttgtgccggatccagaaaaagaaaagaacgaggatagaaaaatggccatgaaaagatctcttgattatatgggattaaaagcaaacaccaaaatttcagacataaaaattgacaagatttttataggaagctgtactaatggaagaatagaagatttaagattggctgcagatcttcttaaaggcaaaaaaattgccgaaaatgtcagcgctatggtcgttccaggatctggattggtcaaagagcaagctgaaaaagaaggaattgacaaaatattcaaagaagcaggctttgaatggagagagcctggctgttcaatgtgtttgggcatgaatccagatcaattaaaacctagagaaagatgtgcttcaacatcaaatagaaactttgaaggcaggcaaggtcgtggaggcagaacacatttagtcagcccaggaatggctatcgcagcagcaattaaagggcatctcactgatgtaagagaaatataat

SEQ ID NO: 284267 - DNA, 493 bp, Unknown
  Bacterial polypeptide expressing nucleotide sequence isolated from the Sargasso Sea
tatggaaaagtttaacaacttaagatcaataccatcatatctatcattgcaaaatattgatacagatatgattatcccaaagcaatttttaaaaaccattaaaagaacaggtttaggtaaaagtttattttatgaaatgcgttatgatgaaaatgggaaaaagaatgtcaattttattttaaataaagaaccttacaataaatcaaaaattcttttagcaggaaaaaattttggatgcggttcatctagagaacacgctccatgggctttatctgattttggcataaagtgtgtaataagtgccagcttcgcagatattttttataataactgttttaaaaatggaattcttccaattaaaattgatgataaaattgtgattgagttagctgaatattctaataggaaagaggaaattgaaattagtttagagaggcaagaaataaaatatggaaataaagtttcaaattttgaacttgatcccttaaaaaga

SEQ ID NO: 284268 - DNA, 1405 bp, Unknown
  Bacterial polypeptide expressing nucleotide sequence isolated from the Sargasso Sea
atgccaaagactttatacgataaaatctggagtgatcacttagtccaccaacaggatgatggaacatctttgctatttgtggacagacatttgatacatgaggtgactagcccacaagcttttgaaggacttagaaatagtaaaagagatgtaagacatccaaacttaacccttgctgttgttgatcataatatacctacaactgatagatctaaaggaattgatgacaacgactctagaattcaagtagaaacacttgaaaaaaattgcaaagattttgatatcaaactttttggaatgaatgataaaagacaaggaatagttcatatagtaggacctgagcaaggctttactcaaccaggaacagttattgtttgcggagacagtcacaccgcaactcacggcgcttttggggctttagcgtttggaataggaacctcagaagttgaacacgttttagcaacacaaactcttgttcagaaaaaagcaaagaattttagaattaatgttaatggaaaacttcctttaggagtaacttcaaaagatgtaattcttcaaattattggaaaaataggaacagctggaggaacgggatgtgtattagaatatgctggttcagtcatatcaaatctttctgtcgaacagagaatgactatttgtaatatgtctatagagggtggagctagagcaggattaattcaacccgatgaaaagatttttaattatctaaaagatagaccaatgtctccaaaaaaagaaaactgggaaaaagctcttgattattggagtaaattaaaaagtgatagtgatgcaaaatttgataaagaaattaatttaaaaggtgatgaaatagcgcctatggttacatgggggacttcgcctgaggacgtagtttcaattaatggaaaaatccctaatccagaaaatgaaaaaaatattgataaaaagaattcaataaatagatcgcttgattatatggggcttaaacctgatgtgaaagtccaagacattaaaattgataaagtttttattggaagttgtacgaacgggagaattgaagacttgagagaggctgcacaaatattaaagaacaagaaaaaagcttcacatgtacatggaatggtcgtccctggttctggtttagttaaagaacaagctgagcaagaaggtttagataaaatattcatagagtctggttttgaatggagagagccaggatgttcaatgtgtttagcgatgaatgctgataaactaaaacctcaagaaagatgtgcgtccacttctaatagaaacttcgaaggaagacagggaagaggaggaagaacccatttagtaagtccaggtatggcagccgctgctgctatcgccggaaatttagatgatgttagaaaatatcaaaactaat

SEQ ID NO: 284269 - DNA, 607 bp, Unknown
  Bacterial polypeptide expressing nucleotide sequence isolated from the Sargasso Sea
atgaaaaaatttacttcacttaaaagcattccagcctatttaccgattgtaaatatagatacggatatgattattcctaaacagtttttaaaaactattaaacgtacaggattaggaaaaaacttatttcacgagatgaggtacgacgatgatggaaaaaatatagataattttatattaaacaaatccccatataacaattcaaaaattttaatagccggaaataattttggctgtggatcatcgagagaacatgctccgtgggcacttttagactttggaataacatgtgtaataagctcaagttatgctgacatattctataacaattgttttaaaaatggtattttgccgataatcctcgatgaagaaaaaataaaagagttagccgaatattcaaaaagaaaagaagaaattgaaattgatttaaaggaagaaaaaattctttttggaaataatgaattaaaatttaaaatagatccttttaaaaagaaatgcttgatcgaaggtctagatgatattgctttatcattagaaaaatcatctcatatcaacgagtttgaaaaaaaggttaagtcagtaaggccttggatttttaatgattaaa

SEQ ID NO: 284270 - DNA, 574 bp, Unknown
  Bacterial polypeptide expressing nucleotide sequence isolated from the Sargasso Sea
aatcttgaaggtaaagacatcaaaccaatggtaacttggggtacttcaccacaagatgtgttgactatagatgaaaatgttccaagtccagagagtgaaacagatttagataaaaaaaactctattgaaagatctttaaaatatatgggtttaaagccaaacacgaaaataaaagatattaaaattgataaggtttttattggaagttgtactaacggtagaattgaagacttaagagaggctgcaaaaattttaaaagacaaaaaaattgcgggtcatgttaatgcaatggttgttcctggatcaggtttagtgaaacaacaagcagaacaagaaggattagataaaatatttataaattcaggttttgaatggagagaacctggatgttcaatgtgtttagctatgaatgctgacaagcttaaacctgaagaaagatgtgcatctacatcgaatagaaattttgagggaagacaaggtagaggcggcagaacgcatcttgtaagtcctggtatggctgctgccgctgcaatttctggtaatttagatgatgtaagaaagtatcaaaattaat

SEQ ID NO: 284271 - DNA, 607 bp, Unknown
  Bacterial polypeptide expressing nucleotide sequence isolated from the Sargasso Sea
atgcaaaagtttaacaaattaaagagtattccagcatatttaccaattgtaaacattgatacagatatgcttattccaaagcaatttctaaaaacaattaaaagaacaggtctaggaaaaaatttattttttgaaatgagatatgatgataaaggaaatataattaaagaatttattttaaatcaagttccatttaatcaatcaaaaatattaattgctggtaaaaactttggatgtggatcatcgagggaacatgcaccttgggcactgttagattttggaattacatgtgttatcagctcgagctatgctgatattttttacaataattgttttaaaaatggaatattgccaattatattggatgacgaaaaaattaaacaaatttcagagtactcaaaccgaaaagaggaaatagaggttgatctgcaaaatcaaaaaattttatttgggaataatgaaattggttttgatatagactctttcaaaaaaaaatgtcttttagaaggtctagatgacatcgcattatcattagagaaaactgaaaaaataatatcctttgaaaaaaatttaaaaaattcaaagccatggatatttaatgattaaa

SEQ ID NO: 284272 - DNA, 664 bp, Unknown
  Bacterial polypeptide expressing nucleotide sequence isolated from the Sargasso Sea
gctgccgccgccgtcaccggccgcttcgccgatattcgcgcgttgtaattacgaggagaacaagatgacaggcttcaaacagcataaagggatcgtcgtccccctcgacagcgccaacgtcgacaccgacgccatcattcccaagcagtttctgcagaaggtcaaccgcatcggttttggcaagcacctgttccacgactggcgcttcctcgacgatgcaggccagcagcccaaccccgagttcgtgctcaaccagccgcagttcgccggcgccagcatcctgctggcccgcgagaacttcggctgcggctcgagccgcgagcacgccccctgggcgctggccgactacggcttcaagaccatcattgccccgagcttcgccgacatcttctacggcaacgccatcaacaacggcatggtgccggtgcgcctgaaggaggaggaggtcgaggccctgttccagctggttgccgcccagccgggcatcgagatcgaagtggatctggaggccaatcaggtgcgagcaggtagcctctgcttcggcttcgagatcgacgagttccgccgttactgcctgctcaacgggctcgatgccatcggcctgaccctgcagcacgaagccgccatcagcgccttcgaggcgaagcagcccagctggatttga

SEQ ID NO: 284273 - DNA, 676 bp, Unknown
  Bacterial polypeptide expressing nucleotide sequence isolated from the Sargasso Sea
aatgggatacaccatatatgacaagctctggaatgagcacttaataagatcctatgatgatggagactccctaatctatattgatagacattttcttcatgaagtaacgtctcctcaagcttttgagggcctcaaaaagaaatcactcaagccatggagaatcaatgcaaacatagctactccagatcacaatgttccaactacaagaaataacaaatttagcattgagaatattgaagacaatatctcaaaattgcaggttatcgagttagataaaaattgtaacgatttcggtataaaacaatttaatatcaactcaaataaccaaggcatagttcatgtaattgggccagaattaggcttaacgcttcccggaatgagtattgtttgtggcgactctcatacttcaactcatggtgcttttggttgtctcgcaatgggaattggaacatctgaagtggagcatgttcttgccactcaaagtttaaaagtaaggaagcttaaaaatatgagaataaattttgaggggtcgatacaaaaaggagtatcctcaaaagatattattttatatttaattaggacaataggaactgcaggtggaacaggttatgcagttgaatttgcgggatcatatattcgaaatatctctatggaagccacgaatgacaatatgcaa

SEQ ID NO: 284274 - DNA, 321 bp, Unknown
  Bacterial polypeptide expressing nucleotide sequence isolated from the Sargasso Sea
catgcctaagactctttacgataaattgtgggattctcatgaggttgctcaaagagaagatggttcatttttgctatatattgataggcatctaatacatgaagtaacatctcctcaagcctttgagggtttaaagatggcaggtagagaaccttggagggtgtcttcaaatatagcgactcctgaccataacgttcctactacaaatagagaaaaaggaattgaaggaatagaagatgaagtatcaaaacttcaggtgacaactctagataaaaactgttctgatttaggtattcttcagtttgatattttagacaaaag

SEQ ID NO: 284275 - DNA, 643 bp, Unknown
  Bacterial polypeptide expressing nucleotide sequence isolated from the Sargasso Sea
atgaaatctaatagcgagggattaatcatagatggagttgttgcatatatagatagagataatattgatactgatcaaattatccctacagaatatttaaaatctattaaaaagtttggctttgaagattatctttttgatggttggagatataaagatgatggaaagctaggtatcacaaaggatcaaagagtgattgatgaaaactttatactcaataaaaatcctttcaatgaatcgaaaatacttttaactcgagataattttggatgtggctcatcaagagaacatgcagtttgggcgttgcgagattttggtataaaagctgtaatagcatcctcttttggggatattttttataataattcttttaaaaatggcgttttgccaattaagttagaaaaaaaagagatagacttcttatttgatcaaacccagcaaaaagttcttgaactctcaataaacttacaaaagaaagaaatcaactgtggtgaaaaaactatttcttttcatgttgataaacatcttatagatagaattatttatggactagacgatgttgatataactttaaaggaaaaagataaaatctttgattttgaaaggactagaattgaagaaagaccttggatattcaaatgag

SEQ ID NO: 284276 - DNA, 1405 bp, Unknown
  Bacterial polypeptide expressing nucleotide sequence isolated from the Sargasso Sea
atgaagactttatacgacaaactctgggaagagcatcacgtcacccaactcgattcgggagagtcacttttatatattgatagacattatttgcatgaggtcacatctcctcaggcatttgagggactaattaagaaaaatttaaagccctggaggcttaatgccaacattgctactcctgaccataatgtacctacaacaagaggtaataattttaattctgaatcaataactgatgaaatttcaaagattcaagtagttgaattggataagaattgtaataaatttggtattaaacaatttgacatagagtcaaataaacaaggcattgttcatgttattggacctgaattaggttttacaattcccggaatgactattgtttgcggagattcacacacatctacacatggagcgcttggttgtttagctatgggtataggaacttctgaagttgagcacgttcttgctacccagtgcctaaaagtttctaaattaaaaaatatgaatgttagatttgaaggagaggtagatgagcatgtttcttcaaaagatattgttttatatttgattggacaaataggtactgcaggtggaactggttacgccattgaattttcaggatcatacataagtagcatatctgtcgagggaagaatgactatttgtaacatggctattgaagcaggagcaaaagttggattaattgccccagacaataaaactattgagtatgttaaaagtaaatcatttcttgatgaagacacttttaatcaagcaaaggagtattggaaaactcttaagtcagatgatgatgcaaaatttgataaagaaataaccatagatgtatcaaaaattaaaccacaagttacatggggtacttcacctgagatggtattgaattatgatgaatcaattccaacagtatttgataccaatgatgaaaacaaaaagaatgttgagttggcaagagactatatgggcattgaaaatgaaacaaaattatctgatttaacattcgataaagttttcattggatcttgtacaaattctagaattgaagatttaagacaagctgctgaaatagttaagggtaaaactattgcatcaaatatttcagaagctattgttgtgccaggatctggccttgttaaagaacaagcagaaaatgaaggattagataaagtttttactgatgcaggttttatttggagagatcctggatgttcaatgtgtctcggaatgaatccagatcaactcaaaccttatgaaagatgtgcgtcaacctcaaatagaaactttgaaggaagacaaggatacttaggtaggactcatttgatgagtccaattatggcagcctatacagcaattaatggaactataggagacccttatgaaatctaat

SEQ ID NO: 284277 - DNA, 652 bp, Unknown
  Bacterial polypeptide expressing nucleotide sequence isolated from the Sargasso Sea
atggaaaaattcactgtgcataccggcgtcgtggcgccgctcgatcgcgagaacgtcgacaccgacgcgatcatcccgaagcagttcctgaagtcgatcaagcgcacgggcttcggtccgaacgcgttcgacgaatggcgttatctcgatcatggcgagccgggccaggacaactcgaagcgtccgctgaatcccgatttcgtgctgaaccagccgcgctaccagggtgcatccgtgctgctcgcgcgcaagaacttcggctgcggcagctcgcgcgagcacgcaccgtgggcgctgcagcagtacggcttccgcgcgatcatcgcgccgagcttcgctgacattttcttcaacaactgctacaagaacggcctgctgccgatcgtgctgaccgagcagcaggtcgatcacctgttcaacgagacggtcgcgttcaacggcttcgaggtgacggtcgacctcgacgcgcaagtcgtgcgcacgggcgacggccgcgagtatccgttcgagatcgccgcgttccgcaagtactgcctgctgaacggcttcgacgacatcggcctcacgctgcgccacgcggacaagatccgccagttcgaagccgagcgcctcgtgaagcagccgtggctcaacaccaagctggtcggctgag

SEQ ID NO: 284278 - DNA, 784 bp, Unknown
  Bacterial polypeptide expressing nucleotide sequence isolated from the Sargasso Sea
atttcaagtttaagtgttgagcaaagaatgactattgcaaatatgaccatggagggtggggcaagagctggcctaatagaacctgacacaaaaatttttaattatctaaagggaaaaccaatgtcaccgaaaggtgaaagttgggacaaagccattgaatattggagcaaattgaaaactgataagaatgcttactttgataaagagataacattggatggtgttgaaataaaaccaatggtgacatgggggacatcaccccaagacgttgttgaaatagatggcaaagttcctaatcctgataatgaaagtgatgaggatagaaaaaactcaattacaagatctttaaattatatgggtctaaaacctaatactaacattaaagatattaaaattgataaagtatttataggcagctgtacaaatggaagaatagaggaccttagagatgctgctaaaattttaaaagataaaaaaattgcatcacacgttaatgctataattgtgcctggctctggattagtaaaagaacaagcagagcaagaaggcttagataaaatttttaagcaatctggttttgagtggagagagccgggttgttccatgtgccttgctatgaacgctgataaacttaagcctgaagaaaggtgtgcctcgacctcaaatagaaattttgagggaagacaaggaagaggcggaagaactcatttagtcagcccaggtatggcagcagcagccgcaatatctggaaatttggatgatgtaagaaagtacgaaaattaat

SEQ ID NO: 284279 - DNA, 424 bp, Unknown
  Bacterial polypeptide expressing nucleotide sequence isolated from the Sargasso Sea
tttaaaaccagatgttgcaatgaaagatcttaaaatagacacagtttttataggtagctgcacaaatggaaggatagaagatcttagagaagcagctcaaatattaaaagataaaaagaaagcagcacatgttcatgcaatggtagttcctggttctggacttgtaaaagaacaggcagagcaagaaggtctagacaaaatatttattaattcgggttttgagtggcgagagcctggatgttcgatgtgtttagctatgaatgctgataaattaaagccagaggaaagatgtgcatctacatcaaatagaaacttcgaaggtagacaaggaagaggtggaagaacccacctagtaagtccaggtatggctgctgctgcagcaattgctggcaatctagatgatgttaggaaatatcaaaaataa

SEQ ID NO: 284280 - DNA, 1195 bp, Unknown
  Bacterial polypeptide expressing nucleotide sequence isolated from the Sargasso Sea
tagatcaaaaggcataaatgatgaggactctagaattcaagtagaaacattaagaaaaaattgcaaagactttggagtagaactttttgatgttaatgataaacgtcaaggcatagtccatattataggtcctgaacaaggattcacacaacctggaacagttatagtatgtggcgatagccataccgctacacacggagcattcggtgcattagcttttggaataggaacttccgaggttgaacatgttcttgctacacaaactttaatgcaaaaaaaatcaaaaaatttaagaattaatgtaaatggtaacttaccaaagggagttactgcaaaagatgtaattttaaaaattataggtacgattggaactgcaggagggactggatatgtagtcgaatttgctggtgatgtgatcaaaagcttaagcatggaagaaagaatgactatttgtaatatgactattgaagcaggagcaagagcgggtttaattgcgcctgatgaaaaaacatttgattatttaaaaggtagaaccatgtcacctaaagatgataattggacaaaagccgtagagttttggaaaactttatattcagataaagattgtaaatttgacaaagaaataaacattgatggtaaaaatattgaaccattagttacttgggggacctcacctcaagacgtttcaccagtaactggcgttgtaccagatcctgataatgagatgaacgaagatagaaaaatggctatgaaaaggtctcttgattatatgggtttaaaagcaaacactaaaatttgtgacattaaaattgataaaatttttataggaagctgtactaatggaagaattgaggatttaagattagccgcagaacttttaaaagggaaaaaaattgctgaaagtgttagtgccatggtcgtcccaggctctggtttagtgaaagaacaagctgaaaaagagggtattgataaaatcttcaaagatgcaggttttgaatggagagagcctggttgttcgatgtgtttaggcatgaatccagatcaattaaaacctaaggaaagatgtgcatcaacttcaaataggaattttgaaggtagacaaggtcgtggaggaagaacacatttagttagcccaggtatggctattgcagctgcaattaaaggaagattaactgatgtgagagaaaatataaaa

SEQ ID NO: 284281 - DNA, 1204 bp, Unknown
  Bacterial polypeptide expressing nucleotide sequence isolated from the Sargasso Sea
acaactactgatagggaaaaaggtatagataatgaagaaagccgtattcaagttgaagcgcttgacaaaaatgcacaagaatttggggttcattattatcctgtatccgatatccgtcaaggaattgttcacatagtcggccctgaacaaggttggacattacctggtatgacggtcgtctgtggtgatagccatactgcaacccatggcgcttttggagcattggcacatggaattggaacatcggaagttgagcatgttttagcaactcaaaccttaattcagaagaaatcaaaaaatatgaaagttgaaattaagggcaaactacgaccaggggttacagctaaagatatcacgctttcggtcataggagcaacgggaactgctggtggcacaggttacgttattgagtactgcggagaagctattcgtgatctttcaatggaaggcagaatgactgtttgcaatatggcaatcgaaggaggtgctcgtgctggtttgattgcacctgatgagaaaacttttgaatattgtaaaggtcgtccacacgctcctaaaggagcagcttgggaacaggcagtggagtattggaagacgctattcacggatgagggtgctgattttgataaaataattgaaataaacggtgacgatatcgcccctgttgttacatggggaacttctccagaagatgtgcttccaattactgagattgttccagcacccgaaaacttccaaggaggtaagatagaggccgtaaaaagatcgcttgattatatggggctgactgctgggcaaaaattgacggacataaaaattgatactgtttttataggttcatgcacaaatggccggatagaagatttgcgtgctgctgcaaaaatcctcgaaggtaaaaaagttaaagatggtatgcgcgccatggtggttcctggttcaggcctggtgcgagcccaagccgaagacgagggattggctgatatattcaagcaagcgggttttgaatggcgtttggctgggtgttcgatgtgcttggcaatgaacccagatcaattaagtgaaggtgagaggtgcgcctcaacttcaaaccgtaacttcgaaggacggcaaggctataaggggcgtacgcatttggtatcgccggccatggcagcagcagcagcagtcacaggacatttaactgacgtccgggagatgatttgat

SEQ ID NO: 284282 - DNA, 480 bp, Unknown
  Bacterial polypeptide expressing nucleotide sequence isolated from the Sargasso Sea
taaaaagaaaatctactgaggatgcattaaattatatggggttaaaaccaaatactaatattgaagatattaaaattgatactgtgtttattggatcatgtacaaatggtagattagaagatttaattgcagcaagcaaagtaattcaagggaataaagttccatccaatgtaaatgccatcgtagttcctggatctcagatagttaaaattaaagcagaaaaattaggacttgataaaatcttcaaagatgctggttttgattggcgagaatctggatgtagcatgtgtcttgcaatgaatcctgataaattgtctcctggcgaaaggtgtgctagcacttcaaatagaaattttgaaggcagacaaggcaaaggtggcagaacccatttggttagtcctgtaatggctgctgcagctgcaattaacggaaggtttactgatataagatcccttaatcttgatttgggagaatattaaa

SEQ ID NO: 284283 - DNA, 828 bp, Unknown
  Bacterial polypeptide expressing nucleotide sequence isolated from the Sargasso Sea
ccaccgaaggaggtgccggttatgtcattgaatacactggagagtgtattcgtagccttggtatggaacagcgaatgacagtttgcaatatgtcaattgaagcgggtgcccgtgcaggtatgattgcaccagacgcagtaacatttgattatctccgtggtcgagatttcgtgccaagggactttgaaaaagctgttcaagaatggcagaagcttccttctgatgaaggggcaacgtacgaccgagtagaggtttttgaatcggctgatattgtgccgcaggtgacctggggaaccaatccagcccaagtcgtgggcgttgatgcagccgttcctaatgtcggtgcgatgagcgatccaagtgagcggtcttcaggagagaaggcgcttgagtacatggggctctcttctggtactcagattacagatattccacttgagcgagtttttattggatcgtgcacgaatagtcgtattgaggacctacgggcagcagctgccgttgttcgagggtaccacgtttcgagagatgttcatgccatggttgtacctggtagtggtcgtgtgaagcgtcaggcagagcatgaaggacttgataaattatttgtagcagcaggatttgaatggcgagaagctggttgcagcatgtgtcttgcgatgaatccagatactctttcggcgggtcaacgatgtgcctcgacgagtaaccgaaattttgagggtcgacaaggacagggaggccgaacccaccttgtttcccctgctatggcagcggcggcagcagttgagggacattttgttgatgtccgaaaatggcagtatcaatagt

SEQ ID NO: 284284 - DNA, 919 bp, Unknown
  Bacterial polypeptide expressing nucleotide sequence isolated from the Sargasso Sea
aaagaaatcgaaaaatttaagaataaacgttaatggcaatttaccaaagggagttactgcaaaagatgtaatcttaaaaattattggtacgattggaactgcgggcggaactggatacgtagttgaatttgccggcgatgtgattaaaagtttaagtatggaagagagaatgactgtttgtaatatgaccattgaagcaggtgcaagagctggattaatcgcaccagatgaaaaaacatttagttatttaaaaggtaaaacaatgtcgccaaaaagtgaaaattggactaaagctgtagaattttggaagactttgtattcagacaaagactgcaaatttgataaagaggttaatattgatggcaaaaatatagaaccacttgttacttggggcacttcacctcaagatgtatcaccagttactggtgttgtaccagatccagaaaaggaaaataacgaggatagaaaaatggccatgaagagatctcttgattatatgggattagaagcaaacactaaaatttcagacataaaaattgataagatttttataggaagctgtacaaacggcagaatagaggatttaagattggctgcagatcttttaaaaggcaaaaaaattgctgataatgtaagcgctatggttgttccaggatccggattagttaaagagcaagctgaaaaagagggaattgacaaaattttcaaagaagcaggttttgaatggagagagcctggttgttcaatgtgtttaggtatgaatccagatcaattaaagcctaaagaaagatgtgcttcaacatcaaataggaactttgaaggcagacaaggtcgtggaggaagaacacatttagtaagtccagggatggctattgctgcagcaatcaaagggcatctaactgatgtaagagaaatataa

SEQ ID NO: 284285 - DNA, 1168 bp, Unknown
  Bacterial polypeptide expressing nucleotide sequence isolated from the Sargasso Sea
aaaattcaagtagagactttagagaaaaatgtaaaagaatttggaattaaattgtttggcatgaacgacaaaagacaaggtatcgtccacatcatagggccagagcaaggttttactcaaccagggacagtaattgtgtgtggagatagtcatactgcaacccatggagcatttggagctttagcgtttggaattggaacatctgaagttgaacatgtattagcaacacaaactttggtacaaaaaaaatctaaaaacttaagaataaatgtaaatggaaaactttcaattggtgtaacatctaaagatgttattttacaaatcattggaaaaattgggacggccggaggaactggatatgttatagaatatgctggtgatttagtttcttcattaagcatggagcaaagaatgacaatttgtaatatgactattgagggtggagcgagagctggactgattaaaccagatgaaaagacattcaaatatttaaaagatagacctttgtctcctaaaaaagaaaattgggataaggctttaaattattggagtaaactttattcagatgataacgcaatatttgataaagaagtaaaacttgacggcaaagatataaaaccgatggttacttggggaacctctcctcaagatgttgtacctattgatggaaaggtgccaaatccaaaagatattactgatccagataagaaaagctcaattgaaagatctttaaaatacatgggattaaaaccagatataaatgttaaggatataaaaatcgataaggtatttatagggagttgtacaaatgggagaattgaggatttaagagaagctgcaaaaatattaaaagataaaaaaatagctaaacacgttaatgcaatggttgtgccaggttcaggacttgtaaaagaacaagcagagcaggagggattagacaaaatatttattagctcaggttttgaatggagagaacctggatgttcaatgtgcttagcaatgaacgcagataaattaaaacccgaagagagatgtgcgtctacttcaaacagaaactttgaaggacgtcaaggcagaggtggacgaactcatttagtaagtccagcaatggctgccgctgcagcagtttctggtaatttagaagatgtaagaaaatattccaattaat

SEQ ID NO: 284286 - DNA, 607 bp, Unknown
  Bacterial polypeptide expressing nucleotide sequence isolated from the Sargasso Sea
aatgaaaaaatttacaaatttaaaaagcattccagcttatttgccgatagtcaatattgatacagatatgataatacctaaacaatttcttaaaactattaaaagaacagggctaggaaaaagtttgttttttgaaatgcgatatgatcaagatggtaatgaaataaaagattttattctaaataaagatccatataaaaattcaaaaatattaattgctggaaaaaattttggttgtggatcctcgagggaacatgctccttgggcgcttttagattttggaattacttgtgtaataagttccagttatgcagatattttttataacaattgttttaaaaatggaattttaccaatcacaatttcagaggacaagattaaagaacttgctgagtactctacacgaaaagaagaaattaaagtcgacttaattgagcaaaaaattagttatggaaataatgagattaaatttgatatcgatgattttaaaaaagaatgtttaattgagggttacgatgacattgctttatctttaaatcacaagtcaaaaatacaagaatttgagaataaaattaaatctgaaagaccatggatatttaatgattaa

SEQ ID NO: 284287 - DNA, 1259 bp, Unknown
  Bacterial polypeptide expressing nucleotide sequence isolated from the Sargasso Sea
taatcgtcctgtgcatcgaccagaagcaaccatagctgttgcagaccataatgttcctacaataaatagacaaaatattgaggatccacaaagcaaaatacaagttgaaactttagcaaaaaataccaaagaacatggaattcaatattttgatttaatggatcagagacagggtattgttcatataattggaccagagcaagggattacccaacctggaatgacaatagtctgtggggatagccacacctctacccatggagcatttggggcactcgcttttggtattggcacaagtgaagtagaacacgtattagctacacaaacaatagttcaaaaccccgctaaaaacatgagaatatcagtaaatggcgaccttccttttggcgtcaattcgaaggatttaatcctatatataattggaaagattggaacagcgggtggaactggacatgtaatcgagtatgccggatcctctattatgggactctctatggagggaagaatgaccatatgtaatatgagtattgaagctggagcacgtgctggtttaatcagccctgatcaaacaactttcaactatattaaaggaagaccttatgcacctagtgctgatcattgggatcaagcagtggaatactggtcgtctctcccatcagataatgatgctaactatgatcatgaaattgttattgatagctccgagattgacccaatggtgacgtggggcactagtcctgaagatgttgtatctgtaaaaggattggtaccaaacccaagtagcgctcaaacagaaaataaaaagaaaagtattgagagatcccttgaatacatgggtcttaaacctggaacaaaaataacagatataaaattagataaaatattcattggctcttgtaccaatggtcgaattgaagatcttagaaaagttgcttctattgttaaggataaaaaaatcgcttcacatgttcaagctatgatagtcccaggatcaggtttggttaaaaagcaagcagaagaagagggaatagatataattttaaaagatgctggctttgaatggagagaggctggatgctctatgtgccttggtatgaatcctgatcaattaaaacctggcgaaagatgcgcctcaacttctaatagaaattttgaaggtcgacaaggtcgaggtggaagaactcatttaatgagcccagaacttgcggcagcttccgctattacagggaacatttcagatataagagatttcacttaag

SEQ ID NO: 284288 - DNA, 1363 bp, Unknown
  Bacterial polypeptide expressing nucleotide sequence isolated from the Sargasso Sea
gggctatcatcttgtagatgagcaagttgatggcacatgtttaatttatattgatcgtcatttagttcatgaagtaacaagtccgcaagcttttgaaggacttcgtaataccaacaggaaagtgagaagacctaagaacacttttgctgtagcagatcacaatgttcctacaacagatcgttcgaaaggtatagaaaatttagaaagcagaatacaagtagaaacattagaacaaaattgcaaagattttgatataactctttttcctttattagataaaagacaaggcattgttcatattgttggacctgaacaagggattacacaaccaggaatgacaattgtttgtggagatagccataccgctacacacggagcgtttggctctttagcatttggtataggtacaagcgaggttgagcatgtattagctactcagactttgatacaaaaacctgctaagaatatgcttattaacataaacaatgatgttttatcaggagtcacagcaaaagatatcattttacatatcataggtcatattggtactgcaggaggtactggatacgtaatagaatatgcaggtaaagcaattgaaaacttaagtatggaaggaagaatgactatttgtaatatgagcattgaagcaggagcaagggcaggtctaattgcccctgatcaaactacttttgattatatcaaaggcagaccatatgcaccacaaggcgatgattgggataatgctcttaaattttggaaatcattaccttcggataaaaatgcaaaatatgataaagaaattaacatcaatgcagaagagatagctcctcaaattacttggggaacaagccctcaggatgttgtacctattaatggcaaggttccaaatccatcgtatataaaagatgtaaacagaaagaaatctatagaaagatcattagaatatatgggtttagaacccaatcaagagattgaaaaaataaaaatagataaagtatttattggatcatgtacaaatggtagaattgaagatttaagagaagtagcaagagttgttaaaggaaaaaaagtttctgtagacgcaatgattgttcctggatcgggtttggtaaaagagcaggcagaaaaggaaggtttagataaaatttttattgaagctggttttgattggagagaacctggttgttcaatgtgtttagcaatgaaccctgatcaattaaaacctaaagaaagatgtgcctctacatcaaatagaaattttgaaggtagacaaggaagagaaggcagaacacatcttgtaagtcctactgtagcagctgcttctgctattaaaggtacttttgcgcaggaaagtgatttgtaa

SEQ ID NO: 284289 - DNA, 916 bp, Unknown
  Bacterial polypeptide expressing nucleotide sequence isolated from the Sargasso Sea
aagaattttgacgtatcagtaagtggcagactgagcgaaggtgtctacgctaaggatttaatcctggcaattatcggccagttgggaacggcgggagctacgggccacacgatcgagtttagaggggacgtggtaaaggcgctcagtatggagtctagaatgactctgtgtaatatggcgatagaagccggcgcaagagctggattagtcggagtggacgagattacgcttgattacgtttcaggtagacctttttcaccgcagggcgcgctttggaatagtgctcttgagtattggtctacactcgtcacggacgacggagcggtgtttgattcaaaaatagagctagatgcttcgttgttaggtcctcaggttagttgggggacctcgccagaaatggtattgcctgttggaggagcagttccaaacccggaccttatttccgatcctgtaaaatgcgaagcgactaggttgtcgttggattatatgggtttgagggctgatcaacctattacggatattgcattagataggatttttattggctcgtgtaccaatgctcgtattgaggatttgagagctgcagcaaaagttttaaaaggaaggaagatctcaaagagaattaaggaagctattgcggtaccaggttcaggtttggtgaaaaagcaggcggaaaaggaaggcttggcggacattttcatagattcaggttttcaatggcgagatgcaggttgttcgatgtgtttgggaatgaaccccgatcagttgggtgaacaggaacattgcgcgtcaacgtcgaatagaaactttgagggtcggcaggggtataggggccgaactcaccttgtcagccctgcgatggcagctgctgctgctttagagggatcctttgtggatgtcaggacgttaatgtaat

SEQ ID NO: 284290 - DNA, 1085 bp, Unknown
  Bacterial polypeptide expressing nucleotide sequence isolated from the Sargasso Sea
actttatatagaccgacatcttgtacacgaggtaactagtccacaagcctttgaaggattgcgaatgagtggcagaaaagttagaagacctgaatttactcttgcgacagcagaccataatgtgcctactatggatagggataagggtatagcagacccagattcaaaattacaagttgaaacgctagagagaaatgctagtgaaaataatatcacttacctaccgatgtcagataagcggcaaggtatcgttcatattgttggacccgagcaaggatttactcaacctggaatgacaatagtttgtggagacagtcatacatctactcatggtgctttcggcgctttagcctggggtataggaacatctgaagttgaacatactcttgctacacaaactctgattcaaacaaaagctaaaaatatgtgtattaaaattacaggtgaggttgtggatggtgtaactgcaaaagacataatattagcaattataaaaaaaataggaactgctggtggaacaggttatgtgattgaatatactggtgacgtaattaaaaatttatcaatggaaggcagaatgacggtttgcaacatgtctattgaggcaggcgcaagagctggtttaatcagtcctgatgaaaaaacttgggaatatttaaagggcagaccacttgctccttctggagaagagtttgaaacggcgattaagtattggcaatcacttgctactgatgaaggcgcacaatatgacgaaatcgtagaaataaaagcagacgaaatcattcctcaagtaacttggggaacaagtccggaagatgttgtttcaattgacggctacgttcctgatccaaaaaatgcaagtagcgatgaaaaaaagatatctattgaaagagcgcttgattatatgggtctcgaacctaatacaccaattaatgagattgaagtaaataaagtttttattggatcttgcacaaatggacgaatagaagatctaagagccgtatctaaaattgcgaaaggtcgcaaagttgaaaaaaatgttcatgcaatgattgtcccaggttcaggacttgtgaaagaacagg

SEQ ID NO: 284291 - DNA, 808 bp, Unknown
  Bacterial polypeptide expressing nucleotide sequence isolated from the Sargasso Sea
atgaaaaaaataatagtaacaggaggatctggctttataggtagtaatttagttaactatttggtcaaaaaaaattattttgttataaatatagataaattaacttattcttcaaacacatatcctaaacataatctttcaaaaaaaaattttaaattttttaaaatcgacattaataaaaaatcaaaattaaaaaaaataattaaaaagtataaacctgaatgtatttttaatctagcggctgagacacatgttgatagatcaattgactcaccttttcaattcattcattcaaatatattaggtgtttataatcttttggaggctataagggaaaacaataaaaaaaataaaaaaataaaacttgttcatatatctacagacgaagtatatggcgatatcatatcaagtagatctaatgaaaaatttccatacaaccccagctcaccttactcagcatcaaaagcaagtgctgatcatctaattaaatcgtatattagaacttacaagttgccagctatgatatctaattgttgtaataattatggtccttatcagtttccagaaaagcttattccaaaaatgatttctaatattttaaataataagcctctacctatttacgctaaaggacaaaactcaagagaatggattcacgttgaagatcattgtgaggctttgtacaaaatttttaaaaaaggtaaaattggtgaaagttacaatgtaggatcaaatattaatcttaaaaatataaaattagtaaaaactattttaaaaatatttaagaaaaaaaaatttattatgaaaa

SEQ ID NO: 284292 - DNA, 655 bp, Unknown
  Bacterial polypeptide expressing nucleotide sequence isolated from the Sargasso Sea
atgactgagcaaaatcggcaaccgctgacaatactaatcacaggaggatgtggttttattggctcggcactgatccgccatattatggcccacacaccacacaaagttatcaaccttgataatctcacctatgctgttaaccccttgagcttatctgcaatcaaagataaccaacgataccgttttattaaaggtgatatttgcgatggcaagttagttgaaaccgtttttgcccagcaccaaccggatgtcgtaatgcatctggcggcagaaagccatgttgatcggtctatagcaagtccagactccttcatacaaaccaatattgtgggcacatttaatttgcttgaagccagccgtatgtttttatcggatttaccggcacacaaggcaacacgttttcgatttcatcatatttccaccgatgaagtctttggtgacttacctaaaacaggttactttaatgaaaaaagtgcctactcaccaagttcaccatattcagcgagcaaagcctcaagcgatcaccttgtaaaagcatggcatagaacatacgggctcccaacgataataacttattgttcaaataattatgggccatatcaacacccagaaaaattaatcccgctcaccatcactcgtgcaatattaggcgaaa

SEQ ID NO: 284293 - DNA, 808 bp, Unknown
  Bacterial polypeptide expressing nucleotide sequence isolated from the Sargasso Sea
atgcagagaattattgttacaggtggattaggtttcataggaagtaatcttgtgcatttacttgttaaaaaaaaatatcatccaattattatcgataaattttcatatgcttcaaatctttataatttaaaaggactaaaaaaaaataattatacagtacataaatttagcatcgaaaataaaaaaaaaattttaaatctattaaacaaatataagccaaaagctatctttaatttagctgctgaaactcatgtagatagatctattgagagccctgatatgtttattaaatcaaatattctcggagtttttaatattttagaatgtattaaagaatatgtaaaaaaaaataaaataaaaatggttcatgtgtctacggatgaagtttatggggatataaaaaaaaataaaaaatcattagaaaatgacaggtattttccgagttctccttattctgcatctaaagcaagtgcagatcatttaattacttcatatgttagaactttcaatttaccaatagtaatttctaattgttgcaataattttggtccaagacaatttccagaaaaactaattccaaaaactatatttaatttagttaacaataaagacataccaatttatggaaaaggtattaatgaaagagaatggatttatgtagacgatcattgtgaaggtttaattaagatacttaaaaaaggaaaaattggacaaagttataatattggatcaggcaatgttgttaaaaacttagatttaataaagaagattattaaggtttataagaataatttttcaaaaaaataaa

SEQ ID NO: 284294 - DNA, 428 bp, Unknown
  Bacterial polypeptide expressing nucleotide sequence isolated from the Sargasso Sea
aaaattaataccattaacaataattaaagttatgaatggagagaaaatacctgtctacggtaacggtcttcagataagagattggcttcatgttgaagatcacgtagaagcattattcgaagtaatatcaaatggagatttaggccaaacttataacataggcggcaataatgaaaaaacaaatatagatgttgttcatatgatatgtgatcttcttgatgaaaaaaaatcatacccaattaatggccaatcaagcagagaacttattgaatttataaaagatagacctggacatgatgttcgttatgccatcgatgcatcaaaaattaaaaaagatttaaattggcagccgaaaagaaaatttgatgagggtttgaaggaaacagttgattggtattttaattattataaagacaaaattatatgaa

SEQ ID NO: 284295 - DNA, 772 bp, Unknown
  Bacterial polypeptide expressing nucleotide sequence isolated from the Sargasso Sea
aatgaaaagatttattgtcactggaggttatggttttattggtagtaatttaatacatctcctcattaaaaaaaattgtaaggttttaaatatagatagtctgtcttatgccgctcaaaaatataacttaaaagatgttaaaaattatacttttgtaaaagcggatattaataataagaaaaaaattttacaaatattaaaaaaatttaaaccgatcggaatttttaatcttgcagctgatacacatgtagaccgatcaatagataattcttttaattttattaaaaataatattttaggagtatataatttacttgaagcaattaaagattataaaaaaaaggttaggttagttcatatttctaccgatgaagtttatggagatatatcaaatcctaaaaggtcaagtgaaagagatgcatatttcccaagctcaccttatgcggcatctaaagcttcctctgatcatttagtaagttcatatgttagaacacataatctagatgctttaatttcaaactgctcaaataattatggtccaagacaattccctgaaaaattaattcccagaatgatttacaatattattaataataaacctcttcctatttacgccaaaggtaaaaattcaagagaatggatatacgtaaatgatcattgtgaagcgctaattaaacttttttataaaggtaaagttggagaaaaatataatattggttctggaatcaattgcagtaacatttttattgtgaaaaaaatacttcaaattttc

SEQ ID NO: 284296 - DNA, 499 bp, Unknown
  Bacterial polypeptide expressing nucleotide sequence isolated from the Sargasso Sea
attgttacaaactgctcaaataattatggtccaaaacaacatccagaaaaattaatcccaaaactaatttataatattttaaacaacaaacctttacctatatatggcaaaggaacaaattctagagagtggatttatgtaagagatcattgtgaagctttaattaaagtctttttaaaaggtaaaattggtgaattttataatattggatctaataaaaatatgaataatttagaagttactaaagaacttttaaaaaatgcaaaaaaattaataaagtttggtagaagagttaaaataaattttgtaaaagatcgcccaggacacgatataagatatgcattaaatagtaataagataaaaaaagaattaaattggaaacctaaaacaaattttacagaagggataagattaacattagattggtatttaagaaataaaacttattataaatcactttcaaaaaaagatattgttaatagattgggcagaggatgat

SEQ ID NO: 284297 - DNA, 499 bp, Unknown
  Bacterial polypeptide expressing nucleotide sequence isolated from the Sargasso Sea
tatgaaaaaaattgttgtaaccggtggatctggatttataggaagcaacctaatacaactgctattaaaaaggaaattttttgtaattaacttagataaatcaagctattcagcaaatccatataacgtaaaagattttaaaaaaaataataattatttattttataaattggacattaataataaagaagctttattaaagattttaaaaaaatataaacctttaggaatatttaatttagctgctgaaactcatgttgatagatctattgacgatgcacaaaattttatcaggtcaaacatacttggagtttacaatttgctagagtgtattagaaaacttgataaaaaattgaaaaataaaattagattttttcaagtttcaacagatgaagtatatggtgatattccaaataataagaaggcaagtgaaaagtacaattacaatccgagttcaccttattcagcgtcaaaggccggagcagatcagataattaga

SEQ ID NO: 284298 - DNA, 700 bp, Unknown
  Bacterial polypeptide expressing nucleotide sequence isolated from the Sargasso Sea
atgaataaaattatagtcacaggtggtttaggttttattggaagtaatctaattaaacttttgctaaaaaaaaaatataaaattcttaatatcgataaagcaagttatgcatcaaatttttataatataaaagaatttagaaatcataaaaattataaatttataaaaaacaacttatcaaattcaaaaaaaatatataaaattatttataattttaagcctaagtgcatttttcatcttgctgctgaaacacatgtcgatagatcaatagacggtcctaaaaatttcatagattcaaatataatcgctacatttaacttgttagaatcttttagaaaatattcaaaaaaaaataaaaaaactagattagttcatgtttcaactgatgaagtttatggtgatgttttaaaaggcagatctttagaaaatagcacgtatttgccaagttcaccatatgctgcaagcaaagcatcatcagatcatttagttttttcatatgttaagacatttaaaattccagcaataattacaaattgctccaataattatggaccaaaccaacatccagaaaaattaattccaaaacttatttataatattactaacaacattagtttgccaatatatggggaaggaataaatgctagagaatggatttatgttgaagatcactgtgaagccctactacgagtttataaag

SEQ ID NO: 284299 - DNA, 776 bp, Unknown
  Bacterial polypeptide expressing nucleotide sequence isolated from the Sargasso Sea
ccatgtcgacagatcaataactgaccctatttattttattaaaaacaacataatcacttcaacaaatcttttttatgcttattctagaatgattaataagaacaaaataaaattttttcatatatcaacagatgaggtttatggatcaattaaaaagggaagttttaaagaagataattcttataatccatcctcgccatactcagcttctaaaggaagtgctgatttaatagcagagtcttttaataaaacttataacacaaatattaaaattttgaatttaacaaataattatggtccatatcaatttccagaaaaatttattccgactttaatatttcattttttgaaaaataaagctgctcctttatatgggagtggaaaaaattttagagaatggatgcatgtttcagatagctgcgaggctatctggagaattatgaatttgaacaaaaaatttgataggattaatataggaacaggaaaaagggtttctaacattgagatatcaaaaatagtttttaatttgatgaaatctaaagatttaactaaattgagcaatactaaatacttaaaaaaagtaaaagacagaccaggacatgaccaaagatatgctctaaattcagagttatttaaaagctttactaagtataaaatgaaagtgaaccttagatctggattaaatgaaacaataaattggtatattaaaaataaaaattggttaaaaaaaacaaaaacaaaatataagtataaaaggttgggtttaaatgattaaa

SEQ ID NO: 284300 - DNA, 817 bp, Unknown
  Bacterial polypeptide expressing nucleotide sequence isolated from the Sargasso Sea
tctcacatggttcgcttacttgtaaataaataccctgaatatcttattgtcaactttgacaaactaacgtatgctggaaatttagaaaatctagtagatattgaaaacaaaccaaattacatatttttaaatggggatgtttgttcagaaaaagatataaatggcttatttgaaacacatcagatttcagatataattcatttagctgctgaatctcatgtagacaggtctattgattctcctaacgaatttgtcaatacaaatgtgattggaacagtcaatttattacagtgtgcaaataaatattgggcaaataaaaatgaacatattttttaccacgtgtcaacagatgaagtttatggttctttaggtgaaactggtttgtttactgaaaaaacatcatatgatccaaggagcccatactctgcagcaaaagcagcatcagatcattttgttagagctttttctcacacctatggcttgtcaattaaaatatcaaattgctctaataattatgggagccatcattttccggagaaattaatcccattaatgattcataacattatgaacaacaaagagcttccaatttatggaaaaggtgacaatattagagattggctatgggttgaagatcatgtagcggcgattgatttaatttttcataaaggagttgttaatgagacctataatataggtggtcttaacgaatggaccaacctcgatttggttaaatatctttgtgacaaaatggatgagaagttgaatcgaaacaaaggcgaatctcaaaaactgattaggtttgtaaaagacagag

SEQ ID NO: 284301 - DNA, 515 bp, Unknown
  Bacterial polypeptide expressing nucleotide sequence isolated from the Sargasso Sea
atataaaatacctgcaataattactaactgttcaaataattatgggcccagacaacatggggaaaagttaataccaaaaataatttataatattttaaataataaacctcttcctatatatggaaaaggcaaaaattcaagagagtggatatatgttgatgatcattgtgatgctttaataaaaatttttagaaaaggaaaaattggaaatttttacaatataggatcaaatattaacttgaataatatttcaatcgtaaaaaaattattaaagatcgcaaaaaaacatattaaattaggaaataaagtaaaaataaaattcataccagatagaccaggtcatgattttaggtatgctattaatagcaataaaataaaaaaagaaattggttggaagtctaaaacaaatttaaatgtaggtcttaaaaaaaccttaatttggtacaaagataataaaagttatttttctaaattaaataaaaaagatatagtaaaaagattaggtaagttatgat

SEQ ID NO: 284302 - DNA, 528 bp, Unknown
  Bacterial polypeptide expressing nucleotide sequence isolated from the Sargasso Sea
catatgttagaacatttaatttgcctgcgataattacaaattgttcaaataattatggtccaagacaacatccagaaaaattaatccctaaaatgatttataatataattaataataagcccctacctctttatggaaatggaaaaaattctagagaatggatttatgttaatgatcattgtgaggcgctaataaaaatctttaaatctggaaaagttggcgaaacttacaacattggatcaaataaaaatttaaataatatagaaatatgtaaaaatttattaaatattgctaaaagaaacattaaaattggaaagaaagtaaaaattaagtttataaaagatagaccaggacatgataaaaggtatgcacttaatagtttaaaattaataaaaaaattaaattggaaaccaaaaacaagttttttaactggaattaataatacatttttgtggtatctgaacaataaaaaatattttagatctataaaaaaaaaagatattaatgaaagattaggaaaaatttaat

SEQ ID NO: 284303 - DNA, 839 bp, Unknown
  Bacterial polypeptide expressing nucleotide sequence isolated from the Sargasso Sea
tatgccgaatattattgtaacaggtggattgggttttattggaagtaatctaattgcattattaattagaaaaaaatacaaagtaattaacattgataaaattacttattcatctaatttttataatacaaaagattttaaaaaatctaaaaaatataaatttataaagtgtgacttaaatcaaaaatctagacttaaaaatattataaaaaaatacaatcctttggctatttttaatctagccgcagaaacacatgtggatagatctatagatggacctgaaaattttataaaaagcaatatattaggtgtttttaatttattggaggtttttaaaacatattcaaaaaaaaataaaaaagctaaattaatccatatatcaactgatgaggtttatggagatgttttaaaaggtaggtctactgaaaattatccatacaaacctagttctccatatgctgcaagcaaagcatcatcagatcatttagtgtcatcgtatgtaagaacttataaaatacctgcaatagtaactaattgttcaaataattacggtcctaaacaacacccagagaagttaattccgaaattaatatacaatatactaaataacaaaagtttgccgatttatggtgatggtcaaaattcacgtgaatggatttttgtagatgatcattgtgaagctttgtttaaagtttttcaaaaaggaaaagttggtgaattttacaatataggttcaggcaaaaatcttaacaacattcaaatatgtaaaaatttattaagagttgtaaagaaaaaaataaaatttggatctaatgttaaaattaaatttataaaagata

SEQ ID NO: 284304 - DNA, 532 bp, Unknown
  Bacterial polypeptide expressing nucleotide sequence isolated from the Sargasso Sea
gatggtcatcctgatcaccgggggtgctggtttcattggttcgaacctgattcattattggctggctaaaaactctggtgacacgattgtcaattttgatgcgctgacctatgcagggaacctcgccaacctggctggggttgaatccaacccgaattatcattttttccaaggtgatctcagaaaacaggaacaactccatgaggtattcgaacagttttccatcgactcggtgattcaccttgcagcggaatcccatgtcgaccgcagcatcaatgatccttctccatttattgatagtaacatcagggggactttccaacttcttgaaaccgccaggaaccactggcaggaggatttgaacgatcaccgtttcctccatgtcagtaccgatgaagtttatggcacgctgggcactgagggattatttaccgagcagaccccttttgctcccaattctccatactcttccacgaaggcttcaagcgatcaccttgtccgggcatggcatcataccttcggtatggacact

SEQ ID NO: 284305 - DNA, 415 bp, Unknown
  Bacterial polypeptide expressing nucleotide sequence isolated from the Sargasso Sea
atgaaaaatatacttataacagggggttgtggttttattggatcaaattttattcatcatttaattgataaagaagaatcttattatattgttaatctagataaactcacgtatgcagggaacatttcaaatcttggtaagattccagattcctcatatttacttgtccaaggagatatatgtgatccaattttagtggattcactttttaaggaatatcaatttgaatccgttgtacattttgcagcagaaagtcatgtcgaccgttctatagatggcccttctagttttattcaaacaaatattctgggaacattcaatctccttgagcatgcaagagcacatttttctaaaacgaaaaataagcatttcagatttttacatgtatcaacagatgaagtatatggttcacttg

SEQ ID NO: 284306 - DNA, 525 bp, Unknown
  Bacterial polypeptide expressing nucleotide sequence isolated from the Sargasso Sea
ttacaaaaaaatatttaatattttaaaaaaagaaaaacctgattttattattaattttgctgctgagagtcatgttgacagatcaataagtgatcctttatattttattaaaaataatattgattcatcaattaacctctttttagcttatgccagatatcagaaattaaaaaaaactaaattttttcaaatttcaactgatgaagtctatgggtcaatttcaaaaggattatcgaaagaaactaatcgatatgaaccttcttctccatattctgcctctaaagcatgtgtggacatggtggcaacctcttttaataaaacctatgatacacaaatcaaagtgataaatttatcaaataattatggaccgtatcaataccctgagaaatttattcctacactaattttttattttttaaaaaaccagcctgcccctatttacggtaaaggtgaaaatataagagaatggatacatgttaatgatagctgtgaagcaatctataaaacaattatatcaaacaagaa

SEQ ID NO: 284307 - DNA, 562 bp, Unknown
  Bacterial polypeptide expressing nucleotide sequence isolated from the Sargasso Sea
atgaaaaaagttattgttactggaggtttaggctttatcggtagtaatttaataaaaatccttattaagaaaaaatactttgtcattaatttggataaagttacctactcttcaaatttttataatttaaaaacaatctccaaaaataaaaattacaagtttataaaggttgatataaataacgaaaaaaaagttcttcaaattttaaagaaatataatccaagtgctatttttaatcttgcggctgaaacccatgtagatagatcaatagacgaaccagaaaactttattaaaagcaatattttaggtgtttttaaacttttgcaagcattcaaaaaatttacaaaaaaaaataagaaatctatattaatacatatttcaactgacgaagtttatggagatgttttgacaggaagatctaaagaggatgatcaatacaaaccaagttcaccatatgcggcatcaaaagcttcttcagatcatttagtatattcttacataagaacatttaaaattcccgctataattactaattgctcaaataattatggcccaagacagc

SEQ ID NO: 284308 - DNA, 631 bp, Unknown
  Bacterial polypeptide expressing nucleotide sequence isolated from the Sargasso Sea
aatgaaaaaaattattgtaactggtggaaacggttttataggtagcaacttagtaaaattattgattaaaaaaaaattttttgtaataaatatagataagaatatttattctaaaagttcttttcttttaaaaaatcttcgatcgaaaaattataagtttcataaacttgatatagtaagtaaaaatttttttaaattgcttaaaagatataaaccagacggaatctttaaccttgctgcagaaacacatgttgataggtctatcgactctccaaaagattttatttggtctaatatattgggtactttcaatattttagaacaaataagaaaatacgaaaaaacatataagaagaagttaagattagtgcatatttctacagatgaagtttatggagatcttaaaaaaaatacaagaactaatgagcaaagtgcttacaaacctagctcaccatattcagcaagtaaggcaagtgcagatcacttaataaaatcatttgcacgtacttataaaattaatgctgttatttcaaattgttgtaataactacggtcctggacagtttccagaaaaattaatacccactcttatttacaatataataaataacagaagccttccaatatatgga

SEQ ID NO: 284309 - DNA, 736 bp, Unknown
  Bacterial polypeptide expressing nucleotide sequence isolated from the Sargasso Sea
aatgggtcatttcttcttaaaaacattaaaaatagaaattaccgatttcataaactagatattaacagtaaaaaaatactaaatatatttagaaagtataaacctaatgcaatatttaatcttgctgcagaaactcatgtagatagatctatagaatcacctaaagattttattcactcaaatatactgggtgtgttcaatattttagaacaaataagaaattataaaaaaaaaaataaaaaaaatttaagattaattcatatctctactgatgaagtttacggtgatttaaaaaaaaaagagaggtccgatgaactctaccgttataaacctagctctccgtactctgcaagcaaagcaagcgctgaccatttgataaaatcttacgtaagaacttacaaactaaatgcggttatatccaattgctgcaataatttcggaccaggtcaatttcctgaaaaattaattccgacattaatttttaatattttaaataaccaacctcttcctatttatggaagaggtaaaaattcaagagaatggatttacgttaaagatcattgtaatggattattaactatctacaaaaagggtatcacaggggaaagttataatattggaacaaatattaacataaataaccttaatttaaccaaacttttactaaaaataataacaagtaataaaataaaaattggaaaaaaagtgaaaataagtttgttaaagatagaccagg

SEQ ID NO: 284310 - DNA, 893 bp, Unknown
  Bacterial polypeptide expressing nucleotide sequence isolated from the Sargasso Sea
atactagataattttccagattctaaaatagttgctgtagataaactaacctatgcaggaaacaaaatttttttaaaaaatataattagaaataaaaattttaaatttattaaatctgacatattagatacaaaaaaatatattaagtatttaaaaaaaatagattgtgccattaatattgcagctgaaagccatgtggataactcttttggaaattctgtacaatttacaaaaacaaatactttaggagctcatgtttttttagaaaattgtataaaaaaaaaagtaaaaaaaataattcacataagcactgatgaagtttatggggataaattgaaaggaaaaagtaatgaaatagatacattaaatcccacaaatccttattctgcatctaaagcagcagccgaaatgataacaaatagttataaatatgtatttaagaaagatataattattattagagcaaataatatttatggaactagacaatttcctgaaaaattaattccttcatgcattgtagctttattaaataaaaaaaaaattaaaatacatggaaatggcaagaatagaagacattttttatttgtaaaagatttttgttttgctctagaaaaaattataaaaaaagtaaatgaagggatttataatattggttcagatgagagctatcaaaacatacaaatagcaaaaaaaatatgtaatttaatgaataaatcttataaaaatattaaatatactagagatagaccttttaacgatagaagatattctatttcatcaaaaaaaattaataatttaggatggaaaccaaaatcaaacttgtttaatgaattaaataaaataattagctggtatcaaaataattttaaaatttttttaagaaagttata

SEQ ID NO: 284311 - DNA, 589 bp, Unknown
  Bacterial polypeptide expressing nucleotide sequence isolated from the Sargasso Sea
aatgaaaaaaattattgtaacaggtgggttgggttttattggaagtaatttaattgagttattaataaaaaaaaattattttgttataaatattgataaaagtacttattcgtcaaatttctataatgtaaaagaatttaaatcattaacgaactataagtttttcaaatgtaatataggaaataaaaagttttataagattttaaaaaaatataagccttcatgtatatttaatttggctgctgaaactcatgtagatagatctattgataatcctgctaattttataaatagcaatattgtagatgtttataaattattagagtcttttaaaaaatttgttaaaaatcataaatgtaagctcattcatatttctactgatgaggtttacggtgatattttaaacggtcgctcaactgagaaatttccgtataatccaagttcgccttatgctgcaagtaaagcagcgtctgaccatttggttaactcatatattagaacttacaaaattcctgccatagttacgaattgctcaaataattatgggcctaaacaacatccagaaaaattaattccaaagttaattttt

SEQ ID NO: 284312 - DNA, 601 bp, Unknown
  Bacterial polypeptide expressing nucleotide sequence isolated from the Sargasso Sea
aatgaaaaaaataattgtaaccggtggtttaggttttataggtagtaacctaattgaacttttacttaaaaaaaattttaaagtcataaatgtggataaggtgacctattcttcaaatttttataatataaaggaatttaagaattcaaaaaactacaagtttattaaatgtaatataaaagagcgtaaatttagaaaaatattatttaaatttaaaccctcatgtttatttaatctagctgctgaaactcatgttgatagatcaatagataatccagagaattttattcaaagtaatattgtgggtgtttacaatttacttgagggctttaaagatttaattaaaacaaataaatctaaattaatacatatttcaacagatgaggtttatggagatgtattatctggtagatcatctgaaaactatccatatcaacctagttcaccttatgcagcaagtaaagcagcttcagatcatttagttagttcttatattagaacttataagataccagcaattgtgactaactgttcaaataattatggtcctaagcaacatcctgaaaaacttatacctaaattaatttataatattctataa

SEQ ID NO: 284313 - DNA, 631 bp, Unknown
  Bacterial polypeptide expressing nucleotide sequence isolated from the Sargasso Sea
atgaaaaaaagatttatagtaactggaggacttggtttcataggcagtaatttaatagagttattgcttaaaaaaaatcattatgtaataaatatagatataggttcatactcatcaaatagctacaatacaaaagattttgacaaaaataagaattataaattaataaaatgcaatattggtgaaaaaaataaaataaaaaaaatatttaacaaatatcgtcctaatggaatttttaatcttgctgctgaaacacacgtcgacagatctattgagaatcctaaaatattttttctttcaaatgtaatatcattaattgattttttagaagtatttaaagattattgtaaaactaaaaaaaatattaaattaattcatatatctacagatgaagtttatggggatataataaaaggtagaactacagaaaaatccaaatactatccaagttctccatacgcagcaagcaaagcgtcttcggatcatttagtttcatcatatattaaaacttttaatcttccttgtataataacaaattgctctaacaattatggtccaaaacaacatccagagaaactaattcctaaattaatttataatattattaataacaaaaacttacctatttatg

SEQ ID NO: 284314 - DNA, 481 bp, Unknown
  Bacterial polypeptide expressing nucleotide sequence isolated from the Sargasso Sea
aatgacagtttttattacgggtggtgctggattcattgggagtaatttcgcacattacatgtcacaatatgacgttgttattcttgataagttgacttatgcagcaaatatggataatttatatccattagattttcctgttaaaggagttgatttagcatataaaaacagattagaagaattatttaatcaatataaacctaaatttatttttaattttgcagcagagagtcacgttgataattccattaacaatgtacaccctttcattgattctaatattattggaactgttaatctacttaacttatcagtaaaatatggcattgaaagatttcatcacatatctactgatgaagtttatggatcattggattatgaagatccaccttttacagaaactactccatacaatccattaaatccttactcagcatctaaagcagcaagtgatcatttttgtatggcatatcataatact

SEQ ID NO: 284315 - DNA, 640 bp, Unknown
  Bacterial polypeptide expressing nucleotide sequence isolated from the Sargasso Sea
tttgagtaaaaaatttttagttacaggtggtgcaggttttattggttctgcatttataaggtatataattaataatacagacaattatatttttaatattgataaactaagctacgctagtaattttttaaatttaaaggaaattcaaaaaaataagagatattcattcgcaaaaatagatgtttcaaatgcccttaaaattagagcaattttaaaaaaagttaaacctgatataattttacatttagctgctgaaacgcatgtggataaatcaatagataatcctgtagaatttttaaattcaaatgttattggaacatttgttttgttagatgaaacaaggaagtatttttctaatttacaaaaaaataaaaaaaaaaattttagatttcaccatgtttcaactgatgaggtttttggagacttaatagataaaaaaagtctatttaatgaaaaaacttcatatgctccaagctctccatattctgcttctaaagctagctctgatcattttgtaagagcttggcaccgtacttataaattaccaatattaataacaaactgttcaaataattatggtcccctatcataccctgaaaaattgatacccctaattattttaaatgctttaaaatggtaa

SEQ ID NO: 284316 - DNA, 603 bp, Unknown
  Bacterial polypeptide expressing nucleotide sequence isolated from the Sargasso Sea
caaaagaaaattatccttacagtccaagttcgccatatgcagccagcaaagcatcatctgatcatattgtgctttcttatatcaaaacttttggcataaaagcagtaattacaaactgttcaaataactatggacctaagcaacatccagaaaaactaattccaaaaatgatttataacataataaataataaaccacttactgtttatggagatggaaaaaattctagagagtggatctatgttaaagatcattgcgaagcattaattaaagtttttaaatatggaaagattggagaaacctacaatataggttcgaataaaaatttaaataatgttgaaatatgcaaaaatttactaaaaactgccaaaaaaaatattaaaattggaaaaaaagtaaaaataaaatttataaaagatagacctggtcatgataaaagatatgcacttgatagttccaaattaataaaaaaattaaaatggaaaccaaaaacaaaattttcagatggaattaacaatacatttatatggtatttgaataatagaaaatattataaatcacttaataaaaaagatattaatatgagattaggaaaaatttaat

SEQ ID NO: 284317 - DNA, 382 bp, Unknown
  Bacterial polypeptide expressing nucleotide sequence isolated from the Sargasso Sea
atcactaattgttcaaataattatggcccaagacaacatccagaaaagttaattcccaaactaatatataatattttaaataataaaagtttaccaatttacggcaaaggtaaaaattcaagagaatggatttatgtaaccgatcattgcgaagctttatttaaaatttttaaaaaaggtaaaattggtgaattttataatataggctctaataaaaatcttaacaatatagaaattgcaaaaaaacttttaaatattacaaagaaatacataaaaattgggcgtaaagttaaaattaaatttataaaagatcgacctggtcatgatttaagatatgcattgaatagtaacaaaattattaataatcttaagcggaagccat

SEQ ID NO: 284318 - DNA, 577 bp, Unknown
  Bacterial polypeptide expressing nucleotide sequence isolated from the Sargasso Sea
aatgaaaaaaattcttgttactggtggattaggttttattggtagtaatttaattaaaatattactaaaaaaaaaatattatgtggtaaatctagacaaaatctcctacgcatcaaatttttataatactaaagaatttcacaatagtaaaaaatataaatttattaaatgtgatataaatgatcaaaaaaagattttttcaactttaaaaaaatacaaaccaagttgtatatttaatttagctgcagaaactcatgttgatagatctattgatggaccaagagcatttattaaaaataatattaacggaactttttcaatacttgaagcagtcaggaaatattcaaaaataaataaatccctaaaactaattcatatatctactgatgaagtttatggtgatgttttgaaaggtagaagcaaagaaactgattcttataaaccaagttccccctatgctgcatcaaaggcatcatccgatcatctcgtattatcatacgtaagaacttatggtttaaatgctatagtgaccaactgttcaaacaactacggtccccgggcacacccggaaaaatta

SEQ ID NO: 284319 - DNA, 653 bp, Unknown
  Bacterial polypeptide expressing nucleotide sequence isolated from the Sargasso Sea
agcggagaacgccaagagaacttcccgactgcatcacatcagcactgatgaagtctttggctccctgggcgaggaaggtcgtttctgcgaaaccaccccctacgacccgcgaagtccatattccagcagcaaggcggccagtgaccatctggtgagcgcctggcaccacacctatggattaccagtggtgttgacgaattgctccaacaactacggaccttggcaattcccagaaaagttgattcccgtcgtaacgttgaaggcggctgccggagagcccatccccttgtacggcgatggattgaacgtcagagactggttgtacgtggaagaccacgttgatgccctgctcctggccgcttgcagaggaacctcaggccgcagttactgcgtcggcggctatggagaacgaaccaatcgcgaggtcgtagaatgcatctgcaaccacttggatcagttacgtccagcgcggaatccgcacaaacatttaattcaaatggtgactgatcggccaggacatgacaggcgttacgccattgatccagcgagaattcaagccgagctggtatggaaaccacggcatgatttcaatgaagccattgcaaagacagtgcagtggtacatcacacactataccaacaaaaaaacgtagt

SEQ ID NO: 284320 - DNA, 882 bp, Unknown
  Bacterial polypeptide expressing nucleotide sequence isolated from the Sargasso Sea
aaaatttcatactcatcaaataagtataatgtaaaagaatacgataataataaaaattataaatttataaagttagatataaacagtaaaaaactaacaaaaatttttaaaagatataaaccaattggtgtatttaatttagctgctgaaacacatgtagatagatctatagataatccatcaaattttattaaaagtaacatagtaggaacatttaacttattagagtcgtttagaagatttcacaaatcttattcaaatactaagttaatccatatctcaactgatgaagtttttggagatgttttaactggtagatccaatgaaaattttaagtataaacctagctctccctatgcagcaagtaaggcctcatcagatcatctagtatctgcctatgttagaacatttagaattccagcgattatcactaactgctctaataattatggaccatgccaacatcctgaaaaattaattcctaagttaatatataacatcattaacaatcgggaattgccgatttatggcaatggaaaaaattcaagagagtggatatatgttatggatcattgcgaaggacttttaaaagtttttttaaaaggagaaataggggagttttataatattggatcaaataaaaatttaaacaatcttcaaataacaaaatatttaatagatattgcaaaaaaatacattgtaataggtaaaaaagtaaaaataaaatttgtaaaagataggcctggccatgatttaagatatgccttaaacagttataaaataaaatcaaaacttaaatggtaccctaaaacaaagatctttgatggactaaataaaacttttttatggtattataataaccaaaaatattttaaaaacctt

SEQ ID NO: 284321 - DNA, 656 bp, Unknown
  Bacterial polypeptide expressing nucleotide sequence isolated from the Sargasso Sea
aatggctcagcccatgccttccgcctccgaacttctgggtcagcgccgcagggttctggtgaccggtggcgccggcttcatcggcggcgcggtggtgcggcggctgctcagggagagcacggccatcgtgttcaacctcgacaagatgggctacgccagtgacctcacctcgatcgaggaggttcttgctgagctgggggaagccggggccaatcgccaccatctgctcaagatcgacctcagcgacgcggacgccgtgaacgctgcggtgcgagaggctgatccagacctggtgatgcatctggcggccgaaagccatgtggaccgatcgatctcgggcccaggcgtgttcatcgagagcaatgtcaacggcacttacaacctgctgcaagcagtgcggggccactacgaaggcttgagtggtgaacgccgggaggccttccggctgcatcacatcagcaccgatgaagtctttggctcccttggagcggaaggtcgtttctcagaaacaacgccctacgacccgcgcagcccctattccgcaagcaaagccgccagtgaccatctcgtgcaggcctggcatcacacctttgggcttcctgtggtgctgaccaattgctcaaacaactacggcccctggcaattccccgaaaagc

SEQ ID NO: 284322 - DNA, 283 bp, Unknown
  Bacterial polypeptide expressing nucleotide sequence isolated from the Sargasso Sea
tatgaagatattagtaacaggtggtgcaggctttattggttctgctgttgtacgtcacatcataaatagtacaactgatactgttgtcaatgttgataaacttacctacgcgggtaaccttgcttctattagttcaatagcagatagcgaccgctatacctttgagcaagtagacatctgtaatgcagtagcaatacaagctctatttaaagaacatcaacctgatatggttatgcatcttgctgcagagagtcatgtgacagatcaatcgaggcccagcagc

SEQ ID NO: 284323 - DNA, 418 bp, Unknown
  Bacterial polypeptide expressing nucleotide sequence isolated from the Sargasso Sea
tatgcgcattctcgtaactggcggagccggattcatcggctccgcactgatccgccatctcattctcgataccgagcacagcgtgctcaacctggacaaactgacctatgccggcaacctggagtcgctggcagccgtggaagacaacccgcgttatcagttcctccaggccgacatcgccgatcgtgagcgggtcagcgaggcgctgctggacttccagccggacgccatcatgcatctggccgccgaatcccacgtcgaccgctccatcgacggcccggcggagttcatccagaccaacatcgtcggcacctaccagctgctcgaggccacccgcgcctactggcagagcctgccggccgagcgccgcgaggccttccgcttccaccacatctccaccgacgaggtctacggcgac

SEQ ID NO: 284324 - DNA, 697 bp, Unknown
  Bacterial polypeptide expressing nucleotide sequence isolated from the Sargasso Sea
aatgaaaaagattattgtaacaggtggctctgggtttattggaagcaatttaattagacttttgctaagaaagaaatattttgtgatcaatatcgataaattaagctactctgcaaattcttataatgtaaaggattttaaaaaaaaccgtaattatttattttacaatttagacattaataaaacatctcgaatattaaaaatattgcaaaaacataagccagtaggaatttttaatttagctgcagaaactcacgtggacagatccatagataaggcacaccattttatcaggtcaaatattgttggggtttatagtttgttagaggcaataagaaaatatgaaaacaaaaaacaaaaaaaattaaaacttcttcaggtatcaactgatgaagtgtatggtgatattcccaataaacgaagtgccagtgaaaatcacaattataatccaagctctccctattctgcatccaaggctgcagctgatcagtttataaagtcttatagtagaacttacggtattaaaatattaatagctcatccttgcaataattatggacccaatcaacatccagaaaaatttataccaaaaatgatttttaatattttaaataatagaccattacctttatatggaaatggaaaaaatattagagaatggatttatgtaaaagacaactgtgaagcattactaaag

SEQ ID NO: 284325 - DNA, 610 bp, Unknown
  Bacterial polypeptide expressing nucleotide sequence isolated from the Sargasso Sea
aatgagaaaagtaattgttactggtggcttgggatttattggaagtaaccttattgagcttcttttaaaaagaaaatataaggtaatttgtattgataaagttacttactcatcaaatttttacaatgtaaaagaatatgaaaagaataaaaattattcttttataaagtgtgacatatcaaatagaagattgtctaaaattgttaataaaattaatcctgttgggatttttaacctagcggcagaaactcatgttgatagatcaatagataatccagaaaattttataaaaagtaatatttttggagtttataatattttagaaatttttaaaaaattctgcaaaaaaaataaaaatagtaaattaattcatatttcaaccgatgaagtttatggagacatactgactgggcgaactaaagaaaattatccatacaatccaagctcaccctatgctgcatcaaaagcatcatcagatcatttggtttcatcatatgtaagaacttataaaatacctgctataatcacaaactgctcaaataattatggtccaaaacaacatcctgagaaacttataccaaaattaatttacaatataattacaaaataa

SEQ ID NO: 284326 - DNA, 424 bp, Unknown
  Bacterial polypeptide expressing nucleotide sequence isolated from the Sargasso Sea
tatgaaatctttttttattacaggtgcagcaggttttataggttcacacatttgtgaacacatttcattaaattttcctaatgcaaaaatttatgcactagacaagttaacttatgctggcaataaaatgtttctaaataaactttttaaaaaaagacggtttaaatttattaaaagcgacataatcgatagtaaaaaatacctaaaatatttaaataaaattgattgcgcaattaatgttgctgctgaaagtcatgtagacaattcgtttttaaattcaataaattttacaaaaactaatgcatacggtgcgcatatttttttacaaaactgtattaacaaaaaagtaaaaaagattattcatataagtacagacgaagtttacggcgataaaataaagggctcgagcaaagaggaggacaaa

SEQ ID NO: 284327 - DNA, 649 bp, Unknown
  Bacterial polypeptide expressing nucleotide sequence isolated from the Sargasso Sea
attttagggacatataatattctaagatccataaatacgaaaatattcttaattcatatttccactgatgaagtttttggtcatgttataaacaataaatcttttaacgagaaaacaaaatataatcctagatcgccctattcagcttcaaaagcatctgcagatcatcttgtttcagcatggaatagtacatatggttacaaatctactattgtaaattgttgtaataattttggaccaaatcaagataaagaaaaatttattccggtaattattaataatattttaaataataaaaaaataccaatatatggtaatggaagacaaaaacgagaatggatttttgtggatgattttgtgtctagtattgattttataatttctaaaaatttgactaaagaaaactttttaattggtagtggtattagatttgaaaataaaaaatttgcgaaaaaaataatagaaatattcacaaaaaatttaaattttgatgaaactaaaataaaattagtccgagtagcagacagacctggtcatgatatagagtataaagttgatagttctaaaataagacgattaggttggaaatcgaaaacaaatataattagtgatttaattaaaactataaattattataaaaataagtaat

SEQ ID NO: 284328 - DNA, 883 bp, Unknown
  Bacterial polypeptide expressing nucleotide sequence isolated from the Sargasso Sea
aaaatacaaagtattgaatattgataaagtttcatatgcatcaaatttttataatactgttaaatttaaaaataataaaaactacaaatttgttaaatgtgatttaaataatattaaaaacttagaaaaaattattgataaattcaaacctcaagcaattttcaatgtagccgcagaaactcatgttgacagatcgatagatggaccaaaaaattttattttttccaatattattggaacatttaatattttagaaattcttagaaaatctaagaaaaagattaaactagtacatatttcaacagacgaagtttatggcgatgtaatcaaaggtagatctaaagaagatgatgcttacaaaccaagctctccttatgcagcatcaaaagcttcttcggatcatttaatatattcatacataagaacatataaaattgatgctaatattacaaattgttcaaataattttggtccaaaccaacatcctgaaaaattaataccaaaacttatttataatataataaataataaaaaacttcctatttatggtaaaggagttaattcaagagagtggatttatgttgaggatcactgcgaggcaatacttaaagtttataaatcaggtaaacctggagaattttataatataggatctaattataatattaataatttaacggttgttaaaaaattaatttctgtagctaagaaaaaaataaagttaggaaataatgtgaagattatatttgttcaagatagacctggtcatgatatgagatatgctataaatagtaacaaaattaaaaaaaatttaaaatggaagccaaaaactaattttatgagtggtttggaaaaaacttttgattggtatcttaataaccgt

SEQ ID NO: 284329 - DNA, 557 bp, Unknown
  Bacterial polypeptide expressing nucleotide sequence isolated from the Sargasso Sea
tatgaaaaaaatattagttactggagggttgggttttataggcagtaatttggtgaattatttaatttcaaaaaattattttattatcaatatagataaatcaggttattcttctaataagaaatattttttaaatttaaaaaataaaaactatattttttttaaaattgatattaaaaataaattaaagttatataaaatcgtaaaaaaatttagaccagatggaatatttaatttagcagcagaaacacatgttgaccgatcaattgataattctaaaaattttataaattcaaatattttaggcgtacataatattttagaagttttaagaaaaataaagcgagaaaaaaaagttaatataaggtttattcaggtatcaaccgatgaagtatatggagacatgccttttcaaaaaagtgcctatgaaaactataattacaatccaagttcaccatactctgcttctaaggctagcgctgatcaaattataaaggcttataaaagaacatacgatttagatacgataatagcaaatgcgtgtaataattatgggc

SEQ ID NO: 284330 - DNA, 849 bp, Unknown
  Bacterial polypeptide expressing nucleotide sequence isolated from the Sargasso Sea
tatgaaaaaagttatagtaactggaggtctaggctttataggtagtaatttagttaatattcttcttaaaaagaattattttgttataaatatagataaagttacttattcctctaatttttacaatctaagaaatatatcgaaaaataaaaattatagatttattagattagatattaataatcataaaaaaatttttaatgttttaaaaaaatatgaaccaaatgctatttttaatctggctgctgaaacacatgttgatagatcgattgatggaccggaaaaatttattaaaagcaacatattaggagtatttaatttattacaggcatttaggaaatttgttgaaaagaataaaagatcaagattaattcatatttcaacagatgaagtgtatggtgatattttaattggaagatcaaaagaaaatgatgcgtataaaccaagctcaccttacgctgcatcaaaagcttcgtctgaccatttagtatattcatatataagaacatttaatattcccgcaatcattacaaactgttcaaataattatggtccaagacagcaccctgagaaattaattccaaagctaatatataatattctaaaaaataaaagtttaccgttatatggtaagggacttaattcaagagagtggatatacgtagatgatcactgcgaagctttaatcaaaatctttgaaagaggaaaaatcggaaatttttataatattggttctaacctaaatctaaaaaatattaaaatttcaaaacttctaattaaaattgcaaaatcaaaattaaatataggaaaaaatgtaaaaattaaatttgtaaaagacaggccaggtca

SEQ ID NO: 284331 - DNA, 455 bp, Unknown
  Bacterial polypeptide expressing nucleotide sequence isolated from the Sargasso Sea
atatccagaaaaattaattccactagtaattaataatgcaattcgagaaaaacctttacctatatatggcgatggcaaacaaattcgtgattggctttatgttgaagatcattgtaatgctattatagaggttttaaataatggagttccatttgaagtttataatattggtggaaataacgaaattaaaaatatagatatagttactcttatttgtaataaacttgatattttaaagaaaagaaagaatgaaaaaagttacaaagagttgatttgttttgttgaagaccgtccaggtcatgataaacgatatgcgataaataatactaaaattaaaaaaaaactaaattggtcaccaaaagaagattttgaaagtggaatctccagaacaattaattggtatttagaaaaccaatcatgggtagaaaatctatataacaaacatcaatcataaa

SEQ ID NO: 284332 - DNA, 364 bp, Unknown
  Bacterial polypeptide expressing nucleotide sequence isolated from the Sargasso Sea
ctttatgttgatgatcatggcttcggcattgggtattgggtagcaacaaattctatagtcggtgaaacatataatattggcggcagaaatgagaaaaaaaatattgaagttgtagatgcagtatgtgaattattagaagagttacaaccagttaaacctgctggtcttagagcttataaagaccttattacttttattgatgatcgtccaggacatgattttcgttatgctattgatgccggtaagattgagcgtgacctaggttggaaaccaaaagaaacttttgagagcggtattcgtaaaactgtactttggtatttagaaaatactgattggtggaagggtatagtgggtaaagaataat

SEQ ID NO: 284333 - DNA, 857 bp, Unknown
  Bacterial polypeptide expressing nucleotide sequence isolated from the Sargasso Sea
aatagtaaaaaaaatttataaaatacttagaaaaaataagccaaaaataatttttaaccttgcggccgaaacgcatgtagatagatcaatagactcaccatccagttttattaaaaacaatgtattaagttccttaagtttaattgaaaatataaaaaaatgttatttaaaaaatgaagtaaaaaaattaaagttaatccatatttctacagacgaagtttatggaaatgtcctagcgggtgcaagcaatgaaacaaaagcttatgaacctaactcaccatatgctgcatcaaaagcttcagtagatcatatattgcgatcatatggagttacttataattttcctttgatcatagttaactgttgcaataattatggaccgtatcaattcccagaaaaatttatcccaacagtaataatcaatatgctccaaaggaaaagcgttcctatatacggaagtggaaaaaatattcgagaatggatccatgtaaatgactattgttcagcactaagcaaaataatgaaaaagggtaagccgggacaaagctacaatgttggaacaggatttagaattacgaatattaatttatcaataaaaatatacaaggaagtaaaaaaaatttttcctaattttaaatttaataaaaaaattaacaagaaaattattgatagacctggtcatgattttagatatgcaataaattctaataaaattagaaaagagttaaaatggagacctaaaattagttttaataaaggtattcaagaaacaataaattggtatatttcaaatatacgatggttaaaatattgttcaaaaaagtacaagggtcaaagattaggtctaaatgattaaa

SEQ ID NO: 284334 - DNA, 694 bp, Unknown
  Bacterial polypeptide expressing nucleotide sequence isolated from the Sargasso Sea
ttggttacaggaggttgtggcttcataggatccaactttgtacgttatatgctcaaaacatataagaatattcagattatcaatcttgacactctaacctatgcagggaatttggataatttgaaggaaattgagcaagataagcggtattcctttataaatggagatatcacggaacgcaatgatgttgtgcctgccttgaaagatgccgacagtattgtccactttgctgcagagtctcatgtagaccgaagcattgataaagcagaaatttttattaagacaaatgtaatcggaacacattcattgttagaatgtgcgaaggaacatgatattgcaaagtttattcatgtttcaacggatgaagtttatggcagcttaggaaaggacggatactttaccgaagaaaccccgattgctgctaacagcccttattcagcaagtaaagcggctagtgatttgcttgctcgagcgtattatatgacatatgggttccctgttattattacgaggtgttccaataactttggaccgtatcagtttccagaaaaacttattcctttgatgatctgtcaggccaggcagaacaagcctcttcctgtttacggagatggaatgaatgttcgtgattggttgtatgttgaagatcattgtgcagcggttgacagagtattacaaagtgagaaccggagag

SEQ ID NO: 284335 - DNA, 772 bp, Unknown
  Bacterial polypeptide expressing nucleotide sequence isolated from the Sargasso Sea
cctgggcatttcatagagagtaatatattgggaacttttaatttgcttgaatcttgtcgtaagttttttgattctctgagtatagagaaaaaatccaaatttatttttcaccacataagtactgatgaggtttttggctccttaggagagaaaggccgtttttcagaatcaacaccctatgatccaagaagtccttattccgcctcaaaggcttctagtgatcatcttgtaagatcttggtaccatacctatggattgccggttatcattaccaattgctcgaataattttggaccttggcaatttccagaaaagcttattcctcttgttactttaaaagctatccaaaaagaacctatccctctatatggtgacggcagtaatattagagattggttatttgttgaagatcatgtagatgctcttcttcttgcagcattaaaagggaaagtgggagaaacatattgcattggtggttatggtgaaaaatcaaacaaagagattgttcttaaaatttgtgaaatattggataacgaaattcctaatcaatctccacataaccaattgataaaatacgttttagacagacccggtcacgataaaaggtatgctattgatccctccaaaatagagaatgaattaggatgggaaccaaaatatggtttagaaaaaggacttagaaaaactgttttatggtatttaaaaaattatgattggtgtcaaaatatattcaaaaaaggtaattatagacttgagagacttgggaaataaa

SEQ ID NO: 284336 - DNA, 610 bp, Unknown
  Bacterial polypeptide expressing nucleotide sequence isolated from the Sargasso Sea
gttgataaatctaagagaactgatgaaaaattttcttataatcctagttctccttattctgcctctaaagcaagcgctgatcatttggtaaaatcttttgtaagaacttttaaaatacccgctattatttcaaattgttgcaataattatggtcctaatcaatttccagaaaaactaattcctaaactaatttttaatatcattaacaacaagccattgcctatttatggtaaaggaaaaaattcaagagaatggatacatgtaaatgatcattgtgaagcgttgttaaaaatttttaacagaggaaagattggcgaaagctacaatgtgggcactaatcaaaatgttatgaatatcgaaatagcaagaaaattattaaaaatatataagagtaaaagcaaaattaaatacgtaaaagatagacctggtcacgatttcagatatgcattaaattctaaaaaaattagaaaaaaacttaaatgggaaccaaaaataaatttaaacaaaggattaaaaaatacttttatgtggtatttaagcaatataaatttttttaaaagtgtttcaaaaaaattatatgataaaagattaggattaaaaaatgattaaa

SEQ ID NO: 284337 - DNA, 859 bp, Unknown
  Bacterial polypeptide expressing nucleotide sequence isolated from the Sargasso Sea
aattcattaaaatgtgatatcaaaaacaaaaaatttaagaaaattttactaaaatataaacctatcgcagtttttaatttagctgcagaaacacatgtggacagatctattgataaacctgaaaaatttattgagagtaatattgttggtgtttttaatttgttagaatgttttaaagaatactcaaaaaaaagtaaatctagattaattcatatttcaaccgatgaagtttatggtgatattttatcaggaagatcaaacgaaaaatttccttataaaccaagttctccctatgcagctagtaaggctgcatcagatcatttagtgagctcttatgtaagaacttataaaattccagcgattgtaacaaattgttcaaataattttggaccaaaacaacaccctgaaaaattaattcctaaactaatttacaatatattaaataataaacctctaccgatttatggcaaaggattaaactcaagagaatggatttatgtgagtgatcactgtgaggcactttttaaaatttataaaaatggaaaagttggtgaattttataatattggttcaaataaaaatttgagtaatttgcaagttgctaaagaacttttaaaaagatcaaaaaaaataataaagatgggtaaaaaagttaaaataaattttgtaaaagatagaccaggtcatgatattagatatgcattaaacagtaataaattaagaaacaaacttaaatggtaccctaaaacaaatttctctgatggaataaaattgacacttaaatggtattgtgaaaataaattatattataaatctcttttaaaaaaagatataacaaatagattaggtaaaggatgat

SEQ ID NO: 284338 - DNA, 490 bp, Unknown
  Bacterial polypeptide expressing nucleotide sequence isolated from the Sargasso Sea
tgctccaacaactatgggccgaatcaatttcctgagaaattgattcctttaatggtaactaatgcaattaatggaagatccctgcccatctatggagatggtatgcaaatacgagactggatacatgtccatgatcatgctcaaggaattattgcttcgatgaaaggtttagttgcaggtaggctttctcccggagaagtaattaattttggtgcggatcaagaattatcgaatatagaaatagttagaacgataattgaactaactggatccgattcgttgattgagcacgttgaggatagacccgggcatgatcgaagatatgctatgggattcgacaaagccaaaagattgctagattggaatcctgaaatttcatgggaggaaggaatcaagagcaccgtagaatggtaccaggaaaatgatggatggatagaatcggttatcgatgggtcataccatgactggatcgatgaacattatggttgaa

SEQ ID NO: 284339 - DNA, 609 bp, Unknown
  Bacterial polypeptide expressing nucleotide sequence isolated from the Sargasso Sea
gtaaaactcaatactttgaagaatccgataaattcaatccctcatctccttattcagcttcaaaagcatctgctgagcatctatgtaatgcatttaagaagacttatggacagaaagtaacaatactacgaccctgcaataattatggaatctatcaacaacctgaaaaaatgataccttttagtattttaaatctagtcaacgataaaaatatcgaagtttatggagatgggaaaaatgttagaaattggattcacgtaaacgatacttcgaatgccattcttcatatgataaataataaatatgaaaacgaagtgtttaatgtcagtacagatttctttattagtaattatgaactaagtactaaaatagcaaactctatgggttttgatgaaaatcggatttctttcatagatgatagacctggacatgattttagatacgctgcttcaaataataatttgatcaggacaggatggaaaccccagtataattttgatgaatcacttaaagaaattattcactggtacatgaaaaatacaaagtggtgggataaagagtttattaatacaaataaaaatcgcaaaaaaagatttaacttaaattagt

SEQ ID NO: 284340 - DNA, 710 bp, Unknown
  Bacterial polypeptide expressing nucleotide sequence isolated from the Sargasso Sea
tatgaaaaaatatttatctactaaattcaaaagaattctagtaacagggggggctggttttattggtagtaattttatatttaaaaatctccatgacaaaaaactaaaaatttttaatttagataaaatctcatattcaagtaataacttctttactgaagaaactttaataaaaaatcaaaataatttaagttttttgagagtagatcttaaagatcagatgggaacaagaaatgccctcgaattcagcaaaccagacttaataattaatttcgctgctgaaagccatgtagataaatcaatcattaatcctcggttatttctagaaagtaacacaattggaacatttaatcttcttgaagaagtaaggagttattggaataaattatctttaaataaaaaagatgattttaggtttttgcatatcagcactgatgaggtatttggtactctcactaaagaaggtaaattttcagagaattcgccctatcttccaagtagtccttattctgcatcaaaagccgcgagcgatcattttgtcaattcttggcatattacatacaaaatacccaccataattgttaattgcagtaataattatggacctagacaatatcctgaaaaacttattccactaacgattaaaaatataataaataatattgagatccccatatatggcgatggaacaaatcgtagagattggattt

SEQ ID NO: 284341 - DNA, 939 bp, Unknown
  Bacterial polypeptide expressing nucleotide sequence isolated from the Sargasso Sea
atcatcactgggaggcgctgggatttatttggaggagcacttataagaagaattttaaatactacaaactcaaaaatttacaatatagataaacttagctattcaagtgatttatcttatttaaaaaattcaaaatttgatgaaggaaggcatattcacttatgttttgatctaaacgattttagaaaaactaatgatgcaatccaaaaaatagatccagatataattattcatttagctgcagaaagtcatgtagatagatcattggataacccatcaaattttatcgaaagcaacatcttgggtacttttaacttattagaggcctctagaaaacattggaataatttagacgagataaggaaattaaattttagatttcttcacataagtactgatgaagtctttggatcattgtctttaaaaggggagacaaagttcaatgaagacagtccttattttccaagtagtccctattcagcttcaaaagcatctagtgatcacttagtaaatgcatggcataagtcatacggtttacccacaataattacaaattgcagtaataattttggcccttttcaattccctgagaaattaattcctctatcaatattaaaggcaataaacaatgagccaattcctttatatggtgacgggaaaaatattagagattggttgtttattgaagaccatatagatgcgattatgcttgtagtcacaaaaggtaaaacaggagaaaactattgtataggtggtaataatgagaggagtaatatatcaataattaatcaagtttgttcttatattgataaattcaagcccggaagaaaaccttattcaaaattaataacttttgtagaagataggccaggacatgatatgagatacgccatttcagcaactaaaataaatttagaattaaagtggtctccaaaaact

SEQ ID NO: 284342 - DNA, 592 bp, Unknown
  Bacterial polypeptide expressing nucleotide sequence isolated from the Sargasso Sea
ccttaccagccaagttctccatatgcagcgactaaagcagcatcagatcatttagttagttcatatatcagaacttacaaagttcccgcaataataacaaactgttctaataattatggtccaaaacaacatccagaaaaattaattccaaaacttatttacaatatcttaaataataaacctttgcctatttatggtaatggtaaaaattctagagaatggatttatgtaaaagatcattgtgaagcattattaaaagtttttaataaaggaaaaattggtgaattttataatattggttcaaataaaaatttaaccaatttacaagtttcaaaagagttaattaacgtcactcaaaaaatatttaatatagggaagaaagttaaaattatgtttataaaagatcgtccaggtcatgacataagatatgctcttaatagtaaaaaaattagaaataaattaggctggtatccaaagacaaattttaaaaaaggaattaaattaacattcaactggtataataataataaaaaatatttcaaatctttgaaaaaaaaagatattgttaaacgtttgggtaaacatgattaaa

SEQ ID NO: 284343 - DNA, 697 bp, Unknown
  Bacterial polypeptide expressing nucleotide sequence isolated from the Sargasso Sea
atgcgattatttataactggagggtgcggatttataggcagcaattttatattaaatcaaggtataaaaaaagctgatgcactactaaactatgacaaattatcatattctggtaatattaataatttatctagtattgaaaacaataatatttattcatttatacaaggtgatatatgcgatataaatacattaaataaggcgataattgactttgaacccgatataattattcattttgccgcagaatctcatgtagatagatcaatagatagcccattcgattttgtggatacaaatattgttggcactgcaaatttattatatgcagcatcttcttatatgaaaaaaactgctaaactaatgaaatttatccatatcagtactgatgaagtttatggttcgcttaaaaagacaggttttttcaatgaaaattcattaattaaacctaattctccttatgctgcctctaaggcaagttcagatttattagtaagatcttggaacaagacatataatttcccatcaattgttacccattgttcaaataattatggtccatttcaatttcctgagaaactaattccattaatgattgctaattgtattgataataaacccttaccactgtatggaaatggtaaaaatattagagattggctacatgtttacgatcattgtgaagctattcccaaat

SEQ ID NO: 284344 - DNA, 802 bp, Unknown
  Bacterial polypeptide expressing nucleotide sequence isolated from the Sargasso Sea
tctcaaaactaccgatttgttaaaggtgatatagttgataaggcatttgtaaatgagttgtttgaagaaaataattttgatggtgttatacatttagcagctgagtcacatgtagataggtctatagcaaatcctttagaatttattgaaaccaatatattggggacaatgaatttattgagtgctgcaaaaaatgtttggtctagttttgagggaaaattgttttatcatgtttcaactgatgaagtctatggttcgctaagtgaaactggattctttacggaaactacagcatatgatccaagaagtccatattcggcttcaaaggcatcatcggatcatttagtaagagcttattggcacacttatggcttgccaattgtaatttcaaattgttctaataattatggatcgtatcaatttcctgagaaattgatacctttatgtataaataatatcaaattaaataaccctatacctgtttatggtaaaggagaaaatattagagattggttgtttgtagaagaccacgttgatgcaatagatcttatttttcataaatgcaaaataggtgaaacatataatattggtggaaataatgaatggacaaatattgacctgattaaattattgtgttctataatggatcgaaggttaggaagagaagagggagaaagtgcaaaattgataacttttgtaaaggatagggcgggacacgatatgcgatatgccatagattctgagaaactgcaaaaggagttaaattggcatccttctttgcaatttcaagtagggacttact

SEQ ID NO: 284345 - DNA, 679 bp, Unknown
  Bacterial polypeptide expressing nucleotide sequence isolated from the Sargasso Sea
aacggcaaatgcaaattttttcatatttcaacagatgaagtttatggatctaataattataatccctcaaaagaaaattctccttacaagcctacatcgccctattcatcctcaaaagcttcttcagatttagttgctttatcatttaatcatacttttaaaacatgtatttcaattataaatttatgtaataattatggaccttatcaacatttagaaaaatttattccgacatgtatttttaatttattgcaaaataagtcaatacctatttatggtagcggaaaaaatattagagagtggatctatgtagaagatgcttgtgaagctataatgaaaattctaaatctaaaacaaaattactatagatttaatattggttctaaaattagaataaataatttttcgttagcaaaaaaaatatttgtaataatgaaaaaaatgaaaaagacaaatatgacaaaacaaaattattacaaatttgtcactgatagacccggtcacgatttaagatatgctttaaattcctcattattttataaaaaaactaaatacaaacttaaaaataatattgataaaggtttaaataaaacaattagatggtacttaaaaaatcatgaatgggtaaaatctattaaaaaaaattattctggaaaaagggttggtttaaatgattaaa

SEQ ID NO: 284346 - DNA, 597 bp, Unknown
  Bacterial polypeptide expressing nucleotide sequence isolated from the Sargasso Sea
ttgattttactgatataccattaaatgaatcttctccatatgaacctaattctccttactctgcttccaaggctagttctgacttattagtaagagcttggaatgaaacatataaagttaatactgtaattaccaattgttcaaataattatggtccttggcaaaatcctgaaaaactaattcccaaaattatctacagtgctttgagcaataaagtgattcctatatatggtaacggtcttaatataagagattggcttcatgtcgatgaccatgttcaagctcttctacttgcaggtgagtccaagagatcttttgaaagatatacaattggagcaaatcaagaatgctctaatatagatttaactaagatgatctgtttatatctagataaaaaaataccaaaagaaagaccttattttgatcaggtaaagtttgtagatgatagattggggcatgatctaagatatgcgattgattcatcgtatatttcaaaagaaattggatttaaacccaaatatactcttgaaaaaggtattgaaaaaacaatagattggtacttagagaacttgaagtggttaaaaaccaaaatttaag

SEQ ID NO: 284347 - DNA, 824 bp, Unknown
  Bacterial polypeptide expressing nucleotide sequence isolated from the Sargasso Sea
taaaaaaatcgatattcgtgattataaggagctgaaaaaagaaattgattcatatcaacctgacgcaattattaacctagctgcagaatcacatgtagatagatctatagattcagcatcaaaagttcttcagactaatataatgggaacttttaacttattagatattttcactaaatattggatacaaaaaaatgcatctaaaacatataaattcatacacatctcaacagatgaagtatttggagaggctttggattctgagatgtttactgagagcacaagatatgatccaaaaaacccatactcagcgtctaaagcagcaagtgaccatcttgtaaggtcttggcataactcgcatggaacgcctactataataacaaattgttcaaataattacggaccttttcaattccctgagaagctcattcctcttacaataaatgcaattaggaattcaaatccaataccaatttatggtaatggcaaacaaataagagattggatatatgttgatgatcatataaatggtgtgttaaatgttctcgaaaagggcacaataggcgatagttataatattggttctaataacgaactaaaaaacattgatctggtagagatgatatgcagcaacctggacaagaagcttaataacactatcccatctaaaaatcttatagaatttgttaaagataggccaggacatgataggcgatatgccatagattcatctaagataagaactgaattaggatggacaccaagttttgatatagaaactggtttagacaaaacaatagattggtatttatctaatgaaactt

SEQ ID NO: 284348 - DNA, 790 bp, Unknown
  Bacterial polypeptide expressing nucleotide sequence isolated from the Sargasso Sea
atgaaaaaaataatagtaacaggtggatctggctttataggtagtaatttagtaaattatctgattaaaaaaaaatatttcgtaattaatattgataaattaacttactcttctaacacctaccaaaaagccagtctttcaaaaaaaaattataaatttttaaaaattgatattaataataaatttaaaattaaaaaaatcataaaaaaatataaacctgaatgcatctttaatcttgccgctgaaacacatgttgatagatctatagactctccttttcaatttattaattcaaatatattaggtgtttttaatattttagaagctattagagaaaacaataaaaaaaataaaaaaattaaattagttcacatttctacagatgaagtatatggagatgttttaaataatcggtcaaatgaaaattttccatataatccaagttccccatattcagcatctaaagcaagtgctgatcatttaatcaaatcttatgtaagaacttataaattgcccgcggtaatatcaaattgttgtaataattatggcccttatcaatttccagaaaaacttattccgaaaatgatttctaatatttttagaaataaacctttgcctatttatgctaaaggacaaaactctagagaatggatacatgttgaagatcattgtgatgctttatataaaatctttaaaaaaggaaaaattggagaaagttataatgttggatcaaatgttaatttaaaaaatataaaattagttaaaaatattttaaagatatttaaggaaa

SEQ ID NO: 284349 - DNA, 850 bp, Unknown
  Bacterial polypeptide expressing nucleotide sequence isolated from the Sargasso Sea
atgaaattcttggttacaggatgttttggttttataggctttaatttcataaactatattaaagataaatatggagatgatgtttttatatatggtattgattcagttgagtcaagctgctcagaaaaaaacaaggaaattagtaaagaattagaaggttttgagcacaaaaaaataaatattaatgatatagatcaagaaagttttgataaagttgatatcattattaacttcgcagctgagagtcatgtggacaattcaatatataatcctcaactatttattgataccaatgttaaaggtactgcaaaagttgcgaattatgcaatcaaaaataatattgacaagtttattcatatttctactgatgaggtttatggaagtaatgaaaatgattattcaaaagaaaatgatagattaaatccctcttcaccctactcgtcttccaaggctgctgcagaaatgatacttaatgggtatacaaaaacatacggatacgaatttattactgtcagaccggcaaataattatggtatatttcaacaacctgaaaaacttataccttttagtgttgccaatattttgtctggtaattgtatagaaatatatggaaaaggaaacaatatcaggcattggcttcacgttgatgatacgtgttcagcaatagatcacttaattgaaaaaggaaagattaatgaagtttataatattggttctggcttttatctttcaaacatagaactagcaaaaaagttattaatgatactggacaaacaggaggatatgattgaatttgtagaggataggcctggacacgattttaggtatgcagttaatttggataaaattt

SEQ ID NO: 284350 - DNA, 994 bp, Unknown
  Bacterial polypeptide expressing nucleotide sequence isolated from the Sargasso Sea
tatgaaattagtagttactggcggatatggtttcataggaagtaattttattttaaaattactggaaagcaatgaagattataaaattacaaatattgatgcagaattaaatggttcaaatccaaaaaatttagattcaataaaaaatcatgaaaattataaatttgttaagggaaatattactaatcgaaaattaatggaagaagtgattaatgattgtgatgcagtagttaattttgcagcagaatcatttgtcgatagaagtattaacgatgcaaatccatttttagtttctaatattagaggtacatatacaatattagatattgttacaaaattcaataaacggatgattcagatatctactgatgaagtttttggtagtttacaagatggcagcgcatttgaaacatctagatttaatccatcaaatccatatgcagcaacaaaggcttcagcagaacttttagttatgtcatattttcaaacatataattcagatgtggtaacaacaagatgtacaaataattatggacctagacaatttgttgaaaaattaatacctaagactataatcttagcaaataaagataaaaaaataccagtttatggtaaaggcaataatattcgagattggatatttgtagatgatcattgtgatgcagtattgatgagtcttctcaatggtaaaaaagggtcatcgtataacatatctgcaaataacgaagtcgataatatgacagtggttagaaaaattttggatgtaatggacaaatctgaagacttgattgaatttgtagaagatagaccaggtcatgattttaggtatagtctaaattcaaaaaagatttcagatgaattaggatggaagagaaatacaaattttgatgaaggaatacgaaaaactgttcaatggtatttggataatccagagattttaaatgatatttcaagtacagttttagattcaacaccttggaaaagttctaattaa

SEQ ID NO: 284351 - DNA, 646 bp, Unknown
  Bacterial polypeptide expressing nucleotide sequence isolated from the Sargasso Sea
atgattaaaaaaagaattattgttacaggggggcttggttttataggaagtaaccttatagaattattgattaaaaaaaagtatcaagtaatcaatatagataaaatcagttactcctctaatttttacaataccaaagaatacaaaaacaataaaaactataaatttattaaatgtgatcttaataataaaaataaattacgtaaaattttaaataaatttaaacctttgggtatttttaatttagcagccgaaacgcatgttgatagatcaatcgatggaccaggaaactttattaagagtaatattcttggagtctataatttattagaagtatttaaaaaatattcaaaaaaaaattataaaacaaaattaatacatatttcaactgatgaagtttacggtgacataataaaaggacgaagtgatgaagaatacccctacaaacctagctcaccttatgctgctagcaaggcttcttcggaccatttagtttattcctatgtacgtacttataaaatcccagctataattacaaattgttctaacaactatgggccaaaacaacatcctgaaaaactattaccaaagttaatttataatataattaagaataaaaatttacctatatatggaaagggattaa

SEQ ID NO: 284352 - DNA, 1018 bp, Unknown
  Bacterial polypeptide expressing nucleotide sequence isolated from the Sargasso Sea
tatgaaaagaattgttgttacaggtggatgtggatttataggaagcaatttagtaaagtttttacttaaaaaaaaatataaggttcttaatatagacaatttaagttactcggcaaacccctataacttaaaaaatgttaaatctagtaaaaattataaatttgttaaacaaaacataaacgacaaagaaaaaatatataaaatattcaaaaagtttaaacctgaaggaatttttaatttagcagctgaaactcatgttgaccgatctatagatgatccaaaaaattttataaacacaaatattattggtgtttatagtttattgctggctttagatagatacaaaaaaaaaatcaaaaaaaaaattaaacttgttcatgtttcaactgatgaagtatatggtgatataaattttggaaaaaaatcaaaggagaaatatccttacacacctagttccccatatgctgcatcaaaagccagtgcagaccatttaataaaatctttttttagaacgtacggaataccagctgtaatatcgaattgctgtaataactatggtccgaatcaatttccagaaaaattaataccaaaattaatatataatattttacaaaataaacctcttacattatatggacgtggaaaaaatataagagaatggatttatgttgaggatcattgcgaagctcttctaaagattcttgagaaaggaaaagttggtgaaagttataacgttggtacctccgactcttttaaaaatattgatattgctaaaaaattattaaaaattttcaataataaaaaaattaaaattagattcgtaaaagatagaccaggacatgatattagatattcattagattatacaaaaataaaaaagaaattaggctggagaaaaaagactaagtttgaagaaggtatattaaaaactgtttattggtatctaaataatcaagaatttttttctagtgtatccaaaaaattatatagtaaaagacttggtcttaaaaaattatga

SEQ ID NO: 284353 - DNA, 673 bp, Unknown
  Bacterial polypeptide expressing nucleotide sequence isolated from the Sargasso Sea
ggaacatataatttacttgaaggcataagaagcttaactaggaaagaaaaaattttgtttcatcatgtttctacagatgaagtatttggtgatttaggtaaaaatgatcctccatttactgagtctcatcaatatcagcctagctcaccatactctgcttcaaaagcagcctcagatatgctggttcatgcttggggaaggacgtataaaattccatatctaataacaaattgcagtaacaattttgggccaaggcaacatcatgaaaaatttatacctaaggttatttgtaatgctataaatggaattgaggttccaatatatggtgatggtaaaaatatcagagattggatttttgtagaagatcacataaaaattatttttgagttacataaaaaaaatgtaagaaatcaatctgtaaatataggaaacaagtgcgaaaaaaccaatcttgaaattcttcaaaccatctcaatgattctcaatgatcaattttccattaagttaaagtattcatttgtaaaagataggcctggtcatgataaaagatatgcgattgatatgacaaaagctgaagctctacttggcaggaaaattgagagtgattttcacttaaacatgaaaaaaactattcaatggtatataaaaaattatgattggtggaagaattgat

SEQ ID NO: 284354 - DNA, 836 bp, Unknown
  Bacterial polypeptide expressing nucleotide sequence isolated from the Sargasso Sea
aaaagtaagaaaaatttttaaatattataatccagtaggaatatttaaccttgcggctgaaactcacgttgatagatctatagataatccaggtaattttattaaaagcaatattttaggtgtttttaatttgcttgaagaatttaagcatttttttaaaaaaaataagaaaactaaattaatacatatatcaactgatgaagtgtatggggatatattaaaaggaagatcaaatgaaaattatccttataaacctagttcgccttatgctgctagcaaagcatcatctgaccatcttgttatgtcttatataaaaacatttaatattcctgctattgttacaaattgttcaaataactttggtccaaaacaacatccagaaaaacttatacctaaactaatatacaatattattaaaaataaaaaactccctatttatggtaaaggaaaaaactctagggagtggatatatgtaagtgatcattgtgaagcgctattaaaggttttcagtagaggaaaactaggtgaattttataatataggctcaaatataaacttaaataacattcaaattagcaaaatgctccttaaggtaagtaaaaaaataatgaataaaaattcaaatgcaaaaattaaatttgttaaagatagacctggtcatgactttagatatgcattagacagtaaaaaaataagaaaacaattaagatggaaaccaaaaacaaaaattttagatggaatacataaaactttctcatggtattttgaaaataaaatgtattataaatccatatcaaaaaaagatattgaaaaaagacttggtgttagaaaatgat

SEQ ID NO: 284355 - DNA, 565 bp, Unknown
  Bacterial polypeptide expressing nucleotide sequence isolated from the Sargasso Sea
aatgtcatttacagaaaattctataataaaaccaagttcaccatactctgcttctaaggcaagtggtgatcatttagtttattcatactttagaacttttaaactacctactataattacgagatgtacaaacaattatggtccttaccaatctaccgaaaaacttattcccaaagtaattaataatgcaataaataatcgatctatacctgtttataataaaggtaatgaaataagagattggattcacgttgaagatcatgttgatgcaattttgaaagtaattaaaaatggtaaaccaggaaatgtctataatattggaagccaaaacagtatgacaaatataaaacttattaaaaaaattctatttataattagtcaaaaaaaaaacaactttaaaagtcttttgaaattaattaagtttgtcaaagataggccagggcatgatttcaaatatgctattaataattcaaaaaccagaaaagaaatcaagtggtcgcctcaaattaaatttgattatggtatcaaaaagactatagagtggtatttgagaaaaaataattaa

SEQ ID NO: 284356 - DNA, 580 bp, Unknown
  Bacterial polypeptide expressing nucleotide sequence isolated from the Sargasso Sea
gatggtcatcctgatcaccgggggtgccggtttcattggttccaacctgattcattattggctggctcaaaactctggtgacacgattgtcaatttcgacgcgctgacctatgcagggaacctcgccaacctggttggggttgaatccaacccgaattattattttttccaaggtgatctcagaaaacaggaacaactcgatgaggtgttcgagcagttttccatcgattcggtgattcaccttgcagcggaatcccatgtcgaccgcagcatcaacgatccttctccatttatcgatagcaacatcaaggggactttccaacttcttgaaacggccaggaaccactggcaagaggatttgaagtatcaccgtttcctccatatcagtaccgatgaagtttatggcacgctggggaaagagggattatttactgagcagaccccttttgctcccaattctccttactcttcatcgaaggcttcaagcgatcaccttgtccgggcatggcatcatactttcggtatggacaccttgatcactcattgttcaaacaattacgggtccctaccaatttcctga

SEQ ID NO: 284357 - DNA, 644 bp, Unknown
  Bacterial polypeptide expressing nucleotide sequence isolated from the Sargasso Sea
agtttatggagatatgggaaagaattataagagatgcgatgaaaatcatccttataaaccgagctctccctactcagcatcaaaagccagtgctgatcatttaattaattcctatataagaacttacaaaattcctgcagtaatttctaattgttgtaataactacggaccatttcaatttccagaaaaacttatacccaaaataatatcaaatattttaaataataaagaactgcctatttatggaaaaggtaaaaactcaagagaatggatatatgtaaaggatcattgtgaagccttattcaggctatatttgaaaggtaaagttggagaaaattataacgttggtactaataaaaacttgagtaatatagatttggttaaaaaaattcttaaaatttttataaaaaataaaattaagatcggtaaaaaagtgaaaataaaatttgtgaaagatagacctggtcatgattacaggtatgctttaaatagcaaaaaaatagtaaaaaatttgaaatggaaaccaaaaacaagttttgataaaggtttagtagatacaattaactggtatttaaaaaatcaaaattttttatcttctatatcaaaaaaactttatgaaaaaagattaggtttaaaaatatgat

SEQ ID NO: 284358 - DNA, 956 bp, Unknown
  Bacterial polypeptide expressing nucleotide sequence isolated from the Sargasso Sea
gatgactaaatcaatttataacagcattttggtcacgggtggttgtggttttattggctcacattttatagagtatttttcagaatattatcaagatactaaaattattaatattgataaattaggatatgcagtctcaaacaaaactgttgaattactaaaccaaataaataattattctttttataaagttgacattacagatattaaaaatgtaaaaaaaattttttctgaaaacaactttgatgctatttttcattttgctgctgagtcacatgtagacaattctataacttcaccatctgacttcgtcaattcaaatatcatgggaacttataatcttttggaatgtactcggcattcgaaagatcttgggaagaatatttttttccatcatatttcaacagatgaagtgtatggttctttgtcaaaatcagaaaatcctttcgaggaagataacaaatacttgcctagctctccatattcagcatcaaaggcctcgtctgatcttttggttgaggcttggagtcgcacttataatttggattacttaataactaattgcagcaacaattatggctctagacaaaacattgaaaaattgattccaaaaattataaaaaatgccgtaattggaaaggaaattccaatttatggaactggtgacaatattagagattggttgtttgtaaaagatcacgttgatggaatattaaaattacatactgctaaaaaaaagaatacaacctataacataggaggcgggtttgaaatatcaaacattgatttagccaacatgatattaagtattttggaagaagattataatttcttggatcttaaaaaattaattcgattcgttgaagatagaaaagggcatgattttaggtatgcaattaatagttcaaagatatttgatgaagcaggatggcagccaagtaactcttttcagcaca

SEQ ID NO: 284359 - DNA, 560 bp, Unknown
  Bacterial polypeptide expressing nucleotide sequence isolated from the Sargasso Sea
taaagctgcatcagatcatttagtttattcatatgtaagaacatttaaaatcccagcaattattacaaattgttcaaataattatggaccaagacaacaccctgaaaaattaatcccaaaattaatatacaacattttaaataataaaagtttaccaatttatgggaaaggaagaaactcaagagaatggatttttgttgatgatcattgtgatgctctaataaaaatttataaaaaaggaaaattaggtgaattttataatatcggatcaaattataatattgataatttgaaagttgtaaaaaaactattaactgtagctaaaaaaaaaattagtcttggacaaaaagttaaaattaaattcgttaaagatagacctggtcatgatatgagatatgcaattaatagtagtaaattaaaaaataaacttaaatggaaaccaaaagttaattttgctaaaggactagaaaaaacatttctttggtatcttgaaaatcaaaattactattcaaaattaaataaaaaagatatcactaagagaattggaataaaaaaatgat

SEQ ID NO: 284360 - DNA, 1027 bp, Unknown
  Bacterial polypeptide expressing nucleotide sequence isolated from the Sargasso Sea
aatgaaaaaaatcattgttacaggcggatcaggttttataggcactaatttagttaattttcttataaagaaaaatttttttgtaataaatattgataaactaacgtattcatcgaataaattgaaagttaattttcgaaataaaagaaattataagttttataaattagatataaataataaaaaaagattaattcaaattattaaacaatataaacctaaagcaatatttaatctcgcagcagaaactcatgttgataggtctattgataatccgaaaactttcatagatacaaacatttacggtacttacaatttattagagtctttaagacttttaaaaaaacaaaaaattaatattaaattaatacatgtttctaccgatgaagtttacggagatattgaaaaaagtttaagatctgatgaagaatttaaatacaaacctagctcaccatacgctgcctcaaaggctagtgcagatcattttgtaaattcttatatcagaacatatggtattaaagcagtaatttcaaattgctgtaataattacggtccttatcagtatcctgaaaaattaattcctaaaatgatttcaaacatcatatttaatagagaacttcccatttatgctaagggactaaactcaagagagtggatatacgtagatgatcattgtcaggccttattcacgctatatttgaaaggtaaacctggagaaagttacaacgttggatcaggaaaaaatataaaaaatatagaattagtaaaaaaaattttaaagatttgtaaatctatgaatataaaaaaaggaaataaagtaaaagtaaaatttgtagaggatagaccaggtcacgatttaagatatgctttaaataataataaaatttctaaaaaacttaaatggaaaacaaaactttctttcgaaattggattgcgaaaaactatttattggtatttagaaaataaattttttcttaaaaagctatcgacaaaaaactacagtaaaagattaggcttaaaagtatga

SEQ ID NO: 284361 - DNA, 567 bp, Unknown
  Bacterial polypeptide expressing nucleotide sequence isolated from the Sargasso Sea
gctgcactaaagcttcctcggatcatttagtttattcttatgttagaacttatataattaatgcaattataactaattgctctaataactacgggccacgacaacatccagaaaaacttattcctaaaattatctataactgtattaataataataatattccaatatatggtaatggaaaaaattctagagaatggatttatgtaatcgaccactgtaacgcattaataaaagtatttaaaaatggaaaagtaggggaattttataatattggctctaatctaaatcttaataatttaaatatagcaaaaacactaataaaaactgctaaacaaaaaattaaaactggtaaaaatgttaaaattaaatttgttaaagacagacctggacatgattttagatatgctcttaatagtaataaaattaaaaaaaaattaggatggaaatcatctataggattaaaaaaaggacttgaaaaaacttttgagtggtatctaaataaccaaaactattattctaagttaaaaaaaattgatattactaaaagattaggtcaaaaatattaat

SEQ ID NO: 284362 - DNA, 723 bp, Unknown
  Bacterial polypeptide expressing nucleotide sequence isolated from the Sargasso Sea
aatgaaaaaaatcgtagttactggtggattaggatttataggaagtaatttaatagatttattattaaaaaaaaattttttcgtcattaatattgataaaggaacttattcatcaaatttatataatactaaagattttaaaagatctagaaattataaattatttaaacttgatatcgcgagtaagaaaatcgataaaatactaacgaaatacaaaccatcaggagtttttaatttagctgctgaaacgcatgtggatagatccattgataatcctgggagttttattcaaagtaacattgttggtgtattcaatctacttgaatgtttcaaaaatttttcaaaaaaaaataaatctaagttgatacatatttcaactgatgaagtttatggtgatgttttaagtggaagaacagacgaaaatcattcttataaaccaagctcaccttatgctgctagtaaagctgcatctgatcatttagtaagttcatacattagaacttataatttacctgcaatagttactaattgctctaataattatggtccaaagcaacacccagaaaaattaatcccaaaactaatatataatataatgaataacagacctcttccaatatatggaaaaggaaccaattcaagagaatggatttatgtaaaggatcattgtgaagcattaataaaagtatttcacaaaggaaaattgggagaattttataatat

SEQ ID NO: 284363 - DNA, 1024 bp, Unknown
  Bacterial polypeptide expressing nucleotide sequence isolated from the Sargasso Sea
aatgcaaaaaataattgtcactggtggacttggatttataggcagtaatttaattaaaatattattaaaaaaaaaatacaaagttatcaatattgatagaataagttatgcctcgaatttttacaatgttaaaaattctaaaaaaaataaaaattactcatttattaaatgtgatataaataataaaaatcaatttttaaaaattttaaaaaaaaataaacctataggtatctttaatcttgctgctgaaacacatgtcgatagatcaatagatagtccaaaaccgttcatcaaaagtaatatattaggagtttataacttacttgaagcttttagaaattattctaaatttaacaaaaaaataaaattaattcatatttcaaccgatgaagtttttggagatttaaaaaaaggtagatcaaatgaaaaatttccatataatcctacctcaccttacgccgcatctaaagcatcatcagatcatttagtttcatcttatattaaaacttataatttaagagctattgttacaaactgctcaaataattatggtccaagacaacatccagaaaaattaattccaaaacttatttataatattataaataacagaaatcttcccatatatggaaaagggaataattcaagagagtggatacatgtttatgatcattgtgaagcactcgttaaggtttttaaaaaaggaaaatttggagagttttataatattggatctaataaaaatttaaataaccttaatataacaaaacttttgctaaaagttgcaaaaaaaattgttaaaattaattcaaaagtaaaaattaaatttgtaaaagatagaccaggacatgattttagatatgccttgaatagcaataaaataaaaaaaaaattaaattggagttctaaaattaggtttgaaaaaggcctttatgaaacttttttatggtattatagaaatcaaacttattacaaatcatttaataaaaaagatatagtaaacagattggggttatttaaatga

SEQ ID NO: 284364 - DNA, 706 bp, Unknown
  Bacterial polypeptide expressing nucleotide sequence isolated from the Sargasso Sea
caacccacttttatttgcacaaacaaatattctaggaactattaatcttcttaactcagttaaagaattgtggaatgataaaaaagataatagattttatcatgtctcaactgatgaagtatatggaaccctaggtgattcaggaagttttcatgaaaaaactaattacgatccgaggtctccatattctgcttcaaaagcttcctctgatcattttgtaagtgcatactatcatacttataatctgcctgttttgatttcaaattgttcaaataattttggaccaaatcaaaataaagaaaaactaatacctgtagttataaactcaattttaaataaacaaaaaataccaatatatggaaatggtaagaacatcagagattggctatttgtagatgatcatatagaagcaattgacacaattcttcacaatgctgaaatcggacaaacatacaatataggaggaaataatgaactgactaatctagaattagtgagaaaaattattgaaataacttcaagacttattaacgaggataaagaatctattttaaagctaatttcatttgtagaggatagaaagggtcatgattataggtactctatagataattcaaaacttaaaaacaatcttggatggagtccatctcataactttgaaaaatctttagagaaaacaataaaatggtatattaaaaaaacatga

SEQ ID NO: 284365 - DNA, 832 bp, Unknown
  Bacterial polypeptide expressing nucleotide sequence isolated from the Sargasso Sea
catgaaaaaaattatagttactggtggactaggttttatcggaagtaacttaattgacttattaattcaaaaaaaattttttgtaattaatattgataaaattacatactcttctaacttttataatgtcaaggaacaccaaaaatcaaaaaaatacatatttataaaatgtgatattgaagataaaaaaattgaaaaaattctttataaacacaaacccgttgctatttttaatcttgctgcagaaacacacgttgatagatcaattgacaatcccaaaaaattcattgagagtaatattttaggcacatttaatctactagaatgttttaaaagatattctaaaaaatttaaatcaagattaattcatatttcaactgacgaagtttatggtgatgtattagttggtaggtcctcagaaaattatccgtataaccccagctctccctatgctgcaagtaaagcatcatcagatcatttagttagttcttatattagaacttttaaaattccagcaattgttactaactgctctaataattatgggccaaaacagcaccctgaaaaattaattccaaaaatgatttacaatattcttaacaataagcctctacctatttatggtaaaggaaaaaattcaagggaatggatatttgtaaaagatcactgcgaagcattaattaagatctttaaaaaaggaaaagtaggtgaattttataatattggatcaaataaaaatttagataatttacaagtttcaaaaaaactgatcgaaatatcaaataattttttaaagataggtaaaaaagtaaaaattttatttgtaaaagat

SEQ ID NO: 284366 - DNA, 499 bp, Unknown
  Bacterial polypeptide expressing nucleotide sequence isolated from the Sargasso Sea
attacaaattgttcaaacaactatgggcctcgtcaacatccagaaaaattaattccaaaattgatttataatattatttgtaataagcctcttcctctttacggtaaaggaaaaaattctagagagtggatttttgtagatgatcattgtgaagctttatttaaagtatttaaaaaaggaactaagggggaattttataacattggatccaatatcaatagtaacaatattgatatagcaagacttttaattaatatcgcaaaaaataaaatgcagttgggtaaaaaagttaagataaaatttgtaaaagataggcctggtcatgatttcagatacgcattagacagtaaaaaaatttttaaaaaacttaaatggaaatcaaaaataaatctaaaaaaaggtttagaaaatacctttaattggtattttgaaaatatgaaatactatacaactttaaaaaaaaaggatatcacgaggagacttggaataattaaatgat

SEQ ID NO: 284367 - DNA, 1036 bp, Unknown
  Bacterial polypeptide expressing nucleotide sequence isolated from the Sargasso Sea
gctgggatcccgccagcgggtgctcgtgacaggaggggctggatttattggcggagccgtggtgcggcgcctgctgcgcgagagcgacgccatggtgttcaatctcgacaagatgggctacgccagcgatctcacctcgatcgaggaggtgctgactgagcttggtgatggagctgcccaacgacatgtgctgcaacaggtggaccttgctgacgccaaggcggtccgagacgcggtgcaggcagcggatcccgatctggtgatgcaccttgcggcggaaagtcatgtggaccgctcgattgcgggccctggtgtgttcatcgagagcaacgtgacggggacgtacaacctgctgcaagcggtacgggagcatgtcgagggcttgagcggagaacgcgaagagaacttccgactgcatcacatcagcaccgatgaagtctttggctccctgggcgaggaaggtcgtttctgcgaaaccaccccctacgacccgcgaagtccatattcgagcagcaaggcggccagtgaccatctggtgagcgcctggcaccacacgtacggattgccagtggtgctgacgaattgctccaacaactacggaccttggcaattccccgaaaagttgattcccgtcgtgacgttgaaggctgctgcaggagagccaatccccttgtatggcgatggattgaacgtcagagactggttgtacgtggaagaccacgtcgatgccctgctcctggccgcttgcaagggagcatcaggccgcagttactgcgtcggcggctatggagaacgaaccaatcgcgaggtcgtggaatgcatctgtagccagttggatcagctacttccgacgcgcaatccgcataagcaattaattcaactggtgactgatcggcctggacatgacaggcgatacgccattgatccagcaagaattgaaaccgagctggggtggaaaccacggcatgatttcaatgaagccatcgcgaaaacagtgcagtggtacatcacacactatgccgaaaagaaaacgtag

SEQ ID NO: 284368 - DNA, 549 bp, Unknown
  Bacterial polypeptide expressing nucleotide sequence isolated from the Sargasso Sea
aatgagtaaaacaattttagtaacaggtggcgcagggttcattggttcagccgtggttcgccatcttataaacgatacaggccatactgtagtcaatttggataaattgacctattcgggcaatttagagtcattaacatcagtttcaaatagcgaccgatatagttttgagcaagttgatatttgtgatgctgaagaagtaaagcgcgtgttcaatacgcacaagcccgatattattatgcacctagcggccgagtcacatgtagaccgttctatcgacggcccaggcgaatttattcagaccaatgtagttggaacatacaccttacttgagcaagcaagagcgtattggtcagcacttgaaggcgataaaaaagcaaggtttaagttccatcatatctctactgacgaagtatacggcgaccttcctcacccagatgaagttgaatcaggcacagagcttccactctttacggaaactaccccgtatgcgccaagctcgccatactcagcaagtaaagcaagttcagatcagctagtacgttcgtg

SEQ ID NO: 284369 - DNA, 726 bp, Unknown
  Bacterial polypeptide expressing nucleotide sequence isolated from the Sargasso Sea
aaagcaatatagttgctgtttataatttattagaaaattttaaaaatttttctaaaaaaaataaatgtaaattaattcacatttctacagatgaagtttatggagatatcttaactggtagatcacatgaaaaatatccctaccaaccaagctcaccgtatgccgctagcaaagcggcatcagaccatttggttagttcatatgttagaacttataacttacctgcaatagtcaccaattgttctaataattttggaccaaaacagcatcctgaaaaattaatcccaaaattaatctacaatattttaaacaataagccccttcctatttatggaaaaggaacaaactctagagaatggatttatgtaaaagaccattgtgaggcattaattgaagtcttccttaaaggtaaaataggggaattttataatataggttctaataaaaatttaaataatttagaggttactaaaaaacttttaaaaacttcaaaaaaattaataaatttaggaaacaaagttaaaatcaaatttataaaagatcgtccaggtcacgatattagatatgctttaaatagtaataaaattaaaaaagaactaggttggtatccaaaaacaaatttttcaaaaggaataaaattgactcttgattggtattttgaaaataaatcttattataaatcactttcaaaaaaagatattttaaatagattaggtaaaagatgat

SEQ ID NO: 284370 - DNA, 808 bp, Unknown
  Bacterial polypeptide expressing nucleotide sequence isolated from the Sargasso Sea
atcgaccctgacttggtgatacatctagcagcggaaagtcatgtcgacaaatccctcattgatccaagtaattttattcaaagtaacatcattggtacctttaatcttttggaggcttctagaaatcattttaaaaaattaactaaaaaaagaaaagaaacctttagatttcatcatgtcagcactgatgaagtttttggatcattggatgactttggtcaattcaatgaaaactcgaattatgcccctagaagcccttactctgcaagcaaagctgctagcgatcacttagtaaattcttggttttattcttactcattaccaatagtaataagcaactgtagtaataattatggtccttatcaatacccagaaaaaataattccattagcaattttaaatggcattaaaggcaaagatatacctttatacggggatgggatgaatataagagattggctttacgttgatgatcatgtagaagcattactacttgtagctaaaagaggtgtaattggtcaaagatactgcataggaggaaattgcgaaaaaactaataaagcgttattgaatcatatctgcaatttgttagatatttattgccctaaatcatacaaacacaacaggctaataaaatatgttgatgacagaccaggtcacgataaaagatattcaattaattcaaaaaagatatctattgagttgggctggaaaagaaaatattcatttgaagaaggaattgaaaaaacagttcaatggtatttaaataatacaaaatggtggggagatatttttgatgaaatttaat

SEQ ID NO: 284371 - DNA, 961 bp, Unknown
  Bacterial polypeptide expressing nucleotide sequence isolated from the Sargasso Sea
tatgaagaaagttgtagttaccggtggtttgggctttataggtagtaatttaattaaaattcttctcaaaaaaaaatattttgtcattaatatagataaagtaacatattcttcaaacttttataatgtaaaaaactttttaaatcataaaaattataaatttttcagattagatataaataataaaaaaaaaattctagaaattctcaaaagatataaacctaaggctatattcaatcttgcagcagagactcatgttgacagatcaatagatggtcctgaaagttttataaaaagcaatattttaggtgtttttaatttattacaggtttttaggaaatatcataagaataataaaaattccttattaatacatatttcaacagatgaagtttatggagatgtcctttctggtagatcaaaagaagaggatgcatataagccaagttctccgtatgctgcttctaaagcatcttctgaccatttagtttattcgtatataagaacattcaaaattccagcaataattactaattgttctaataattatggaccaagacagcacccagaaaaactaattccaaaattaatttataatattttaaataataaaaaactaccaatttatggcaaaggtataaattcaagagaatggatatttgttgatgatcactgtgaagctttaattaaaatattggagaaaggtaaagctggaaatttttacaatattggatcaaatttaaacctaaacaatataaaaatttgtaaaagacttataaaaattggaaaaaataaaattaaaacaggaaaaaatgtaaaaattaaatttgtaaaagatagaccaggtcatgatctaagatatgctcttaatagtaataaattaatatataatataaagtggaaaccaaaaacaaatattgtaaacggattaaaaaaaacgtttgattggtatttaaaaaat

SEQ ID NO: 284372 - DNA, 743 bp, Unknown
  Bacterial polypeptide expressing nucleotide sequence isolated from the Sargasso Sea
aaattttattaaaagtaatattttgggtgtctttaacttgcttgaagctttcaaagactattcagttaagaacccaagatcaaaattaattcatatttctacagatgaagtttatggagatattttaaaaggaagaactagtgaaagttacgcttacaaaccaagttcaccatatgcagccagtaaagcatcttctgatcatttagtttattcatatgttagaacttataaactaccagctatagtaaccaattgttcaaataattacggaccaaaacaacatccggaaaaacttattccaaaattaatttataatattttaaaaaatagaaatttacctatttatggaaaaggattaaattctagagagtggatttatgtttcagatcattgtgaggctcttattaaaattttccaaaaaggaaaaattggaagtttttataatattggctctaacattaataaaacaaatatagaagttacaaaatctttattaaaaattgcaagacaaaatataaagatcggaaaaaatgttaaaataaaatttataaaagacagaccaggtcatgacgttagatatgctctaaatagtagaaaaattattaaagaaattaaatggaagcctaagattaatattaaaaagggcatgaatttaactttcaattggtatttgaataatatgaaatatttcacgtcagtaagaaataaagacgctacaaaaagaataggtttaagaaaataac

SEQ ID NO: 284373 - DNA, 678 bp, Unknown
  Bacterial polypeptide expressing nucleotide sequence isolated from the Sargasso Sea
aatgaaaaggtttatcgtaactggggggtatggttttattggtagtaacctaataaaattattattaaaaaaaaaatttaaagtctttaacatcgataacctatcatattcagctcaaaaatataatttaagagatattaaaagtaaaaactacttattcaaaaaaattgatattaataataaaaaggaaattacaaaaattttaaacaagtataaacctcatggaatttttaatcttgccgcagatactcacgtcgatagatcaatagatgattcttataattttattaaaaataatattcttggtgtttataatttattagaagttattaaagattataagcaaaagatcagattagttcatgtttctacagatgaggtttacggagacatcttagcctcaaagagatcaaatgaaaactttccatatattccaagctctccttattctgcctcgaaagcttcttctgatcatttagtgaatgcatatgttagaacacataagattgatgctgtcatttctaattgttcgaataattacggaccaagacaatttccagaaaaattaattcctaagatgatttataatattttacacaataaacctctgccaatttatgcaaaagggaaaaattcaagggagtggatttatgtagatgatcattgtgatgctctaat

SEQ ID NO: 284374 - DNA, 703 bp, Unknown
  Bacterial polypeptide expressing nucleotide sequence isolated from the Sargasso Sea
ttttattaagacaaatgtcatcggaacgcacttattgttagaatgtgctagaaaatatgatatcaccaagtttgttcatgtttcaactgatgaagtttatggcagcttaggaagtgaaggatactttaccgaagaaacaccgattgcagctaatagtccttattcagcaagtaaagccagtagtgatttgattgctcgagcttattataagacctatgggtatcctgttactattactaggtgctccaataactatgggccgtttcagtttccagaaaagcttataccttttatgatatatcgagccaaagaagacaaaactcttcccgtatacggagatggaatgaatgttcgtgattggttatatgttgaagatcattgctcagctttagacatagttttacaaagaggaaagcctggagaggtttataatattggaggtaataacgagtggcataatattgatattgtaaagcttattcttaaggagctcaagaagccagaaacgttaattgagtttgttgaagatcgtttaggacacgatcgaagatatgctattgattccggaaaaattaaagaaaaactcggatgggaacctttggttccgtttaaaagtggtgtcaatcaaacaatcaagtggtattgtaataatcttaaatggattgagcagataaataacgggcaatatcgagtgtcagagtaa

SEQ ID NO: 284375 - DNA, 746 bp, Unknown
  Bacterial polypeptide expressing nucleotide sequence isolated from the Sargasso Sea
ttttaaaaaattaaatatacaaaatcaagatgaaattacaacattaatccttgagtcaaaacctagagcaatattaaattttgcagcagaaagccatgtcgatagatcaattgaaggcccagaaaattttattcattcaaacatagttggaacatattctctcttagaagcctctctgcaatattggaattcactgggcgaaaaggaaaaagataattttagattttttcatatctctacggatgaagtttttggatcattgaatatgagcgatgaaaaatctaccgaagaaagtccttacagacccaatagtccttattcagcatcaaaagcagcaagcgatcacttagtaagggcttggcatcatacctttgaactccccactttaatttcaaattgcacaaataactatggccctcatcaacaccaagaaaaacttattccattgatcatcactaatgctttagaaaataaaaatcttccaatctatggagatggaaaaaatataagggattggttatatgtagaagatcattgcgaggcaattattaaaatactagaaaatgggaatccaggagagacttataacattggcggcagttgtgaaaaaaataatttagaagtggttagcgaaatttgtaaaatcttagattctataaaaccgaagcaggatggctcttcttataaagaacaaatcgagtttgtaaaagatcgaccagggcatgattttagatatagtttggata

SEQ ID NO: 284376 - DNA, 805 bp, Unknown
  Bacterial polypeptide expressing nucleotide sequence isolated from the Sargasso Sea
tttgttagtaacgggcggtgctggatttataggtgcaaattttgtgcactattggcgcaataagtatccagatgatcaggtaatcattctagatgcgctaacttatgctggcaataaagataatttgaagttttacctggatcaggagaacgtcgtatttatcaatgggtctatttgcgatcagatgttggtaaaaaaaacttttataagccataaaatagataaagtagttcactttgcggctgaaagccatgttgatcgatctatagaagggccagatgactttattaatacgaatataatgggaacttatgtattactaaaaactgcgcaagcaaattggagtcatagaggtgttaatgatcatttgttccatcatgtatcgaccgatgaggtttatgggagtttggagttagcagagccaccattttctgaaaccagtgcttatgctcctaattcgccttactcagcaagtaaagccgcgtctgatcatttagtaaggtcctatcatcatacttacgggttaaacacaacgacaagtaattgctcgaataactacggtgctttccagtatccagaaaaattaattcctctttgccttatcaatatcttgcaagggagacctttgccgatctatggagacggaaagcaaattagagattggttgcatgtagatgatcactgccgaggtattgatctagtgcttggaaatggtacttatggtgaaacctataatattggtggtgataatgagcgtaagaatattgatgtagttaaattgatttgcaaaacagttaacgaaata

SEQ ID NO: 284377 - DNA, 745 bp, Unknown
  Bacterial polypeptide expressing nucleotide sequence isolated from the Sargasso Sea
atgaatttcaaaaaaactatattaattactggaggagctggttttattgggtctcatgttgttagaaaattagtaaataaatattctcaataccacatagtaaatttagataaattaacatatgcaggtaatttgaataatcttcatgacattgtagataaacctaattattcatttatccaattggatatatgcaatgagcatggaattaaagaattatttaatcaattctcttttgatggcgttattcatttagctgcagaatctcatgtagatagatcgatttctaacccaaaagaatttattttaactaatgtcgttggtaccttaaatttacttaatgaatgtaaactaaaatgggttaactcagaaaataaatgtttctatcatatttcaactgacgaagtttatggttcattaggagaacaaggattttttgaagaaactacttcctatgatccaagaagtccatattctgcttctaaagctagttctgatcacttagttagagcatacggtcacacttataatttacctattaaaatatctaactgcagtaataattatggttcttttcaatttcctgaaaagttaattccgttgataattaataatattaaaaataaaaaacctttgccaatttatggaaaaggagaaaatgttagagattggttatgggtagaagatcatgctaatgcaattgatttaatttttcatgaaggtagatttggtgaaacttacaata

SEQ ID NO: 284378 - DNA, 899 bp, Unknown
  Bacterial polypeptide expressing nucleotide sequence isolated from the Sargasso Sea
aatgaaaaatatattaataacaggcggatgcggttttattggttcgaactttgtaaaaaatataattaaaaatgattcaaattattttccaataataatagattgcttaagctatgcaggtaatttggacaatttaaaaaacatagataataagtcttatgtttttgtaaaaggtgatatttgtgacaagttattggtaaatcaacttttcgataaatataattttaaagcggtttttcattttgcggcagaaagtcatgtggataggtcaattgatgggcctgataaatttataaatacaaatatttttgggacatataatttattagaggcttctagaaaaaataataaagcagatagctctaattttagattcatccatgtttcaactgatgaagtatatggggatcttgacaataatgggttctttactgaagaaacaccatataacccaagctcgccttactcagcaacgaaggcttcttccgatcacttagcaagagcatggtctcgaacatatggtttgccagttattgttacaaattgttccaataattatggaccattacaatttcctgaaaaattaattccgcttatgataatcaattgtttggattggagagacctccctgtctatggtgatggccaaaatgttagagactggctatatgttgatgatcattgtaatgcaattaaaactattttcgaaaaaggaataatcggagaaacgtataatattggcggtaataatgaaattaaaaatatagatattgttaataccatttgctctatacttgatgaccttaaaccaaaagaaaatggtgagtcgtatagtaatcaaattaagtttgttaaagacaggcctggtcatgattttagatatgctattaatgctgaaa

SEQ ID NO: 284379 - DNA, 955 bp, Unknown
  Bacterial polypeptide expressing nucleotide sequence isolated from the Sargasso Sea
attgggtagtaattttatcattcgcatattaggtaaattaaattgcaaagttattaatgtagataagcttacatattcaggtaatttagataatctatctggggttaaagaaaattatgattttctagagctagacatagctgataaagacaagataaaagaagcgataatgaaatttgagcctgatgtcattattaattttgcagcagaatcccatgttgatagatcgattgataattgttcggattttattaatacaaatattttaggtaccataaatcttcttgaagcatctttgacgtattatagagaaagtcaaaaagataattttaaatttatacatatttcaactgatgaggtttatggaagccttgaaaaaacagggagtttttctgaagattctacatatgcaccaagctctccatattctgcatcaaaggcttcgtctgatcatttcgtaaacgcatggaataaaacatttggcctacctactattattactaactgctcaaacaactatggcccctttcaatttccagaaaaattaattcctctaatgattattaattctattaatgaaaataaattaccagtttatgggaatggtgacaatgtacgtgactggatacacgtagatgatcactgcgatgctattattaggataattgaaaatggaaaagtaggagaaaaatataatataggtggaaattgtgaaaaaagaaatattgatatagttgaagaaatatgtgatattgttgatgtgctttgtcctcgtaatagcaataagtcgcacagagaattaatagaatttgttgatgataggccaggccatgattacagatatgctgttgattctagtaagataagcaatacattaaactggattcctaaagtcaactttaatgatggaatgacttctacagtcaaatggtatttagataactctgtttggtgg

SEQ ID NO: 284380 - DNA, 709 bp, Unknown
  Bacterial polypeptide expressing nucleotide sequence isolated from the Sargasso Sea
acttgagtgcctaagaattttaaacagaaataagattaagccaaaattaattcatatttctacagatgaagtctacggagatataaaaaataaattgagatcagatgaaaattataaatatgaacctagctcgccatattctgcatccaaggcaagcgcagatcatcttattaaatcatatataagaacttataatttaaatgcagttatctctaattgttgtaataattatggtccgtaccagtttcctgaaaaattgataccaaaaatgatatcaaatattttcaataataaagagcttccggtttacgcaaaaggaaataattctagagaatggatacacgtccaagatcattgtgaagccttattaaagctttatttgaaaggtaaatcaggagaaagttataatattggatctggtaaaaatatgaaaaatatcgatttagtaaaaaaaattttaaaaatgtgtagactaataggaattccggtaaagaataaaacaaaaattaaatttgtaaaagatagacctggtcatgatttcagatacgcgcttaactcaaaaaaaatatttaaaaaattaaaatggcaaacaaaaatagattttgaagtcggtttaaaggaaacaattagatggtattttaataacagaaattttttaaaacaaatctcaaaaaagaaatatgataacagattaggattaaagatatga

SEQ ID NO: 284381 - DNA, 703 bp, Unknown
  Bacterial polypeptide expressing nucleotide sequence isolated from the Sargasso Sea
atgaaaataatagtcactggaggatgtggatttattggaactaactatatcctaaataaaatatctcagaatagaagcactatattaaacatagataaattgaattatgcgggaaacaaaaataatttatcttcgataagtgatgatgataattatagttttgtcaatgaagatatttgcaatattgaaagtattacaggcctattagacaattttaaaccagatgctcttattcattttgcagctgaaacacacgttgatagatccattgatggccctatgtcttttattcattctaatatagttggcacagtttcattacttgaagcttgtagaaaatatttcaaaaataatataaatttcagattccttcatatcagcaccgatgaagtatatggctctttaaataaaaagggattatttaatgaaaattcaccttacaatccaagctcgccctattcatcatctaaggcttcatcagaccatttagttcgcgcttggcataaaacatatgatctacctattttaatttcaaattgttcgaataattatggaccttatcaatttactgagaagcttattccattaattattgcaaattgtattgatgagaaacctcttccaatttatggtgaaggtctaaacattagagactggttatttgttaatgatcactgtgatgcaataaataaaattctcgata

SEQ ID NO: 284382 - DNA, 841 bp, Unknown
  Bacterial polypeptide expressing nucleotide sequence isolated from the Sargasso Sea
caaactcttgcgtaacaaaaataacactgttttaaatattgataaaatctcttatgcatctaatgaagattttattgaaaaaaatgaccaatatgccatatcaaaaattgatttaagtgatgtcaattctgtggaaaaaactatattagattttaatccagataatatatttcatttggctgctgaatctcatgtagataattcaataacaagcccctcaccatttatttttagtaatatcattggaacatttaatttgttagaagcctcaagaaaattacttaaaaaaaaatctaaggaaaatagtttcaaatttcatcatatatctactgacgaggtttttggagatcttgaaatcaatgacccaagcttcaatgaagatagtccatacaaaccaagctctccatattcagcctcaaaagcttcaagtgatcatcttgtaagatcatggattagaacttatgattttcctgctgttattactaattgctcaaacaattatggaccaaatcagcaccaagagaagctaattccaatggtaataaataatataattaatagaaaaccaattccggtttatggtgatggtcttcaaatcagagattggctatatgtcgaagatcatattgatgctcttattaaagtttctatggaagcacccgttggtgaaactttcaacatagggggggaggaagagttgagtaatatagatttaattaaattaatatgtcagcttatggatgataagctttctaaaaataattcagaaaatttgatttcatttgtgaatgacagagcagggcatgatagaagatattcaattgattttacaaaaatcaaa

SEQ ID NO: 284383 - DNA, 691 bp, Unknown
  Bacterial polypeptide expressing nucleotide sequence isolated from the Sargasso Sea
attttcagatttcaccatattagtactgatgaagtttttggatctttaggaaaaaatggcaaattcaatgaaaattcaccttactctccaagaagcccatactctgcatcaaaagctgcaagtgatcatctagttagagcatggttccatacttataatcttcctactttaatatctaactgctcaaataattttggaccattacaatacccagaaaaattaattccaaaagttattcttaatgcattaaatcaaaatccaattgaaatttatggcgatgggttaaatattcgtgattggatttatgttgaagatcatatagaggccttaaaaagagtattattttcatctaaacctggaaaaacatattgtattggtggatcttgtgaaaagtctaatcttgaagtagtcactactatatgtaatcaattggatatacttcgtcctattggagattcatacaatacattaatcaaatttgttaaagatagacctggccatgattacaggtatgccatagattcgaaaaatattttaaatgatttaaattggagcccaaagtttaactttgaaaaaggaataataaaaacaattaattggtatctcgaaaatacaacttggtttaatgaaggtaataaaaaagagataaatattattactaaaaggcagggtataattgatgatcattaat

SEQ ID NO: 284384 - DNA, 856 bp, Unknown
  Bacterial polypeptide expressing nucleotide sequence isolated from the Sargasso Sea
ttggtcaccggaggtcttggcttcatcggatcgaatttcattcgcatgcttctgcaggaggatgttttcgaaaaagtcattaatttggacaagcagacttacgctggaaatcctgaaaatctttccggttttcaaaaccatccccggtacgtctttcaacgaggtgatatttgcgaccaaacttctctcgagagcatcctgatggagaatgaagtcgatgcggtggtcaattttgccgccgaaagtcacgtggaccgttcgattgacggtcccgaacccttcgtgcaaaccaatatcgtcggagccttgcgtttgcttgaagccaccaaaacctttctttcgaaatgcaccgccgaccgccaaaaggcgttcagatttcttcatgtttccaccgatgaagtctatggttctcttacggcggaggatcccgcattttgtgagtccaccccctacgctcccaatagtccgtattctgcttcgaaggcagcggcggatcatttggtgcgcgcttatcaccacacctttggcctgccggttttgacaaccaactgctccaacaattacggaccttatcagtttcctgaaaagctcatcccccttatgattctcaacgcctgtgagggaaagagtctgccgatctatggagatggctcgaacgtgcgggattggttgcacgtcgaagaccattgttcgggaatcctcgcggttctgcaaaaaggtcgcttgggtgagacttattgcattggaggagagtccgagaagaccaacatggaggtcattgacacgctttgctcccttcttgacgagagattccctgaccacgctccgcatgcaaaactaaagtctttcgtacgga

SEQ ID NO: 284385 - DNA, 742 bp, Unknown
  Bacterial polypeptide expressing nucleotide sequence isolated from the Sargasso Sea
cctgaaaattttatccaaagtaatatagttggggtttataatctactagaaaattttaaatatttttcaaaaaaatataaatctaaattaatacatatttctacagatgaagtttatggtgatattttaactggacgatcatcagaaaaatatccatatcagcctagctctccgtatgcagctagtaaagctgcatcagatcatttggttagttcatatgttagaacatacaagatccctgcaattataactaattgctcaaataattatggtccaaaacaacatcctgaaaaattgatcccaaaattaatttataatatcataaataataaacctctgcctatttatggaaaaggtaaaaattctagggaatggatatatgtcaaagaccattgcgaagcattaataaaaatatttttaaaaggtaaaaatggtgaattttataatattggatcaaataaaaatcttaataatttacaagtaaccaatgaacttttaaaaaaatcaaaaaaattaattaaactcagaagcaaagtaaaaataaattttgtgaaagatcgtcctggtcatgatattagatatgcattaaatagtaataaaattaaaaatgagataggttggtacccaaaaacaaatttctcaaaaggaataagattgacacttgaatggtatttaaaaaataagtcgtattataaatctctttcaaaaaaagatataattaaaagattaggtaaaagatgat

SEQ ID NO: 284386 - DNA, 637 bp, Unknown
  Bacterial polypeptide expressing nucleotide sequence isolated from the Sargasso Sea
tcgctggatgaaactggaagatttcaagaaaacacaccttatgacccaagctcgccatattccgcctccaaagcaagttctgatcacctagttcgggcttggcatcgaacctatggactaccaactctattaaccaattgttcaaacaattatggaccatttcaatttccggaaaaattaattcctttaatgataataaattgttttgaccagaaaactcttccagtgtatggagagggtgaaaatattagagattggttgtttgtatcggaccattgtaaagcaattttagaagtatacaggaacggggaaataggaaacacctataatattggtggaaataatgaattaaaaaatatagatattgtaaatagagtctgctcattaatggatgaattttatccacaaaaatatgttgagaagtatgctgatttaattacttttgtgaaagatagaccagggcatgattttagatatgcaattgactctagtaaaatttataatgatctaggatgggaaccagttgagtctttcgaaactggaataaagaaaactgttaactggtatctaaataatgttaagtggtggagaagaatacaaaataaaacttacaaacaagaaagattaggaatttgaa

SEQ ID NO: 284387 - DNA, 785 bp, Unknown
  Bacterial polypeptide expressing nucleotide sequence isolated from the Sargasso Sea
tggtatttttaatcttgctgctgatactcatgtagatagatctatagaaggctcctttaactttataaagaataatattctcggagtgtataatttattggaagctattaaagactataacaaaaaaactagacttattcatatatcaactgatgaagtctatggagatattaaagatccattaaaatctaacgaaaactttccgtatacaccaagttctccttactcagcctcaaaagcgtcttctgatcatttagttaatgcctacgttagaacgtacaaaattgatgcagtaatatcaaattgttctaacaactacggacctaggcaatatcccgagaaacttataccgaaaattatttataatattttaaataataaacctctgccaatatattcaaaaggaaaaaatttaagagaatggattttcgtagacgatcattgcgaagcacttataaaattatttaataaaggtcgttcaggtgaaaaatataatataggttctgggattatttgtagcaacatttttcttgttaagaaaattttaaagatatttaagaataaaaaaataaaaataggtaaaaaagttaaaataatatttgttaaagatagaccaggacacgatttcagatatgcattgaatagtaataaaatcaaaaaaaatttaaaatggaaagccaaaataaattttagtcagggaatttcaaaaacaattgactggtatataaaaaatcaaggttattttaaaaaattaaatgaaaaaaattttagttacaggtggtgaa

SEQ ID NO: 284388 - DNA, 673 bp, Unknown
  Bacterial polypeptide expressing nucleotide sequence isolated from the Sargasso Sea
atacatatatcaacagacgaggtctatggtagtttgggcaataaaggtaaatttacagaaagcaccccttacgaccccagttctccgtattctgcatctaaggctagttctgaccatttagcaagatcttggtataagacctatgattttccggtaataatcacaaattgctctaataattatggtccataccaattcacagaaaaattaatacccctaatgattataaatgctttggctggaaaagaacttcctgtatatgggaaagggttgaatgttcgggattggttatatgtgcgcgaccattgtgaggcaattcaaactattgctgatgttggtcaattaggtgagacatataatatcggtgggaataatgaaatcacaaatattcagatagttaatactatttgtgaaatattaacaaatgagaggccactagagaatggtaaatcatatcaggagcaaattgtatttgttcctgatcgacctggtcatgattttagatatgctattgatgcctctaagattgaggctgaattgaattggaagccccaagaaagttttgaaacgggcattaaaaaaacaatcctgtggtatttaaaaaatcaagattggtgggaaaatattaataggaacaagtaccagcagcaaagattggggttaaaagaataat

SEQ ID NO: 284389 - DNA, 695 bp, Unknown
  Bacterial polypeptide expressing nucleotide sequence isolated from the Sargasso Sea
tatgaaaatatttgttacaggtggttgcggatttattggaagtaattttatacttcgccaaattaaatcaaataactgtgaaataatgaattatgataaactaacgtatgcaggaaatgctgctaacttaaaatctttatccaacaataataattattcctttttcaagggcgatatttgtgattttaattctttaaaaaaggctatttatctctttcagcctaattgggttgtacattttgctgcagaatcacatgtagataattccataaatgagccaaatatatttataaaaacaaatgttgaaggaactgcaaatcttttaggagtatcgctttcatactttaaaggattaacagacagtgaaaagaattattttaaatttttgcatgtgagcaccgatgaggtttttggctctctgggtcaaaaaggttattttaacaatgattcaaattattctcctaattccccatactcagcatctaaagcatcctcagaccatttagttagggcgtggcatgctacctatcaattgccaactttaattacaaattgttccaataattatggtccatttcaatatccagaaaaattaattccattgttagtaacaaattgtttaaaaaataaatcattgcctatatatggtgatggaaaaaatataagagactggatttatgtaaatgatcattgtg

SEQ ID NO: 284390 - DNA, 495 bp, Unknown
  Bacterial polypeptide expressing nucleotide sequence isolated from the Sargasso Sea
ccaactgttcaaataattatggaccttatcaactttatgagaagctaatacctctcatgatagttaaggctcttaatggagagaagcttccaatttatgggtcaggcatgcaaataagagattggttatatgttgaagatcatgttgaggcactaataaaagtaatacaaattggcaagatcggcgatagctataatataggtggaaattctgaaaagacaaatttagaggtcgtagagcaaatctgtggaatccttgatgatctaattgaatacaagccaaaaggaattagaagcttcaccgaattgatctcatttgttgaagatagaccaggtcatgacaagagatatgctatcaactcagataaaattacaaatgaactcaattggatgccaaatcaagactttgagagcggcttgaaaataactgttcaatggtatgcagaaaatattgattcatcaccttacgatatagaaagaatagggaagggttaat

SEQ ID NO: 284391 - DNA, 649 bp, Unknown
  Bacterial polypeptide expressing nucleotide sequence isolated from the Sargasso Sea
tacttttgttaaaggggatatttgtaataagtcgatattaaatgaactctttgaaaaatatagttttgatggggtttttcattttgcagcagaaagtcatgtggatagatccattgatggcccagacgaatttataagcacaaatataattgggacttataatttattagaaatttcaagaaaatatttaaaagaagttaattcacattttaagtttattcatgtttcaacagatgaagtatatggtgaccttgatgatgatgggtactttactgaaaccactccatatgatcctagttctccatattcagcatctaaagcctcctctgatcatttagctagagcttggcatcgcacatttgaattaccagttatcgttacaaattgttctaataactatgggcctatgcaattccctgagaaattgattccgcttatgattattaactgtcttgattcaaaagatttacctatttatggtgatggtcaaaatgttagggattggttgtatgttgatgatcattgtagtgcaattaaaactatttatgagaaaggggtgattggagaaacttataatattggcggtaacaacgaaattaaaaatatagaaattgttaataccatatgctctatacttgatgagcttaaa

SEQ ID NO: 284392 - DNA, 703 bp, Unknown
  Bacterial polypeptide expressing nucleotide sequence isolated from the Sargasso Sea
tttaagaaaattaaaaaaaaccacaaaaaataaaattaaatttttacaaatctcaacggatgaagtttatggtgatattcctggaagcaaagttgctagtgaaaaagacaattacaatcccagctctccttattctgcttcaaaagctagtgcggatcaattagttaaagcatacggaagaacttacggaataagaacagtaatagctaatccctgtaataactatggaccaaaccaatttcctgaaaaatttatacctaaaatgatttttaatattttaaataacaaatctttaccagtttatggaaggggcaataatactagagagtggatttacgtaaaagataactgcgaagctattctaaaaatttttcttaaaggtaaaaatggtgaaaattataacgttggaacaggcattaagttaaaaaatatagatatagttaaaaagatttttaaaatagctaaaaaaaataaaataaaattaggaagaaaagctaaaattgtctttgtaaaagatagaccggggcacgatcttaggtatgctctaaattctaataaaattagaaaaaaaataaaatggaaacataaggtttctcatacaaaaggattagaagatactttcaaatggtacaaagataatcttggatatttcaaaaaaatatctaaaaaaagtattgcagtaagacttggattaaaattatga

SEQ ID NO: 284393 - DNA, 889 bp, Unknown
  Bacterial polypeptide expressing nucleotide sequence isolated from the Sargasso Sea
tatgaaaaaagttatagtcacgggaggcctaggctttataggtagtaatttaatcaaaatccttcttaaaaaaaaatattatgtcattaatctagataaaataacctattcttccaatttttataatgtaaaagaattttcaaaaagcattaattacaaatttatcaaagtagatatcaacaacaaaaaaaaaattcttcaaattctgaaaaaatttaaaccaaatgctattttcaatcttgctgcagaaactcatgtggatagatctatagataaacctgaaagttttattaaaagtaatattcttggagtgtttaatttattagaggctttcaagatgtatcttaaaaaaaataaaaaaataaaattaattcatatttcaactgatgaggtttatggggatatattaagtggaagatcaaaagaagatgatagttacaaaccaagttctccctatgccgcatccaaagcatcttctgatcatcttgtatattcatatattagaacatttaaaattcctgcaattatcactaattgttcaaataattatggtccaaaacaacacccagaaaaattaattcctaaattaatttataatattattaacaataaaaacttacctatatatggaaaaggactaaattccagagaatggatctatgttgatgatcattgtgaagctttaattaaaatttttgaaaaaggtataattggtaatttttataatatcggatcaaatttaaatgttaacaatttaaaaatttcaaaacttttaattaaagttgcaaaagctaagtttaatattggaaaaaatgtaaagataaaatttgtaaaagatagacctggtcatgacatgaggtatgctttaaatagtagtaaattaataaaa

SEQ ID NO: 284394 - DNA, 680 bp, Unknown
  Bacterial polypeptide expressing nucleotide sequence isolated from the Sargasso Sea
taggtttcatcacatcagcactgatgaagtatttgtgaatttaactgattctagagatctttttaaagaagactctccatataaacctagttctccatattctgcatctaaagcaagttcagatcatttagtaagggcatggaatagaacctttgatctaccaactttagtttcaaattgctctaataattatggcccatttcattatccagaaaaattaatacctttgacaattttaaaccttcttaattgtaaagatattccagtttatggtaacggtgaacaggttagagactggttgtatgttgaagatcatgctgaagcattatatcaagtggccacgaaaggcattattagtgaaacatataatattggcggcaataatgaatacaaaaatatagatgttgtcaggcttatatgtaaaataatgcaggagttacatcctatagaaaaaaacaataactcaaatgactccataaaccattacgaagatctaattaagcatgtagaagatagaccaggtcatgatttgagatatgctatagactcatcaaaaattaataataatttaaattggtatccaaagcatgactttgaaactggaattttaaatacaattagatggtaccttaaaaatttaaattgggtaaaaaatgttaacaaaaatttaaaaaactaga

SEQ ID NO: 284395 - DNA, 682 bp, Unknown
  Bacterial polypeptide expressing nucleotide sequence isolated from the Sargasso Sea
tcatataaaaataaaaaatgtagactaattcatatatccactgatgaagtttatggagataaattatacggtagatctaaagaatttgattcttataaacctagctctccatatgctgctacaaaggcatcatcggatcatttagtatcgtcttatataagaacatataatatagcagcaatagtgactaattgttcaaacaattatggtcctaaacaacatcctgaaaaactaattccaaaattaatttattacattttaaaaaataaaaatcttccaatttatgccaaaggactaaactcgagagaatggatttatgttactgatcattgtgaggctctaataaaaatttttaagaaaggaaaaataggtaatttttacaatattggatcaaatataaatatgaaaaatattgatgttgtaaataaattaatttctgtagctaaatcaaaaataactttaaaaaaaaatgttaaaattaaatttgttaaagacagaccgggacatgattttagatatgcgttaaatagcaataaaattaaaaaagaactaaaatggaaaccaagaactacatttaaagatggtatagaaaaaacatttatgtggtactttaaaaatcaaaaatactattcaaacctttcaaaaaaagatatcactgaaaggctgggttttgaaaaatgat

SEQ ID NO: 284396 - DNA, 580 bp, Unknown
  Bacterial polypeptide expressing nucleotide sequence isolated from the Sargasso Sea
atgcataaaatattaatcactggtggtttgggttttattggaagcaatttgatcaaatttttaatagaaaaaaaatataagattctaaatattgataaagaaaattatgcatcaaatacctataatattaaaaaatttataaaaaataagaactataaatttataaaaaatgatctttcagattcaaaaaaaatattaaaaattattaataattataaaccaaaatgtatatttcatttagctgctgaaacacacgttgacagatctatagatagtccaaaaaattttatagactcaaatataattgctactttcaatttattagaagcttttagaaaacattcaatcaaaaataaaaagactaaattaattcatgtatctacagatgaggtatatggtgatgtgctaaaaggaagatctttagagaacagtgcctataagccaagttctccatattcagccagtaaagcatcatctgaccatctagttttttcttatattaaaacatttaaaattcctgcaataattacaaattgttctaacaattatggccctcatcagcatccagaaaaattaatcc

SEQ ID NO: 284397 - DNA, 734 bp, Unknown
  Bacterial polypeptide expressing nucleotide sequence isolated from the Sargasso Sea
ctttattcaaagtaacattgtgggggtatataacttacttgaatgttttaaaaattttacaaaaaaaaataaatcaaaattaattcacatttctactgatgaagtttatggagatgttttgaaaggtaggactagcgagaactatccataccaaccaagttctccttatgctgcaagcaaagcttcttctgatcatttggtaaattcatatataaggacttataaattgccagcaatcgtaactaattgctcaaataattatggtccaaaacaacacccagagaaattaataccaaagctaatttataatattatgcaccacaagccattaccaatttatggtaaaggaacaaattctagagagtggatatacgtaaaagatcactgtgatgcattaatcaaagtatttatgaaagggaagattggtgaattttacaatattggttctaataaaaatttaaccaatcttgatgtatgtaagtatttattaaatcttgcaaaaaataaaaagaaaataaacaaaaaagttaaaattttatttgtaaaagatagacctggccatgatactagatatgcacttaacagtaataaaattataaaagaattaaaatggaagcctaaagtaacatttaaaaaaggaattaagtatacttttgaatggtataaaaataaccaactttactataaatcattatcaaaaaaagatattacaaaaagattaggaaaaaaatgat

SEQ ID NO: 284398 - DNA, 580 bp, Unknown
  Bacterial polypeptide expressing nucleotide sequence isolated from the Sargasso Sea
aaggcttcaagcgatcaccttgtccgggcatggcatcatactttcggtatggacaccttgatcactcattgttcgaacaattatggcccctaccaatttcctgaaaaactgatcccgttgatgatccgaaactgtcttttaggaaaagaattaccggtctatggagatggcctgcaggttcgagactggctttatgtggaggaccattgcgaagccttggacgtggtttttcatcgaggtcagtccggagaatcctacaacgtcggagggctgaacgaatgggaaaacctgagaatggtccgtcacatttgcaaattcatggatgccgaacttggaaactctccagaacggtcttgtctgaacctgatacgccatattcaggaccgtcccggacacgaccggaggtatgcaattgatgcatcaaaaatccagaatcaattgggttggcaaccccgtcaccagatcggagaaggcctcgaaaagaccatgcgatggtatctcgatcatcaggaatgggtggagcaggtcacttcgggagcgtaccgtgattattacaagcatcattacgggactggctgaa

SEQ ID NO: 284399 - DNA, 723 bp, Unknown
  Bacterial polypeptide expressing nucleotide sequence isolated from the Sargasso Sea
agagtccttgaatgaagtatcctccaaccatcgctatcaatttgagaatattgatatatgtaaccaagaagcaattaattctatttttaagaaatataaaccaaatgcagtaatgcatctagctgccgaaagtcatgttgataaatctatagatgggcccgttgactttatgaagactaatattatgggaacttttacaatgctggaggcttcaaatatgtactttcaaaaattagagggtttagataaagaaaattttcgattccatcatatatccactgacgaagtctatggtgacttggggaatcctaacgattatttcacagagttgaccccatatgctccttcttcaccctattcagccagtaaagccagctcagatcatttagtaagatcttggtggcgtacttacggattgccggtaatcgtaactaattgttctaataattacggaccttatcactttcctgaaaaacttattcctcacatcatattaaacgctatacaaggtaagtctcttccaatatacggagatggatctcaaataagagattggctatttgtagaagaccacgctagagccttgctgaaagttttaagcgaagctaaagttggtgaaacttataatatagggggaaataatgaaaaaacaaatctggaagttgtagaagatatttgtgaattacttgaggagatggcaccaaaaaaacctacaaaatgtaa

SEQ ID NO: 284400 - DNA, 662 bp, Unknown
  Bacterial polypeptide expressing nucleotide sequence isolated from the Sargasso Sea
tatgaataaaaaaatattagtaactggtggagcaggttttataggctcagctcttatacgaaatattatatctaatacaaatcatagtgtagtaaatattgataaacttacttatgcaggaaatttggagtcattatcattagtagaaagctctgatagatatttttttgagttagcagatatatgtgatgcaaacaaaattaaaaatatttttgaaaaatatcaacctgacctagttattcatttggctgcagagtctcatgtcgataaatcaataaatgcgccttcagagtttattcaaacaaatattattggtacatatgttttgcttgaacattcaagaatgtattggggatctcttaaaaacgacaaaaaagaaaaatttagattccttcatgtgtctacagatgaggtttacggagatcttgaaggcacaaatgatttatttacagagacaacacgatatgctccaagttctccatattcggccacaaaagctggttctgatcatttggttcgtgcgtggaataggacttataaattaccaacattaataacaaattgttccaataactatgggccctatcagttccctgaaaaacttattcctaataccattctaaaggcattgaatggaagtagcattcctatatatggtgacg

SEQ ID NO: 284401 - DNA, 814 bp, Unknown
  Bacterial polypeptide expressing nucleotide sequence isolated from the Sargasso Sea
atattagatatagcaaaccttaataaattacaaaaaatcattaaaaaatataaaccaatttatgtaattaattgtgcagcagaaactcatgtagatagatcaataaatagatctatgccatttataaaaagtaatattttaggaacttataatttattagagtgtattagagaagttttctttaataaaaataaaaaagaaaataataattttaagctcttccatcaaatttcaacagatgaagtttttggtgactcggtaaattttaaaaaagcaccaactgaaaattcatcttattatcctagttcgccatattctgcatctaaagcaagctcagatcatctagtttcctcctggggcagaacatacaaaattccatattctatatcaatttgcacaaataattatggacccagacaatttcctgaaaaattaataccaaagacaataatcaacgcaatagagggaaaaaaaatcccaatctatgggaacggtaaacaaattagagattggttatatgtagaagatcatgcagaggcagtagaaaagattatatttaatagaaaatcgagaggaaataagtttaatataggaggcaacaatcaaattaacaatttaaaacttgtaaatattatttgtgagtacatggacaaaaaattaaaaaaaaaaccaaaaaaaatatctaaatttaaagatctaatagagtttatagaggatagaccaggacatgataaaagatattttttaaataccatcaaaattaaaagaaaattaaattggagaccaaaatataatataaaaaaatggcctagaa

SEQ ID NO: 284402 - DNA, 698 bp, Unknown
  Bacterial polypeptide expressing nucleotide sequence isolated from the Sargasso Sea
aatgaaaaatattatagttacaggtggtttaggttttatcggaagcaacttaattgagcttttaataagcaaaaattatagagtaataaacattgataaagtaacttattcgtcgaatttttataatgttaaaaagtttaagaaaaataaattatataaatttattaagtctgacttaaataataagaaaaaaatatcaagtatactgaaaaaatattctccagtttgtatatttaatattgcagctgaaacacatgtggatagatcaattgatagtccaaaaaattttgtacttagtaatattttgggagtttttaatcttttagaatcttttagagaacattataaaaaaaataaacgtactaaattaattcacatatctacagacgaagtttatggagatgttattaaaggtagatccaaagaaaacgatgcatataaaccgagctcaccttactctgcttcaaaagcttcttctgatcatttagtttattcttatattagaacatatggaattcctggaataataacaaattgttcaaataattacggtccaaagcagcatcctgaaaaattaatacctaaattaatatataatattattaacaataaatatttaccaatatatggaaaaggtaaaaattctagagaatggatatatgttggtgaccattgtgaagcattgctcaaagttttta

SEQ ID NO: 284403 - DNA, 827 bp, Unknown
  Bacterial polypeptide expressing nucleotide sequence isolated from the Sargasso Sea
aatgaggcttcttgttactggaggatgtgggtttataggttcaaatttcatatcaattgctctaaaaaaaaaaataagaataatcaatattgataatcttacttatgcatcgaaaaattataaaaatcatccaaacgataaaaattataaatttttcaaattaaatatattagatgaaaaaaaaatattaaaaattttaaacaaatttaaaccagatggaatcattcattttgcagccgaaacacatgtagatagatctataaagaaccctgaaattttcttcaaatctaatactatagggaccttaagacttttaaatgcatgtagaatttttttaaatagaaataagaataaaaaatttagatttataaacgtttcaactgatgaagtgtatggatcattgacaatcaaagaaaaaagtttctcagaaaaaaataaattttttccaaacagtccatactcagcaagtaaagcatctagtgatcatatcgctagagctttttttaggacttataaaatgcctataataacaacaaattgctcaaacaattatggtcctaaccaatatagagaaaaacttatacctctaattattcataatgctttaaagaaaaaaaaattacctatttacggtaatggtaaacaaatccgtgactggttatacgtaggagatcattgcaatgcaattttaaaaattttttataaaggtaaagtaggtgaagtttacaacattggtggccaaaatgaaatcaggaatttagatttagtaaaaaaaatttgtataatacttgataaaaaaatgaacctaaacaaaaaagaagattctc

SEQ ID NO: 284404 - DNA, 902 bp, Unknown
  Bacterial polypeptide expressing nucleotide sequence isolated from the Sargasso Sea
aaaaaatcattcaaaatataaatttatacatggtgatatttgtgataaaaaatccgtttcagacgcaattaatgcatttaatcctgatgccatagtcaattttgcggctgaatcgcatgtagatagatctattgatgctccaaatgattttatcaatactaatattgttgggactgtaaatctagttgctgaagcatttctttattggcaacaaaaaaagggaaataaattttttagatttctacatatcagcaccgatgaggtttttggatcattaaataatggattttttaatgaatctactccttataatccaagctcaccttattcagcttcaaaagctagtgcagaccatatagtgcgcgcgtggcaccgaacatatggattgccaattttaataactaactgttcaaataactatggaccttatcaattccctgaaaagttaattcctctaatgataatcaattgcattaaggaaagaaaacttccattatatggtgacgggcaaaatataagagactggctattcgttaaagaccattgtaaagcaattatgagtgttcttaaaaatggaattataggagaatcttataatattggcggtaataatgagataaaaaatattgatatagtaaaaaggatttgttctgtattagatgatttaaggcctagaaaaagtaaaaaatcacatgaagaacttatccaatacgtagatgataggcctggccatgatttcagatatgctattgatacatcaaaaatcaaaaataaattgagttggattgcaaatgaaacatttgaatcaggtatacttaaaactattaattggtatcttgataatgaagtttggtggcacaaaattcaaaaaatagttacaatcaagaaagacttggtattag

SEQ ID NO: 284405 - DNA, 948 bp, Unknown
  Bacterial polypeptide expressing nucleotide sequence isolated from the Sargasso Sea
ttacttattcagcaaataaatattgaagaaaaattaagaaataaaaacaattacaaattatttaaacttgatattaataataaaaataaaattatcaaaatcatagaaaagttcaaacctaatgcaatttttaatttagcggccgaaacacatgttgataggtctattgatggaccaaagaactttattaatacaaatatcaatggcacattcaacttattagaaagtttacgttttcttaaaaggaaaaaaattaaattaaagttaattcatatttccacagatgaagtttatggagatattaagggtaactttagatcaaatgaaaattataaatatgagccaagctcaccttactctgcatcaaaagcaagtgcagaccacttagtaaaatcctatattagaacatataaattagatgccgttatttcaaattgttgtaacaattatggtccgtaccagtttccagaaaagttgataccaaaaatgataagcaacatattaaataataaagaattaccaatttacgctaaaggaagaaattctagggagtggattcatgttgaagatcattgtgaggccttattcacgctatatttgagaggtaaatctggagaaagctataatgtggggacaaatcaaaatatgaaaaatattgatctagtaaaaaaaataataaaagtgtttaaatcaatgcaatttaatatcggaagtaaaactaaaataaaatttgtaaaagatagacctggccacgactttagatacgcacttgataataaaaaaatatttaaaaagattaaatggaaaccgaagataaagtttgaccagggtattaaagatacaattcaatggtatataaaaaataagaatttcttaaatagaatatctaaaaaatcatatgatcaaaggctgggattaaagtatgataaaaaaaggtataattttagc

SEQ ID NO: 284406 - DNA, 703 bp, Unknown
  Bacterial polypeptide expressing nucleotide sequence isolated from the Sargasso Sea
gttagaaaattagaaaaaaaaaccaaaaataaattaaaatttttacaaatttctactgatgaagtttatggagatataccaaaaaacaaaaaagctagtgaaagttacaattacaatccaagctcaccttattctgcttcaaaagctggtgctgatcagctggtacgttcttatggtagaacctatgggatcaaaacactgatcgcaaatccttgcaataactatggacccaaccaatttccagaaaaatttattccaaaaatgatctttaatatgcttaacaacaaaccttttcctgtatatggcaaaggtaaaaatgttagggaatggatatacgttaaagacaactgtgaagctttattaaagatttttttaaaaggaaggattgggaaaagttacaatattggaactggtattagactgagaaatatagacataataaaaaaattaatagatatatcaaaaaaaaataaaataagaattacaaataaaaataaaattgtttttgtaatggacagacctggtcacgatgaaagatatgcacttaattctaataaaataaaacgagaaataaaatggagacataaaacatccgtctccagtggcttgtcaaaaacaatcgattggtattcaaaaaatttaaattttttcaagaaaatttctaaaagaaatataaccaaaagactaggtgtaaaagtataaa

SEQ ID NO: 284407 - DNA, 610 bp, Unknown
  Bacterial polypeptide expressing nucleotide sequence isolated from the Sargasso Sea
agatctaaagagattgatgcatacaagcctagttcaccttattctgcttcaaaagcttcatctgatcatttggtttattcttatataagaacatatggaattcctgcgattgtaacaaattgttcaaataattatggtccaaaacaacatcctgaaaaattaatacctaaactaatatataatattattaataataaaaacttaccgatctatgggaaaggtaaaaattcaagagaatggatatatgttggagaccattgtgatgcactgcttaagatttttaataagggaaagattggtgaattttacaatattggttcaaattataatttagataatttatctgtagtaaaaaaacttattaatgtttctaaaaagaaaattaaaattggctctaaagtaaaaattaaattcgttaaagatagaccaggtcacgataaaagatacgcaataaatagtagcaaaattaaaaataaaattggctggaaaccaaaaataagctttgaagaaggattaaaaaaaacattttcttggtatcttaataaccagcagtactattcaaaactaaataaaaaagatattactaaaagaataggtgtaaaaaaatgat

SEQ ID NO: 284408 - DNA, 763 bp, Unknown
  Bacterial polypeptide expressing nucleotide sequence isolated from the Sargasso Sea
gatgtatcctgaaaaattcatcaaaactaatattcatggtgtctacaacttactggaagttttaaggaaattaaaaaaaattactaaaaataaaataaaatttttacaaatttcaacagatgaagtttacggtgatatttcagttggtaaaatagctagcgaaaaagacaattataatcctagttcaccatactctgcctcaaaagcaagtgccgatcaattagtcaagtcgtatggtagaacgtatggattaaaaacattaattgcaaatccttgtaataattatggtccaaatcagtttcctgaaaaatttatacctaaaatgatttttaatgttttaaataacagaccattaactatttatggtaaaggtaaaaatactagagaatggatttacgtcaaagataactgcgaagcaatattaaagatttttcttaggggcaagtatggcgaaaactataacattggaacaggtataaaattaaaaaatatagacatcgttaaaaaaattttagaaattgcaaaaaaaaataaaattagagttggaaagaaagccaagattaggtttgtgaaggatagaccaggacatgacctgagatacgctttaaattcttctaagattaggaaaaaaatgaaatggaaacacaaagtttcaacggctaaaggattagaagatacttttagttggtacaaaaataatcttggttattttaaaaaaatatcgcaaaaaaatatatctactagacttggtctaaaattatga

SEQ ID NO: 284409 - DNA, 883 bp, Unknown
  Bacterial polypeptide expressing nucleotide sequence isolated from the Sargasso Sea
attatcgtaactggaggttcggggtttataggcagtaatttaataaatcttttgttaaaaaagaaattttttgtaattaacatagataaatttagctattctgcaaatccctataatgtccaagattttaagaaaaataaaaattatgttttttttaaactagatattaataagacaagcaaaatattaagtatattaaataaatataaacctgtaggaatttttaacttagctgctgaaacacatgtcgatagatcgatagataaggcacatcattttattagatcaaatataactggagtttatagtttgcttgaggctataagaaaatacgaaaaaaaaacaagaagaggtttaaaacttttacaagtttcaactgatgaagtttatggagatattcctagaggcaaattggctaatgaaaatcataattataatcctagttcaccttattctgcatctaaagctggagcagatcaatttatcaaatcttatggaagaacatatggattgaaaattttaattgctcatccatgtaataattatggaccaaatcaacatcctgaaaaatttattccgaagatgatttttaatttacttaacaataagtctcttactctttacggaagtggtaataatataagagagtggatatacgttaaagataactgtgaagccttattaaaaatctttttaaaaggcagaagtggcagaagttataatattggaacaggtataaaattaaaaaatttagatattgcaaaaaaacttttagctgtcgctaaaaaaaataagatcataatttctaaaaaaaataaaattcaatttgtgcaggatagaccgggccatgatgagaggtatgctttaaattcaagtagaataa

SEQ ID NO: 284410 - DNA, 703 bp, Unknown
  Bacterial polypeptide expressing nucleotide sequence isolated from the Sargasso Sea
ttaaagggtagtgatttaccttttaagtttattcatgtttcaacagatgaagtatatggtgctcttgatagtgaagggcactttactgaaatgactccatataatcctagttctccttattcagcatcaaaagcttcttctgatcatttagcgagagcatggcatcgtacatatgaattaccagttattgttacaaattgctcaaataattatgggccgatgcaatttcctgaaaaattgattccactgatgattattaactgtcttgattcaaaagatctaccagtctatggagatggtcaaaatattagagattggttatatgttgatgatcattgcagtgcaattaaaaccatatatgagtatggtgttgtgggagagacttataatattggtggtaacaatgaaattaaaaatatagaaattgttaatacagtttgctctatacttgatgagcttaaaccgcaagaaaatgggaaatcatatagtgatcaaattaaatttgtcaaagatagacctggccatgattttagatatgccatcaatgctgaaaaaatacaaaaggaattaaattggtttcccagagaaacatttgaaacaggtattaaaaaaactatagaatggtatttagaaaatgaaaagtggtggcggatgattcaaaataaaacatataaacaagagagacttggagaaaatatttaaa

SEQ ID NO: 284411 - DNA, 583 bp, Unknown
  Bacterial polypeptide expressing nucleotide sequence isolated from the Sargasso Sea
tgcctcaaaagcaggatcagaccacctcgttagagcatggaatcgcacctatggattaccaacattaataacaaattgttctaataattatggtccatatcaatttcctgaaaaattaattccactaataatcattaattgtttaaatgataaaccactaccagtatacggggaaggtaataatgtaagagattggttatatgttaaagatcattgtgaagccattagctatgttttaaataatggaaaaattggacagacatataacattggaggcgataacgaaataaaaaatattgatgttgtcaaaacaatatgctctatattggatgatatattgccaaaacaagatggtaattcgtattcagaattaataagttttgttaaagatcgcccgggtcacgattttagatacgctattgatgcagaaaaaataaaaacaaacttgggatgggggcctaaagaatcttttgatagtggactaagagaaaccattcactggtatttaaataataaaacttggtggcaatctatacagaaaaatacatacgagcaggaaagattaggggtaatcaaatcatga

SEQ ID NO: 284412 - DNA, 680 bp, Unknown
  Bacterial polypeptide expressing nucleotide sequence isolated from the Sargasso Sea
taatttggcagcagaaactcatgttgatagatcaattgatggacctgcagagtttataaaaagcaatatagttggggtgtttaatttattggaggaatttagagaatttacaaaaaaaaacaaaaaagctaaactaattcatatttctactgatgaagtttatggcgatgtattgaaaggcagaagtaaagagaatgactcttataaaccaagttcaccttacgctgcatcaaaagcgtcatcagatcatctagtttattcttatgttagaacctttaaaattaatgcaatgataactaattgttcaaataattacggacctcaccaacatccagaaaaactaattccaaaacttatttataacataattaataacaagcctcttcctttgtatggaaaaggaaaaaattctagagaatggatatttgtagatgatcattgtgatgccttatttaaagtatttaaaagtggaaaaaggggagatttttataatattggatctaatataaacagtagcaatttagatattgctaaactcttgattagtattgctagaacaaaaataagattaagtaaaaatgttaagataaaatttgtaaaagacagacctggacatgactttagatatgcattggatagtaaaaaaaagggaaaaaacttaaatggaaatctaaaataaa

SEQ ID NO: 284413 - DNA, 933 bp, Unknown
  Bacterial polypeptide expressing nucleotide sequence isolated from the Sargasso Sea
aggatcaaaattttattcataattttataaatagaaatccaaaatcttttgtaattaatatcgattcattatcttacgcaggtaatgagggaaacaatgaaaatttatcaaaaaaaaattatcaattcgttcatggtgacatttgttcaaaaagtgatatttccaaaatatttcaagaaaatgatcttgatgcagtattaaactttgctgcagaaagtcatgttgataggtcaattaagaaaccagactctttcataaaaagtaatatctttggaacttacaatcttcttgaatgcctgagagagtttaatgagaaactagatcataatattcattttcatcatatttccacagatgaagtttatggaagccttgataaaaatgattcaccctttactgaaaaaaataaatactttccaaatagtccatactcagcaagcaaagcatcttcagatcatttagttagatcatggcataaaacatttaatttacctgttactatttcaaattgttcaaataattatgggccctttcaatttcctgaaaaattagtacctttaacaatttttaatatccttaatggcaaagaaataaagctatatggagatggtatgaatataagagattggttgtacgttattgatcattgcgatgcaatagaaaaaatcttagtttatggagaaaatggacatacatataatattggtggaaacaatgaaatcagcaatgtagatattgtaaatacggtttgtaacgaaatagagataatcttgccagcaggtaagaataagaaatccaaatataactcatatcaagattctgttaagtttgttgaagatcgtcctggtcatgatttcaggtatagcattgattcatcaaaaatacataatgatttaaattggcttcctaaagagtccttgaatcaggaataaa

SEQ ID NO: 284414 - DNA, 641 bp, Unknown
  Bacterial polypeptide expressing nucleotide sequence isolated from the Sargasso Sea
attgaaagctattgtcacaggaggagcaggattcataggctctgctctagtaaaaaagttaatcaaatcacttaaatgtgaagttatggttatagactctttaacatatgcatcccaaatgccttcactccaggaagttctagaaaataagcttttttctttttccgagactgatatttgtgacacaaagtctttgatggagatttatgcaatattccaacccgattttgtttttaatcttgctgctgaaacccacgttgaccggtctatagattcacccgagctttttttgaagacaaatgtcatgggtacatattcgttacttgatgtttcattaaagttctggagggatttggatgctacaagtaaaaaaaagtttaggtttcttcatatttctacggatgaagtatttggtgatctcaaagaaaatgaaccacctttcaaagagacaaataattatcatcctagttcaccttactctgccagcaaggctagttcagaccacttagttagagcgtggtataaaacttacaatcttcctgtgcttttaagtaactgttcaaataactatggcccttttcagttttatgaaaagttaattcctctcatgataatcaaagctttgagaggcgaaaagcttc

SEQ ID NO: 284415 - DNA, 907 bp, Unknown
  Bacterial polypeptide expressing nucleotide sequence isolated from the Sargasso Sea
aatgcaaaaaattttagtaactggaggtcttggttttattggcagtaatttagtcaaattattactagataaaaaatacaatgttataaatattgataaaataagttactcatcaaatttttataatacaaaagacttttcaagaaacaataaatatcaatttattaaatgtgatttaaaaaattcaaaaaaaattgaaaaaattttaaataaatttaaaccaaattgtatatttaatttagcagcagaaacacatgttgatagatctattgatagcccaagaaattttatagattcaaatattataggaacatttagtcttttagaaagttttaaaaaatttttctataaatataaaaaaggtaagctaattcatatatctaccgatgaagtttacggtgatatattgaaaggaaggtcaaaagaaaatgaccaatacaaaccaagttctccttatgctgcatcaaaagcttcgtcagatcatttggtaacttcatatattaggacatttaatttacctgcaataattacaaattgttcaaataattacggacctagacaacatcctgaaaaattaatccctaaaatgatttataacattcttaataataagcctctttccctctatggaaatggaaaaaattctcgagaatggatttatgttaatgatcactgtgaagcgcttataaaaatctttaaatctggtatagttggtgaaacttataacattgggtcaaataaaaatttaaataatatagaaatttgtaaaaatttattaaatattgctaaaaaaaatattagaataggaaaaaaggtcagaattaaatttataaaagatagaccgggacatgataaaagatatgcgctcaatagttcaaaattaaataaaaaattaaagtggaagcaa

SEQ ID NO: 284416 - DNA, 713 bp, Unknown
  Bacterial polypeptide expressing nucleotide sequence isolated from the Sargasso Sea
attgaaaaccattgtcacaggaggagctggattcataggatctgcacttgtaaagaaattaattaactcattggaatatgaagttttggccctagactctttaacttatgcctctcagattgattccttagaagcagttcaagatagcagtcttttttctttttctgagactgatatacgtgatgaaaatgcactggaagacatctttaatgaatttaagcctgactttatttttaatctagctgctgaaactcatgttgatcgatcaatagattctccagaactttttttagaaacaaatatttttggaacttatcgacttctgaaagtctctttaaaatatttgaaaactttagaaaaagaaaaaaaagataagtttaggtttcttcacatttctacagatgaagtttttggagatttggaggccaatgaccctcctttcagagaaacaaataattatgaccccagttcaccttattctgccagtaaagcgagttctgatcatttagtcagggcatggtatagaacttataagcttccagtgttactgagcaattgttcaaataattacggacctttccagttctatgaaaagctaattcctttaatgataattaaagccttaagaggagaaaagcttccaatttatggcactggactgcaagtaagagattggctatatgttgaggatcacgcagatgcactcattaaga

SEQ ID NO: 284417 - DNA, 702 bp, Unknown
  Bacterial polypeptide expressing nucleotide sequence isolated from the Sargasso Sea
aaacaataaaaataagctacaaaaaattttttacacttttaaaccttatgcaatttttaatttagctgcagaaacacacgtggatagatctatcgatggtccagaaaattttataaaaagtaatattttaggggtatataatctgctagaagtttttaaaaaatattctaaaaaatattctaaagcaaaattgattcatgtttctacagatgaagtttatggtgatattctaagaggtagaagtgatgaaaattttccttacaaaccaagttctccttatgctgccagcaaagcttcgtctgaccacttggtttactcttatgttcgaacttataaaatacctgctattataactaattgctcaaataattatggaccaaaacaacatcctgaaaaattaataccaaaattgatatacaacataataaaaaataaaaaactaccaatctatgggagaggattaaactctagagaatggatttatgttgaagatcattgtttggcattaattaaaattcttggaaaaggaaaggttggaaatttttataatattggatcaaatattaataaaacaaatattcaaattactaaatcattaattaatattgcaaaaaaaaatatcaaaataggaaaaaatgttaaaattaaatttgtaaaagatagaccgggtcacgatgttagatatgctttaaatagtaaaaa

SEQ ID NO: 284418 - DNA, 813 bp, Unknown
  Bacterial polypeptide expressing nucleotide sequence isolated from the Sargasso Sea
aatgaagcttttagttactggaggtgctggatttattggttcagcagttattcgagaagcaattggaagagatatccaaattgttaacatagattctttaacatatgcggcttgtttagataacttaaaatctattcaaaaagatcaaaattatttctttgaaaaggctgatattagagatcgtgacttaattgatgttatttttgaaaagcatcagcctgatgctgtaatgcatttagctgcggagtcacatgtagatagatcaatagatagcccgaatgatttcattgagacaaatgtattaggaacatttaatttacttgaggcttcaagaaattattggcatcaaaaaggtaagcctgctaattttcgttttcatcatatatctactgatgaggtatatggatcattaaaactaaaaagccctgaaaaatttactgaagaaacatcatatgatccacgcagcccttactcggcgactaaggcagcgtctgatcatttagttcgagcgtggcatgaaacatatggcataccagttgttttaacaaattgctcaaacaattacggcccatatcatttcccagagaagcttataccagttgtcattataaaagcattagctggagacactataccggtatatggtaatggagataatgttagagattggttatatgttgaagaccacgctaacgcacttttgttggttcttgaaaaaggtgaaattggaagaagttacaacattggaggtgaaaacgaatctagcaacattgagcttgttaagatgatatgtgaaatacttgattcaaagaa

SEQ ID NO: 284419 - DNA, 739 bp, Unknown
  Bacterial polypeptide expressing nucleotide sequence isolated from the Sargasso Sea
gtttatcaatagcaatattttgggaacatttaatcttttagaaatttttaaaaaattctctaaaaaatttaaaaaatgtaaattaattcatgtttctacagatgaggtttatggagatattttaaaaggaagaacaaaagagaattatccttacaatccaagttcaccttatgcggctagtaaagcttcatcagatcatattgttttttcttatataaaaacttttggaataaaagcaataatcacaaattgctcaaataattatggtcctaaacaacacccagaaaaacttattcctaaaatgatctacaatatattaaacaataaacctctaacaatttatggaaatggtaaaaattctcgagagtggatctatgtaaaagatcattgcgaagcattaattaaaatttttaaatctggaaaaattggtgaaacatataatattggatctaataaaaatttaaataacttagaaatctgtaaaaatttattaaaagttgcaaaaaaaaatataaaaattggaaaaaaagtaaaaattaaatttataaaagatagaccaggtcatgataaaagatatgcgcttgatagttcaaagttaattaaaaaattaagatggaagccaaaaacaaattttttagatggaataaaccaaacttttatatggtatttaaataataaaaaatattatagatctcttaatataagagatattattaaaagattaggaagtattaaatga

SEQ ID NO: 284420 - DNA, 835 bp, Unknown
  Bacterial polypeptide expressing nucleotide sequence isolated from the Sargasso Sea
gatggattttgatccagattatgtggttcattttgctgcggagactcatgttgacagatctatagacgggccttctgaatttataaatacaaatataataggtacattcaatttactgcaatcctgtcttaaactcctcaataaaaaaaagattgatcaaaaaggaagattcagatttatacacatttctacagatgaagtctttggaagttcaagtggtgacgcatttgaagaaaatgatgcttatttaccttcctctccttattcggcatccaaggcttctgcagatcacctagttagagcatggcatacaacatatgattttcctgcaattattgtcaatacctgcaacaattatggcccttttcagaatcgagaaaaactaataccaaaaactatcttttgtttaatgaacggccttgaaatacctctttacggaaagggacaaaatataagagattggatacatgtggatgatcatgttgaagctatattgttagtcattcaaaaaggtattattggttcctcatacaatattggagtaaataaccaagtaaagaatatagatattgtaaattcgctatgtgaacttgcaactgagatgaatttagaattaccaattaaccttaaacatcataaagaattgattaagtttgtagatgatagacctggtcatgatttttgctattctttatcctctaaaaagattgaaaaagaattgggatggaagccaagatatcaaatacttgaaggtttaaaactttctattcaatggtatgtagctaatcaagataaattagataatgaaggatacaatcctgagtggatgaaatga

SEQ ID NO: 284421 - DNA, 670 bp, Unknown
  Bacterial polypeptide expressing nucleotide sequence isolated from the Sargasso Sea
tatgaaaaaagttatagtcacaggaggtctaggctttatagggagtaatttaatcaaaattcttcttaaaaaaaaatactatgtaattaatcttgataaaattacctattcttccaatttttataatgtaaaagaattttcaaaaagcaaaaattacaaatttattaaaatagatatcaacaataaaaaaaaaatttctcaaattctcaaaaaatttaaaccaaatgccattttcaatcttgcagcagaaactcatgtagatagatctatagatcaacctgaaaattttattaaaagtaatattttaggagtatttaatttgttagaagctttcaaaatatatctcaaaaaaaataaaaatataaagttaattcatatttcaactgatgaagtttatggagatattttaaatggtagatcaagagaagatgatgcctataaaccaagttcaccttatgcagcttcaaaagcatcttctgatcatctggtttattcatatattagaacatttaaaattcctgcaattgtcactaattgttcaaataattatggcccaagacaacaccctgaaaaattaattcctaaattaatttataatatccttaacaataaaaacttacctatatatggaaaaggactaaattccagagaatggatttatgttgatgat

SEQ ID NO: 284422 - DNA, 839 bp, Unknown
  Bacterial polypeptide expressing nucleotide sequence isolated from the Sargasso Sea
atttaagcctaataaaataattcatttagcggcagaatctcatgttgatagatcaattgatgggccagaagtatttatgcagtctaatattttaggaaccttcaatcttatagattcatcgtataaattttattcatctctttcacataaattaaaaaataactttaaatttttattagtatctactgatgaagtatatggttctttgggtattgacgagaataaatttgatgagaacagtaattataaacctaatagcccttattctgcttccaaggcggcatctgatcatatagcaagagcatggataaaaacttttcaaatgccaattctaataagcaatacaactaataattatgggccatggcagtttcctgaaaaactaatacctctgacaatttataaatgtttaaatgaaaaagatattcctatttatggtaatggagaacaaattagagattggatatatgttgatgatcatgtgaatggattattttacatactagaaaatggtactattggagaaaaatataatattggtagtaataatgagattaaaaatattgatgttgttagtaacatttgtgagattcttgatcaaatacgacctcgagaaaagggatcttattctgatttaattacatttgttgatgacagaccggggcatgatactagatatgctctgaataacaaaaagatatgtgatttggggtggaagccatcatattcatggaatactggcctaagacaaactattgattggtacctaggaaatattgactatttagaaagtaaaaatataaagaaatattcaggagaaagacttgggaagatctaat

SEQ ID NO: 284423 - DNA, 840 bp, Unknown
  Bacterial polypeptide expressing nucleotide sequence isolated from the Sargasso Sea
agttttccatcgactcggtaattcaccttggagcggaatcccatgttgaccgcagcatcaacgatccttctccattcattgatagcaacatcaaggggactttccaacttcttgaaaccgccaggaaccactggcaggaggatttgaacgatcaccgtttcctccatgtcagtaccgatgaagtttatggcacgcttggcaaagaggcattatttaccgaacagaccccttttgctcccaattctccctactcttcctcgaaggcttccagcgatcaccttgtccgggcatggcatcatactttcggcatggacaccttgatcactcattgttcgaacaattacggtccctaccaatttcctgaaaaactgatcccgttgatgatccgaaactgtcttttaggaaaagaattaccggtctatggagatggcctgcaggttcgagactggctttatgtggaggatcattgcgaagccttggacgtggtttttcatcgaggtcagtccggagaatccttcaacatcggagggctgaatgagtgggaaaacctgagtatggtccgtcacatttgcaagttcatggatgccgaactaggaaaccctccagaacagtcttgcctgaacctgatacaccacattcaggaccgccccggacacgaccggaggtatgcaattgatgcatctaaaatccagaatcaattgggttggcaaccccgccaccagatcggtgaaggcctggaaaagaccatgcgatggtatctcgatcatcatgaatgggtggagcaggttacttcgggagcgtaccgtgattattacaagcatcaatacgggattggctgaa

SEQ ID NO: 284424 - DNA, 821 bp, Unknown
  Bacterial polypeptide expressing nucleotide sequence isolated from the Sargasso Sea
aatgaattttcaaaaaaaaatattagtaactggaggagctggttttataggttcgcatgttgttagaagattggtaaataaatacccaaattatttgattcttaatgctgataaattaacctatgctggtaatttggaaaatttaattgatgttgatcaaaaagaaaattatgaatttgttcaattggacattaccaatgaaaaattagtaaatgaattgtttgaagctcatgattttgatggtgttattcacttagctgcagaatctcatgtcgatcgatctatttcaaatcctggtgaatttgtaatgactaatgtagttggaaccctaaatcttcttaattcttgtaggtctcaatggaatggtaattacaatgataaggtgttttaccatatatctacggacgaagtatacggttcattaggttacgaaggactattttatgagacaactgcttatgaccctagaagtccatattcagcatcaaaggccagttctgaccacttggttagagcatattttcatacttatggtatgcctattaaaatttccaattgcagtaataattatggcgccaatcaatttcctgaaaaattactgccattaatgattaataacatcaacgaaaataagccgcttccagtttatggtaagggtgaaaatattagagattggttatgggtggaagatcatgctatagctatagacttaattttccataaaggtaaatctggggagacctataatattggtggacataatgaatggaaaaacattgatttaattcatttgttatgtgatacaatggatagaaaattga

SEQ ID NO: 284425 - DNA, 538 bp, Unknown
  Bacterial polypeptide expressing nucleotide sequence isolated from the Sargasso Sea
agctagcaaggcctcatcagatcatttagttagatcatggacaagaacatatggattgccttcagtgataaccaattgttcaaacaattatggcccttatcaaaatgatgagaaattaattccaacaataattaggagtgcacttaatcatgaaccgattcctatttatggtgacggaagccaaataagggattggctttttgttgaggatcatgttgccgcacttcataaagtattaatagaaggtaaaaataatgaaacttataatattggtggcataaatgaggtaaagaacatagatgtcgctatgaagatttgcgcaatattagatgatatatatccaataagttctcaagagtttaaatcttataataagcttattaaatttgtagatgatagacctggacatgataaaagatatgcaattgattgcagtaaaattaaacaagatctcaactggcatcctaatgaaaatttcaacagcggtatgattaaaacagttaaatggtatatagataaatataaagaaggtaattaa

SEQ ID NO: 284426 - DNA, 933 bp, Unknown
  Bacterial polypeptide expressing nucleotide sequence isolated from the Sargasso Sea
gcccttagtaaaggacataaaatattagctatagactgcttaaaatattcagggataaaaaataatgttaatagatttaacgataataaaaattttgaatttaaaaaaatagatatattaaataaaaaaacactagaaaggtgtattaaaaattttagacccaactttattataaactttgcagcggagagtcatgttgataggtccattgaaagccccatgtcatttatagaaactaattgtttaggtgttattaactttcttcagtgtataaaagaattgaaactaactaatataactaaactagtacaaatttctacagatgaagtttatggtgaagtaagctttccagcaacagaaaataatagatatatgcctaactctccttactcggcttcaaaagcttctgctgatcttttcataagggcttgggataaaacttttaagttaaagaatataatactccatcctagtaataactatgggccaagacagtttcctgaaaaattgatgccattaattataactaatgcattatataaaaaaaaattaccaatttatggagatggaatgcagactagggaatggctttttgtagatgatacagttgatgccatattgcagtgtttacaaaagaaagatctgaaagggcacctaaatataggcagtggacagagatacactaatttacaaatagtaaaaaaaatttgcttaatactagatagtttacttaatgaaaaaaaattcaaacattctagcttaatacattttacaaaagatagaccaggacatgataaaaaatatgctattaattctaaaatagcttttaataagttaggatggaaaccaaaaactactattgaagatggtttactgaaaacagtcaaatggtatattgataatgaaaagtggtggaaggaaatattgaaaaaa

SEQ ID NO: 284427 - DNA, 502 bp, Unknown
  Bacterial polypeptide expressing nucleotide sequence isolated from the Sargasso Sea
atgaaaaatatattagtgacaggaggttgtggtttcattggatcaaattttattcaccaccttattaataaaaatgatttatcccacattgttaatctagacaaacttacatacgcggggaatatttcaaatatcagtcagatttcaaattctaggcacacattgattgagggggatatatgtgattcagatttagtaaaatcactttttgataaatacgaatttgaatcggttatacatttcgccgcggaaagccatgtcgatcgttcaattgatgacccctctaactttatttatacaaatatagtaggtacattgaatctccttgagcattcaagatcatatttttctaaaacaaaaaatgaggattttagatttttacatgtttcaacagatgaggtgtatggttcacttgatgacggaggaaaatttctcgaatcaactccttatgatccaagttctccatattctgcatcaaaagcaggttcagatcatctgtcag

SEQ ID NO: 284428 - DNA, 838 bp, Unknown
  Bacterial polypeptide expressing nucleotide sequence isolated from the Sargasso Sea
aaaaataagaaatataagtttattaaatgtgatttaaaaaatcaaaaaaaattaactagaatacttaaaaaatataatccatctggaatttttaatttagctgcagaaactcatgttgatagatcaattgatagtccagaaaattttattaaaagtaatatagttggtgtatttcacttgttagaagcgataagaaaatataattttaaaaaaaaaaaaattaaattaattcatatatcaacagacgaggtttatggggatgtattaaaaggtagatctagagaaaaggacccatacgagccaagttctccatatgctgcatcaaaagcttcatcagaccacttggtttcttcttatattagaacttttaatttaccagcaattgttactaattgttcaaataactatggaccaggacaacatcctgaaaaacttattccaaaaataatttataatattttaaataacaaaccattgcctgtttatggtagtggaaaaaatacaagagaatggatttttgttaaagatcattgtgaagctttgattaaaatttttctaaatggaaaaataggtaatttttataacatcggttctaactttaatttaacaaatatagagattataaaaagattattgtttatcgcgaaaaagagtatgagcataggcaaaagagtaaagataaagtttgtaaaagatagacctggccacgatttgagatacgccttggatagctccaagattagaaaagaattaaaatggataccaaaaacaaatattaaagatggtctaataagaacacttatatggtatgttaacaacaaaaaaattttattcgaat

SEQ ID NO: 284429 - DNA, 683 bp, Unknown
  Bacterial polypeptide expressing nucleotide sequence isolated from the Sargasso Sea
atattgtaaaaaaaatttaaatacaaaattaatacatatttctacagatgaggtttatggagatgtgttaaagggtagatcaaaagaaagtgatccctatattccaagttctccttatgcagcatcaaaagcttcttcagatcatttggtatactcttatattagaacttataaaatacctgctataatcacaaattgttcaaataattacggtccaagacagcatcctgaaaaactaattccaaagttaatatacaacattctaaaaaataaaaatttaactatctacgggaaaggtagaaattcaagagaatggatatatgtaaaagatcattgtagagctttaattaaaatttttaaaaaaggaaaaattggcaacttttataatattggctctaatgttaatcaaaaaaatatagaaatttgtaaaaaattaattcaagttgcaaaaagaaaaattaaaataggaaaaaatgttaaaattaaatttgtcaaagataggcctggtcacgatttaagatatgctttaaacagtaataaaatttttaataagttaaaatggaaatctgaaataaaaattgataaaggtctagaaatgacttttttatggtatctgaaaaatcaaaaatattattcgaatataaacaaattagatatcacatctagatttggaaacgtatgat

SEQ ID NO: 284430 - DNA, 931 bp, Unknown
  Bacterial polypeptide expressing nucleotide sequence isolated from the Sargasso Sea
atgagaatattagtaacaggtggttgtggttttataggtagtaattttataaaacatatgttaaatacatatgaagattataaaatatataatgtagataaattaacttatgctggaagtgaagataatttaggtgagtttaagaatcattcaaattattatttccatcaagcagatattaatgaatatgcaacattacattatatggttggacagaataaaatagatactattgttaattttgcagcagaatcgcatgtcgacagaagtatagaaaattcagatgagttcatacaaagtaatattaatggaactcatactttattgaaattatttcacgaatttccgattaaacgatatgttcaaatatcaactgatgaagtatatggttcattggaagagaacgattcaccatttacagaagactcaccattgaaaccaaatagtccatacgctgccagtaagacatcagctgatttattgtgtagaagtttttatgaaacttatgattatccaattgttatcacaaggtgttctaataattatggaccaaatcaatatcctgaaaaattaataccattgatgattcagaaagctaagaatggtgaaaatttaccagtttatggaaatggattgaacataagagattggattaatgttcaggaccattgtgaagcaatagatgttgttttacatagaggagaaaatggtgaggtttataatattggtggattagatgaacgaagaaatattgatatagttaagactatattatataaattaaataaaggatatcaacacatagaatatgtacaagacagacttggacacgattttagatatggaatggatatatcaaagattcgtgacgaattgggttggagtccgagaattaactttgaagaaggaataggagaattagtaaaatgaa

SEQ ID NO: 284431 - DNA, 1018 bp, Unknown
  Bacterial polypeptide expressing nucleotide sequence isolated from the Sargasso Sea
atgcataaagtaatagttactggtggtttaggatttataggaagtaatcttataaacttattattaaaaagaaatttttttgtaataaatttagataaagttacttactcgtcaaatttttataatgtagcaaattttcaaaaaaataggaaatataagtttattaaatgtaatttagaaaatcaaaaaaaaataactagaatacttaaaaaatataaaccatcaggaatttttaatttagctgcagaaactcatgttgatagatcaattgatagtccagaaaattttgttaaaagtaatatacttggtgtatttcacttattagaagcaataagaaaatataattttaaaaaaaaaaaaattaaattaattcatatatcaacagatgaggtttatggagatgttctaaaaggtagatctagagaagaagacccatacgaaccaagttctccatatgcagcatcaaaggcttcatcagaccatctggtttcttcttatattagaacttttaaattaccagcaattgttactaactgttcaaataactatggaccaagacaacatcctgaaaaacttattccaaaaataatttataatattttaaataacaaaccattgcctgtttatggtaatggaaaaaatacaagagaatggatttttgttaatgatcattgtgaagctttgattaaaatttttctaaatggaaaaataggtaatttttataacatcggttctaacttaaatttaacaaatatagagattataaaaaaattattgtttatcgcaaaaaaaaatatgaacataggcaaaagagttaagattaagtttgtaaaagataggcccggccatgatttaagatatgctttggatagctccaagattaaaaaagaattaaaatggatcccaaaaacaaatattaaagatggtctaataagaacgcttatgtggtatattaataacaaaaaattttactcaaatattaataaaaaagatattgtcaaaagattaggaaactaaa

SEQ ID NO: 284432 - DNA, 1033 bp, Unknown
  Bacterial polypeptide expressing nucleotide sequence isolated from the Sargasso Sea
aatgaaaaaaattattgtaactggtggctgtgggtttataggaagcaatttaattagacttttacttcaaaagaattattttgtaattaatatagataaattaagctattctgcaaattcttataatgtaaaggattttaagcaaaatcgtaattatttattttataatttagatataaacaagacatctcatatattaaaaattttagaaaagcataaaccaataggaatttttaatttagctgcagaaactcacgttgatagatctattgataaagcatatcattttattaggtcaaatattgctggcgtttatagtttgctagaggcaataagaaagtttgaaaataaaaaacataaaaagttgaaacttttacaagtttcaacagatgaagtgtatggtgatattcccaaaaaacaaagtgcagatgaaaatcacaattacaacccgagttctccttattctgcatctaaagctgcagcagatcagtttttaaaatcttatagtagaacttatggtattaaaatattaatagctcatccttgtaataattacggtcctaatcaacatccagaaaaatttataccaaaaatgatttttaatattttaaataatagacctttgccactttatggaaatggaaaaaatattagagaatggatttatgtaaaagataattgtgaagcattacttaaaatttttttgaaaggcaaaaatggaaggaattataatattggtacaaatataaaattaaaaaacactgatattgcttcaagattattagatgttgcaaaaagaaataaaataaaaatttctaagaatactaaaattatttttgtaaaagataggccaggtcatgacgaaaggtatgctttaaattcaaatagaataaagagagaaattaaatggaaatacaaaacacctatttctaaaggtctatttaaaacaattgaatggtattcaaaaaattataattattttaaacaaatttctaagaagaatataactaaaagattaggtttgaaagtatga

SEQ ID NO: 284433 - DNA, 595 bp, Unknown
  Bacterial polypeptide expressing nucleotide sequence isolated from the Sargasso Sea
atgaaaaggtttatcgtaacaggggggtatggttttattggtagtaacttaataaaactattgttaaaaaaaaaatttaaagtccttaacattgataaattatcatactcagctcaaaaatataatttaaaggatattaaaagtaaaaactactttttcaaaaagactgatattaataataaaaaagaaattttaaaaattctaaaaagatataaacctcacggaatttttaatttagcagcagatactcatgtggatagatcaatagacgattcctctaactttattaaaaataatattctaggcgtttataatttactagaagccattataaattataaaaaaaaagttaggctagttcatatttctactgatgaagtttatggagatatttcaggttcaaaaagatctgatgagagctttccatatattccgagctctccttattcggcttcaaaagcttcttctgatcatttggttaatgcttatattagaacacataaaattgatgctgtgatatcaaattgttcaaacaattacggtccaagacaatttcctgaaaaactaattcctaaaatgatttacaatattttaa

SEQ ID NO: 284434 - DNA, 617 bp, Unknown
  Bacterial polypeptide expressing nucleotide sequence isolated from the Sargasso Sea
tatgaaattcttagttactggtggcgctggatttatcggctctgcattagttagatatctcatacatgatactgatcatcaggtattaaatatcgataaattaacctatgcatcaaaccttgattcattggaatcagtaaaagaccatccgaattataaattcaataaagtcgatatttgtaaccatgaaaccatagataacatatttcatacattccaacctgatatggtcatgcaccttgcagcagaaacccatgttgatcagtcaatagagcattcaaggaaatttctagattcaaatgtttttggaacctatgttctacttgaggcttcaagaaagtattatgattccttgccaagcaatatgaagcaaaagtttagatttcagcatatttctactgatgaggtgtttggtgatcttgaagattcaactggttattttactgagaatactccatatgcaccaagttctccatattctgcgacaaaagcttcatctgaccatcttgtgcgtgcatggtatcgaacatatggcttgcctattgttattacaaattgctccaataattatggaccgttccaatttccagagaagctgataccactgatgattagta

SEQ ID NO: 284435 - DNA, 752 bp, Unknown
  Bacterial polypeptide expressing nucleotide sequence isolated from the Sargasso Sea
tacttataaccttctagaggcttcaagaagctactggagcaaattgtatgataaacataaagaagaatttcgttttcatcatatttctacagatgaagtgtttggttctttaggcatgcagggtgcatttacagaaaacacgcgatatgatcctcgttccccgtattctgctagcaaggcttccgccgatcatttggttcgagcatggcatgaaacgtttggactgccagtggttttgagcaactgctcaaataattatggtccgtatcattttcctgaaaaattgatccctttaatgataataaaagcgcttaagggcgagcctatgcctgtttatggatcaggcaacaatgtacgagactggctttacgtagatgaccatgcgcgggcactctatacaattgcgtctagaggacgcgcaggtgaaagctataatgtagggggtaattcagaagttagtaacatacaagtggtagagcgtatttgtgccatcctgaatgaattatctccaagaaaagatggaaagcgatacgaggaacaaataacttttgtatcagatcggccaggtcatgattttcgatatgcaatagatgcaacgaaaataaagtctgaacttgattgggttccacttgaaacctttgaaacaggtcttagaaaaaccgtcgaatggtacttagataatcaaaaatggtggcagccgttattaaataaacactatcagggtcagcgcttgggcaagtcagctgactgat

SEQ ID NO: 284436 - DNA, 859 bp, Unknown
  Bacterial polypeptide expressing nucleotide sequence isolated from the Sargasso Sea
aatgaaaactttattagttactggtggtcttggttttataggaagcaatttgatagaattgttactcaaaaaaagatttagagtaataaatatagataaagttagttattcctcaaatttttataatacaaaagattataaaaataataaaaactataagttcattaaatgtgatattaacaatcaaatcaaaataaacaaaatattaaataaatatcatccagattgtatttttaacttagcagctgaaacgcatgttgatagatcaatcgataatgctaaacattttattaaaagcaatatcactggtgtcttttcattacttcaagtttgtaaattctacgcaaaaaaaaataaaaaatttaaatttattcatatatctactgatgaagtttatggtgataaacttaggggaagatccttggaaaatgatccttataaacctagttcaccctatgctgcatccaaagcgtcatcagatcatttggtatattcttatattagaacttttgattttcctggaatcgttacaaattgctcaaataattatggaccaaaacaacatcctgaaaaacttattccaaaaataatttacaatattttaaacaatagaccattaccaatttatggaaaaggaattaatgaaagagagtggatttacgttgaggatcattgtgatgcactttttaaaatttatcaaaaaggattaataggaaacttttataatattggatccgatgtagttttaaaaaacaatgctttaattaaaaatattctttcaattgcaaaaagagagattaaagtaggtaaaaacgtcaagatggtatatgtaaaggatagaccaggtcatgacttaaga

SEQ ID NO: 284437 - DNA, 1063 bp, Unknown
  Bacterial polypeptide expressing nucleotide sequence isolated from the Sargasso Sea
atgattctggtaacgggcgggtgcggctttaatcgcgcccatttcgtgctcgactggctggatacgtcggacgaagcggtgctgaatgtagacaaactcacctacgccggcaatctgggtacgctcaagtcgcaacagggaaatccccggcacgtgttcgtgcgcgccgatatctgcgatcgcgccgcactggacgcacttttcgccgagcacaaaccgcgcgccgtgctgcacttcgctgcggaaagccatgtggaccgttcgatccatggcccggcggattttgtgcagaccaacgtggttggcacctttaccttgcttgaagccgctcgccagtactggaacacgctcggggaggccgacaaggccgcgttccgtttcctgcatgtttcgaccgacgaggtattcggctcgctctccgctaccgatccgcagttttccgaaaccacgccgtacgcgccgaacagtccctattcggccaccaaggcgggttccgatcatctggtgcgcgcctaccatcacacgtatggtttgccggtgctcaccacgaactgctcgaacaactacggtccgtaccagttccccgagaagctgattccgctgatgatcgccaacgcgctcagcgggaaggcgctgccggtttatggcgacggtcagaacgtgcgcgactggctgtatgtcggcgaccattgcagcgcgatccgcgaagtgctcgagcgcgggacgccgggcgagacgtacaacgtcggcggctggaacgaaaagaagaacctcgacgtcgtgcatacgctgtgcgacttgctcgaccagttgcgtccgaaggcgggctcctcgtaccgcgaccagatcacctacgtgaaggatcgtccgggccacgaccgccgttatgcgatcgacgctcgcaagctcgagcgcgagctcggctggaagccggccgagacgttcgaaacgggtcttgccaagacagttcaatggtatctggacaatcaggcgtggtctgacgaagtcgcttcgggcgagtatcggaagtgggttgagaccaactacgcgcagcgcgcgtaag

SEQ ID NO: 284438 - DNA, 1063 bp, Unknown
  Bacterial polypeptide expressing nucleotide sequence isolated from the Sargasso Sea
catgatcctggtgacgggcggcgcgggttttatcggcgccaatttcgtaatcgactggctgcgtcaatccgacgaggccgtgctcaacgtcgacaagcttacctacgcaggcaaccttcgtacgctgcaatcgttgaacggaagcccgaagcacgtattcgctcgcgtcgacatctgcgatcgcgcggcactcgatacgctgttggccgcccaccggccgcgcgcgatcctgcatttcgcagcggaaagccacgtcgatcgctcgattcacggtccggccgagttcgttcagacgaacgtggtcggcacctttacgctgctcgaagccgcgcgtcagtactggggtgcgttgcccgaggtggagcaagccggcttccggttcctgcacgtgtcgaccgacgaagtgttcggttcgctgtccccgaccgatccacagttctccgaaacgacgccgtatgcgcccaacagcccgtattcggcgacgaaggctggctctgatcacctggtgcgtgcgtatcaccatacatacggcctgccgacgctgacgaccaattgctcgaacaactacggcccgtaccagttccccgaaaagctcattccgctgatgattgccaatgcactcgccggcaagccgctgcccgtctacggcgatggtaagaacgtgcgcgactggctgtacgtcggcgatcactgcagcgcgattcgcgaagtgctcgcgcgcggcgtgccgggcgagacgtacaacgtcggcggctggaacgaaatgacgaacctcgacgtcgtgcatacactgtgcgatctgctcgatagcgcgcggcccagggcgcaaggttcgtatcgcgatcagattgcatacgtgaaggatcgtccggggcacgatcgccgttacgcgatcgacgcgcgcaaactcgagcgcgaactcggctggaaaccggccgagacgttcgcgaccggcctcgcgaagacggtattctggtatctcgacaaccaggcgtggtccgacgaggtggcctcgggcgaataccgcaagtgggtcgagaccaactacgcagagcgcgtttga

SEQ ID NO: 284439 - DNA, 1048 bp, Unknown
  Bacterial polypeptide expressing nucleotide sequence isolated from the Sargasso Sea
tatgaaaatatttataacaggaggatgcggatttataggaagtaatttcattatcaagcaaattgatgatgaaaaaaacaatatattaaattatgataaattgacttatgctggaaatcttgataatcttagctcaataaataataacaagagatatgaatttatcaatggagatattactgatttttcaaccttaaaaagtgctatttttgattataagcctgatgccattatcaattttgctgcagaatctcatgttgaccgctctattaacaatcctatggattttgtaaatactaatatagttggaacagcaacattattaaacatatctaatttatattttaattctaaacctaattctgattttaaattttatcaaattagtactgatgaagtatatggctctcttggtgaaacaggtttatttacagaaaaatcattatataaaccaaattctccatattcctcaacaaaagctggctctgatcacttaactcgagcatggggcaaaacttatggtctccctgttataactactaattgttcaaataattatgggccttatcagtttccagaaaaattaattccattgataataacaaactgttttgatgaaaaacctttgcctatttacggtgacggttcaaatattagagattggttatatgttaatgatcattgcgatgctatttattctgttttaaataaatctgaaccacaaaaaacctacaatattggtggcaattttgagaaaacaaatattgaaattgtaacagaaatatgtagaatacttgataaaaaacttccaagaaatcaaggtgaatcttacgagaatctaattacttatgttgaggataggccagctcatgattttcgctatgcaattgactctacaaaaataaaaaatgaaattggctggtcgcccaaagaatcatttaaaagcggtataaataagactgttaattggtatttggataacaaagaatggtggagaaaaattcaaaaaaacaaatatagccaggagcgattaggtaaaattaattaa

SEQ ID NO: 284440 - DNA, 1021 bp, Unknown
  Bacterial polypeptide expressing nucleotide sequence isolated from the Sargasso Sea
atcgtaactggtggttcaggttttataggaagtaatttaataagcccattattgaaaaaaaaatacttcgtgattaatgttgataagttaagttattccgcaaattcatataatgtaaaaaactttaaaaaaaatagaaattatatattttataaaactgatattaataaaacatctaaaattcttcaaatattaaacaaacataaaccaatcggaattttcaatttggctgcagaaacacatgtagatagatctattgacaaagcacatcactttatcaggtcaaatattgtaggtgtttatagtttgttagaagcaataaggaagtttgaaaataataaagtaaaaaaaattaaacttttacagatttccactgatgaagtttatggtgatataccaaataataaaaaagcagatgaaaatcataattacaatcccagctctccatattcagcctccaaagctgcagctgatcaatttataaaatcctatagtagaacttacggattaaaaataatgattgcacatccttgtaataattatggaccaaatcaacatccagaaaaatttataccaaaaatgatatttaatattcttaataataaacctttgccagtttatggtgatggaaaaaatgtaagagaatggatttacgtaaaagataattgtgaggcacttttaaaaatatttttaaagggaaaaaataatcaaaattacaatataggaacaggagtaagattaaaaaatacagaaatagcaaaaaaacttttagatattgcaaaaaagagtgttactgacaaacctaataaaactaaaatagtttttgttaaagatagacccggtcatgatgaaagatatgcattaaattcaaaacttataaaaaaagagattaaatggaaacataaaatatctatatctaatggtttattaaaaaccttggcgtggtattcaaaaaattacaattatttcaagcagatttctaaaaagaacataactaaaagattgggtttaaaactatgaa

SEQ ID NO: 284441 - DNA, 1024 bp, Unknown
  Bacterial polypeptide expressing nucleotide sequence isolated from the Sargasso Sea
aatgaaaaaaataattgtaaccggaggtttaggatttattggtagtaatctgataaaactgttaattgaaagaaactattttgtgattaatgtcgacaaaataagctacgcttcaaatttttacaatataaaaaatttttcttacaaaaaaaattataaattttttaaattagatatcaataataggtctggatttaaagatattttaaacaaatataaaccggttgcgatatataatttagcagctgagacacatgtagatagatcaatcgatagtcctgcagagtttataaaaagtaatattgttggggtttttaatttactagaaacatttcgtgaattcacaaaaaaaaataaaaagactaagttaattcatatatcaactgatgaagtttatggtgatgtattaaaaggtcgtagtaaagaaactgatacatataaaccaagttccccttatgctgcgtctaaggcatcatcagatcatttagtatattcttatgtgaggacatataaacttaatgcaattataactaactgttcaaataattatggtcctaatcaacacccagaaaaattaattcctaaattgatttacaatataatcaataacaaacccttacctttatacggcaaaggaaaaaattcgagagagtggatttttgtagatgatcattgtgaagctttattaaaggtttttagaaatggatctaaaggagaattttataatattggatccaatataaatattaacaatttagatattgcgaaattattaataaaaattgccaaaaagaaaattaaagtaggaaaaaaagtaaaaataaaatttattaaagatcgtccaggtcacgatattagatacgcacttgatagtaaaaaaattaaaaaaaaacttaagtggaaatctattacaagtcttaaaaggggtttgaataatacttttgactggtattttaaaaatatgaaatactatacatacttaaaaaaaaaggatatcacaaatagacttggagtaattaaatga

SEQ ID NO: 284442 - DNA, 946 bp, Unknown
  Bacterial polypeptide expressing nucleotide sequence isolated from the Sargasso Sea
aaaaatttttttgtaattaatgtagataaagtttcgtattcatccaatttttataatcataaagaatataaaaattcaaaaaaatacaaatttataaaatgtgacataaaagataaaaaatttaaaaatatcatatttaaatacaaacctacttgtatatttaatttagctgctgaaacacatgttgatagatcaatagacaatcctaaaaattttattcaaagtaatatagttggtgtttataacttacttgagtattttaaagaatattcagataaatttaaatccaaattaattcatatttcaacagatgaagtttatggagatattttaaaaggtcgtactacagaaaaatatccttattatccaagttcaccctatgctgcaagtaaagcggcatctgatcacttggtaagtgcttatgttagaacttataagatccctgcaattataaccaattgttcaaataattatggtcctaaacagcatcctgaaaaattaattccaaaattaatttacaatataataaataataaaccacttcccatatatggaaaaggaataaattctagagagtggatttatgtcaaagatcattgtgaagctttgtttaaagtttttaaaaaaggtaaaattggacaattttataatataggctcaaataaaaatcttaataatatacaagtatgtaaaagtcttttaaatatttctaaaaaattaataaatttaggaaataaagtgaaaataaattttgttattgataggccgggtcatgatattagatatgctttaaatagtaataaaattaggaaagaattgaattggaaaccaaaaattagttttgcgaaaggaataaaattaacttttaattggtacaatgataataaaaagtattacaaaacattatctaaaaaagatattttaaaaagattaggtaaaaaatgat

SEQ ID NO: 284443 - DNA, 979 bp, Unknown
  Bacterial polypeptide expressing nucleotide sequence isolated from the Sargasso Sea
atgaaaaagacaataattattactggaggacatggttttattggaaaaaatttaattgagtacttaaagggttactataatatagtaaatatagataattctatattaaaatcaccttttaaaactaaaaatcataaaatcattaacataaatagttccattggtaataaaaaggttatctctcaagttttaaaaaaatacagacctaaattaatatttaatttagctgcagaaacacacgttgataattcaataatgaaacctgaaaaaatagttaaaaataatatttttgagacttttaaatttttaataacaattaaagaaaatttaaatctattaagcaaaaattttaaatttattcaaatctctacagatgaggtttatggcagtataagaaaatattcaaaaaaaaaatttactgaaaattctaagttggagacaaattcaccttattccgcatcaaaagcttcttttgacttaatactactttcttttattaaaacttataaatttcctggtattattaccagaggttgtaataattttggattttaccagcattacgaaaaattaattccaaagataattaagtgttgtttttacggtaaaaaaattccaatttatgatagaggtcatcaggttagagagtggatttttgcaaaagatcattgcaaaattattaaacatatctctgaaaaaggagaaataggagaaatatataatattggttcaggttttagaatttcaaatattaaacttacaaaaaaaataattcaatacatgtctaagaaaaatttatcacaaaaaaaaattggatttgaattaatacaatatgttcaggatagaccaggtcatgattttaaatacgcgctaaatactgataaaattttcaaaaaatttaaaataaaatttaatcaaaaatttgattataatttaaataaaacaatagattggaatataaaatttttaaatggtaaat

SEQ ID NO: 284444 - DNA, 1003 bp, Unknown
  Bacterial polypeptide expressing nucleotide sequence isolated from the Sargasso Sea
atgaaaattttagtaacgggatgttatggttttataggatttaactttttaaaaaaattaattaaagaatataaagatgaatttgaagttactggtatcgatttattaaataattcttattcaaaattaaattatcaacaattgaatactggagagaattttgaatttttatctgagaacataattgacataaataaaattaattttaaaaaaaatgattttgatttagttatcaattttgcagctgaatcccacgttgatacatcaatttacaatccagatgtatttatacaaacaaacgttcttggggtaaataatttgttaaagttttgtttagaaaattcagtaaaaaaatatattcagatttctactgatgaagtctacggaagtacaagaaatcattattttgaagaaacagatatattgaatccttcctcgccatattcagctagtaaagctagtgcggacatggtatgcaatgcatacatgaagacatatgatatggatataaaaacgattaggcccgcaaacaattatggaccatttcaacagcctgaaaaattaattcctttctctatcagtaacattattgaaaataatgaggttgaaatatatggtgatggctcaaatattcgccattggttgtatgtaaaagatacggttgaaggcatctttaaggtgattgaaaaaggagaaagtggagagatttataatataggttctggtatctatcacaataacaatgaaattgctgaaaaattattatctaaatttaatttgtctaagaattcaataaagtacgtaaaagatcgacctggtcatgattttaagtatgctgtaaattttgataaattaagtaaccttggttggtccccaaaatatgattttgaaaacgctcttgaagaaactaccgaatggtatctagaaaacaaaaattggtggagtgaaggcattgctcaaataagaaaaaatagagatttaagatttaataaaaagcagtgaa

SEQ ID NO: 284445 - DNA, 1075 bp, Unknown
  Bacterial polypeptide expressing nucleotide sequence isolated from the Sargasso Sea
aatgaataaatatttagtcacaggcggagctggtttcattggatcatccttaataagaaaccttatgggcaaagaacaatgtgatgtcctgaatattgataaactaacttatgctgggaatctggataatctcaaatcagtagaatctaaatctggttatcaattccaccaaatggatatagtcgataaagaaagccttgacaagattattatagatttcgagccagattatattatgcatcttgccgctgaaagccatgttgacagatccatcgatgatcctagcacttttatctcaacaaatattatcggaacttacaatttgcttgaatcagttaggaattatctgggaacaatccctataagaaaagcagagaagtttaggtttcatcatatttccactgacgaagtttttggtagcctcgggtctgagggattttttacagaggagacaaagtatgatcccagttcgccttattcatcatcaaaagcttcatccgatcatcttgtgagagcatggaatagaacttatgacttgcctattgtgataaccaattgttctaataattatggaccataccaatttcctgagaaactaataccactcatgattattaatgcccttgatggtaagccactcccaatttatggcaatggtttgcaagttagagattggttatatgtggatgatcacacagatgctttaatagaggttgtattgaatggaaagataggggaaacatacaatattggtggcagatgcgaaaaaaccaacattgaacttgttcaactcatatgtgagattctttctcaggaactgatcaagaaagggagtaataagaaagatctcaaagatcaaattacatttgttgatgataggcctggccatgatcagagatatgcaattgatagctcgaagatttctaatgaacttgggtggaaaccaaaagagagcattgagtctggtcttgaaaaaacaatcaactggtatctagagaatgaatcatggtatcaaaagataattaatcaaagctatgatggtcatagattaggattgaaaggagcagaaaaatga

SEQ ID NO: 284446 - DNA, 569 bp, Unknown
  Bacterial polypeptide expressing nucleotide sequence isolated from the Sargasso Sea
atcttcagatcatttagtacgtgcatggcatagaacttttggtctgccagtgactatttcaaattgttctaataattatggcccttatcaatttcctgaaaaattaattcctttaatgattattaattgtttatctaataaatcacttccagtttatggaaaaggtgaaaatattcgtgattggctttacgtagaagaccattgtaaagcaataaatttaatcttacaggaaggcgcgattggtgatacttacaatattggaggtaacaatgaaattagtaatttaaatattgttgaatctatttgtacaattttagataaattaaaaccttctaattctggtaagtcttataatcaaatgataagctttgtaaaagatcgccctgggcatgatttcagatatgcaattaatactacaaagattaaaaaagatttaaattgggaaccaaaagaaacctttgattcaggtttaataaagacaattaaatggtatctagaaaatgaaaactggtggaaaaaaacacaaaaaaatatttataaacaagaaagacttggtgtatcgccttgaa

SEQ ID NO: 284447 - DNA, 1060 bp, Unknown
  Bacterial polypeptide expressing nucleotide sequence isolated from the Sargasso Sea
atgaatattttggttacaggcggcgctgggttcataggctcaaatttggtcagattcctgataaatgagacgaattctaatgtgataaatattgattcactaacatatgcaggaaatttagagtctttagatagcatcagcagtagtgaccgctattcctttgaaaatatagatatttctgatagttcatcactgaagaaaatcataagtcaatattctccagacgttatttttcaccttgcagcagaatctcatgtggatagatcaattgacgatcctgaagtttttctcaagactaacattttaggcacttttaatttgttgaaactttcaagtgatcatataaatcaatacagcgaaaaaagaaaatctaagtttagatttattcatgtctcaactgatgaggtatttggagatcttaaacttaatgatccaccatttggagagactacagcatataatccaagctctccgtatgcagccagtaaagctagttcagatcacttagttagagcatggcataaaacctatgattttccttcaatcattacaaactgttcaaacaattatggccccaaccaatttcctgaaaaattaatacctctaattataatgaacgcaatcaatcaaaaacccttaccaatctatggagacggaagtcaaataagagactggttatatgtcgaagaccatgtaaaagctcttcacatgttggcagagaagggacttataggagagacttacaatattggctctcaaaatgaaattaaaaacattgatctggtaaaaaagatctgtaatgtacttgatcaaatcagacctcaaaagtctatgcaatatgaagatcttatcaaatatgttgatgatagacctggacatgataaacgttatgctataaatccaaagaaaatattttctcaaattggttggcaacctgaagaaaaatttgatggcggacttaaaaagactattaagtggtatttagaaaacgaaagctggtgcaaaaacattgaagatggaagctatttgactagacaagggctattaacaaagaaatgac

SEQ ID NO: 284448 - DNA, 718 bp, Unknown
  Bacterial polypeptide expressing nucleotide sequence isolated from the Sargasso Sea
ttatcttttagaataattagaaaaaacaataagttaaacaaaaagaaaattaaattagtacatgtttcaactgatgaagttttcggtgatatacctaacaaaaaaaggtctaatgaaaaatatccttattcacctagttctccttattcagcatcgaaagctagtgcagaccacttaataaagtcttatataaggacatacaaaatacctgccattatttcaaactgttcaaataattacggtcctaatcagtttccagaaaaattaataccaaaaattatttttaatatcgttaacaataaacctctgcctatttatggaaaagggaagaattctagagaatggatttatgttaatgaccactgtgaagccttattcatgctttatttaaaaggtagaaatggggaaagttataatattggaagtaataaaaacttaagaaatatagatcttgtaaaaaaaatattattcttaatgaaaaaaaagaaaattaaaatcggaaaaaaagtgaaaatacaatttgtgaaggacagacctgggcatgactttagatatgctcttaacagtaaaaaaataaggaaagatataaaatggaaacctagaactaatattaatattggccttaatttaacaataaattggtatcttaataatttaagtttttttaaaaatatatctaaaaaatttcatattaaaaggataggcttaaaaatatgat

SEQ ID NO: 284449 - DNA, 727 bp, Unknown
  Bacterial polypeptide expressing nucleotide sequence isolated from the Sargasso Sea
attgggagtattcaatattttagaagttttcagaaatttttcaaaaaaaaacaaaaaatcaaaattgattcacatttctactgatgaagtgtacggagatattttgaatggaagaactaaagagacctatccttataatcctagttcaccttacgcagcctcaaaggcatcttcagatcacttagtttcttcatatgttagaacttataagattcgggcaattgtaaccaattgttcaaataattatggtcctaaacaacatcctgaaaaattaattccaaaattaatctataacatcctatcaaataaaaaattaccaatatatggcaagggacaaaattccagagaatggatatacgtaaaagatcattgcgaagccttaataaaaatttttgagaaaggaaaaataggaaatttttataatattggttcaaacaaaaatttaataaatttggaaatttcaaaaaaattattaaaaattgctaaaaagaaaattaaagttggtaagaatgtaaaaatagaatttgttaaagatagaccaggacatgatattaggtatgctttgaatagtaacaagttaataaaacaattgaaatggaagcctcaaacaaattttgaaacaggtttaaaacaaacttttgaatggtatttaaataatcttaactactataaatctttaaataaaaaggatattttaaaccgactaggtttaaaatctaattcttaa

SEQ ID NO: 284450 - DNA, 898 bp, Unknown
  Bacterial polypeptide expressing nucleotide sequence isolated from the Sargasso Sea
attatgcgatatttgtgatgaagaccagttaaagataattttcaaaaaatatgagcctaatgttatttttcacctcgctgcagaaagtcatgtagatcgatcaatcttaagccctaaacaatttattgaaactaatattatgggcacctttaacttattaaatttaagtttagacttatggaattctcgcaaaagtgagagcaattatttttttagatttcatcatatctctacagatgaggtttttggagatttaggtgattcagacctgaaattccaagagtcatctttatacagaccgagctcaccttatgcagcatctaaggcaagttctgatcatttagttcgttcttgggggagaacttatggattgccttatatacttacgaattgttcaaataattatggtccatatcaatttcctgaaaaattaataccccaaactatacttaatgcaataaatgggttagatatccctgtatatggagatggaaatcaaattagagattggctttatgttgatgatcatgttcaggctttattatgtgctgttttccaggctgaacaaaatcaaaattacaatattggaggtaataatgagatcaagaatatcgatgttgttaaccaaatatgtaagattttggataatgaagtcaaggaaaaaccgcaatctatcagctcctttgctgatctaatttcatatgtcacagataggccgggtcacgatttaaaatatgcaatagatgcatcaaaaattcataaagagctcggatggactccaaatgagaattttgaaacaggaattaaaaaaactgttttgtggtatcttgataatcaggtttggtggaaacaaatcttgcaggggacatatcaagaagaaaaaaaaataaaaaaatga

SEQ ID NO: 284451 - DNA, 577 bp, Unknown
  Bacterial polypeptide expressing nucleotide sequence isolated from the Sargasso Sea
tatgaaaaatattatagtgacaggtgggctaggttttattggtagtaatctaatagaacttttaataagtaaaaattatagagttataaatatagataaagttacttattcctcaaatttttataacgtaaaaaatatacaaaaaagtaagctatataagtttgttagatcagaccttaataataaaaaaaaattatcaaatattataaagaaatactctcctgtttgtatatttaatgttgcggctgaaacacatgttgataggtcaattgatagtccaaaaaattttatacttagtaatattttaggagtttttaatcttttggaatcttttagggaacattgtaaaaaaaataaaggaacaaaactaattcacatatctacagacgaagtttatggagatgttttgaaaggtagatctaaagagagtgatgcatataaaccaagttcaccttattctgcttcaaaggcatcatcggatcatttagtttattcttatataagaacatatggaattccagctataataacaaattgctctaataattatggtccaaaacaacatcctgaaaaataa

SEQ ID NO: 284452 - DNA, 810 bp, Unknown
  Bacterial polypeptide expressing nucleotide sequence isolated from the Sargasso Sea
atactaattcttatgattttgttaaaggagatatttgtgataaatcgctagtaaatgaactttttgaaaaatatagttttggtggggtttttcattttgcagcaaaaagtcatgtacataggtcgattgatggaccaggcgcatttataaatacgaatatttttggaacttacaacctactagaaacttcaaggaaatattttaaagatggtaactcacattttaagtttattcacgtctcaacagatgaggtatatggtgatcttgatgatgacggttacttcactgaaacgactccatataatcctagttctccttattcagcatctaaagcatcttctgatcatttagctagagcttggtatcgcacatttcaattaccagttatcgttacaaattgctctaataattatgggccaatgcaattccccgagaaattaattccgcttatgattattaactgtctagattcaaaagatttgccagtatatggggatggtcaaaatgttagggattggttgtatgttgatgatcactgcagtgcaattaaaactatatatgagaatggttctattggagaaacttataatattggcggtaataacgaaattaaaaatatagatattgttaacaccgtgtgttcaatacttgatgaacttaaacctgcaaaaaatggtaagtcctatcgtcatcaaattaaatttgttaaagataggcctggtcatgattatagatatgctattaatgctgaaaaaatacaaaaagaattaaattggtttcctggagaatcatttgaaactaggtattaga

SEQ ID NO: 284453 - DNA, 688 bp, Unknown
  Bacterial polypeptide expressing nucleotide sequence isolated from the Sargasso Sea
tctaaaaaaaataattttagatttattatggtttcaactgatgaagtttacggttctattgaaaaaggtgaaagagctaaagaaattaacccttataaacccagtagtccttattcagcgtcgaaggcttcagctgataatttagcagaagcatggtttaaaacctataatcttcctgtaattacaacaaatactacaaataattatgggcccttacaatttcctgaaaaattaattccattaacaatatctaaaattctaaatgaacaagagattcctatctacggaaagggaaatcaaataagagattggatccatgttagcgatcatgttaagggccttatttatgttagaaataatggaaaaattggtgaaaagtataatattggcaatgaatgtgaaaaaaccaatttagaggttgtatcggatatttgctccaaaatagatataaaattaaaaagtaaaaaagatagctataacttaataacatttgtagaggatagacctggccatgactttagatattcacttgataatgaaaaaatcaaaaatttaggctggaaacctgaaatcgactggaatagcggtatagaaaatacaatagattggtatattaacaataatgaatggatcaaaaaaatattagaaaataattataaaggtgaaagattaggtcttgataaataat

SEQ ID NO: 284454 - DNA, 816 bp, Unknown
  Bacterial polypeptide expressing nucleotide sequence isolated from the Sargasso Sea
agcaagcaagaatctattggagtcaattagaaaataataagaaagtaggtttccgttttcatcatatttctacggatgaagtctatggagatttacctcatccagataaatatttatacgtcggatcaaaccccatctcgcagacgcgcaataaagccaagcctcaaaagcaccaacttggctctacgttatttaccgagaacacatcctatgcacctagctctccatactcagcatctaaagcaagctccgaccatttagtgagggcgtggaatcgaacctataatttgccaacaattgtaacgaattgttctaataactatggtccgtttcattttcctgaaaagtttattccactcataatattaaattgtctgcaaggtaaaccgttaccagtttatggtaatggtcaacagatcagagattggctatatgttgaagatcatgcaagagcattggtattggtggctactaccggagagatagctgaaacctacaatatcggcggtcataacgaaaaaagaaatattgaaatagtaaccattatctgtgagctgctggaaaaattggcaccgcgaaagccaaaaggtattaaacactataaagatctcatcaattttgtaaaagatcgtgcagggcatgatttacgttatgccatcaatgctagcaagatcgctgaccaacttaattggaagccagtcgaaacatttgaaactggaatcaaaaaaactgttcaatggtatatagataatcaagactggtgtcaaaatgtgcaggatggcagctatcaaggagagcgtttaggcctagtctaaa

SEQ ID NO: 284455 - DNA, 963 bp, Unknown
  Bacterial polypeptide expressing nucleotide sequence isolated from the Sargasso Sea
gtgacaggcggtgcaggctttatcggtgccaactttgctctcgactggctggcacatgtggatgagcccgtggtcaatatcgacaagctgacctatgcgggaaatctcgagaatctggccagcctgaacggcgatgcccgccatgtgtttgtgcaggccgatatcggcgacagcgccaagcttgcgcaattgctggcgcagcaccagcctcgcgccgtggtgaactttgcggccgagtcgcatgtggaccgctccatccatggtcccgaggatttcatccagaccaatgtggtgggcactttccgcctgctggaagcggtacgcgcctattggcatggtctgcaaggcgaggccaagtccggcttccgctttttgcatgtctctaccgacgaggtctatggcacgctggcgccgaccgatccagcgtttaccgaagagcacaattacgagcccaacagcccgtactcggccagcaaggcagccagcgaccatctggtgcgggcctggcatcacacctacggcttgccggtgctgacgaccaattgcagcaacaactacggcccgctgcatttcccggaaaagctgatcccgctggtcattgtcaatgcgctggcgggcaagccgctgcccatctacggcgacggcatgcaggtgcgtgactggctctatgtgcgcgaccattgcagcgccatccgccgtgttctcgaggctggccagttgggcgagacctataacgtgggcggctggaacgagaaggccaatatcgatatcgtcaagaccgtgtgcagcttgctcgacgagttgcgcccgcgcgccgacggcaagacctatgccgagcagatcacctatgtgaccgaccgtcccggccatgatcgccgctatgcgatcgatgcacgcaagctggaacgcgagctgggctggaagcctgccgagaccttcgagaccggcattcgcaagaccgtg

SEQ ID NO: 284456 - DNA, 730 bp, Unknown
  Bacterial polypeptide expressing nucleotide sequence isolated from the Sargasso Sea
tggcactttaaacttattaaatgtatctagaaatttttttgatagcttaagtgctagaaatagggaaggtttcatttttcatcatatttctactgatgaagtatatggagatcttgagataaacgacccaccctttaaagaaataaatagatatcaaccaaactcaccatattcagcatcaaaagctagctcagatcatttagtaagagcatggaacagaacatatgggttaccaactttagtatcaaattgttctaacaattatgggccttttcaatgtatagaaaaattaataccaatgacaattacaaatataattaaaggtcaaaaaattcctatttatggaaatggtcttcaaattagagactggcttcatgtcaatgatcatgtagatgctttaattaagatagtattgaatggcaaaagtaatgaaacatataacatcggtactaaaaatgaaaaaacaaacatagaagttattaaaaaaatttgtgagatcatggattccattcatcctaaaaaaatctcaattgattcatataaaaaccttattgattttgttgaagatagacctggtcacgacaaaagatattctattgatcccacaaagataaataatcagcttgggtggcaagggaatattgatttcgaagaaggccttaaaaatactatacaatggtacatcgacaatcaaaattggtggcagtctgaggaagatttcataaaatga

SEQ ID NO: 284457 - DNA, 935 bp, Unknown
  Bacterial polypeptide expressing nucleotide sequence isolated from the Sargasso Sea
gtcaaattttatacataaaatattacaaaaagattcatcgatctatatcataaatcttgataagctaacctatgcaggaaatttgatgaatctttcttctatatcaactaagagatatacttttgtaagaggagatatctgtgataaaggcttagtaaaatctttattcaatgaatataattttcaatctgttgttcattttgcagctgaaagtcacgttgatcgatctattgatggtccttcggcgtttatacaaactaatattgtggggactcttaatttattagagcattcaaaaaagttttttttaaaatcaaaaaacaaggattttaaatttttacatgtatccacagatgaggtttatggatcgcttggtaataatgggaaatttcttgaaaatacaccctacgctcctagttcaccttattcagcatcgaaagcaggttcagatcatcttgtacgtgcttggaataaaacatatgatttacctattttaataacaaattgttctaacaattatggaccttatcaatttccagaaaaattaatacctttaatgataataagagctataaataataaacctttaccagtttatggtaatggggataatgttagggattggttatatgttttagatcattgtgatgctatattaactgttttagataggggtgagataggtcagacttataacgtaggtggaaataatgaaataaaaaatattgatgtcgtcgaatccatatgtgatattattgatcatttaatcccgaagggtaattccaaatctcataaagaattaatacatttcgtacaagaccgacctgggcatgattttcgttatgcaatagatgcaagtaaattaaattctaagctaggttgggtctccaaagagtcttttgaaagtggactagagaaacaattcggtggtatat

SEQ ID NO: 284458 - DNA, 685 bp, Unknown
  Bacterial polypeptide expressing nucleotide sequence isolated from the Sargasso Sea
ttatttaaattcagactcaataaacgttccacaaaaatttagatttcaccatatatcaactgacgaagtgtttgggagcttaggtaaaacgggcctttttgatgaattttctcaatacaaaccaagttcaccttattcagcctctaaagcaagttctgatcatctagtgagagcttggaatcatacatttggaataccaacaataataactaattgctcaaataattatggacctaatcaatatcctgagaaacttattccattaactatcttaaatgcacttgaaggaaaagatattcctatttatggtaacggtgaacaaataagggattggttatatgttgatgatcatgcggatgccttgtatcaaattcttcaaaaaggcaaaattggagaaacttataatattggaggtaataacgaaataacaaatattgaacttgtaaagaaaatttgctcgatactagatggaaaaataaaagtaaagccatctaaaataaaaagttttgttgagctaataagttttgtccaagatagaccaggtcatgactatagatatggtattgatgcaagtaaattaaaaaatgaattaaattgggaaccaagaacaagtctagatttaggattattaaaaactgtagattggtacataaataatcaaacgtttaagtcaactttgatataa

SEQ ID NO: 284459 - DNA, 805 bp, Unknown
  Bacterial polypeptide expressing nucleotide sequence isolated from the Sargasso Sea
gatgcgcatccttattaccggcggcgccggcttcatcggttcagctctgattcgccatctgatccaaagtaccgagcatgaagtactcaacctcgacaagttgacctacgccggcaacctggaatcgcttgcccccgttgatgacaacccgcgttaccgcttcgtccaggcggatgtcgccgacagccctgtggtcgcgcagacgctggccgagttccagcccgaggccatcatgcacctggctgccgagtctcatgtcgatcgctccatcgatggcccagcggcctttatccagaccaatatcgtcggcacctacagcctgctggaaagcacccgcacctattggcttggcctgagcgcagaacgcaaagcggcgtttcgctttcatcacatctcgaccgacgaggtgtatggcgacctgcacggtgtcgatgacctcttcaccgaaaccactccctacgcgcccagctcgccttattcggcgagcaaggcggcgtccgaccatctggtgcgtgcctggcagcgcacctatggcctgccggtgctgatcaccaactgctcgaacaactacggcccctatcatttccccgaaaagctgatcccactgatgatcctcaacgccctggcgggcaaaccgctgccggtgtatggcaacggtcagcaggtgcgcgactggctgtatgtggaagaccatgcgcgcgccctgctcaaggtggtcagcgaaggtcaggtcggcgagacctacaacatcggcggccataatgaacagaagaacctggatgtggtacgcgctatctgcgcgctg

SEQ ID NO: 284460 - DNA, 694 bp, Unknown
  Bacterial polypeptide expressing nucleotide sequence isolated from the Sargasso Sea
aaataaggattttagatttttacatatatcaacagatgaagtatatggttcacttggaagcgatggaaaatttcttgaatctacgccttacgacccaagttcaccatattctgcctcaaaagcaggatcagaccacctcgttagagcatggaaccgcacatatggtttaccaacattaataacaaattgttctaataattatggtccatatcaatttcctgaaaaattaattccactaataatcattaattgtttaaatgataaacccttaccaatatatgggaaaggtgctaatgtaagagattggttatatgttaaagatcattgtgaagccattagctatgttttaaataatggagagattggacagacatataacattggaggcgacaacgaaataaaaaatattgatgttgtcaaaacaatatgctctatattggatgatatattgccgaaacaagatggtaattcgtattcagaattaataagctttgttaaagatcgcccgggtcatgattttaggtatgctattgatgcagaaaaaataaaaacaaacttaggatgggaacctaaagaatcttttgatagtggactaagaaaaaccattcattggtatttaaataatacaacttggtggaaatcaatacaaaaaaatacatatgaacaggaaagattaggggtaattaaatcatga

SEQ ID NO: 284461 - DNA, 769 bp, Unknown
  Bacterial polypeptide expressing nucleotide sequence isolated from the Sargasso Sea
catgaaaattctggtcaccggcggtgcaggctttatcggttccgccgttattcgtcacatcatcagcaacacggacgacagtgtcgtcaatgtggacaagctcacctatgccggcaacctggaaagcctgctcagtgtcagcgacagtccccgctatacctttgaaaaagtggatatttgtgaccggcataccctggatggggtattacaacggcaccagcccgatgtgatcatgcacctcgccgcagaaagccacgtggaccgttccattgatggcccggcggccttcatggaaaccaacatcatagggacctacaccttgctggaggcggcacgccaatactggaacagcctggacgacactgcccaacaggctttccgcttccatcacatctccaccgatgaagtctatggtgacctggaaggtccggaagacctgtttactgaaaccaccccttatgcgcccagctccccgtattccgccagcaaggccagctccgaccatctggtgcgcgcctggttgcggacctatggctttcccacactgatcaccaactgctcaaacaattacgggccttaccacttcccggaaaagctcatcccactgatgatcctcaatgccctggaaggaaaacctttaccggtgtacggccagggtacccaggtacgtgactggctctacgtggaagaccatgcccgcgccctctacaaagtggcaactgaaggcaaagtgggggagacctacaatatcggcggccacaacgaaaaa

SEQ ID NO: 284462 - DNA, 899 bp, Unknown
  Bacterial polypeptide expressing nucleotide sequence isolated from the Sargasso Sea
attgggctcagcagtagttcgccatcttataaacgacactgaccacacagtggttaatttagataagctgacctacgcgggtaacttagagtcattaacacctgtttcagacagcgaccgctatagctttgaacaagttgatatttgtgatgctgaagaagtaaagcgtgtgttcaatacgcatcagcctgatatcattatgcaccttgctgctgaatctcatgtagatcgctctattgatggcccgggcgagtttattcaaactaacgtagtgggcacatacacgttgcttgagcaagcaagagcatattggtctgaacttgagggcgataaaaaagctgggtttaagttccatcatatttctacagacgaagtatacggcgaccttcctcatccagatgaagttgagccgggaacgaagctaccactctttacagaaactaccccgtatgcaccaagttcaccttactcagcaagtaaggcaagttcagatcagctagttcgttcatggcttcgcacatacaagctaccaacgctcgtaactaactgctcaaacaattacggcccgtaccatttcccagaaaagcttattccattagttattttaaatgcactagctggtaagccgctgcctgtatatggcaaaggtaatcaaattcgtgattggttgtatgttgaagaccatgcccgcgcgttggtagtggttgcgcttaatggtgaaatcggtgaaacctacaacattggtggccacaacgaaaagcagaacattgaagtggtgcaaactatctgttcaattctagatgaagttaagccaaaagataccaaatacgctgagcaaattacttacgttcaagaccgcccaggccacgacatgcgctacgctattgatgcgagcaaaa

SEQ ID NO: 284463 - DNA, 690 bp, Unknown
  Bacterial polypeptide expressing nucleotide sequence isolated from the Sargasso Sea
atatttctactgatgaagtatatggcgaccttcctcacccagatgaagttgaaccaggcacagaactaccactttttacagaaacaacaccatatgcaccaagctctccatactcagctagtaaagcgagctcagatcagctagtgcgttcgtggcttcgcacatataagctaccaacgcttgtaactaactgctcgaataactacggcccttaccacttcccagaaaagcttattccattggttattctaaatgcactagctggaaagccgctgcctgtatatggtaaaggtaaccaaattcgtgactggctgtatgttgaagaccacgcacgtgcattggtggtggtcgcgcttaacggcgagatcggtgaaacctataatattggtggccacaacgaaaagcagaacattgaagtggtgcaaactatctgttcaattctggatgaagttaagccaaaagatagcaaatacgcagatcaaattacttatgtgcaagatcgcccaggccatgatatgcgctacgccattgatgcaagcaagattgaacgtgaacttggctggaaacctcaagaaaccttcgaaagcggtattcgcaaaactgttgagtggtatttagcgaatgaaggctggtggaaagcggttcttgacggcagttaccaaggcgagcgcttaggtagcggaagctgat

SEQ ID NO: 284464 - DNA, 745 bp, Unknown
  Bacterial polypeptide expressing nucleotide sequence isolated from the Sargasso Sea
aatattttagggacatactccatgcttgaggcttcaaggctatatctaacaaagcatcttgaaaagaaaaataatttcctttttcatcatatctctacagatgaagtatatggagatttaaaagatagcaatgatttatttaacgagaacactaagtatgatccatcatcaccatattctgcatctaaagccagttcagatcaccttgttagagcttggggaagcacctatgaattaccaatagttattacgaattgttctaataattatggaccctatcattttccagaaaaattgattcctaggataattttaaatgctattcatggaaaagcattaccagtctatggaaatggccaacagattagggattggctgtatgttgacgatcatgctagggctcttctaaaagtattattccaatccaagattggtgaaacttataatattggcggccataacgaaattaaaaatatcaatgttgtagaatccatatgtattctgttggaagacttgcttccagacaagccagatggtgtcaagttttacaaggatctaattgagtttgttgatgataggccaggacatgatgaaagatatgctattgatgccacaaagattaataatgagctcggatgggagccaattgagacttttgagtctggtttaaaaaaaaccgtcaagtggtatttagataataaggattggtgggaaaatatcttaaaaaataaacacaaactataaa

SEQ ID NO: 284465 - DNA, 709 bp, Unknown
  Bacterial polypeptide expressing nucleotide sequence isolated from the Sargasso Sea
gcagctaagagtcgattccgtttcatcatatttcacagatgaagtctatggtgatttgctgcattctgatgaagtgttaccagatgtaacattgcctcttttcactgaatcaacaccttatgcaccaagcagtccgtattcagcctctaaagcttcaagtgaccatctcgtacgagcatggcttcgtacctacggatttccaaccatagtgacaaactgctcaaataactatggtccttatcattttcctgaaaagctaatccccctagtgattttaaatgcacttgagggcaaacctttgccaatttatgggaaaggtgaccagatccgtgattggttgtatgttgaagaccatgctcgcgcactatacaaagtggttacagaaggtcaaattggcgaaacttacaatatcggcggacataacgagaaacaaaatttagaagtcgtgcagactatttgcactattcttgatgctctcgttccaaaggcaagttcgtatgcagagcaaattacttatgttactgacagacctggacatgataggcgatatgcaatcgatgcctctaagatgagtcgcgagctaaattggcaaccgcaagaaacctttgaaacaggcttacgcaaaacagttgaatggtatttagcaaatcaagaatggtgccagcatgtacaagatggtacttatcagcgagagcgcttgggcatttaa

SEQ ID NO: 284466 - DNA, 611 bp, Unknown
  Bacterial polypeptide expressing nucleotide sequence isolated from the Sargasso Sea
gcccagctcgccctactcggccagcaaggcctcgtcggatcaccttgtgcgcgcctggcagcgtacctacgggctgccggtgctgatcaccaactgctcgaacaactatgggccgtatcacttccccgagaagctgatcccactggtcatcctcaatgccctcgatggcaagccgctgccggtctacggcgatggctcgcagatccgcgactggctgttcgtcgaggatcacgcccgcgcgttgttcaaggtggtcagcgaaggtgtggtcggcgagacctacaacatcggcggccacaacgagcagaagaacatcgaggtggtgcgcggtatctgcgcactgttggaagagctggcgccgagcaagcctgccgggcttgcgcgctatgaagacctgatcaccttcgtcaaggatcgcccgggccacgacctgcgctacgccatcgacgccagcaagatcgagcgtgaactcggctgggtgccgcaggaaaccttccagaccggcctgcgcaagaccgtgcagtggtacctggaaaacctcgaatggtgccgtcgtgttcaggacggcagctatcaacgcgagcgccttggcgccctggagaacgcatgaa

SEQ ID NO: 284467 - DNA, 913 bp, Unknown
  Bacterial polypeptide expressing nucleotide sequence isolated from the Sargasso Sea
ctcagccctaatccgccacctgatccagcacaccgagcacgaggtgctcaacctggacaagctgacttacgccggcaacctcgagtcgctgaccagcatcgcgtccaacagccgctatgagtttgtccaggccgatatcatcgaccaggccaccgtcagcgccttgctcgcacgcttcgaacccgatgcgatcatgcacttggcggccgagtcccatgtcgaccgctccattgacggcccgtcggattttatccagaccaacatcgttggcacctacagcctgctggaagccacgcgagcctattggcagaagctggcagagccggcaaaaggcgcattccgtttccaccacatctccactgatgaggtgtatggcgacctgcacggcgtggacgacctcttcaccgagaccacgccttacgcaccgagctcgccgtattccgcgagcaaggcagcgtccgaccacctggtacgcgcctggcagcgcacctatggcctgccggtgctattgaccaactgctcgaacaattacgggccgttccatttccccgaaaaattgatcccgctggtgattctaaacgccctggcgggcaagccactgccggtgtatggcgatggtctgcaggtgcgtgactggctgttcgtcgaggatcatgcccgtgcgctgctcacagtggtcaccactggggttgtgggcgaaacctacaatatcggcggccacaacgaacagaagaacatcgacgtggtacgtggcatctgcgccctgctggaagaactggcgccgcaacgcccagccggtgtggagaaattcactgacctgatcaccttcgtcaaggatcgcccaggccacgaccaacgctacgccatcgacgccagcaagatcgaacgcgaactgggctgggtcccggaagaa

SEQ ID NO: 284468 - DNA, 682 bp, Unknown
  Bacterial polypeptide expressing nucleotide sequence isolated from the Sargasso Sea
atgttagtaacaggaggttgtgggtttattgggtcaaattttattcaatatgtattacaaaagaatccatatgtagatattatcaaccttgataaattaacttatgcaggtaatttgatgaatctttcttctttaccaaatgataggtatacctttataaaaggagatatttgtgataaagataaaatagaagctttatttaataaatataattttgaatatgttgttcattttgcagccgaaagtcatgtagatcgatctattgatgggcctgctgagtttatacaaactaatattgtaggcactcttaatttgctagagcattctaaaaaatttgtttttgaatcaaacaaaaaggatttcaaatttttgcatgtatctacagatgaggtttatggatcgcttggtaataaaggaaagttccatgaaaatacaccttatgctcctagttcaccatattcagcatccaaagcaggttcagatcatcttgtacgtgcttggaataaaacatatgacttacctatactaataaccaattgctcaaataattatggtccttatcagtttcctgaaaaattagttcctttaatgattattaatgctttgaatgataaacccttaccaatatacggcaaaggagataatgttagggattggttatatgttttagatccattgtgat

SEQ ID NO: 284469 - DNA, 643 bp, Unknown
  Bacterial polypeptide expressing nucleotide sequence isolated from the Sargasso Sea
ttgttcctagagacaacaccctatgctccgagttcgccatattcggcaagtaaggccagttcagatcatttagttcgagcttggcatcgaacttatggactaccaacaatgattaccaattgttcaaataattatggtccttatcatttccctgaaaaattgattcctttagtgattttgaatgctttagaaggtaaggcacttccaatttatggtaaaggtgatcaaattcgcgattggttatatgtagaagaccacgctagagcattatataaagtggtgactgaaggtgttgtcggagagacgtacaacattggcgggcacaatgaaaaacaaaacattgaagtcgtgaaaacgatttgtaagattttagatgagttgagacctcaagcgaatgcggaaccttatgaaagtctaattacttttgtgaaggatcgccctggtcacgatttacgctatgcaattgatgcaagcaaaattcaaaaagaccttggttgggtgcctgaagaaagttttgaaacgggtttaagaaaaaccgttgaatggtatttgaataaccaagcgtgggttcaacatattcaaagtggtgaatatcaaaattggatcaatcaacagtatcaggttgcagaagaaacaaattaag

SEQ ID NO: 284470 - DNA, 768 bp, Unknown
  Bacterial polypeptide expressing nucleotide sequence isolated from the Sargasso Sea
tatgaagaatattcttataacaggtggttgtggttttattgggtcaaattttattcatcatctaattgataaagaagaatcttattatattgttaatctagataaacttacgtatgcaggtaatatttcaaatctaagtaagattccagattcctcatattcacatgtccaaggagacatatgtgattcaattttagtggattcactttttaaagagtatcaatttgaatccattatacattttgcagcggaaagtcatgttgaccgttctatagatggtccttctagttttattcaaacaaatataatgggaacctttaatctccttgagcatgcaagagcacatttttctaaaatgaaaaataagaatttcagatttttacatgtgtcaacagatgaggtatatggttcgcttggaagcaatggaaaatttcttgaatctactccttacgacccaagttcaccatattctgcctcaaaagcaggatcagaccacctcgttagagcatggaatcgcacctatggtttaccaacattaataacaaattgttctaataattatggtccatatcaatttcctgaaaaattaattcctctaataatcattaattgtttaaatgataaaccattaccagtatacggggaaggtactaatgtaagagactggttatatgttaaagatcattgtgaagccattagctatgttttaaataatggaaaaattggacagacatataacattggaggcgacaacgaaataaaaaatat

SEQ ID NO: 284471 - DNA, 667 bp, Unknown
  Bacterial polypeptide expressing nucleotide sequence isolated from the Sargasso Sea
ctcaacaaggatagttttatatttcatcatatatcaacggatgaggtttatggagatttattaccatcagatgatccattttcagaggaaaatcgatatgtccctagttcaccatattctgcttcaaaagcatcttcagatcatttggtaagggcatggtatagaacttatgggttaccagtcctcataacaaattgttcaaataattttggaccttatcaaaatagagaaaaattaatacccacagtaatattaaatgctattaagggaatgaatataccaatctatggagatggcaaacaaattagagattggctttatgttgaagatcattgcgaagctcttcttaaagtaattaccgaaggagatatcggtgaaacttataatataggcggcaataatgaagttacaaacttagaactcattgaattaatttgtaatatgctcgaaaatatatgtccaaatatgaaacataagagtatttcaaagttttctgacctcatagaatttgttgatgatcgccctgggcatgatcaaaggtatgctatagactcaagtaaaataaaagaaagtcttggctgggagccaaaacatagctacaaagatgcaattgataaaactatcaaatggtacataagaacctatgaaggagaggttgcaaattgaa

SEQ ID NO: 284472 - DNA, 1072 bp, Unknown
  Bacterial polypeptide expressing nucleotide sequence isolated from the Sargasso Sea
aatgaagattttagtaactggcggtgcagggttcattggttctgcagttgttcgccacattatagaaaacaccgaagatagcgttgtaaatgttgataagctaacctatgcaggaaacttagagtccttggttaatgttgccggaagctcacgttatgcatttgaaaaagtagatatttgtgaccgttctgaactagatagagtttttgcaatacaccaaccagatgcagtgatgcatcttgcagcagaatctcatgtcgaccgttctatcactggccccagcgatttcatccagactaatattgtcggtacctatactttactagaatctgctagagaatattggacgaagctcgatagtcataaaaagaaggcttttcggttccatcatatttcaacagatgaagtttatggtgacttgctgcaccctgatgaagtgtcatcggatgtgacattgcctcttttcactgaatcaacaccttatgcacctagcagcccatattcagcctctaaagcttcaagcgatcatcttgtacgtgcttggttacgcacctatggtttaccgaccatagtcacgaattgttccaataactatggaccttatcattttcctgagaaattaatccctctggtgatcttaaatgcacttgagggaaaagctttgccaatttacggcaaaggtgaccagatccgcgattggctatatgtcgaagaccatgctcgcgcactatacaaagtggttacagaaggtcaaattggtgaaacctacaatatcggtgggcataacgagaagcaaaatttagaagttgtgcagaccatttgcactattcttgatgctctcgtccctaaagcaagttcatatgctgagcaaatcacctatgtgactgacagaccaggccatgatagaagatatgcaattgatgcctctaaaatgagtcgtgagttgaattggcatcctcaagagacctttgaaacaggtcttcaaaaaaccgttgaatggtatttagctaatcatgaatggtgtcaacacgttcaagacggtacatatcaacgcgagcgtttaggtatttaa

SEQ ID NO: 284473 - DNA, 1054 bp, Unknown
  Bacterial polypeptide expressing nucleotide sequence isolated from the Sargasso Sea
gatggtcattctgatcaccgggggtgccggtttcattggttcgaacctgattcattattggctggctcaaaaccctggtgacacgatcgtcaattttgacgcgctgacctatgcagggaacctcgccaacctggctggggttgaatccaatcagaattatcatttttttcaaggggatctcagaaaacaggaacaactcgatgaggtgttcgaacagttttccatcgattcggtgattcaccttgctgcggaatcccatgtcgaccgcagcatcaacgatccttcaccattcattgatagcaacatcaaggggaccttccaacttcttgaaacggccaggaaccactggaaagaggatctgaaggatcaccgtttcctccatgtcagtaccgatgaagtttatggcacgttgggcaaagagggattatttaccgagcagaccccatttgcccccaattccccttactctgcctcgaaggcttccagcgatcaccttgtccgggcatggcatcatactttcggcatggacaccttaatcactcattgttcgaacaattatggtccctaccaatttcctgaaaaactgatcccgttgatgatccgaaactgtctttttggaaaagaattgccggtctatggagatggcctgcaggttcgtgactggctttatgtggaggaccattgcgaagccctggacgtggtttttcatcgaggccagtccggagaatcctacaacgtcggagggctgaatgagtgggaaaacctgagtatggtccgtcacatttgcaagttcatggattccgaacttggaaactctccagaacagtcttgtctgaacctgatacgccatattcaggaccgccccggtcacgaccggaggtatgcaattgatgcatcaaaaattcagaataaattgggttggcaaccccgccacctgatcggtgaaggcctcgaaaagaccatgcgatggtatctcgaccatcaggaatgggtggagcaggttacttcgggagcgtaccgtgattattacaagcatcattacgggactggctga

SEQ ID NO: 284474 - DNA, 1063 bp, Unknown
  Bacterial polypeptide expressing nucleotide sequence isolated from the Sargasso Sea
aatgctgttagttacgggtggggcggggttcatcggcggaaattttgtgctcgactggcttgctggatccaatgagtccatcgttaacctcgacatattgacctatgcgggtaacctggacaccttgaagtcactggaaagtgattcgcgtcatcattttgtgcgcggcgatatcggcgatcgtcaactggtgtcgaagttgctttctgaacaccggccgcgtgccgtgatcaatttcgcggctgagtcgcatgtcgaccggtcgatccatggcccgggcgacttcattcagacgaacgttgtcggtacattcaaccttctcgaatcggtacgcgcttactggtctggcctagtggaagaagagcgtcgcgcatttcgcttcctgcatgtttccaccgacgaggtgttcggcacacttggcgagaacgatccgccgttcactgaaacgaacgcgtacgaaccgaacagcccctattcggcgagcaaggcggcatcggatcatctggtgcgcgcttggcaccatacgtatgggttgcccgttgtgaccaccaattgctcgaacaactatggtccgtatcattttcccgagaaactgattccgctgatcatcctgaatgcgcttgcgggcaagccgctgccgatctatggagatggccagcagatccgcgactggctctacgtcagagatcactgctcggcaattcgcgccgttctggccgacggtgcgctcggcgagacttacaacgtcggtggctggaacgagaagccgaacatcgaagtcgtgtatgcgatctgtgcgatcctcgatgagttgcagccgcgtggcgatggccagtcgtatgcgactcagatcagctatgtgcaggaccggccagggcacgatcgtcgttacgcaatcgatgcacgcaaactcgaacgcgaactaggctggaaacccgctgaaacctttgaaaccggtatccgcaagactgttgagtggtacctgaagaatcagggttgggtaaagaacgtcacaagcggccaatatcgtacgtggatcgaccgccactacggagaacgatga

SEQ ID NO: 284475 - DNA, 1081 bp, Unknown
  Bacterial polypeptide expressing nucleotide sequence isolated from the Sargasso Sea
atgaaaattctagttacaggtggggcaggttttattggctctgcagtggttcgtcatattatcagcaatactcaagatagcgtaattaaccttgataaattgacttatgcaggcaatttagaatcgcttgtaagcgtggcggcaagtgagcgttattcatttgagcaagtcgatatttgtgaccgtgctgagctggatagagtcttttcacaataccaacctggtgcagtaatgcatttggcagcagagtcccatgtagaccgttcaattactggcccagctgattttattcaaactaatatagtagggacttacacgctactcgaagccgcccgtcaatattggaccgagctcgatgctgagcgtaaatcagcttttcgttttcatcatatttcaaccgatgaagtgtatggtgatttgccacatcctgatgaacaagaaggccaagtggttaatcaagagctgcctttatttaccgagagcacgccttatgcaccaagcagcccttattctgcctctaaagcttccagtgaccatttagttcgtgcatggctgcgtacctatggtctgccgacaattgtaaccaactgttccaataactatggtccgtatcactttcctgaaaaattaattcccttagtgattttaaatgccctcgaaggtaagccattacctatttacggaaaaggcgaccagatccgtgattggctgtatgttgaagaccatgctcgtgcactatacaaagtggttacagagggtaaagttggcgaaacctacaatattggtgggcataacgaaaagcgtaacttagaagtggtacaaaccatctgtagaatcttagattcattagtccctaaagttacgccttatgctgagcaaattacctatgtaactgatagacctggacacgatcgccgttatgccattgatgcttctaaaatgagcaatgagctaaattggcaaccccaagaaacttttgatacaggcctgcgtaaaacaatcgaatggtatttagcaaaccaagaatggtgccagcatgttcaagatggcacctatcagcgagagcgtttaggaatctaaa

SEQ ID NO: 284476 - DNA, 856 bp, Unknown
  Bacterial polypeptide expressing nucleotide sequence isolated from the Sargasso Sea
ttggtaaataaaatgcgtaaaacaattttagtaacaggtggtgcaggattcattggttctgcagtagtacgccatctcatcaacgatacagatcatactgtagtcaatttggataaattgacctatgcgggcaatttagagtcattaacatcagtttcaaatagcgaccgctatagctttgagcaagttgatatttgtgatgctgaagaagtaaagcgcgtgttcagtacgcatcagcccgatattattatgcacctagcggccgagtcacatgtagaccgttctatcgacggcccaggcgaatttattcagactaatgtagttggcacgtacaccttacttgaacaagcaagagcgtattggtctgtactagaaggcgataaaaaagcaggctttaagttccatcatatttctaccgatgaagtatacggtgaccttcctcacccagatgaggttgaaccaggagcagagcttccactctttacagaaaatacaccgtatgcacctagctcaccgtattcagcaagtaaagcgagttcagatcaactggtgcgttcgtggcttcgtacatataagttacccacactagttactaactgctcgaataactacgggccgtatcacttcccggagaagcttattccgttggttattctaaatgcgttagctggaaagccacttcctgtatatggtaaaggtaatcaaattcgcgattggttgtatgttgaagaccacgcacgtgcattggtggtggtcgcgcttaacggtgagattggtgaaacctataatattggtggccataacgaaaagcagaacattgaagtggtgcaaactatttgctcaattttggatgaag

SEQ ID NO: 284477 - DNA, 873 bp, Unknown
  Bacterial polypeptide expressing nucleotide sequence isolated from the Sargasso Sea
gtgattcaattttagtagattcactttttaaggagtatcaatttgaatccgttgtgcattttgcagcagaaagtcatgttgatcgttctatagatggaccttctagttttattcaaacaaatataatgggtacctttaaccttcttgagcatgcaagagcgtatttatctaaaatgaaaaataaggattttagatttttacatgtatcaacagatgaagtatatggttcacttggtagcaatggaaaatttctagaatcaactccttacgatcccagttcaccatattctgcatcaaaagcagggtcagatcacctcgttagggcatggcatcgcacctatggtttaccaacattaataacaaattgttctaataattatggcccatatcaatttcctgaaaaattaattccactaataatcattaattgtttaaatgataggccattgccagtatatggagaaggtattaatgtaagagactggttatatgtcaaagaccattgtgaagccattagttatgttttaaataatggagaaattggacagacatataatattggaggggataatgaaattaaaaacattgatgttgtcaaaacaatatgctctatattggatgatatattaccgaaacaagatggtaattcgtattcagaattaattagttttgttaaagatcgcccaggtcacgattttagatatgctattgatgcagaaaaaataaaaacaaacttaggatgggcacctaaagaatcttttgatagtggactaagagagaccattcactggtatttgaataataaaacttggtggcaatcaatacagaaaaatacatatgagcaggaaagattaggggtaattaaatcatgaa

SEQ ID NO: 284478 - DNA, 1066 bp, Unknown
  Bacterial polypeptide expressing nucleotide sequence isolated from the Sargasso Sea
atggataacaaaattttagtaacaggtgggagtgggtttataggctctagctttattcattatttaattaataatactgattataaaagaataattaatttagataaattaacttacgcaggaaataatgataacttaatcaatattcaacaaaatattcgttacaagtttattaagggtgatatttgtgatagacaatgtataaaaaagatatttcaagattatagtcctaataaaatagttcactttgcagctgaaagtcatgttgatcgttctattgatggaccaaaagatttcataaacacaaatatcgttgggacctcaatattgcttgaggaatcattatcgtattataataaattaaaaaaattatcaaaatcttcttttaaatttcatcatatttcaactgatgaggtttttggaagtcttggggaaaaaggattttttgttgaagattctccttatgaccctagctcaccttactctgcttcaaaagcatcttcagatcatttagtacgtgcatggcatagaacttttggtctgccagtgactatttcaaattgttcaaataattatggtccttatcaatttcctgaaaaattaattccattaattattattaattgtttatctaataaatcacttccagtttatggaaaaggtgaaaatattcgtgattggctttatgtagaagaccattgtaaagcaattaatttaatcttacaggaaggcgcgattggtgatacttataatattggaggtaataatgaaattagtaatataaacattgttgaatctatttgtacaattttagataaattaaaaccttctaattctggtaagtcttataaacaattgataagctttgtaaaagatcgccctgggcatgatttcagatatgcaattaatactacaaagattaaaaaggatttaaattgggaaccaaaagaaacctttgattcaggtttaacaaagacaattaaatggtatctggaaaatgaaaactggtggaaaaaaatacaaaaaaatatttataaacaagaaagaattggtgtttcatcttgaa

SEQ ID NO: 284479 - DNA, 1096 bp, Unknown
  Bacterial polypeptide expressing nucleotide sequence isolated from the Sargasso Sea
attgaggtcttttgttgtgaaaattttagtaacaggtggtgcaggttttattggttcggccgtggtaaggaatatcattgaaaacactaatgacagtgtgattaatctagacaaactgacctatgcgggtaacttagaatcactcactagtattgcgaataatgcacgctacacattcgaaaaggttgatatttgtgatcgtgctgagcttgaacgagtgttttcattacatcagccagatgccgttatgcatctggctgccgagtcacatgtcgatcgctcaattaccgggccagcagattttattcaaacgaatatagtgggtacttgcacgctgctcgaagctgctcgccattactggatgcaacttgatgctgagcgtaaatcagcttttcgttttcatcatatttcaaccgatgaagtgtatggtgatttaccacacccagatgagcaagaaagccaagcagtaaaacaagagctacctttatttactgaaagcacgccctatgccccaagcagtccatattctgcttctaaagcatcaagcgatcatttagtacgtgcatggctacgtacctatggcttaccgacgattgtgactaattgttccaataactatggcccttatcattttccagaaaagttaattccactggtaatccttaatgcacttgaaggaaagccattgcccatttacggtaaaggcgatcaaatccgtgattggctgtatgttgaagatcatgctcgagcgttatacaaagtggttacagagggcaaaattggtgaaacctacaatattggtggtcataacgagaagcagaacttagaagtggtacaaaccatctgtagaatcttagattcattagtgcctaaaaccacgccttatgctgagcaaattacctatgttacagatagacccggccacgatcgccgctatgccattgatgcaagcaaaatgagtgctgagcttgattggcagccacaagaaacttttgagactggtctacgtaaaacagttgaatggtatttagctaaccaagaatggtgccagcatgttcaagatggtacttatcagcgtgagcgtttaggtatctaa

SEQ ID NO: 284480 - DNA, 1021 bp, Unknown
  Bacterial polypeptide expressing nucleotide sequence isolated from the Sargasso Sea
atgcgaatactcattaccggtggtgcagggtttattggatcggcattagtgcgaatgctgattgagcaaacgacgtgtgtcgtgaccaatgtcgataagttaacctatgccagtcatcctgaggctttagcagctattgccgagagtgagcgctatcatttcatacaggcggatatttgtgatgcagcgacattagagcaagtctttcaggctcatcagcccgatatggtaatgcatttagcggctgaaagtcatgttgatcgctcaattgaaggacccgctgcatttatccaaaccaacattgtgggcacctatacgttgttagaagcttcgcgccgatattggcagcaattagcggatacgcgaaaagggttatttagatttcatcatgtttctaccgatgaggtttttggttcactgaccgaaactggattgtttagtgaaacctcagcttatgatccgagctcgccttattcagcaagtaaagcttcagcggatcatttggttcgtgcttggcatcgaacttatgctttaccgatagtgatgaccaactgctccaataactatggcccttttcaataccctgaaaagctcattcccctaatggtcaccaatgcgttacagggtaaaccgttgccaatttatggtaatggtcagcaagtgcgtgattggttgtatgtggatgatcacgttaaggcgctctatttagttgcgactcagggggagcttgggcaaacctataatattggtggttcctgtgagcaaactaatttgacggttgtgcggcaaatttgcgccttattagaggagttagtgcctactcatccgcaatctcttgcaatgggtagtgcggggtttgctgatttaattcagtatgtcgttgaccggcctggccatgatgtacgctatgctattgatgccagtaaaattcaacgtgaattaggttggagagcgcaagagtcttttgagtcaggtctcagaaagacggtggagtggattattaaccagcaacatctttaag

SEQ ID NO: 284481 - DNA, 568 bp, Unknown
  Bacterial polypeptide expressing nucleotide sequence isolated from the Sargasso Sea
atgagcttacaagattttcatccaaggtctccctatgaaatatcaaaagttacaggttttgatttaactcgaaattacagagaagcttataatttgttcgcagttagtggcatattattcaatcatgagtcaccaaggagaggttttgaatttgtaacaagaaaaatcagtttagcagttgctagaataaaaaacaatttgcaaaatgacttaatcctgggaaatttaaaggcaaaaagagactggggatatgcaaaagattatgtcgaagcaatgtggttaatgcttcaaaatcaaaaccccgtagattatgttgttggaactggtttaacaaattcaatcgaagattttgttaaattagcttttgatcaagtaaaactaaattatctagattacgtaaaatttaatgaaaaatttttaagacctacagaagtagacttattaatagcggataatgcaaaagtaaaaaaagaattaggctggaaaccaagtataaattttgaagatttagttaatttaatggttgagtcagatttaaagtatataagagataataaatctaaataat

SEQ ID NO: 284482 - DNA, 739 bp, Unknown
  Bacterial polypeptide expressing nucleotide sequence isolated from the Sargasso Sea
ataggaacattaagattgttggaggcaattagatttttaaaaattaaaaatattaagttttatcaagctagtacttcagaactttttggagaaacgtatggaaaaaatgtttttagtgaaaaatctaaatttcatcctaaatctccctatggtgttgctaaattatattcatactggatcacatcagtttatagagagtcatatggaatctttgcatccaatggtattttatttaatcacgaaagcccaagaagaggtgaaacttttgttacaagaaaaatcacaagatttttggcaaaaaaaaaacttggaagtaaagatgtattgtatttaggaaatcttaacgcgaaaagagattgggggcatgcgaaagattatacagaaatgcaatggcgaattttacaacaaaaaaaaccaaatgattttgtagtagcaacaggtcaagctttttcagtaagacaatttgttgaaatagcatctaaatatttaaatcttaaaatatattggcagggcaaaggattaaatgaagttggatatttgaaaaaaggatcaaaaaaagaaataatcatcagagttgataaaaattactttagacctaatgaagttgaatacttgaagggtgatgcaagaaaagcttttaaacttctaaaatttaaaccaaaatatacttttaaagatctagttaaagatatgattgaaagtgatttaaaaaaggcaaaaaaagaattacaaaaataaa

SEQ ID NO: 284483 - DNA, 970 bp, Unknown
  Bacterial polypeptide expressing nucleotide sequence isolated from the Sargasso Sea
aaaaaaacagccattataactggtattacaggtcaagatggaagttatcttgctgaactgttaataaaaaaaaactttaaagtttatggcatcataagaagaacatctacggatcctctttatagattaaaatatttaggtgtagaagataagattagttttttaaatgttgatctatcagaacaccaaagagtgaatagatatattaattcaataagaccaaattatttttttaatttagctgcccaatcttttgtcgcttattcttatgataatcctatttatactgataatgtaaataatttatctgtacttaatattttagaatcaataaaaaataactcaattaaaacaaaattttatcaagcttcttcatcagagatgtatggaggtttaaatttttcaaaaaaaaaactaaatgaaaattctaattttgatccaatatcaccatatgctattgcaaaactttcatcttatcattacaccagaatgtacagaaaatcttataatatctttgcatcaaacggtatattatttaatcacgaaagcccaatacgcggcgaacaatttgttacaaaaaaaattgtaaaaggtttggtagaaatattaaatggaaaaaaaaaggatccaatatatcttggaaatatttattctaggagagattggggacacgcaaaagactatgtagatgctatatataagataatgaattacaaaattgcagatgattttgtagttgctagtgataaaaattattctgtcaaagaatttataaatttaactgctaaaattctgggaatcaaaatgatttggtcaggtaaaggtttaaaagaaaaagccttaaatgcaaatggaaaaataataattaagattagtaaaaaattttttaggcctttagatataaataatttagttggagacacttataaagctagaaaaaaattaaaatggaaaccaaaaaatgattgaa

SEQ ID NO: 284484 - DNA, 720 bp, Unknown
  Bacterial polypeptide expressing nucleotide sequence isolated from the Sargasso Sea
tatgaaaaaagcgttcatttcgggagtcacgggacaagatggttcttatcttgctgaattcttattaaaaaaagattatgaagttcatgcaatctttagaagaagttcagtttttacatcgcaacgagtagatcatattttggataatcctaattttaaaacatatcatggagatctaactgattcgagcaatctcaagggactaatctcttcaatctctcctgatgagatttataatttgggagcccagtctcacgttgcagtatcgtttgatgttcctgaatatactgctcaggtagacgctatcggaacaataagacttcttgatgcagttaaagatctagagaacaaaccaagattttatcaggcttcaacctctgaactatttggagggctgcccgagactgctccccaatcagaaaagactcccttttatcctaaatctccctatggtacagctaaaatttatgcatattgggctactgttaattatagagaagcatatgacctttacgcatgcaatggaatcttgtttaatcatgagtcccctagaagaggagaaacttttgtaacaaaaaaaattacaaaggcagtagcaaggattaaaaaaggacttcaagaagatcttaagttaggcaatttagacgcaaaaagggattggggttttgcaaaagattatgttgagatgatgtggttaatgctacaacaggaaaagcctaa

SEQ ID NO: 284485 - DNA, 679 bp, Unknown
  Bacterial polypeptide expressing nucleotide sequence isolated from the Sargasso Sea
atgaaagcttttataactggcattaacggtcaagatggttcttatcttgctgattttttgatagaaaaaaaatatgaggttcatggcacaattagacgatcctcttcaataaatacagaaaaaatagatcatttaatttctgagcaccaaggtactaatttgcatttgtattactcagacttattagactcctcatctcttactaatttaatttcaaaaataaatcctgatgaagtttacaacttagctgcacagtcacatgttgcagtttcatttcagaaccctatgtttacaacacaagctagtacgattggccctctttctcttcttgagtcaataagaaatgtaaataaagatataaaattttatcaggcttcttcatcagaaatgtatggaggagcagccagagaggcattaaatgaagattcaagatttgacccaaaaagcccttatgctgcagcgaagttatttgcatatgaaatttcaaaggtttatagagagtcttacgatatgtttgctgcaaatggtattttattcaatcacgaatctcctagaagaggagaaacatttgttacaagaaaaatttcaaaagcagttgggagaataagtgttgggatacagaacaaacttacccttggcaatctagatgcgtttagggattggggctatgccggagatt

SEQ ID NO: 284486 - DNA, 847 bp, Unknown
  Bacterial polypeptide expressing nucleotide sequence isolated from the Sargasso Sea
catgaaaaaaacggcattagtcacaggaattagtgggcaagacggaggttatcttgcggctctccttctgaaacaaggatatcgagtcattgggaccagtcgtgatgcaaatgcaaatcgcttcgagggcctgcgaacgcttaatattcaagacaaggtcattctcgattcaatgtcattgattgattttcaatcaatcctaagagttattcatcaatatgagccagatgaaatttacaatcttgcaggacaaacatcagtggtgctttcgtttgatcagccagtggaaacctatgagagtattgttattgcaacagtcaatttgctcgaagctattcgcatgtcaaacaaaacgattcgtctttataatgccggtagttcagagatgtttggaaataccaagggtgagcctgcatcagaagtgacaaggctgcatccccgcagtccctatggaattgctaaagcgacttcattttggcaaattgcccagcatcgtgaggcatacggtgtgcatgcatgtacgggtattcttttcaatcatgaaagtccgttgcgtcctgagcgatttgtcacgcagaaaattgtcaaaggggcctgtgctatcgcgaacggtagcgaaaaaacccttccacttggtgatttatctgtccagcgagattggggatgggcgcccgaatatgttgtagccatgcacgcgatgctccaacgggatcatccagaagactttgtgattgctactggtcaaacatcaagtctcgaggcatttgtgtcagaggtgttttcgacgcttgggctcaactggaaagagcatgtcgtacgagatccaagatttatgcgacccagtgat

SEQ ID NO: 284487 - DNA, 542 bp, Unknown
  Bacterial polypeptide expressing nucleotide sequence isolated from the Sargasso Sea
tatggctaattcaaataaggttgcactaattacaggtattactggtcaggatggatcttatttagctgagttcttacttgaaaagaactatattgttcatggtattaaaagacgatctagttcatttaatacagagagagtagatcatttatatgaagatcttaatgaaaatgaaagccataactttattttgcattatggggatttaagtgattcaacaaatttaattagaatcatacaagaattgcaaccagatgaaatatataacttagcagcacaaagccatgttgcagttagctttgaaagtcctgaatatactgcagatatagatgcaattggaactttaagaattttagaagccataaggatattgggtttagaaaagaaaactaaattttatcaagcctctacatcagaattatttggtttagttcaagaagtgcctcaaactgaaaaaactccattctatccaagaagtccatatggtgttgcaaaactctatgcatattggacagtagtaaattatagagaagcatataata

SEQ ID NO: 284488 - DNA, 790 bp, Unknown
  Bacterial polypeptide expressing nucleotide sequence isolated from the Sargasso Sea
aatgaaaagaagaacctccagctttaatacaagcagaatagatcatttgtttaaagacctacatgacccaagtcgtaagttaatattacatcatggtgatcttacagactcctcaagtattataggagtaatatcaaaaactcttccagatgaaatttataatttagcagctcagagtcatgtcgctgtatcatttgaacagcctgaatatactgcaaattcagatgcttttggcgtattaagaattttagaagcaataagaatattaggattagaaaaaaaaacaaaattctatcaaagttctacctcagaattatatggtctagttaaagaaaaacctcaaaacgaaaaaacaccttttcatccaagaagtccttatggcgttgcaaaattatatgcgcattggataacaaaaaattatagagaagcatatggactatttgcatctaatggaattttatttaaccatgaatcgcccagaaggggtgaaacttttgcaactagaaagataactagggcttttgctaaaatgttatttgggaacaaattacctttatatttaggaaatttatcagcaaaaagggactggggacatgctaaagattatgttgaggcacaatggcttattcttcagcataagaaagcggatgattttgtaatagcctccggtaaacacattctgttaagattttgttacagcgttgcaagctatttgggtatgaaattaatggactggaaaaggactaatgaagtgggtattttattaaagttctatagagcacaagtatga

SEQ ID NO: 284489 - DNA, 821 bp, Unknown
  Bacterial polypeptide expressing nucleotide sequence isolated from the Sargasso Sea
tatgggtttcaaaaaaacggctttaattacaggtattacaggacaagatggatctattctagcggattttttacttcaaaaaaattataaaattataggaattaaaagaagatcatcttcatttaatactgaacgtataaatcatttatataatagtaaaattttaaataaatcttactttcctttttatggagatttaacagatacaacaaacctaatcagaattatccaacaaacaaaaccccacgaaatctataatttagcagctcaatctcatgtcagaactagttttgaaactccagagtatactgcaaatgcagatgctttaggaacgctaaggcttttagaagcaataagaattttaaaattagaaaaaaaaattaaattttatcaagcatcaacttctgaaatatttgggaacactaaaattccccagaatgaaaaaacacctttcgcacccactagcccttatgcaatttcaaaacttttttcttactggaccgtaataaattacagaaaagcttataatatttttgcagtgaatggaattttgtttaatcacgaaggagagagacgaggagcaacgtttgtgacgagaaaaattacaagagcagtagcaaactacttttatggtaataaagaaattctttatcttggtaatttaaacgctagaagagattggggatatgcaaatgattacgttaagactatgtggttgatgttgcaacaaaagaaaccttcggactatgtaatttcaactggcgtaagtaaatcagtaaaagattttgtcaatgaagcttataattgtataggcgtaaaaa

SEQ ID NO: 284490 - DNA, 481 bp, Unknown
  Bacterial polypeptide expressing nucleotide sequence isolated from the Sargasso Sea
catgaaagcccagtcagaggagaaactttttgttacaagaaaaatagtaattgcattatgcaaaattaaacttggattacaaaaaaaattatatttaggaaatttaaattcaaaaagagactggggacatgcaaaagattatgtaatagctatgtggaaaattttacaaaaaaataagcctactgactatgttatttcaactggtaaacaatacacagttcaacaattcgtgaattttgttttaaaagaattaaatattaaatttttttggaaaggtaaaggagtcaattgcaaatgttataatgaaaataatgaagttatagttgaatgtgataaagagtattttagacctttagaagtagatactttattaggagattctagaaaagcattaaaagatttaaaatggaaaccaaaatttaagattaaagatctggtcaaagatatggttagaagcgagttaaccaacctaacaaaatga

SEQ ID NO: 284491 - DNA, 507 bp, Unknown
  Bacterial polypeptide expressing nucleotide sequence isolated from the Sargasso Sea
cttcagggatccttttcaatcatgagtcccccctgaggggagaggagtttgtaacaagaaaaataattattggtctcatcagaatattgaaaaaagatcaaagttattttgagctaggaaacttatatgccaaaagagattggggatatgccaaagaatatgtggaagttatgtggaaaatgttgcaaaaaaataaacctgatgattatgtaatcgcaacaggaaaaacatattccattaaggattttatagatattgcaactagttatctaaaaatgaatgtagaatggattggtaaagggcttaatgaaaaattgataaataaagtcagtaaaaaagtattaattaaaataaatccaaaatattttagaccatctgaagtaaatgtattaattggggactattctaaagcaaaaaagcatttgaaatggaaaccaaaaactaatttaaaaaaattgatatctattatgatagatgatgaaattaaatactataataaactataag

SEQ ID NO: 284492 - DNA, 520 bp, Unknown
  Bacterial polypeptide expressing nucleotide sequence isolated from the Sargasso Sea
aatgggattttatttaatcatgaaggcccaactcgtggagagactttcgtgactcgtaaaattagtatggcaatagcaaaaatttattatggtatgcaagaaaagctatatttaggtaatttgagctcaaaaagagactggggccatgctaaagattatgtgaagggtatgtggctaatccttcaacacgacgttccagatgactttgttttgtcaactggcaaaatgtattctgttaggaattttgtagaattagcatttaaaattattgatattgatatcgaatgggttggcgaaggtgaaaatgaaaaagggtttaacaaaaaaacaggtaaatgtttagttgaagttgatcctcgttactttagacctacggaagtcgatcaacttttaggagattcaactaaagccaaaactgttttaggatggaaagcagaaatttcttttaaagctctagtttatgaaatggttaaaaatgatttaaaaatagtgaaaaatcaaaatagaaaaagtatttaat

SEQ ID NO: 284493 - DNA, 487 bp, Unknown
  Bacterial polypeptide expressing nucleotide sequence isolated from the Sargasso Sea
aatgtttatttctaatggaattttatttaatcatgaatctccaagaagaggagaaaattttgtcactagaaaaattacacttggagccacttcaataaaactaggcattcaaaataaattagttttaggcaatctaaatgcaaaaagagattggggatatgctaaagattatgttgaagctatgtggctgatgttgcaacaaaaaaaagctgatgattttgtaatagctactggcaaatctcacactgtaaaatatttttgcgaacttgtatttgatattttggatttagattataaaaaatacgtagtatctgataagaaatatttcagaccttctgaggttgactctttaaaaggtgattataaaaaagctaaaaaaattttaggttggaaacctaaaacatctgttgaagaacttgcaaaaataatggtagatcaagaaatgaaaactttaacaaaatataaaaaaaataatttgtttaaataa

SEQ ID NO: 284494 - DNA, 772 bp, Unknown
  Bacterial polypeptide expressing nucleotide sequence isolated from the Sargasso Sea
atgggttttaaaaaaactgccttgattacaggtattacaggacaagacgggtcaattctagctgattttttactgaagaaaaattataaaataattggtattaaaagaagatcatcatcgtttaatactgaaaggattgatcatctatatgatagaaaaatattaaataaatcttattttcctttttatggagacttaaccgattcaacaaatttaataagaattatacaacaaacaaaacctcaagaaatttacaatttagctgctcaatcacatgtcagaactagctttgaaactccagaatacaccgcaaatgctgatgctctaggaacattaagattattagaagcaataagaattttaaagttggagaaaaaaattaaattttatcaagcctctacttcagaaatttttggaaatacaaaaattcctcagaacgaaaaaactccctttgctccaacaagtccttatgcaatatcaaaacttttttcatattggacggtaattaactatagaaaagcttataatatatttgctgtaaatggaattttatttaatcacgagggtgaaagaagaggtgcaacttttgttactagaaaaattactagggctgttgccaactatttctatggaaatagagaaatactttatttgggaaatttaaatgcaaaaagagattggggatctgcaaacgattatgtaaaaacaatgtggctaatgttacaacaaaaaaaaccttcagattatgtaatttctaccaggtgtaagtaag

SEQ ID NO: 284495 - DNA, 762 bp, Unknown
  Bacterial polypeptide expressing nucleotide sequence isolated from the Sargasso Sea
ttgaagtccctgaatatacagcagaggttgacgctttaggcacaataaggcttttaaatttagttaagcaatccaaaaaaaatattaaattctaccaagcatcaacgtcagaactgtttggcggtattcctgaaacagcgccacaaaatgaaaaaacacctttttatcctaagtcaccctatggggctgctaaattatatgcattttggataacaaaaaattatagagaggcatatgatattcatgcctcgaatggcatattgtttaatcatgaatctcctagacggggtgaaacatttgtctctaaaaaaataacaaaggcagttgctaatatatcaaaaggaaaacaggaaaatcttcagcttggaaatttggatgctaaaagagactggggatatgcaaaagaatatgtagaatcgatgtggctaatgcttcaacaggataaaccagatgattacgtaatagctactggagtaactaaaactgtaagagagtttgttgaattggcatttaaatatgtagatattgatataaagtgggcaggaagtggaataaatgaaaaaggcttgtgttctaaatctggaaaagaaattgtaattattaatcccagatactatagaccttctgaagttgatttacttcatggcgattcaacttatgcacaaaaaaaactcggatggagacccaaaacatcccttgaagaattggtagagataatggttgaatatgatttaaattatgacggctatggatttgattaaa

SEQ ID NO: 284496 - DNA, 921 bp, Unknown
  Bacterial polypeptide expressing nucleotide sequence isolated from the Sargasso Sea
ggaatgaaaagaaaatcatcctcatttaatacgcaaaggatagatcatatttacgaaaataaaaaatataagaaaaaattttttctccattatggagatatgtcagattctttgagagtattaaatttgattaattcaataagacctcatgaaatatataatcttgctgcccaaagtcatgtggctacaagttttgaaataccagaatacacttcagatgttaatgctcttggagctttaagaattttagaggcaataagaagattaaacttaataaaaaaaacaagattttatcaagcgtcgtcatcagaattgtttggtaaaatacaagagaaatcgcaatcagaaaacacacctttttatcctttaagtccttatgctatctcaaaattatatgccttttggataactaaaaattatagagagtcatttaaaatttatgcttgtaatggaatattgtttaatcatgaatcgcctcgtagaggtgaaactttcgtaacaagaaaaattaccttaggtttaaatagaattgcattaggtttagaaagatgtttgtatttaggaaatctttattcattaagagactggggtcatgcaagagattatgcaataatgcaatggaaaattcttcagcaaaaaaaaccagaggattatgtagtagcaactggaaaacaatacagtgttaagttctttgtagagagatgctgtaagtatttgggtataaaaattaagtgggttggtaaaggtctaaatgaaaaaggagttgtagcccatgttgataaaaatagcaaaattaagttaaaaaagaatgcagttatcataagagttaataaacaatattttaggccactagatgtgaaaaatttgatcggtaattctaaaaaagcacaaaaaaaattaggatggaatccggatagaaaa

SEQ ID NO: 284497 - DNA, 562 bp, Unknown
  Bacterial polypeptide expressing nucleotide sequence isolated from the Sargasso Sea
gttaaccccgcttcacccccgaagtccttatggatctgccaaggttttcggtcaccacacaacggtgaactaccgcgaaagctacggcctctatgcctgtagcggaatactgttcaatcatgagtcacccaggagaggaattgaattcgtaacccgaaaggtcaccaatgcggtagctcgaattaagttaggtctccaagatcatgtagctctcgggaacttagacgctaaacgcgattggggatttgctggcgattacgttcgagctatgcacctgatgctgcaacaggaggagcctgatgatttcgtggtcgcaacaggtgaaacccacgcagtcagcgaatttgttgccctagccttcgccgctgcggacatcgacgactgggaaccttatgtccgtattgatccgaaatttttccggcctgcagaggtagaccttctggtaggcgacgctacaaaagcaaaaactcaacttgggtgggagcccaaagtgtcctttcctgatttggtgcgaataatggtggaacacgacctcagagttgagcgagaaaagctaacttga

SEQ ID NO: 284498 - DNA, 840 bp, Unknown
  Bacterial polypeptide expressing nucleotide sequence isolated from the Sargasso Sea
aatgaaaaaaaaagcattaatatttggtattacaggtcaggatggatcgtatttagctgaatttttaatgagtaaaaaataccaggttcatggtattaaacgaagaacttcaacgccaaatacaagtagaatagatcatatatttgatagtgtaaattttaataataaaaatttaattatgcatcatggagacctttcagactcaggctctttgtatagaattatcaatgacgttaatccagatgagatctataatttagccgctcaaagccatgtaaaaatttcgtttcaaatacctgagtacacatcagaagtaaacgcattaggtccacttagactgttagagattattagacattataaaaaaaaaagaattagattctatcaagcatcaagctctgaaatgtttggaaagtcaaaaccaccacaaaatgaaaaaacattatttttaccaagatcagtttattcaatttctaaagtttttgcatatcatagtgttgttcattatagagaagcatacaatatacatgcttgcaatggaattttatttaatcatgagtctccacgtagaggtgttaattttgtaacaaaaaaaatagttcaaggtttggtcagaattaaaaaaggtaaacagaagaatttaactctaggtaatttatatgcaaaacgtgactggggtcacgctaaagactatgtagaatctatgtggagaatactacaaaataaaattcctgatgattttgttatatctacaaacacatctcactctgttaaagattttataaatatctgtgcaaaaaaattaagaattaaactatattggaaaaataaaggtttaaa

SEQ ID NO: 284499 - DNA, 733 bp, Unknown
  Bacterial polypeptide expressing nucleotide sequence isolated from the Sargasso Sea
ttcaaatgctgacgcattaggagctttaagaattctagagtcaatcgtaacaattaatccgaaaattaaatattatcaagcaggcagttcagagatgtatggtaaaattcaatcttttcctcaaaatgaaaaaactccgttttatcccagaagtccatatgcagtatcaaaagtttatgctcattggataacagttaattatagagagtcgtacaaaatatttgcttgtaatggtattctgtttaaccacgaaagtccgcttagaggagaaacttttgtcacaaaaaagattgtcaaagcattatgtaaaataaaaaataaaaaacaaaaaaaattatatttaggaaatatatatgcaaaaagagattggggacatgctcaagattatgtagaagcaatgtggaaaattttacaatataaaaagcctgaggattgggtaatatgtacaggaaagcagtattcagtcaaacagtttataaatttagtatcaaaaaagttaaatttaaaaattttttggagaggaaaaggtttgcatgaaaaagcttacaatgaaaaaaaacaaaaaattattgagataaaaaaagaatattttagacctgctgaagttgataatcttaagggaaattctaataaagcaaaaaagtatttaaaatggaaaccaaaaaaagatattaattatttaattcaagatatgatcaattatgaattaaatgaattaaaaaatggtaaataa

SEQ ID NO: 284500 - DNA, 715 bp, Unknown
  Bacterial polypeptide expressing nucleotide sequence isolated from the Sargasso Sea
atgggaaaaatagctattattacaggaatttctggtcaagatggttcatatttagctgaattattattaaaaaaaaattacaaaatttatggtatttgcaaaaaatcaaaaaaaattaattttaagaatattgaaaaaataaaaaaaaaaatttttattaaaaaaattgatattaataatttttctcatattaaaagattgattaagaaagttcgtccaaatgaattttatcatttagctgcacaaagttttattaattataaatttgaagatgaattttttagattaaatccgaatataaatggaactcattatatattgtcagcaattaagaaattttcaccaaaaacaaaattttattatgcagcgtcctcagaattatttggcaatgccaaatcattaccacaagatgagaatactcattttaatccacgatcagcttatggtgtatcgaaagtggctggttattatttgacaaaaaattatagagaggcttataaattatttgcttgttctggcattttatttaatcatgagtcaccaagaagaaatgtaaattttgtatctcgtaagataaccaaaaatttatctttaataattaaaggaaaaataaaaaaaattattttaggaaatataaattcaaaaagagactggggccatgcgaaagattatgtttatgcaatgtggaaaatattacaattaaaaagaccacaag

SEQ ID NO: 284501 - DNA, 649 bp, Unknown
  Bacterial polypeptide expressing nucleotide sequence isolated from the Sargasso Sea
tatgaaaaaaaaaattgcactaatttttggtattaccggacaagacggatcttacttagcagaatttttaattaagaagggatatttggttcatggcgtaaaaagaagatcttcatctcttaatacctcaagagtagatcatatttatcaggatcctcatgaaaataagagaaatttttttttacattatggagatattactgatgctatttcagtttcaactttaattaaaaaaattaaacctaacgaaatttataatttagcagcacaatcgcacgtatcagtttctttcgaagtccctgaatatactgcaaatgcagatgctattggcgctttacgaatactggaagcaattaaatttcatggatttgaaaaaaaaacaaagttttatcaggcgggtacttctgaaatgtttggaaaagtaagagaaatacctcaaaatgaaaaaacatctttttacccaagaagcccttatggtgttgcaaaagtgtatgcacactggattacaattaattatagagaggcatataatatttatgcttgtaacggaatattatttaatcatgaaagtccagtaagaggtgaaacttttgttactagaaaaattgtagtagctctctgtcaaattaaaaagggtttaaaaaaaaaa

SEQ ID NO: 284502 - DNA, 916 bp, Unknown
  Bacterial polypeptide expressing nucleotide sequence isolated from the Sargasso Sea
atcttcttcaatcaatacttcaagaatagacccactaatatctgaatattcaaatatcaaagaaaaaaaactacatctacattattcagatttacttgactcttcctctttgactgcattaatcaacagtattaaaccagatgaggtttataatcttgcagcacaatcacacgttgcagtttcatttaaaaacccgatatacacaacccacactggcacaaatggaaccctctctcttcttgaagcaataaagcattcagataaagatattaaattttatcaagcttcatcttctgaaatgtatggagggactacaactgaaaaactgaatgaaaattcaaaatttgaaccaaaaagcccttacgctgcggctaaggtcttttctcacgagataaataaaatatatagggattcctatggtatgttttgcacaaatgggatcttgtttaatcatgagtctccacatagaggtgagacttttgttacaagaaaaattacaaaagctgtaggaagaatatctatgggtctccaaaagaagttaaccttaggaaatttaaatgcatcacgtgactggggttttgctggagattatacatatggaatgtggcaaatgttacaacacgattcaccaggtgactgggttttagcaacaggtcagtcatatactgtggaaaaatttgctgaaactgcatttagtgaagttggattagattggtcagagtatgttgtaacctcagaaagatacatgagaccaaatgaagttgagtctttattaggagatccgacaaaagccaaaaccgaattaaattgggaaaataaaactagttttaattccctggtaaaactaatggtagagtctgatttaaattcagctaaaaaagaaaaaatcttgatcgaggaaaaattgataaaacca

SEQ ID NO: 284503 - DNA, 889 bp, Unknown
  Bacterial polypeptide expressing nucleotide sequence isolated from the Sargasso Sea
atgaataaaaaagcacttataactggaataacaggccaagatggaagttacttggctgaatatttgttatcattaggttatgaggttcatggaattgttagacgaatagcaaacgaacattcatcatggcgatattcaaggataaatcatatattgccaaatattgttatgcattcaggatcactagaaaattatcaaagcttatttgatattgttcaagaagtaaaacctgatgaatgttaccatttagctgctcagagttttgttgctaactcatttgaagatcaacattctacgttatcaattaatacttttggtacacactatttaatatcaataataaaaaaaattactcctaattgtaaattttattttgcaggatcatcagaaatgtttgggaaagttgaagagtcacctcaaaatgagtcaacaaaatttaatccaagatctatatatggaataagtaaattaacagcttatgaaataacgaaaaactatagagaatcttataatatgtttgcttgttcagggattttatttaatcacgaatcccctagaagggggtcagaatttgtaactagaaaaattagcattgctgctgcgaaaatcaaacttggattagaaaaaaatattagcttaggcaatattaatgccgaaagagattggggttatgctaaagattatattgaagcaatgcataaaatgttacaaattgataccccacaagattttgttattggcactggcaaatgttatagcgtaaaagattttttgaaaatggcatttgaatgttttgatttagattatgaaaaatatttaaatatagataaatctttattaagaccagctgatgttgagttactcatttctgattcttcaaaagcaagaa

SEQ ID NO: 284504 - DNA, 657 bp, Unknown
  Bacterial polypeptide expressing nucleotide sequence isolated from the Sargasso Sea
agcatcgtctttcggagatgtatgggaaagtatcagagagtcctcaaaatgagaaaacaaagctcaatcctgtaagcccctacgcaatatctaaaacatacgctcattttatgacttcgctttatggagtaagttacgggctagaagtctacagcgggatattattcaatcatgagtcaccacttagaggccttgagtttgtaacaagaaagattacacactctgctgccatgattaaaacaaataaactagagtacatggaactcggtaacttaaatgctcttcgtgattggggacacgctagagattatgtacgaggtatgtggatgatgatgcaatcaaaaagccccgggacttatgtcttatcaaccggagagatgcattctgtcagagaatttgttgagattacatttaggaatattgatatagatattgaatggcgaggtgaaggtttagacgaggtcggcattaataaatcaaatggtaatgtcattgttaaaataaatgaagaatattttaggccccatgatgtccaacaattattaggagactcttcaaaagcccatgatattataaagtggaaacctgaaatatcatttaacgagctttgtaaggaaatgatagaatttgacatgcaagaattacaaataaaataaa

SEQ ID NO: 284505 - DNA, 336 bp, Unknown
  Bacterial polypeptide expressing nucleotide sequence isolated from the Sargasso Sea
aatgtcaaaagtcgcacttattaccggcgtaacggggcaggacggttcttatctggcagaactgctgctggaaaaaggctatgaagttcacgggattaaacgccgtgcttcttcctttaacaccgaacgtgtcgatcacatctatcaggatccgcacagcagcaacccgaaatttcacctgcactacggtgatttgaccgacagctccaacctgacgcgcattctgcaggaagtgcagccggatgaagtgtataacctcggcgcgatgagccacgttgccgtgtcgtttgagtcgccggaatataccgccgacgtggatgcgatgggcacgctgcg

SEQ ID NO: 284506 - DNA, 743 bp, Unknown
  Bacterial polypeptide expressing nucleotide sequence isolated from the Sargasso Sea
cgtttttacaactcaaacagggacacttggatcagtttccattttagaagctttaagatttgcagattatgaagcaaaattttaccaagcttcatcttcagaaatgtatggaggaggggttcaagagaagttaaatgaggaatctccatttgatccaaaaagtccttacgcagcttcaaaagtatttgctcataatatgacaaagatttatagagattcttatgatttgttttgtgttaatggaatattattcaatcatgagtcaccttttaggggagagacttttgttactagaaagataacaagggctgttggaagaattgcattgaatcttcaatctaagttaactcttggaaatttagatgcaagcagagattggggttttgcaggagactatgttgaagcaatgtggacaatgttgcaacataaaacccctgatgattgggttgttgcaacaggagaaacacatactgttaaggagtttgcaaaattagcttttgaagaggttaatttaaattgggaggattacatagtatcttctgaaaaatatttaagacctaacgaagtggattacttacttggagacccaactaaggcaaaaaaagaacttaaatgggaaccaaaaacctcatttaatgaattagtaaaaatgatggtagattacgatttaaatttagctaaaagagaacaagttttaattaaagagaatttaattaaacctacatgggaaaacccaacatagc

SEQ ID NO: 284507 - DNA, 495 bp, Unknown
  Bacterial polypeptide expressing nucleotide sequence isolated from the Sargasso Sea
taactagaaaaatttcaagagctctaaccagaatcaaacttggtttacaagaaatgttatatattggaaacttaaatgctaaacgtgattggggacatgctaaagattatgttgaaatgcaatggatgatgttgcaacaaaaaaaacctgaagattttgttattgcaactggtacacaatattcagttagagaattcataaaccttgcagctaaaaaacttgatattgaaatttcttggaggggtgagggaataaatgaagttggaactataaatggtaaagaggctattaaagtagatcctaaatattttagacctacagaagttgaaacattattaggaaatgctgaaaaagcaaaaataaaactaggttgggaaccaaaaattacatttgaagaattagttagtgaaatggtttctgaagatttaaaactcgcaaagcgtgatgaattaattaaaaaacatggatatagtttttttaataaatttgaataat

SEQ ID NO: 284508 - DNA, 574 bp, Unknown
  Bacterial polypeptide expressing nucleotide sequence isolated from the Sargasso Sea
gaatatacagctaattgcgatgctttaggttcattaagaatattagaggctattagatttcataaattgaataaaaaaacaaaattttatcaagcaggaacctctgaaatgtatggaagggtatttgaaacaccacaaaatgaaaaaactccattttatccaaggagcccttatggtgttgcaaaagtttatgctcactggataaccgtaaattacagagaggcttacaagatatttgcttgtaatggaatattgtttaatcatgaaagtcctagaagaggaggtacatttgtcacaaaaaaaattgtaaatggattgtgtagaataaaaaaaggattacaaaaaactttatatttaggcaacttagaagcaaaaagagattggggtcatgcaaaagattacgctgttgcaatgtggaaaattctccaaaaaaaggaacctgatgattttgtaatagcaaccggtgttcaacttactgtgaaagaatttgtgaatctagttttaaaagaactaaaaatcgattatttatggaaaggtaaaggactttcatcgagatgttttattaaagggacaa

SEQ ID NO: 284509 - DNA, 604 bp, Unknown
  Bacterial polypeptide expressing nucleotide sequence isolated from the Sargasso Sea
aatgaacgaaaaaaaatcgattgcacttatcacaggagtgaccggtcaagatggttcgtacttggctgaattgcttttgtcaaagaactacattgttcatgggattgtgaggcgcagtagctcctttaatacctctcgaatagaccatctgatcgaagaggaaaaatataaagataaatttttctttcatcatggggatgttacagacagcagtaacgtagagcggttgatcgaagactgtcaacccaccgaaatttacaacttagcggcacagagtcacgttgcagtgtccttccagattcccgaatataccgcgcaagttgacgcgttgggaactctacgatttttggaagcaattagatcgaagagatatccggttagattctatcaagcctctactagcgaactttatggaaaagtcgttgaaactccgcaaaatgaagaaacccctttttatccgaggtctccatatggggtggccaagctctacagctattggatagtggttaattatagggaagcatacgacctgtatgcttcaaatggtattttatttaaccatgaaaagcctagacgcggagagaccttcgtaacagggaaataa

SEQ ID NO: 284510 - DNA, 797 bp, Unknown
  Bacterial polypeptide expressing nucleotide sequence isolated from the Sargasso Sea
ttatatcatacatggtgtaaaaagaagatcatcaagtgctaatactgaaaggattgatcatatttttgatagtataaattttaaaagtaagaatttttttatccattatggtgatgttacagatagctcaagtactttaaatataattaataaaataaaaccagatgaaatatataatttagcagcgcagagtcatgtcagagtttcttttgacatacctgaatatacagctaattcaactgctctagggtctttaagaattttagaagcaattaaaaatctaaatctttataaaacgaaatattaccaagcttcaagctctgaaatgtatggcaaacaaaaaagaaacctatcacaaaatgaacaaactccttttcatcccatgtcaatttatggtgtttccaaagtttttgcttatcatgcttcagtttattatcgagaagcttatggtatatttgcttgtaatgggattttatttaatcacgagtcaccacgtagaggtccaacatttgttacaaaaaaaattgttcaagctctagtaagaatcaaaaaaaataaacagcagactttatctcttggaaatttatatgcaataagagactggggccacgctaaagattatgtagaatctatgtggaaaataatgcagtacaaaaaacctgatgattgggtaattgcaactaatgaagaaatgacagtaaaaaaatttattaataaatgtgctaagaaattaaaaatgaatttaacctggaaaaaaaaaggaattaatgaggttgctattgataataaaactaaaa

SEQ ID NO: 284511 - DNA, 715 bp, Unknown
  Bacterial polypeptide expressing nucleotide sequence isolated from the Sargasso Sea
actggaaagaattgacaacactatttcaaaatatataaactctgatgagttaaatttacattacgcagacttacttgattctgcctccttatcaaatttaataatacaaatacaacctgatgaaatatataatttaggtgctcagtcccacgttgctgtatcatttagcaatcctctttacacaactcaaacaagcacgatagggccattagctctattagaaactattaaaaactcagataaagaaattaaattttatcaagcatcaagttctgaaatgtatggaggaagaagtcaagatagtttaaacgaggaatcaacccttcttccaaggagtccgtatgcttcagcaaaagtatttgcacatgagattaataaaatttacagggattcttatggaatctttggagtaaatgggattttatttaatcatgagtcaccaagaagaggagaaacatttgttactagaaaaattactaaagcaattggaagaattcatcatggattacaagaaaaattaacattaggaaacctaaaagcatcaagagattggggatttgctggagactatgtaaaagcaatgtggatgatgatgcaacatgaaaatcctgatgattgggttgtagctaccggcaaaacacacaccgttgaagaatttttaattgaagcttttaatatagttgatttagattggaacgaatatgtaattacttct

SEQ ID NO: 284512 - DNA, 859 bp, Unknown
  Bacterial polypeptide expressing nucleotide sequence isolated from the Sargasso Sea
gacatagaatttatagagttagatgtaatagaccaagcaaatataagaagagcaatagaaaaaacaaaaccagatgttgtttataatttagcagctcaatcatttgtaggcttatcttttgaacaaccagaacttgcaactttaattgacgctatgggtgtattaagaatgctagaaagttgtaaacaagttaatcctgagataaaattttatcaggcttcaacaagtgaattgtacggtaaagtttttgaaacaccacaaaaagaaacaactaagttttggcctagaagtccatatggtgttgcaaaattatatggtcatcatataacaataaattatagagaggcttataatatgtttgcctctactggtattttatttaatcacgaaagtcctatgagaggtgaagattttgttactagaaaaatatcaaaaggtttagcactatggaaaaaagaagatagaccaattattctaggtaatttaaatgcaaaaagagattggggtcacgcagaggactttgtagagggtatgcagttaataatgaatcacacaaaagcagatgactttgtattagcaactggtgtaattcatactgtaaaacaatttttagagatgtctttagattatctaggcattaatttttattggaattcatctggtgaatgttttgaaagagaaacaaataaaaaaatatctacggtagataagaaacattttagacctgctgaggttgatatattacaaggtgacgctactaaagctaaaactgaattaggctggaaacataaacacaatgtagaaagtttaatgagagaaatggtagacgcagatatgagaaggtattataaaaaatgaa

SEQ ID NO: 284513 - DNA, 169 bp, Unknown
  Bacterial polypeptide expressing nucleotide sequence isolated from the Sargasso Sea
aatgggaaaatcaaaagttgcattaatcacaggcattactggacaagacggttcttacctagcggaattacttttgaaaaaaggttatgaagttcatgggataagaaggcgtagttcatcttttaatacaggacgaatcgatcatatattcgataaattacatatacac

SEQ ID NO: 284514 - DNA, 658 bp, Unknown
  Bacterial polypeptide expressing nucleotide sequence isolated from the Sargasso Sea
gatgaaaaaagcatttattacgggaattactggacaagacggctattacctatctaaattactactggaaaaggattatgaaatacatggaattgttagaaggtcatcgtcaataaatacagcaagaattgatgaatttattgcagatcataaaaatgacaataaatttaaattgtattattcagaccttcttgattcatcatctttaaattctcttataaacaatattcaaccagatgaaatctataatttagctgctcaatcacatgtagctgtatcttttaaaaatccaatatacacttctcaggttggaacacttggttccttatctttgttagaagctgtaagaaattctgataaagacattaagttttatcaagcatcatcatctgagatgtatggaggtggttctaaaaaatcattaaatgaagtttcaatatttgatccaaaaagcccttatgctgcatcaaaagtatttgcacataatgttacaaaactctacagagaatcttacgatatttttggtgtaaatggaattttattcaaccatgaatctcctttcagaggtgaaacttttgtaacaaggaaaattacaaaggccgttggtcgaatacatttaggcattcaagaaaaacttactttaggcaatcttgatgcg

SEQ ID NO: 284515 - DNA, 496 bp, Unknown
  Bacterial polypeptide expressing nucleotide sequence isolated from the Sargasso Sea
catgtcaaaaaaagttgcgttaataaccggtgttacaggccaagatggctcttacttagctgagttgttacttgaaaaaggttacgaagtacatggtattaaacgccgtgcatctagctttaatacagagcgagtggatcatatttaccaagatcgccacgaaaccaaccctcagttctttttacattacggcgatttaaccgatacgtctaaccttacgcgtattttaaaagaggttcagccagacgaagtatataacctaggcgcacaaagccatgtagcggttagttttgaggcaccagaatacaccgccgatgtagatgcaataggcacattgcgtttgcttgaggcaattcgctttttagggcttgagaaaaaaaccaagttttatcaggcgtctacctctgagctatacggtgaagtacaagaaataccacaaaaagaaacaacgccgtttcacccgcgctcaccttatgcagttgcaaaaatgtacgct

SEQ ID NO: 284516 - DNA, 766 bp, Unknown
  Bacterial polypeptide expressing nucleotide sequence isolated from the Sargasso Sea
aatgaaaaaaatagcattaataactgggatcacaggtcaagatgggtcctatttagctgagtttttattaaaaaaaaattatgtagttcacggattaataagaaaatcttcaactttcaatacgaaaagaattgatcatatttatatagatccacataacaagacaaacttttttttacattatggagatttaaccgatactaatagtatttataatttaattcatagaattaggccaaatgaaatatataatttaggagcacaaagtcatgtcggtgtttcttttgaaaatcctgaatatacttcagaagtttcaggaattggaacacttaggttactagaagcaataagatttcttaaaataaaaaatattaaattttaccaagctagcacttcagaactttttggtgaaacatatggaaaaaatatctttaacgaaaaatcaaaatttcatccaaaatcaccatatggagttgctaaattgtattcatattggatcacatctgtttatagagagtcgtacggaatttttgcatgcaatggtattttatttaaccatgaaagcccaaggagaggtgaaactttcgtcacaagaaaaataacaagatttttagcaaaaaaaaaattaggaagtaaagatattttatatttaggtaatcttaatgcaaaaagggactggggacacgcaaaagactatacggaaatgcaatggagaattttacaacaaaaaaaaccagatgacttcgttgtagccacgggacaggct

SEQ ID NO: 284517 - DNA, 583 bp, Unknown
  Bacterial polypeptide expressing nucleotide sequence isolated from the Sargasso Sea
agtccttatgcagcatctaaagtttttgcacacaatatgacaaaaatatatagagactcatatgatatgttttgtgttaatggaattttattcaatcatgaatcacctcaccgtggagagacatttgttactagaaaaattacaagagctgcaacaaggatatctcttggaattcagtccaaactaacacttggaaaccttgaagcaagtagagactggggatttgcaggagactttattgaaggtatgtggatgatgatgcagcataataaagctgatgattgggttcttgctactggtcaaacacatactgtaaaagagtttctaaaaattacttttgataagcttgatttaaactgggaagactatgtggaaacttctgagcgatatttcagaccaaacgaggtagattatcttttaggcgatccttcaaaagcaaaaagtgaattagggtgggagcctaaaactagtattgaagaacttgttgatttgatgatagaaagtgatttaaatttagcaaaaagagaacaagttcttttaaatgagggtttaattgaaccaacctgggaaagcctaaactaat

SEQ ID NO: 284518 - DNA, 529 bp, Unknown
  Bacterial polypeptide expressing nucleotide sequence isolated from the Sargasso Sea
actcgtaaaattacccgcgctatctctaatattgcttatggtttagagccttgcttatttttaggcaatatggacgccctgcgcgactggggccatgccaaagattatgtgcgtatgcaatggatgatgttgcaacaagaccagccagaagatttcgttatagccacaggcaaacaaatttctgttcgcgaatttgttcgtatgtcagccaaagaggccggtattgagttagcctttagcggcgaaggtgttgaggaaatcgctactgttactgcggtggacaatagtaaagctcctgcagttaaagtaggggatatcatagtgaaagttgacccacgttatttccgtccggcagaagttgaaactctgttaggtgatccagccaaagcgaaaaacaaactgggctgggaaccagagattcaggtagagcaattatgtgcggaaatggtggctcatgacttagataaagccaaacaacatgcactgctgaaaaagcatgggtacgatgttagcgtgtcattggaataac

SEQ ID NO: 284519 - DNA, 586 bp, Unknown
  Bacterial polypeptide expressing nucleotide sequence isolated from the Sargasso Sea
atgtttggaagaatggttgaaaacccagctcgagagacaacacccttttaccctagaagtccatatggagtttcaaaactctacgctcactggattacaaaaaactacagagagtcatatggaatgtttaactgctcaggaattctatttaatcatgagtcagagaggcgaggcgtagagtttgttacaagaaaaatctcagacggtgttgctaggattcatcttggactatctgattgcattacactgggaaatcttgaagcaaagagagactgggggtatgcacctgactatgtagaggcaatgtggttgatgcttcaacaggatagcccagatgactatgttgtcgcaactggaacttgctactcaataagagattttttaaatgaagcttttttagcaattggagtacaagactggtctccatacgtcaagcaagatccaaaatttatgagacctgcagaggttgatgttcttgtgggagataattcaaaagcaagagagcaattaaactggaaacctagaacttcttttaaggatctagttaagatcatggtagagaatgacatcaattctcttaaataga

SEQ ID NO: 284520 - DNA, 710 bp, Unknown
  Bacterial polypeptide expressing nucleotide sequence isolated from the Sargasso Sea
cactcttagaattctagaagccattaaattattagggttaattaataaaactaaattttatcaagcttcaacatcagaaatgtttggtaatgcaaaaaaattgcccattactgaaaaaactaattttgaacctgttaacccttatggtgttgcaaagttgtatgcatattggatgactaagatttacaggcaggcttacggtatgcatgcctctaatggtattctgtttaatcatgaaagtccaagacggggtgaaaattttgttacaaaaaaaatagtttcttcaatagtaaaaattaaacataataaacaaaagtttttatatttaggaaatttagattctaaaagagattggggacatgcaaaagattatgtttttggaatgtggcttatgttacaacaaaaaaaatcagatgattatatattatcaactggaaaaagttactcggtaagagattttgtagaaaaatgttttgattatattggtataaagataaaatggaatgggaaaggcttaaaagaaattggaataaataaatctaataacaaaacaattgtaaaagtagataaaagatatttaaggcctaatgagctacatcacttattaggtaattctaataaggcatttaaaactttaaagtggaatcataaatataatataaattctttaattaaagaaatgatgaatgatgaattaaaaaaatattaat

SEQ ID NO: 284521 - DNA, 504 bp, Unknown
  Bacterial polypeptide expressing nucleotide sequence isolated from the Sargasso Sea
tatgaaaaaaaaaattgcacttatttttggagttactggacaagatggctcttacttatctgaatttttattgaaaaagggatattttgttcatggagtaaaaagaagatcgtcgtcatttaacactggtagaatagatcacatttaccaagatccttttgagagtaagagaaatttttttttacattatggcgatgttacagacgcaatttctgtatccagtttaatcaagtccatcaaaccaagtgaaatatataatttggctgctcaatctcatgtttcagtttcttttgaagttccagagtacacagcaaatgctgatgcaattggagcattaagaatcttagaggctataaagtttcatggttacgaaaaattaacaaaattttatcaggcaggaacatccgaaatgtttggaaaagttaaacaaattcctcaaaatgagaaaactcctttttatccaagaagtccttatggtgttgctaaagtatacgcacattggat

SEQ ID NO: 284522 - DNA, 761 bp, Unknown
  Bacterial polypeptide expressing nucleotide sequence isolated from the Sargasso Sea
ttcgtttaaaaatccagtatataccacacaagttggcacattaggttcaatatccatacttgaatcaattagacatagtaaaaaagaaattaaattttatcaggcatcttcctcagaaatgtatggaggctcagaaaaagtcaaactcaatgaagaatctaaatttgatccaaaaagtccctacgcagcttcaaaagtttttgcccatgatattacaaaaatatatcgtgactcgtatgatctgtttgcagtaaatggtattttatttaatcatgagtcaccaatgagaggagagacttttgtgactcgaaaaattagcagagctgtaggaagaatttctttgggactacaagaaaaattaactttaggtaacttagatgcaagcagagactggggatttgctggagactatgttgaagcaatgtggatgatgctccaacatgacaagccaggagattgggtagttgcaactggagaaacccatacagttaaggattttgcaaaaagcgcttttgagaaagtaggacttaattgggaagactatgtggaaacatcagaaaaatatcatagaccaaacgaagtaggctacctattaggtgatccaactaaagttaaaaatgagttaaattggtctccaaaaacttcatttgatgatttagttaaaatgatggttgattatgatattgagctagcaactaaagaatcagtattaataaaagaaaagttaattaaaccaacgtgggaacatcctaaagaataat

SEQ ID NO: 284523 - DNA, 646 bp, Unknown
  Bacterial polypeptide expressing nucleotide sequence isolated from the Sargasso Sea
aaaaaaaatatttgacgagaattctaaattttatccaagatctccatatggagttgcaaaactttattcttactggattaccagtgtttatcgagaatcatatggaatatttgcatgcaatggtattttatttaatcacgaaagtccaagaagaggtgaaacatttgtaactagaaaaattacaaggtttctggctaaaaaatatcttggctctaaagaaatactttatttaggaaatttaaatgcaaaaagagattggggacatgctaaagattttgtagaaatgcaatggagaattttacaagcaagtaaacctgatgactatgtaattgccacaggcaaaacttacacggttaaacaatttgtagaaattgcatgtaagtttataaatataaaaatatattggtctggaaaaggaattaatgaggtaggatatttttataataaaaataaaaaaaaacaaatacttgtaaaggttgaccaaaaatattttagaccaaatgaggttgactatctaagaggtgattctaaaaaagcatataaaagatttaattttaaacccaaatataattttagatcgttagtgaaagaaatgatgatgaatgatattttgcttgaaaaaaaaaatagtggtttaaaagtataa

SEQ ID NO: 284524 - DNA, 625 bp, Unknown
  Bacterial polypeptide expressing nucleotide sequence isolated from the Sargasso Sea
aattatagagaggcatatggaatgttcgcttgtaatgggattctttttaatcatgaaagtccgaggagaggtgaaacatttgttactagaaaaataactcgagggctatcaagaattaatgaaggtatagaagattgtatttatttaggaaacttaaattcattaagagattggggccatgctagagattatgttgagatgcaatggagaatgcttcaacaagctaaacccgctgactatgtaatctcaacagggaggcaagaatcggtaaggaaatttattgaactttctgcaaaagctataggttggaataaaggggaaaatactcctggtattatttggaaaggtgagggattagaagaagttggtattagagcagacaatggtaaagtggtagtcaaaattgatccaaggtactttcgtccatgtgaggtagatacccttttaggagatccatctaaagcttcagaagaattaggttggaaagcaaccacatctttggaagaattggtcaatgaaatgataaaagaagatcttcttcaagccaaaaaagatgtacttattttaagtcagggatttaatatcaactctactaaggaaaatccgcccaatttaaaagtttgaa

SEQ ID NO: 284525 - DNA, 676 bp, Unknown
  Bacterial polypeptide expressing nucleotide sequence isolated from the Sargasso Sea
atgaaatttaaaaaagctttaatcactggtataacaggtcaagacggatcttacctagcagaatttttattgaaaaagaaatatattgttcatggaattaaaagaaaatcatcatcatttaacacctcaagaattgattatatctatgataacaaaaagtataaaaataaattttttttacattatggtgatcttttagattcaaattccttaattaaaattattagatcagttcaaccaaatgaaatatataatttagctgctcaaagtcacgttggtgtaagttttcaattaccaaattatacaactcaagtaaattcaattggtactttaaatttactccaggcaataaaggatagcggtctttcttctaaaacaaggttttatcaagcatccacttctgaactatttggtgaaatacaggaaaaaaaacaatctgaaaaaacaaaattttatccaaaaagtccttatgcaacttcaaagctatttgcatactggataacgaaaaattatagagaatcatataaaatgtttgccagtaatggaattctttttaatcatgagtcaccaagaagaggtgaaacatttgtaacaagaaaaattacaattggtctatctaaaatcatttatggattagaaaagtgtttgtacttgggaaacatttactctttaagag

SEQ ID NO: 284526 - DNA, 629 bp, Unknown
  Bacterial polypeptide expressing nucleotide sequence isolated from the Sargasso Sea
aatgagaaaagttgctctaataactggtatcacaggccaagacggatcatacttaactgaatttctattaaaaaaaaaatataaagttcatggcactataagaagagtggcattagaggacaaaactcatagattgtggagattacaaaaattattaaaacaaattacattacatgcggcttctttagagagttatgcaagtatggttaaaataattcaaaagataaaaccaacagaaatttatcatttagccgcacaaagttatgttgattattcctttagagatgaattctctactttaaacataaatataaatggaactcattacattctttctgctataaaagatttttcacctaaatctaaattctatttcgccggatcatcagaaatgtttgggaaagctaaaaaaaagcctcaaaatgaaaacacatccttttatccaagatctgcctacgggatttcaaaagtgactggttatgaattaactcgaaattacagagaagcatataatcttcactgtagtactggaattttatttaatcatgaatctccaagaagaggttttgaattcgtgacaagaaaaatatctcatgctgttgcaatgataaaatgcggtcttcagaaag

SEQ ID NO: 284527 - DNA, 602 bp, Unknown
  Bacterial polypeptide expressing nucleotide sequence isolated from the Sargasso Sea
acaaaacgaaaaaactaattttgttccaagaagtccatacgctgtttccaagttatttgctcattggattacgattaattatagagaggcatataatatttttgcatgcaacggcattctttttaatcacgaaagtcctataagaggagaaacttttgttacaaaaaaaattgtttcagctttatgtaaaatcaaaaaaaacaaacaaaaaaaactttttctgggaaatttatacgcaaaaagagattggggacatgcaaaagattatgtaattgcaatgtggaggatgctccaacaaaaaaaaccagatgattatgtgattgcaacaggtcatcagtactctgtaaagaggtttgtaaatttatgtgctatccaattgaatatgaaattattgtggaaaggcaaaggattaaaagaaaaatgttattgggaaaataaggtaattatcgaaatagataaaaaatattttagaccaacagaggttgagtctttaaaaggagattatagaaaagcaaaaaaactacttaaatggaagccaaaaataggaattcaagatcttgttagagaaatgattaatcatgaattaagtaatgataaataag

SEQ ID NO: 284528 - DNA, 642 bp, Unknown
  Bacterial polypeptide expressing nucleotide sequence isolated from the Sargasso Sea
tatgaaaaaaaaaatagcactaatatttggagtaactggccaggatggttcctacttgtcagaattattaataaaaaaaggatatttagttcatggagtaaaaaggagatcatcgtctttaaatacaagtagggttgatcatatttatcaagatccgtttgaaaaaaatagaaatttttttttacattacggagatgttacagatgcaatctcagtttctgcattaataaaaattttaaagcctgatgaaatatataatttggctgcgcaatctcatgttgctgtttcttttgaagttccagagtatacagctaacgctgatgctataggagttgttagaattttagaagctattaaatttcataacttaataaaaaaaacaaagttttatcaagcaggcacatctgagatgtacggaaaggttcgtgaaactcctcaaaatgaaaaaacccctttttatcccagaagcccttatggagtagctaaagtttatgcacactggataactgtaaattatagagaagcatacaatatttttgcttgtaacggtattttgtttaatcatgaaagcccaagaagaggcgaaacatttgttaccaaaaaaattgtttctgcgctagttaatattaaatttggaaaaca

SEQ ID NO: 284529 - DNA, 682 bp, Unknown
  Bacterial polypeptide expressing nucleotide sequence isolated from the Sargasso Sea
tatgacattaccaaaatataaaagagacaaattatatttttatcaagccgggacaagtgaaatgtatggtaattttccacaggttccacaaaatgaaaatacgccatttgctcctatctctccatatgcttgcgcaaaggtatacgcatatcatataacaaaggtataccgcgaagcatatgggatatttgcgtgtaatggtatattatttaatcacgaatctcccagaagaggagacaactttgttacgcaaaaaatcgttaaaaacgtaaaagatattatggatggtaaaaaacaatacttgactttaggtaatttagatagtcaacgcgattggggacacgcaaaagattatgtatatggaatgtggttaatgttacaaaatgatacaccagatgattttgttttatcaaccggtattacaacgtcggtaaaaaaatttgttgaattatgttttgaaaaaggtggtcgcccgatcacttggtcaggagaaggtttaaatgagttaggtaaagaccgtataactggagatgttttagttaaaattgataaaaaatatgttagacccaccgaagtaaatttactattaggggattcctctaaagcaagagatgttcttaaatgggttccaaaatacgatttaaacgctcttgtagatagtatgtttgagtttaatgaataa

SEQ ID NO: 284530 - DNA, 676 bp, Unknown
  Bacterial polypeptide expressing nucleotide sequence isolated from the Sargasso Sea
caaagtaaaacaaaattttatcaggcatcaacttcagagaatatatggagacaacaatttaaaaaaactaaatgaaaattctaattttaacccaagctcaccatatggtgtgtctaaacttttttcttactggataacgagaaattatagagaatcttataatatatttgcaagtaatggaatattattcaaccatgaatcaccaagaagaggagagacatttgtaacacaaaaaattgtaaaaggacttgtaaaaataaaatataatttacaaggatgtttgttcttaggaaatttaaatgctaaaagagattgggggcatgcaaaagattatgtatttgctatgtggaaaatattacaacataaaaaaccagatgatttttgtattgctacaggaaaaagttttacaataaaaaattttattgatgaagttgcaaagaaccttcaaatgaaattaaaatgggagggaaaaggagtaaatgaagttgcaattaacactagaaacaataaaaaaattattgctgtaaatcaaatgtacttaagaccttctgatattaattctttaacaggagattattcaaaagcaaaaaaattattaaattggaaacctaaaataaatttttctcaactagttaaggaaatggtagattctgaactagataaatattcaaagtaa

SEQ ID NO: 284531 - DNA, 706 bp, Unknown
  Bacterial polypeptide expressing nucleotide sequence isolated from the Sargasso Sea
atgaaggtagctttaatttttggtattacgggtcaagatgggtcttatttagcaaggctcttattaaagaaaagatatatagttcatggagtaaaaagaagaagttcttcactaaatacaaaaagaattgatgatatttatgttgaaccattctcaaaaaaccaaaattttatacttcattacggtgatataacggatgctttatctactacgaacctaattaacaaaataaaacctgatgaaatttataatttagcagctcaatcacatgtagcagtttctttcgatgttccagaatataccgcaaataccgacgggcttggtccattaagaatattagaaacaataagaaattcaaaaaaaaaaattaaattttatcaagctggtacttctgaaatgtttggtaaagtcgataaaatacctcagaatgaaaaaacaaattttcatcctcggagtccttacgctactgcaaaattatatgcacactggataaccaaaaattacagagatgcttacggactattcgcttgtaacggtatactatttaatcatgaaagccctatgagaggtgaaacttttgttacaaaaaaaattgtgaaagcacttgtgagaataaaaaataaaaagcaaaaaaaattatttttaggaaatatttattcaaaaagagattggggtcatgctaaagattatgttgaagcaatgtggc

SEQ ID NO: 284532 - DNA, 847 bp, Unknown
  Bacterial polypeptide expressing nucleotide sequence isolated from the Sargasso Sea
tgtttcttcattaatcaaaaaaattttgccagatgaaatttataatttagcagcacagtcgcatgttgctgtttcatttgaggttccagaatatacagctaatgcagatgcaataggtgcattaagaatcttggaggcgataagattccacaatttacaaaataaaacaaaattttatcaagcaggtacatcggaaatgtatggtaaggttgcccagataccacaaaatgaaaatacaccattttatcctagaagcccttacggagttgcaaaagtttatgcacattggataactgttaattatcgtgaggcttataaaatatttgcgtgtaatggaattttatttaatcatgaaagttcaagaaggggaggaacatttgtaacaaaaaaaattgttaatggattatgtagaataaaatttggtcttcaaaaaactttatatctaggaaatttaaattctaaaagagattggggtcatgctaaagattatgtagaagcgatgtggaaaatgctacaattaaaatcaccaaatgattttgttatttctactggtaaacaatatactgtaaaatattttgtaaacttagttttaaacgaacttaaaataaaatattattggaaaggtaaaaatttaaatactgcatgttttgtaaaaggaagtaatcagaaaattgtaagtattgataaaaattattttagaccacttgaggttgataccttgcttggtaattcaagcaaagcaagaaaaattcttaaatggaaaccaaaatataatgttaaacaattagttaaagagatggtatctgaagaactttatatactaagtaatgataaaaaaatcagataa

SEQ ID NO: 284533 - DNA, 598 bp, Unknown
  Bacterial polypeptide expressing nucleotide sequence isolated from the Sargasso Sea
atgaaaaaaaaaatagctttaatttttggtattactggacaagatggtgcgtatctatccaggtttctgcttaaaaaaaaatatacagtacatggagtaataagaagatcttcttcatttaatacatctagattggacgatatatacgaagatccatccttaaaaaatagaaaatttattctacattatggagatttaattgatagctcatctgtttcttcactaattacaaaaattatgcctgatgaaatatataatttagctgcacaatcacatgttgcggtttcttatactataccggaatatacaagcaatgtagatggaattggaactttaagaattttagatgtaataaaaagtataaataaaaaaaaaattaaattttatcaagctggcacatctgaaatgttcggaggaacacaaaaaaaatcacagaacgaaagcacaccttttgatcctcaaagtccttatgctgcaggcaaggtttttgcacacacaattacaaaaatttataggaaagcatacggcatatatgcttgtaatggaattttatttaatcacgaaagcccactgagaggagaaacttttgtaacaaaaa

SEQ ID NO: 284534 - DNA, 940 bp, Unknown
  Bacterial polypeptide expressing nucleotide sequence isolated from the Sargasso Sea
tatgtctaaagttatttttatcacggggattactggccaagacggatattatctatcaaagtcaatgctggaaaaaggaaatattgttcacggcacaataagacgttcatcattaatcaatacaaaaaggattgatgatctaatctctgaatattcaacaaaagaacagctctatctccactattcagatttacttgactcagcctctatttcaagattaataaataaaataatgcctgacgaaatatataatttagcagcacaatctcatgttgctgtatctttcaaaaatccactttattctactcagaccggcactttaggtgcattatcaattcttgaagcaattaaaagtacggataaagatataaagttttatcaagcttcctcttcagaaatgtatggaggggaagaacaaatattgttaaatgaaaattctctttttgatccaaaaagtccatatgcagcttctaaagttttcgcacataatataacaaagatatatcgagagtcctatggaatgtttgctgtaaacggtattttatttaatcatgaatctccaatgagaggtgaaacttttgtaactcgaaaaataactagagcattaggaagaattgttaatgaagtacaatctaaattaacattaggaaatcttgatgcatctagagactggggttttgctggagactatgtagaaggaatgattgcaatgatgtcacatgggcaggcagacgactgggttctcgctacaggtgaaacgcacacagtaaaagagtttctaaatcttgcattcgaatacgttaatttggattgggacaagtatgttttaacatctgaaaaatattttagaccaaatgaggtcaatcatttattaggtgatccatctaaggcaaataaaaaaattaaatttggaagcctaaagtttcatttaatgatttag

SEQ ID NO: 284535 - DNA, 703 bp, Unknown
  Bacterial polypeptide expressing nucleotide sequence isolated from the Sargasso Sea
aaaacatgcagaatttatcaggcttcaacatcagaattatatggaagagttagggaagttccacaaaacgaacttactcccttttatccaagatcaccatatggagttgctaagttatatgcatattggattacaaaaaattacagagaagcatatgggatatttgctgttaatggaattctcttcaatcatgagtctgaaagaagaggggaaacttttgtgtcaagaaaaataacattagctacagcaagaataaataaaggaattcaaaagaaattgtacctaggtaatttagattctaaaagagattggggttatgcaaaagattatgtaaagtctatgtggttgatgctacaaaacaataagcccgaagattttgtgattgcatcaggagaacaacattcagttagagaatttgttgagttagcatttagttttgtttctattaaaattaaatggattgggaaaggtgttcaagaaaaaggaattgacgaaaaaacagggaatacacttatagaaatagatccaaaatattataggcctactgaggtagattcgcttttgggagaccctactaaagccataaagcagttaggatggaatcctaaagaaacaagttttgaaaaacttgttaaaattatggtaaagcatgatattaaattggttgaaaatgaaataagaattaagcaatcttatgagtaag

SEQ ID NO: 284536 - DNA, 607 bp, Unknown
  Bacterial polypeptide expressing nucleotide sequence isolated from the Sargasso Sea
tttgtttgatccaaaaagcccatatgctgcttcaaaagtttttgctcatgatattacaaagatatatagagactcatacaatcttttttgtactaatggaattttatttaatcacgaatctccacatagaggcgaaacctttgtaactagaaaaattactaaagcagttggaagaatttatatgggaattcaagataagttgaccttaggaaatctagaagcatcgagagactggggttttgcaggggattatgtagaaggaatttggttaatgatgcaacatgaaaaaccagatgactgggttttagcatcaggagagtctcataaagtttcagagtttgctgagctagcttttaaaacagcaggtcttgattggtctcaatatgtgcaaacttctgaaaaatatttacgaccaaacgaagtagattttttattaggcgattcatcaaaggcccaaaaagaattaggatggaaaccaaagacttcatttacagcccttgtagaaatgatggttaaagaagatatagaaatggctaaacaagaagatattttgcttaaaaataatttgattaaacctacttgggaaaaccccgttaaaaaatattaa

SEQ ID NO: 284537 - DNA, 532 bp, Unknown
  Bacterial polypeptide expressing nucleotide sequence isolated from the Sargasso Sea
gtaaccagaaaaatcactagaggtttagcaagaatatatgctggtttagattcttgtttatatatgggtaaccttaatgcaaaaagagattggggacatgctaaagattatgttgaaatgcaatggttaatgctgcaacaagaaaacccggaagattttgttattgcaacaggaagaatggaaacagtcaaaaggttcatagaattaagtgccgcaaaattaaactggaacaaaaattctaagaaagatgcaattatatgggaaggagagggtgtaaacgaaataggaaggagatctgatacaaatgaaatagtaattaaagttgatccaagatattttaggccaacagacgttgatgagttacttggggctccaaataaagcttataaaaaacttggatggtctccaaaaatatctctagagagtttaattgaagaaatgattttaaatgacaaggaagaagcaagaaaagaattagttttaagaaatgaagaaaaagattcaattaaaaaattccaaaattatagataaa

SEQ ID NO: 284538 - DNA, 929 bp, Unknown
  Bacterial polypeptide expressing nucleotide sequence isolated from the Sargasso Sea
aagatggatcttatcttgcggaatttttaataaaaaaaaataccaagttcacggaatcattcgaagagtagctcttgaagatgagacacacagaatgtggagaattaggggaattactaataaagtaaaattacatcccgcttctttagaaagctacgcaagcattgtaaaaattattcaaaaaattaaacctaatgaaatttatcatttaggggcacaaagttttgttgattattcttttaaagacgagttttcaacactaaatacaaatataaacggaacacattatttgttatctgcattaaaggatttttccccaaaaactaaattttattttgcggggtcttctgaaatgtttggtaaagtaaaaaaaattcctcaaaatgaaaaaactccatttcacccaagatctgcatacggtatttcaaaagtaacaggatatgatctaacaagaaattatagagaggcttacggacttttttgttgcacaggaattttatttaatcatgagtcaccaagaagaggctttgaatttgtaacaagaaaaatctcacatggtgttgcaagaataaaattaggtttacaaagaaatttaaaattgggcaatattaatgcccttagagattggggacacgcccaggactatgtagaagctatgtggctgatgttgcaacagaaaaaacctgaagattatgtaattggaactggaaagcaattttcagtaaaagaattcgctcggattgcattttcaattgttggtttaaattacaaaaaacatattataattgacaaaagactatttagaccttctgaggttgtatctttgttggcagatccttctaaagcaaaaaaagttttaaaatggaaacaaaaaatatcattcaaaaagcttgtaaaagaaatggtagaatctgacttggagttgtaaa

SEQ ID NO: 284539 - DNA, 403 bp, Unknown
  Bacterial polypeptide expressing nucleotide sequence isolated from the Sargasso Sea
tatgggtaaaaaagcgcttatcacaggtataacagggcaagatggatcttatttagctgattttttattggaaaaagggtatgaggttcatggtattattcgtcgaagtagttcttttaatacaggaagaattaatcatttaattaacaatcaaaaactaaaagaaaaattttacttttatcatggagatttaactgatgcaagtagtctgaatcgcatattagaaaaagttcagcctaatgaaatatataatcttgcagcgcaaagtcatgtaaaagtatcttttgagattcctgattatactgctagagtagatgctttaggaactctacgttttttagatgcaataagagaaactcaaattgattctaaaggttatcaggcatcaactagtgaacttttt

SEQ ID NO: 284540 - DNA, 559 bp, Unknown
  Bacterial polypeptide expressing nucleotide sequence isolated from the Sargasso Sea
gatgacagtaaattatagagaagcttgggatttacatgcttgctcaggaatactttttaatcatgaatcacctctaagaggaatagaatttgtaacaagaaaaattactttgggtgttgctgaaattacaaagaaaaaaaagaaaagtattagtctcggtaacttaaatgccaagagagattggggttatgcaggagattatgtaaatgcaatgtggctgatgcttcaaaagaaaacaccaagtgattatgtaattgcaacaggcgaaatgtatagtgtaagagagtttgttgaaaaggcctttaatgctgttgatactgaaattgaatgggttcttgatgatggagtagagtctgggcgttgcaagaaaactggaaacattcttgtagatataaataaagattttaatagacccgcagaaacagattatctcttaggagatgcaacgaaagcaaaagaagagcttaattggaaaccacaagtaaattttaatactcttattgaaatgatggttaaaaaagatttggatagagttgaaaacgatgtctatggtttttag

SEQ ID NO: 284541 - DNA, 646 bp, Unknown
  Bacterial polypeptide expressing nucleotide sequence isolated from the Sargasso Sea
gatatttttataaatgttaaacctgatgagttgtaccatttagctgctcagagttttgttgctcaatcttttgatgatgaacattcaacattatctgtaaatacatttggtactcatttattaatttcaattttaaaaaaagttaatccagaatgtaaattttattttgctgccacttccgagatgtttggcaaagttcaagaaacacctcaaaatgaaaatacaaaatttaatcctcgttcaatatacggaatcagtaaattagctagttatgaaatagtcaaaaattatagagaatcatataatatatttggttgctcaggaattttatttaatcacgaatcaccaagaagaggatttgaatttgttacacgaaaaattagtttaattgctgcaaaaataaaattaggattagaaaataagatagtgttaggcaatattgaagcaaaaagagattggggatatgcaaaagattatgtggttgctatgcatagtatgcttcaaaatgaagatccaatcgattatgtaattggatcagatgaaacacactctgttaaggactttttaaattatgcattcaaatgtttggatttacattatgaagattattttatcacagacaaaaaattttttagacccgcatgaa

SEQ ID NO: 284542 - DNA, 508 bp, Unknown
  Bacterial polypeptide expressing nucleotide sequence isolated from the Sargasso Sea
tcttttcaaccacgaaagcccacgaagaggagaatcttttgttacaaggaaaattactagatttttaacaagaaaaaagctgggctcaaaagatattttatatttaggaaatttgaatgcaaaaagagactggggacacgcaaaagactatgttgaaatgcaatggagaatcttacaacaaaaaaaagctgaagattttgttattgcaacaggtaacgcttacagtgtcaaacaatttataaatctttcagcaaaaattcttaatttaaacattaaatggaaaggaaaaggattaaatgaaaaatgttatttaattaatggaagaaaaaaagaattaataattaaagtagataaaaaatactttagaccaaatgaagtacattatctaagaggcaatgcctcaaaagccctaagatccttgaattttaaacctaaatattcatttttagaattagtagaagatatgattaaacatgatcttgaattagctgaggaagaactgatttaa

SEQ ID NO: 284543 - DNA, 529 bp, Unknown
  Bacterial polypeptide expressing nucleotide sequence isolated from the Sargasso Sea
tatgagttgcatgcttcgaatggaattctctttaatcatgagtctcctaggagaggggaaacttttgtaactaaaaaaattacaaaagcagtagctagaatttctaaaggccatcaagaaagtcttcaattaggaaatttggatgcaaaaagagattggggatatgcgaaagattatgtcgaatctatgtggctaatgcttcaacaggagaagcctgatgactatgttattgcaacagggattacaaaaactgtgagagaatttgttgaattggcttttaagaatgtaagtattgatattacttgggaaggtagtggtgtaaatgagaaaggtttgtgctcaaaaacaagaaaagaacttgttactatcaatcctcgctattataggcctgctgaagttgaattacttcatggtgactccacgtatgctcaaaaaaaacttggatggaaaccaaaaacaacctttgaggagcttgtaaagatcatggttgaatatgatttaaaacatgataactatgggtttgattaaa

SEQ ID NO: 284544 - DNA, 823 bp, Unknown
  Bacterial polypeptide expressing nucleotide sequence isolated from the Sargasso Sea
atatacaatctggctgcccaaagccatgttcatgtgagcttcgaaactccagagtacactgccgactctgacgcattgggcacgctgagactccttgaggcaattcgtattctgaaaatggaaaatcaagttagattttatcaagcttcaacgtccgaactttttggaaatacgaaggaggttccccaaaacgagcgcactcaatttaacccacggagtccgtatgctgtagccaaactatattcttactggatcgtaaaaaattatcgagaggcctacggattacatgcgtccaacgggatcctatttaatcacgagggccctactaggggcgagacattcgtaactagaaagataacacgagaggtagctaagattcatttgggaataaagtcacgattatttctcggcaaccttgaggcaaaaagagactggggacatgctaaagattatgtcaggggaatgtggttaatgcttcaacaagaaaaagctgatgattatattttagctacgggaaaatcacactccgtgcgagagttcgtggaaaaggccttttcacatataaatagaaaaatatcatggactggttcaggaacacttgagaaagggattgatgcacacactggtgaaattttagtagaagtacttgcagagttttaccgaccaacggaggttaaccttttacaaggtgattcctcgaaggctgaagacgcttttaaatggcaacctactataagctttgatcaactggtggaagaaatggtgaaaaaagatattgctctacttcgaaatctaaacacctacgataataataaaatttaaa

SEQ ID NO: 284545 - DNA, 631 bp, Unknown
  Bacterial polypeptide expressing nucleotide sequence isolated from the Sargasso Sea
tataaataatgaaaaattaaatgaggaaagtctatttattccaaaaagtccgtatgctgcaggaaagctttttgctcacaacctgacaaaagtatatagggagtcctatgacttattttgttccaatggaattttatttaaccacgaatcaccatacaggggtgaaacatttgttacaagaaaaatatcgagggctgttggaaggattaaaaataatttacaaactaaattaacgctcggtaacttagaagctgtgagagactggggatttgcaggagattatgtagaagggatgtggcttatgctgcaacatgatgagccagatgattgggttcttgcaacaggagaagcacacagcgtaaaagaatttgcaaaggtagcttttgaagcagtcgatcttaattgggaagaatatatagtttcagatgacaagtatctaaggccgaatgaggtaaaccacttactaggtgactcctcaaaagctagaaaaaaactaaattgggagcctaaagtaaattttgaagatctagtaaaaatgatggttaatcatgacttagagttagcagcaaaagagaaagtactacatgaaaatggaatgttggctccaacttgggaatatcctactaactaa

SEQ ID NO: 284546 - DNA, 628 bp, Unknown
  Bacterial polypeptide expressing nucleotide sequence isolated from the Sargasso Sea
aattcagttttaaatccaaaatcaccttacggagtggctaaattatttgctcaccatataacaaaaatatatagagactcctacggtatttttgcttgtagcggtattttatttaatcacgaaagcccgagaagaggagaaacatttgttactagaaaaattacaatgttcttagctaaaagattaatgggaaataaaaaagttttaaaattaggtaacatttatgcaaaaagagactggggacatgcaaaggactatattgaaatgcaatggaaaataatgcagcaaaaaaaaccagaagattatgttatagccactggacaaacgcatagtgtaaaagattttattaattatgcttgcagaattgccaagataaaaattaaatgggcaggaaaagggttgaatgaaaaagcatatgaaattaagggaaataaaaaaaaattgatgattgagatagataaaaaatattttagaccactagatataaactatttaagaggtgatccatcaaaggctaaaaagaaattaaaatataaaatcaaatttaagtttaaagacttagtaaaagatatgattacaaatgatttattgaaatataaagaaaataaatttattgatcgtagttaat

SEQ ID NO: 284547 - DNA, 886 bp, Unknown
  Bacterial polypeptide expressing nucleotide sequence isolated from the Sargasso Sea
tatgaaaaaaaaaattgcacttatatttggagtaacaggtcaagatggatcttatctggctgagtttctaataaagaaaaaatatgttgttcatggtgtaaagagaagatcttcttctataaatacaaatagagtagaccacatttatcaagatccacatgagtctaaaagaaattttattttgcattatggcgatataactgattcgacttcagtatctaaaattattaaaacagttaaacctaatgaaatatataatttggcagcacaatcacatgttgcagtttcatttgaagttccagagtacaccgctaatgcagatgcgttgggagctttaaggatattggaagcaattaaatttcacaagatggaaaaaaaaactaaattttaccaagcaggtacttctgaaatgtttggtaaagttcaatcagttccacaaaatgaaaaaacaaacttttatccactaagtccttatggtgttgcaaaactttatggtcactggattacaaaaaattacagagaggcctataatatttttgctgcaaatggaattttgtttaatcacgaaagcccaagaagaggtgaaacttttgttactaaaaaaattgttaaagccatgatgaaaataaaagaaggtacacaatcaaaattgtttattggaaacttaaatgcgaaaagagactggggacacgctaaagattatgttgaggcaatgtggaaaattctccaacaaaaaacttcagatgattatgtgattgcaactgggaaacaatatagcgttaaacaatttattaacttagttgcacaagaacttgatatgaaaatagtttggaagggaaaaggaattaaagagagagcttatgataaaataagtaaaaaagttatt

SEQ ID NO: 284548 - DNA, 495 bp, Unknown
  Bacterial polypeptide expressing nucleotide sequence isolated from the Sargasso Sea
tttggttaaaaaaatgaagaaagttgcactaataaccggtatcacgggtcaggatggagcttatcttgccgatttgctgcttaaaaaagactatcttgttcacggtatcaaaagacgttcatccagttttaatactgctcgaattgaccatctttatcaggacccgcacatagacaatcgaaattttgttttacaccatggagacctgactgattctactaatatgatccgtatcatacaggaagttcagcctgatgaaatttacaatcttgctgcccaaagtcacgtaatggtttcatttgaaacaccagaatacaccgcaaacgctgacgcgctcggaactttaagaattttagaggcaataaggcttttgaggttatcagataaaactaggttctatcaggcatcaaccagcgagctatacggtatggcacaggaagtcccacaaaatgaaaaaacacctttttatccacgttcaccctatggagtagccaa

SEQ ID NO: 284549 - DNA, 520 bp, Unknown
  Bacterial polypeptide expressing nucleotide sequence isolated from the Sargasso Sea
gatatgttctgttgttcagggatattgttcaatcatgaatctccattaagaggagaagagtttgtaaccagaaaaataacttctcaacttagtaagattaagttaggtttaatagatacgcttgaattgggaaaccttgaagctagaagggattggggctttgcaggagattatgttaaggctatgaacatgatgttattacaagaaaagcctgacgactatgttgtagctacaggagagacgcattccgttgctgaatttgtagaaagagctgcttcatatctaggtatagatttagtttgggaaggagaaggaaagaatcaacaaggattagataaaaataataataatgtcattgttaaggtgaatgaagatttttacagaccggctgaagtagacactctaataggagattcatcgaaagctaacaaagttttgaattggaaaccagaatgctcctttgataacttagtagaaatgatggtcaaagaagatttagatggtctagaaaataaatagt

SEQ ID NO: 284550 - DNA, 377 bp, Unknown
  Bacterial polypeptide expressing nucleotide sequence isolated from the Sargasso Sea
aatgaaaagagctttcataactggcgcaactggtcaagatggatcttatttaattgaatttttacttgataaaggatatgaggtgcatggtattattcgaaggagtagttcttttaatacaagtaggattgatcatatcataaataataatagatttaaagatcgatttatttttcaccatggcgatataacagatgttagtaatctcactcgattattggaaaaaatacaaccgcatgaaatttataatcttgcagcccaaagccatgtaaaggtttcattcgaaatacctgattacacagctcaagttgatgctttaggtactttgagaattcttgatgctattagagagaacaaattagaaactaagttctatc

SEQ ID NO: 284551 - DNA, 898 bp, Unknown
  Bacterial polypeptide expressing nucleotide sequence isolated from the Sargasso Sea
cgcattgatcacagggatcactggccaagatggccaatacttagccgaagtactccaccaagaggggtacaaggtatatggcctaatcaagggacagcgaaacccaaaagccgagatgattaccacagggttcccgtttgttgaactggtcgaaggagatctacaagatctctcatcactcatcgcagctctggaatacacccaaccccacgaggtctacaaccttggcgcgatctctttcgtagcactgtcattcaagcaagcggaactaacagccaatatcactggcttaggagttttgaggctcctggaagcaattcgactcgtgggcggcgaaaataacccaatccgcttctatcaagcatcgtctagcgaaatgttcggcaaagttcgcgagacccctcaaaccgaactcaccccactccatcctcgcagcccatacgggtccgccaaagtattcggacaccacaccaccgtgaactatcgcgagagctatgggctctacgcatgcagcggcattctcttcaatcacgagtcgccgaggcgtggaatcgaattcgtaacccggaaggtcacgaatgctgtcgccagaatcaaacttggacttcaagaccacgtcgccctcggcaatctggacgccaaacgcgattggggcttcgctggtgattacgtcagagcgatgtacctaatgctgcagcaagacgaacctgatgattttgttgtcgcaactggggaaacccatgccgtcagcgagttcgtatccttggcgtttgcggctgtgggtatagatgactgggagtcttacgttcgcatcgaccaacgctttttccgacccgctgaagtagaccttctagtgggagatgcatcaaaggcgcgaagccagtgggatggcagccag

SEQ ID NO: 284552 - DNA, 529 bp, Unknown
  Bacterial polypeptide expressing nucleotide sequence isolated from the Sargasso Sea
tcatacgatatgttttgtgtaaatggtatattgtttaaccatgagtcaccttatagaggagaaacatttgtaactcgaaaaataactagagcagtgggaagaatcaagcttggtttgcaatcacaattaacccttgggaatctagaagcatcgagagattggggttttgcaggtgattatgtggaaggtatgtggagtatgatgcagcacgacagtgcagaagagtgggttttagcaacaggcaaatcaataactgtaaaagaatttgttgaactagcatttaaatatgttgatttagaacctgatcaattcattaaaacttccgatagatactttaggcccaatgaagtagagtttcttcttggagattcttctaaagcaaaagaaaaattgaattgggaagcaaaaacagacattgatacacttgttaaattaatggttgatagtgatattaatttggccaaaagagaacaaattttgttaaaagaaaatcttattaaaccaacatgggagaatccaacaagttaga

SEQ ID NO: 284553 - DNA, 772 bp, Unknown
  Bacterial polypeptide expressing nucleotide sequence isolated from the Sargasso Sea
atgaaaagagctttaataacaggaattaatggaatggatggaagtcatttagctgacttattgttaaataagggttatgaagtgtttggtatggagagaaggtgttcatcacctaatagggttaatactaaacacttagtcaatagaataaattttattaatggagatttaactgaccaaaattcacttttaagatgtattaaagaatcaagccctaacgaaatatataatttaggtgcacaatcatttgttggtgaaagttggaatacacctgaacagacaagtgatgttaccggtttgggtgtattaagaatgttagaagccattagagagtatggagaagatgttaaattttatcaagcttcatcatcagagatgtttggtagaatggttgaaaatcctgccaaagaatctacacctttttatcctcgttcaccatatggtgtttctaaattatatggacattggattacaaagaattatagagagtcgtatgacatgtttgcatgtagtggtattttatttaatcatgaatccgaaagaagaggtttagaatttgttacaagaaaaattaccaatggagttgctcaaatatataatggaatgatggataaaattacattaggtaatttagattcttatcgggattggggatatgcacctgattatgttgaggcgatgtggatgatgttacaacaggaaaaacctgatgattacgtaatagcaacaggtgagactcactcaataagagaatttttagacgttgctttta

SEQ ID NO: 284554 - DNA, 880 bp, Unknown
  Bacterial polypeptide expressing nucleotide sequence isolated from the Sargasso Sea
gggtcaagatggttcttatcttgcagaatttttaattaaaaaaggatatgaagtccacggaattgtaagaagaattgctctggaaaatcaaaatcatagattatggcggttaaaaaaaatattaaaaaaaattaatttacattcaggatcaatggaaagttatgcaagtatttttaaaatttttaataaggtaaaacctcatgagttttatcatctagcagcacaaagttatgtagactactcttttgaagatgaattttctactttatcatcaaatatagcttcaacacattattgcctctccgcaataaaagaaagtggttataattgtaaattttactttgcaggatcatctgaaatgtttggtaaggttagagatatcccacaaaatgagaatacaccttttcatccaagatcaccttatggtatttctaaagtagctggttttgatttaacaagaaattatagagaatcttatggtcttcatacttcaaccggaatactatttaatcatgaatctgaaagaagaggttttgaatttgtaactagaaaaatatcacaagcagttgcaatgataaaactaagaaaacaaaaatttcttgaattaggaaatttagatgcacaacgagattgggggtatgcgcctgaatatgttgaagcaatgtggttaatgctacaacagaaaaaccctgatgattatgttgtgggtacaggtgaaacatatagtataaaatattttgcagaaagagcgtttgatattgttggtttaaattatcaaaagtttgtaaaaatcaataaaatttattataggccagctgaagtagagttattaattgctgatttcagcaaaataaataaaaaatttggttggaggcaaaaa

SEQ ID NO: 284555 - DNA, 696 bp, Unknown
  Bacterial polypeptide expressing nucleotide sequence isolated from the Sargasso Sea
agctcgtcttgattctgttttttctcaattaaaccttgaatatgcagatatgactgatatgtcatcattaattagagttttaaatcaagttaaaccagatgaaatttataatcttgcagctcagtctcatgtaagaatatcttttgatcaacctatatatactgcacaagtagttgcagttggagttatgaatttattggaggctgttagacttatatgcccaaaagcaaaaatttatcaagcatcttcttctgaaatgtttggaaataatattgatgaagatggatttcaaagagagtcaactccaatgagcccagtttctccttatggatgtgctaaagtttttggttataacttggttagaaattacagaaattcatataacctatttgcaagcaatggaattctctttaatcatgaatcacctagaagaggaacaaattttgtaacaaataaagttgcaaaagaagcagtaagaattaaaatgggcttatcaaaagagttaaagctagggaatttaaatgctgctagagattgggggcatgcaaaagattatgtcaaatgtatgtggcttatgctacaacataaaaagcctgatgattttgtagtttctacagggaaatcacatacagttcaagatttagttaattacgtttttaattctcttgaaataccaaattgggagcagttaattaa

SEQ ID NO: 284556 - DNA, 485 bp, Unknown
  Bacterial polypeptide expressing nucleotide sequence isolated from the Sargasso Sea
tcctagaagaggtgaaacatttgtatctagtaaaatagtaattggattaacaaaaattaaactaggtctgcaagattatatgactattggtaatctagacgctagcagagattgggggcatgctaaggattatgtagtaatgatgtggaaaatgctacaattaaaaaagcctgaagattttgtaatagcaactgggaatacttacactgttagagaatttataaattgtgcttgcaaatatttatcaattaaaattcaatggaagggtaagggtgttaatgagtatgcaattgatttatcaaatggaaaaaaaattatttatgtaagtagcaatcattttcgaccaaacgatgttaactaccttagaggtgatgcaaaaaaagcatcaaagaaacttaattggaaaccaaaatataatttaaataaaattgtaaaagaaatgatagattgtgagttaataaaaaataaaaaaattaatgagtaaa

SEQ ID NO: 284557 - DNA, 634 bp, Unknown
  Bacterial polypeptide expressing nucleotide sequence isolated from the Sargasso Sea
gtttggtaaagtttttgaaacacctcaaaatgaaaaaacacctttttatccaagaagcccttatggtgtagccaaagtatactctcattggataacaataaattatagagaatcttataaattgtttgcctgtaatggaattttatttaatcatgaaagtccattgagaggtgaaactttcgttacaaaaaaagttgtaacagctttatgtaaaataaaattaaaaaagcaaaaaaaattgtttgttggtaatcttaatgcaaaaagagactggggccatgctgaagactatgttcaagctatgtggaaaattctacaacataagcagccagacgactttgtaatatgtaccggcaaacaacatagcattaagcaatttataaacatggtctcaaaagaccttgaaataaaaattatatggaggggaaaaggtataaatgaaaaaggttatgatcaaaataataattgtattattgagtgtagtaaaaaatattttaggccagcagaagttgatactcttgttggtgattcctctaaagctagaagaatattaaaatggaaaccaaaacatgatattcattctctaatcaaagatatgatttcttatgaattaaaaattcataaaaatgattaa

SEQ ID NO: 284558 - DNA, 877 bp, Unknown
  Bacterial polypeptide expressing nucleotide sequence isolated from the Sargasso Sea
tagattacacctctattactctgaccttactgactcttcttcattaaataatttaatatcttcagttatgcctaatgaggtttataatttagctgcccaatcacacgttgcagtatcttttgaaaatccaatctatacgacagaggcaaataatttaggtacaatatctttacttgaagctattaaaaatatagacaataatattagattttatcaagcatcatcgtcggaaatgtttggaggggaacatcaggaaatgttgaacgaggattcaccacttgttccaaaaagtccttatgcagtatcaaaagtgttttcttaccacatgacaaaaatttatcgtgaatcatatggtatttttgccacaaatggtattttatttaatcacgaatctcctcatagaggtgagacatttgtaacaagaaaaattactagagcagttggtagaatagcagtcggaattcaaagcaaaataacacttggaaatattgacgcatcacgagattggggttttgcaggcgactacgtagaagcaatgtggaaaattttgaatcacgataatcctgatgattgggttatcgcaactggtgaaacacacacaataaaagaatttttagaactagcctttcagcatgtaaatcttaacttcgaagattatatagaaatctcagaaaaatattacaggccaaatgaagttggttacttattaggtgatccaaaaaaagcaattaaggaacttggttgggaaccaaaaacaaactttaaggaacttgtaattatgatgcttgaaaatgatattgaagttgcaaaaagcgaaaaaatattgatagaaaaaggtcttctagagccaagctgggaaaactacttaattccttaa

SEQ ID NO: 284559 - DNA, 892 bp, Unknown
  Bacterial polypeptide expressing nucleotide sequence isolated from the Sargasso Sea
aaatatattgttcacggcgtaaaaagaagaagttcatcgtataatactagccgtatagacgatatctatgacaatccgctttttaaaaacaaaaaactttatttacatttcggagatgtaactgacactttgtctgttcgtgagattataaaaagaacaaaacctaacgaaatatataatttagctgcacaatcacatgtccatgtatcatttgaacttccagaatatactgctaacgctgatgctttaggagccttaagaattttggaaggaattaaatcgttaaagttagaaaaaagagttaagtactatcaggcaggaacttccgaattatatggaagagttcaaaccactcctcaaaatgaaaaaactcaattttacccaagaagtccttatggtgtagcaaaattgtatgcacactggattacactcaattatagggaggcttataatatatttgcatgtaacggaattttgtttaaccacgaaagtccattaagaggcgaaaattttgtcaccagaaagataacgattggcttatgcaagattaaattaaaattagaaaaaaaactttatgttggtaatttaaatgcacgaagagattggggacatgcaaaagattatgcaaaagctatttggttaataatgcaacaaaaaaaacctgaagattatgtaatagcaacaggtcattgttataccgtaagaaaatttattgaaattgcaggtaaagaacttggtatgaaaattaggtggaagggaaaagggattaatgaaaaaggttatgatcaaaatggcaaatgtattgttgaatgtaaaaagcattatataagaccattagaggtcgacttattaattggagacgctaaaaaagcaagaaaaaaacttaagtgaa

SEQ ID NO: 284560 - DNA, 232 bp, Unknown
  Bacterial polypeptide expressing nucleotide sequence isolated from the Sargasso Sea
aatgaagaaaataaaaaagaaagctttaataactggaataactggacaagatggtagttatctggctgaatttttacttgaaaaaggttatgaagttcatggaataaaaagacgatcaagcagcttcaatacagagaggatcgatcacttatatcaagatccccatgaaaaaaagccgaaatttattctccattatggagatcttactgacagcactaatctgataagataa

SEQ ID NO: 284561 - DNA, 595 bp, Unknown
  Bacterial polypeptide expressing nucleotide sequence isolated from the Sargasso Sea
aatgtttggaaataatatagatagtgacggctttcaaagagaaagcactcctatgaaacctgttagtccatatggggcagcaaaattatgtgcatatcataatgttcaagtttatagaaaatcttacaatattttcgcttgtaatggaatattatttaatcatgaaagcccatttaggggagtaaattttgttacaaataagattgtcagaggtgctatgatgattaaaaagggcatatcaaacgagttagttcttggtaatcttgacgcatcaagagactggggtcatgctaaagattacgttaaggcaatgcttctgataatggagttagatcgacctgatgattatgtatgttcaactggagaaacgcacacagttcaagaattatgtgattatgtatttaaaaaactagaactatcgaaagatcatataaagactggtaaacaatttatgagaccaaatgaattgaatattttaaaaggagattcatctaaattaaggaaggccacaaattggtctccagaatatacatttcactcaatgatagatgagatgatagaatactgggattcaaagcttgattataaaaaataa

SEQ ID NO: 284562 - DNA, 637 bp, Unknown
  Bacterial polypeptide expressing nucleotide sequence isolated from the Sargasso Sea
tgttcgcatattggattgttgtaattatagagaatcttatgggatgtatgcatgtaacggaattctattcaatcatgaatccccaagaagaggagagacttttgttactagaaaagttactcggggactttcaaatatattttgtggccttgagaaatgtctttacatgggaaacttagattctctgagggattggggccatgctaaagattatgtaaagatgcagtggcttatgctgcaacaaaaaatgccagatgattttgttattgctaccggtgaacaatttagtgtgcgacagtttataacattgtcagcaaaggagttaggtttagagatttcttttgaaggaaagggtgaagaggaaaaaggaatagttaagaaaatatcacctgatactgaaacagaattaaaagaaggagatgtcattgtaagggttgacccaaagtattatcgtcctgcagaagtagatactttgttaggagatccatcaaaagcaatgaaaaagttgggatggaagccagaaatttctacagaacaaatgtgtgcagaaatgatctcagaggatttaaagattgctaaaagaaatgcttttttaaggtcccaaggttttgatgctcccatttctgtagaggattag

SEQ ID NO: 284563 - DNA, 884 bp, Unknown
  Bacterial polypeptide expressing nucleotide sequence isolated from the Sargasso Sea
aatgaaagccttgataacaggaattacaggtcaagatggagcctatctcgcaaacctcttaataaataagaattatgaagttcatggcctagtaagaaggtcctcgtctattaatacttctcgtattgatgacttaatctcagaatactcaccagaaaataggtttcagttacattattctgatttactggattcttcctctattactaacttaataaattcaataaatcctgatgaaatttataatcttgctgctcaatcacatgtctctgtttcttttgaaaaccccatttatacatcacaggtaggtaccttggggtcaattacaattttggaagcattgaaacattctgaaaagaaaataaaattttatcaagcatcttcatctgaaatgtttggtggaggttcaaaggaaattcttaatgaaagttctgcatttaatccaaaaagcccatatggtgcatctaaagtatttgcacatgatattacaaaaatctacagagactcatatgatatttttggtgtaaatggaatattatttaatcatgaatcgccattaagaggagaaacttttgtgacaagaaagatttcaaaagccgttggaaggattacagctggaatccaagaaaaattaactcttggaaatcttgatgccagtcgagattgggggtatgcaaaagattacgttcaaggaatgtggctaatgatgcagcataaaaatccagaagattgggtactagctacaggagtaactaagactgtcagagaatttgctattgaagcgtttaatcatgttaatttaaattgggaagattttgtattaacttcagaaaagtacctgagaccaaacgaagttgattatttactaggagatctcaaaagca

SEQ ID NO: 284564 - DNA, 703 bp, Unknown
  Bacterial polypeptide expressing nucleotide sequence isolated from the Sargasso Sea
atgaaaaaagctctcataacagggatcactggtcaagatggatattatttaacaaaatttcttctaaaaaaaaattatcaggttcatggtattaaaagaagaacttcattaattaatacaaaaagaatagatgaatttttcaacgataaatcactaaattttaaaaaatttatattacatcatggtgatatgagtgatgcttcaagtttaacaagtattcttaataaaattaaaccagatgagatctataatctagctgctcaaagccatgttaaagtgtcatttgaaattcctgaatatacagctaactctgatgctataggggttctaaggcttcttgaagcagtaaggtcagctaatttaattaacaaaacaaaaatttatcaagcatcaacttctgagctttatggtaaagcacaagaatttccacaaagcgaactaactccattctatccaagaagtccttatgctgttgctaaactttatgcgcattggattattataaactacagagaagcttataattttcatgcttgtaatggaataatgtttaatcatgaatcgccattaagaggcgaaacttttgtaacaagaaaaattactattggattatcaaagataaaattaggtttacaaaaagaaatattacttgggaaatttaaacgcgaaaagagattggggtcatgcacaagactatgctgaa

SEQ ID NO: 284565 - DNA, 802 bp, Unknown
  Bacterial polypeptide expressing nucleotide sequence isolated from the Sargasso Sea
atgaaaaaaaaaatagcattaatctttggagttactggtcaagatggcgcttatctttcaaagtttcttttaaaaaaaaattataaagtccatggagtaaaaagaagacactctactttaaatacatttagaatagatgatatttataaagatccttttgcaaaaggaaaaaatttttttttacatcatggtgatataaccgattcactttcggtacataatataattaaaaaagttaagcctgatgaaatatataatcttgctgcccaatcgcacgttgctgtatcatttgaaattccagaatatacaacaaatgtagatgctttaggcactttaagagttttagaatcaatagttagaataaataaaaaaattaaattttatcaagctggatcttcagaaatgtttggaaaagttgttgaaagtccacaaaatgaaaaaactccttttcatcctagaagtccatatggggtagccaaattatattcacattggattactgtaaattacagagaagcatataaaatatttgcaagtaatggtattttatttaatcacgagagtcctttaagaggagaaacttttgttacaaaaaaagttgttagagcactttgtagaataaagcaaaaaaaacaaaaaaaactttttgttgggaacttgtatgcaaaaagagattgggggcacgcaaaagattatgttaaagcaatgtggaaaattcttcaaaataataaacctgaagattttgtaatttgcactggaaaacaatatacaattaagcaatttataaatttggtagctaaag

SEQ ID NO: 284566 - DNA, 916 bp, Unknown
  Bacterial polypeptide expressing nucleotide sequence isolated from the Sargasso Sea
tatttatgaagaccctcatatcgaggatgcaaggtttttcatgcattacggtgatgtgaccgacagtacaaatatgattaggctcattcaatcaattaggcctaatgaaatatacaacttggctgcccaaagccatgtacaagtaagttttgattctcctgaatatacagctaatgctgatgctttaggtcctttgagaattttagaagcaatccgcactcttaaataccaggatgatgtgaagttttaccaggcatcaacgtcagaactctatggtgatgctatggagagccctcagacagaaaaaacaccattccggcccagaagcccctatgccgcatcaaagctcatggccttctggacaacggtcaactatagagaagcttatgacatttttgcatctaacggaattttatttaatcatgaaagtccaagaaggggagagacttttgtaactagaaaaattactcggggcgtagcagctatcgagtcaaaaatagaaaaaaaactttatttaggtaacttagattcaagacgagattggggtgacgcaagagactttgtaaagggtatgtggctgattctccaaaaccacaaaagtgatgattttgttttagctactggcaaacaacattcagtaagagaatttgtcgagctagcttttcgctacactggtagggatattgcttggtcgggaaaaggtataaatgagaaaggaaaagacaaaaatactggagaagtactggtggaaatcgataaaagatattttagaccaatagatgttgaatcactggtaggtgatgcctccaaagcatcctctgaattaggttggcgtccagaaaaccaatttgagagtctcgtagaggaaatggttaattacgacagagaattattgagagaaaaatatggaaggtaa

SEQ ID NO: 284567 - DNA, 494 bp, Unknown
  Bacterial polypeptide expressing nucleotide sequence isolated from the Sargasso Sea
gccgagaagaggggaaaccttcgtcacgcgtaagatcaccctcgcggttgccaacatcaaggctggcaagcaagagtgcttgtacctcggtaacatggacgccaagcgtgattggggtcacgctcgcgactacgtcgagtgcatgtggaagatgctccagcaagaccacccggaggatttcgtcgtcgcgactggcgaaaccaacaccgtgcgtcacttcgtggaccgcgccttcgatatcgccggcatgaagctcaggtttgaaggtgagggtgttaacgaagttggcatcgaaatcgcgaccggacgcacgctcgtgcgcgttcacgagcgttatttccgcccggccgaggtcgatcttctcatcggtgatccggccaaggcgttggagaagctcaagtggaacccacgcacgacgtccctcgaggagctcatcaaggaaatggtcgatgcggacatcgcgcgcgtcgagaacccgacgttgcggttctaaa

SEQ ID NO: 284568 - DNA, 793 bp, Unknown
  Bacterial polypeptide expressing nucleotide sequence isolated from the Sargasso Sea
atgaaaaaagcatttttaactggaataactggtcaagatggttattacttagcaaaacttttaattgataaaggttaccaagttcatggaactgtaagaagatcttcttcaattaatactgacagaatagatccattaatatctgaatattcagaaaatgaaagattaaaacttcattattctgacttgattgattcatcatcattgaataatttaattaacagtattaatccagatgaaatttataatctagccgctcaatcccatgttatggtctcatttaaaaatcctgtttatacttcgcagacaggaactctaggaacgctctcattattagaagctgtaaagaactctgacaaagatattaaattttaccaagcatcatcttcagagatgtatggtggaggtgttcaggagaaattaaatgaagattctttgtttgatccaaaaagtccttacgccgcttcaaaagtgttttcccataatgcaacaaaaatttatagagattcttataatttgttttgtgtaaatggaatattatttaatcatgaatcaccccacagaggagagacgtttgtaactagaaaaataacaaaagcagttggaagaatatcagttggtatccaaaaaaatgtaaccctaggtaatttagatgcttcaagggactggggctttgcaggtgattatgttgagggaatgtggagaatgatgcaatcagataagccaagtgattgggtgctagccactggcgaaacacataccgttaaagagtttgccaagcttgcctttgaga

SEQ ID NO: 284569 - DNA, 991 bp, Unknown
  Bacterial polypeptide expressing nucleotide sequence isolated from the Sargasso Sea
tttagcagagtttctattaaaaaaaaaatatatagtgcatggggtcaaaagaagatcttcctcaataaacacctttagaattgatcacatttatcaagatccccatgagaagacacgtaatttttttttacattatggagacataactgactcaacatcggtatctaaaatcatcgaacttataagacccaatgagatttataatttagcagctcaatcacatgtagccgtttcttttgaagttccagaatacacagctaatgctgatgcattaggagccttaagaatattagaggcaattaaatttcataaattacaaaaaaaaaccaagttttatcaagctggcacatcagaaatgtatggaaaagttcaagagataccccaaagtgaaaaaacgaatttttatccactgagcccttacggagttgccaaattatatgctcattggattacaaaaaattacagagaagcctatgatatttttggttcaaacgggatactgtttaatcatgaaagtccaagaagaggagagacattcgttacaaaaaaaattgttagtgctttagtaaaaattaaaatgggtaaacaaaaaaaactttttttaggaaacttagactcaaaaagagattggggtcatgccaaagattatgtggaggcaatgtggaaaatattacaacacaacaaacccgatgactttgtcatagcaacaggaaaacaattaagtattagacaatttgtaaatttagtctcaaaaaaattaaatatgaatatctattggagaggcaaaggaattaatgaagtaggatacgataaaattaataaaaagaagataatttttgttgataaaaactatattagacctttagatgtaaatacattgttggggaatgcaaaaaaagcgagaaagatactttcttggaaacccaaaattcaaataaatcagttaattgatgaaatgatatctgaggaaatcaaaataatcaatgcttaa

SEQ ID NO: 284570 - DNA, 802 bp, Unknown
  Bacterial polypeptide expressing nucleotide sequence isolated from the Sargasso Sea
atgaattcaacatcaaataatgattcaaaaattgccttaattacaggtatcactggacaagatggctcatatcttgctgagttacttcttgaaaagggctatcaagttcatgctacattgcgccgatcatctgtatttaccactgatcggatagatcatattatggatcatgaaagacttcacacttatcacggtgatcttactgattcaagcaatcttcatcgtttaataatgcaaatccaacccaatgaaatttataatcttggagctcaatcacatgttgcagtatcttttgaagttccagaatatactgctaatgttgatggtttgggtgtaataaggttattggatgctgttcgtgatttaggaccacattgtaagtactaccaggcttcaacatcagagctttttggcggtatcccaggaacagaacctcagagcgaaagcactcctttttatccaaagtctccatatggagcagctaaactttatgcttattggattacagtaaattatcgagaatcttataatttgtttgcttgtaatggagtcctgtttaatcatgaatctccaagaagaggcgagacgtttgtaactaaaaaaataactaaagcagttgctaatattcacaatggaaagcaagagatccttaagttaggaaatcttgatgctaagcgtgactggggacatgcaaaggatttcgtctatgctcaatggcttatgttacaacaagataaaccacaagattatgtaattgcaacaggagaaactcataccgtaagagagtttgtagaatgtgctt

SEQ ID NO: 284571 - DNA, 570 bp, Unknown
  Bacterial polypeptide expressing nucleotide sequence isolated from the Sargasso Sea
caaaagtatttgctcataacataacaaaaatatacagagattcgtataatcttttttgtgtaaatggaatattgttcaatcatgaatcacctcatagaggcgaaacttttgtaactagaaaaatatctagagctgtgggaaggataagtgttggaattcaatctaagttaaccttaggaaatctagaagcttctagagactggggatttgcaggagattatgtaaaagggatgtggatgatgatgcaacacgacaaacctgatgattgggttttagcgacaggaaattcctatactgttgaagagtttgctaaagaagcctttgaggccgttaacttgaactggtcagattatgttgagtcttcagaaaaatactttaggccaaatgaagtcgattttttacttggggattcaagtaaggcaaaaaaatatcttggttgggagccagaaacatcatttaaagacttagtaaaattaatggttgaaaatgatgttcaactagccaaaagagaagcagttctaattaatgaagggttattagaccccacctgggagcattcaaaaaattaat

SEQ ID NO: 284572 - DNA, 1024 bp, Unknown
  Bacterial polypeptide expressing nucleotide sequence isolated from the Sargasso Sea
aatgaaaaatgccttaattacaggaataaccggtcaagacggtgcatatttagcaaaattactaattgagaagggatacaaagtttatggtactgtgcgcagaagcacttctgagaagtttgttaatttaaaatacctaaatatttacgacaaaattaagttttatgattttgatttattagaactaagcaatatacaaaatgttattaaagaaacaaagccacatgaaatatatcatttagctgctcaaagcttcgttccaacatcatttcaagtaccaatagttactactgatattaattcgttaggaacattacgaatattagactcaattaactctataaataaaaagataaagttttaccaagcctctacatctgaaatgtttggaaaagtacagcagataccacaaacagaaaaaacaccattttacccaagaagtccatatggagtgtcaaaagtattttcgcattggataacagtaaactatagagaatcttataacatacatgcatcttctggtattttattcaatcatgaatcgcctttaagaggaggtgagttcgtaactaaaaaaattacttcaacattaacaagaattaaacatggttcaaaagaaattcttaaagtcggaaatattaacgcaaagcgagattggggttatgcgggggattatgtttatgcaatgtggttaatgcttcagcaaaaaaacccagatgattatgtaattgctactgggaaaacacacagtgtaaaagaatttataaatttgacattaaaatatttaaacttcgaatataagtgggtaggacagggcatgaatgaaagagcaattaacaaaaaaaacggtaaaacgattataaagattgataaagaattttttagaccagcggaagttgacttattaataggaaacccaggtaaagcaaaacgtaaacttaaatggaagccaaataccagtttaaaaaaactagtgcagctgatggttgattatgacgtaagtcaaataaaaaaaacacactag

SEQ ID NO: 284573 - DNA, 566 bp, Unknown
  Bacterial polypeptide expressing nucleotide sequence isolated from the Sargasso Sea
aatgggtaaaagagctttaattactggaataactggacaggatggatcctatctatctgaatttttaataaataagggttatgaagtttatggggccgttcgaaggacttcatctgtaaatactggaagactatctgagttagatattttaaataaaataaatctagttgcgatggaccttgctgagataacaaatattcaaagagtaatagaagaaattaagcctgacgaagtttataacctggctgcccaaagctttgtccagacatcttttgatcaaccaatctatacatctgaaattgatgcaataggtgttacaagaattctagaaacaataagaatgttgggaggtaatataaaattttatcaagcttccacatcagaaatgtttggtaaagtgcaaacctcgccacaaaatgaagaaactccgttttatccaagaagtccatatggtgtttcaaaattatatggtcattggatgacagtaaattatagagaagcttgggatttacatgcttgttcaggaatactttttaatcatgaatcacctctaagaggaatagaat

SEQ ID NO: 284574 - DNA, 706 bp, Unknown
  Bacterial polypeptide expressing nucleotide sequence isolated from the Sargasso Sea
cactgcattgggttccgtccgtattcttgaggctgtccgggaggctggtctagtcgataaagtgcgctattaccaagcgtcctcctctgaaatgtatggcaaggtacaggaggttcctcagcttgaaaccactcccttttggccccgttcgccgtatgcatgcgccaaggtctactcccattggttaaccgttaattatagggagtcctatagcttgcatgctagtagcggcattcttttcaaccatgagtccccacgcaggggtgagaccttcgtcacgcgcaaaatcacgcgggctgccactagaatcaagctaggtctccaaaaaaagcttattcttggaaacctcgactccaagagagactggggttatgccaaagagtacgtcgaagccatgtggctcatgcttcagcaggatgaggcggatgatttcgttattgcgaccaatgaaacgcatacagtccgggagttccttgaggagaccttctcctgtctcgatttggattgggagcagtttgtcggatttgacaagaagtacgaacgacccgctgaagttgaccttctgatcggagatccgtcgaaagccaagaagaagttgggttgggaaccgaaaacaacctttaaggagctggtttccattatggttgaggctgacatgaagttggcggaacaggaaaaggccttggctgatgcccgtcttggctaa

SEQ ID NO: 284575 - DNA, 571 bp, Unknown
  Bacterial polypeptide expressing nucleotide sequence isolated from the Sargasso Sea
tacggacattggataactgtaaattatagagaagcttgggatatacatgcttgctcaggaatactttttaatcatgagtcccctctaagaggaacagagtttgttacaagaaaaatttctcttggagttgcagaaattatcaaaaataaaaaggcaagcatcagtttgggtaatttaaatgctgagagagattggggttttgctggagattatgttaatgcaatgtggctaatgcttcaaaacaaagaagcaaatgattatgttattgctacaggtaaaactcatagcgttagaaagtttgtagaaaaggcatttagtgttgtcgatattcaaattgaatggacaattgataacaaaattgaaacaggtagatgtaaaaaaaccggtaaaatattagttgatataaatacagactataacagaccctccgaaactgatcatcttctgggagatgcatcaaaagcaaaaagagatcttaactggaaaccaaaaacaaattttgaagaacttgttgaaatgatggttaaaaaagaccttagcagagtggaaaataactcctacagtttttagt

SEQ ID NO: 284576 - DNA, 933 bp, Unknown
  Bacterial polypeptide expressing nucleotide sequence isolated from the Sargasso Sea
gtattgaaagaaggtcagcaagaaatacaaatttgagactcgagaaattatctatattagataaaataattatagaagacagtgatattaaggaaatcaataatttaatcagaatttttcaaaaatataaaattcatgaggtgtataatttagcagcacagtcatttgtaaaaagttcatttgataatccaattgaaacatcacaggtgaatgcatttggtactttaaatttgctagagattattagaaatcaaaataaaaatattaaattttatcaagcttcaacatcagaaatgtttggaaaacacggtaaaaaaaaacaaaatgaattaacaaattttcacccaagaagtccttatgccacgtctaagactttttcacattatactgtgcaaaattatagagaagcttataatatgtttgctgtaaatggtatattgtttaatcatgaatcgcccttgagaggagaggaatttattactagaaaaatttctcttggacttgctaaaatcgtaacaggaaaacaaaaggttttaaaagttggaaatatttatgctaaacgagattggggttatgcaaaagattatattgaagctatgtggaaaatgttacaagttaaaaaacctgaagattttgtaattgcaactggcaaaactcattccgtaaaagaattcataaataaatgcattaagattcttaaaataaacactaagtgggttgggaaaggtttaaatgaaaaacttatcgacttaaatagaaacaaaccaattattgttatagataaaagatattttagacctgcagaagtaaatgttttgaaaggcgattatactagggctaagaaaattttaaaatggtctccaaaaacaaatctagatgatcttgcaaaaattatgattatgtcagatttattgtatgtgaataaaaaataat

SEQ ID NO: 284577 - DNA, 913 bp, Unknown
  Bacterial polypeptide expressing nucleotide sequence isolated from the Sargasso Sea
tatgaagaaagcttttataacaggaataacagggcaagatgggtcttatcttacagaattacttttggataaaggatatgaggttcatggtatcgttagaagaagctctttatttaatactgatagaatagatcacttagaaaataatccaaaccttcatacacattggggcgatttaacagattcatcaaatttacatactttgcttagtgatatttgtcctgacgaaatatataacctaggtgcacaatctcatgttgcagtttctttccaggtaccagaatatacaggagaggttgatgctattggcacaattagattactaaattcggttaaagacttaaaaaacaaccctaaattctatcaagcatcaacatctgaattatatggaggtattccagaaacagctcctcaaaatgaacaaactgctttttatccaaaatctccatatggagcagcaaaattatatggatattgggttactattaattacagagaatcatataacttatttgcatctaacggaattttatttaatcatgaatctcctagaagaggaggaacgtttgttacaaagaaaattgctaaagctgttgcagacattgaatacaataaattagattgcttaactcttggtaatttaaatgctctcagagactggggacatgccaaagactatgttgaagccatgtggctaatgatgcaacataatgaacctcttgatttagtaattgcatctgggcgcacatattctgtacgagagtttgttgaacttgcatttaaacatattgaaattgaaatagaatgggttggtgaaggaattaacgaagtaggtcttgataagaaatcaagaaaaactcttgtaaaagtagatccaagatatttcaggcctgcagaagtagagcaccttcat

SEQ ID NO: 284578 - DNA, 676 bp, Unknown
  Bacterial polypeptide expressing nucleotide sequence isolated from the Sargasso Sea
atgcctaaggttgctttaattactgggattacaggtcaggatggttcttatcttgctgaactcctattgaagaaaggttatgaagttcatggtatagttagaagagcatcactcattaatactcatagaatagatcatatctatgagaagattaaacttcattatggagacttgactgactctactaatctagtgagagtgatacagaaggttaaaccaaatgagatatacaatctaggtgctcagagtcatgttaaagtgtcctttgagatgccagagtatactggtatggttgatggactaggaactcttcgtatacttgaagcagtaagactattagaaagagaaaaagaaactaggatataccaagcatctacatcagagatgtttggtaaggtagtggagattcctcagacagagaagactccatttcatcctagatctccctatggttttgctaaagtatatgcatactgggcaactaagaactatagagaagcatatgacatgtatgcttgcagtggtatcttattcaaccacgaatctcctagaagaggagaaacttttgttactagaaagatagttcaagcattagataagatagcaaagggagaacagaatgtattaacattaggtaatctttatgctaagagagactggggacacgctaaggatt

SEQ ID NO: 284579 - DNA, 640 bp, Unknown
  Bacterial polypeptide expressing nucleotide sequence isolated from the Sargasso Sea
atgagttcgcataagcgcgccttgataacaggtattaccggccaggacggctcctatcttgcagagtttcttctgtcgaaggggtatgaggtccacggaatcatccggcgtgccagtacgttcaacacgacgcggatcgatcatctctacaccgaccctcatcatccggacacgcgcctgtttctgcattatggcgacctttcggacgcttccgggctgcgtcacattctggccaaggtgcgaccgcatgagatttacaacctagcggcacagagccacgttcgcgtttcgtttgatcagccggaatacacggccgacattgtagcgaccggcacgttgcgcctgcttgaggcaacccgcgagtacatcgcgatggctgaggatccggtgcggttttatcaggctggatcctccgaaatgtatggctcagcgccggccccgcagagcgagacgacaccgtttgcaccccgcagcccttatgccgtggggaaggtagccggctattggtatgccgccaattatcgagaggcttacggcatgtacgtggtgaacggcattctcttcaatcacgagagcccccgccgtggcgaaacatttgtgacgcgcaagataacccgtgccctggggcgcattcgtcacg

SEQ ID NO: 284580 - DNA, 725 bp, Unknown
  Bacterial polypeptide expressing nucleotide sequence isolated from the Sargasso Sea
gatgaaaaaagtagctcttattactggcattacaggtcaagacggttcttatcttgcagaactattattaggtaaaggttacgaagttcatgggattataagaagagtagcattagaagatgaaacacatagactttggagaataagaaaaattttaaaggatataaatatacatgcaggttctttggaaagttatgcaagcatatttaatattattgtaaaaataaagccggacgaagtttatcatttggcagcacaaagttatgttggatattcatttgaagatgaattttcaactcttaatattaacattaacggaacccattatcttctttcagctgtaaaagaatatgcagatagtaaaataagattttattttgctggatcttctgaaatgtttggaaaagttaaatccacgcctcaaaatgaggatacggtttttaatccaagatcttcatatggaatatcaaaggttacaggcttttatttaactaaaaattatagagaagcttataaattgcatgcatcaaatggaatattatttaatcacgaatcaccaagaaggggatttgagtttgtaactagaaaaatatccagtgctgttgctagaataaaaaatggatcaaaggaaaaattgaagttaggtaatatgaaagcaaaaagagattggggtcacgctaaagactttgtcgaagcaatgtggctaatgcttcaaatggataaac

SEQ ID NO: 284581 - DNA, 747 bp, Unknown
  Bacterial polypeptide expressing nucleotide sequence isolated from the Sargasso Sea
accaccttgcctctcagagttttgtctcaatatcatttgaagatgagttttcaacaatgcaaaccaacatcaacggtacgcattatctgcttgctgcaattaaggatacttctccggagtgccgattttactttgctgggtcttcggaaatgtttggcaaagtcgaagaaacaccgcaaagagaaactactcgttttcatcccagatctgtgtatggtattacaaaagttgctggatttgaactgaccaggaattaccgtgaagcttatgatttgtttacttgtacaggaatacttttcaaccatgaatctcccagaagaggttatgagtttgttactcgaaagatttcttcaaccgcagcccggattaaacttggattggagaaagaattaaggcttggtaatattgacgcaaaaagagactggggtttttcaggcgaatatgttcggatgatgcacaccatgctacagcaggttaatcctgacgactatgtaattggcactggagaaactcattcggtcagagagtttatgcaaataatttttgaagaacttaaactaaattatgaagattaccttgttattgacccgcgtttttatcgtccggctgaagtagaaattttagtggcagatccttccaaggcaatagaaaaattaggatgggaacctaaagtaacttttgaagaattggcactcagcatggtaagatcagattatgaaaatttatcaaataaaatgcatatttgag

SEQ ID NO: 284582 - DNA, 859 bp, Unknown
  Bacterial polypeptide expressing nucleotide sequence isolated from the Sargasso Sea
gcagcccgatgagatctataaccttggcgctcaaagccatgtggcggtgagctttgaaagccccgaatacaccgccaacagcgatgcactgggaaccctgcggatcttggaggctgttcggatacttgggctaacaaacaagacgcgcatctatcaggccagcaccagtgagttgtatggcttggtgcaggagatcccgcagaaagagagcacaccgttttatccccgcagtccttatggcgtcgccaagctctacgcctactggatcacggtcaattaccgcgagagttatggcatgtatgcctgcaatggggtcttgttcaaccacgaaagccctaggcgtggtgaaacgtttgtgacccgcaagatcacgcgtggacttgcccggattgatgcgggattggacgactgcttgtacatgggcaatctcgattcgctgcgcgattggggccatgcccgcgactatgtggagatgcaatggcgcatgcttcagcaggagaaacccgaggactttgtgattgccacaggtcgccaggaaagtgtgcgccgctttatcgagctcacggccttggagttgggctggggagccatgcagtgggaaggcatagggattgatgaggttggtcgccgcgcggatacaggagatgtggtggtgaacattgatccgcgctatttccggcctgccgaagtggaaacccttctgggtgatcccaccaaagccaaagagaagttgggttggacgcctaccaccaccttggaagaactggtggctgagatggtggccaccgataaagaagaagctcagaaagaggcctacctcaagcgcaagggctttcacgtcgttggagcgcgcgagtga

SEQ ID NO: 284583 - DNA, 685 bp, Unknown
  Bacterial polypeptide expressing nucleotide sequence isolated from the Sargasso Sea
ttttatcaagcttcaagctcagagatttttggtaaagttcaagagaatcctcaatctgaaacaactcctttttatcctagatcaccttatggagttgctaaactatatgcttactggataactgtaaactatagagaagcttataatatttatgcctgtaatggaattctatttaatcatgaatcgcctttcagaggagaaaattttgttacgcgtaaaattactagagctttgactcgcattaaattggatcttcaagaccgtttatatatagggaatttgtatgctaaaagagactggggacatgcaaaagactttattgaaatgcaatggttaatgttacaacaggataagccagacgattatgtaatttcaacaggaaaacaatatacagttaaagagtttataatggctgttgctaaacaattagatattgaaataaaatggagtggttctggcagtcatgaaaaaggtttgaatataaataataaagttatagttgaagttgatccaagatattttagaccaactgaagttgatgaattattaggtgactcaaccaaggctcataagaaattgggatggaaacaaaaaatttcatttgaagaattagtaaaaaatatggttgaacatgatttaagaattgcaaaagaggaaaaaatacttcaaggcgctaatttttaat

SEQ ID NO: 284584 - DNA, 709 bp, Unknown
  Bacterial polypeptide expressing nucleotide sequence isolated from the Sargasso Sea
gagtactagcgaactttacggactaataagagaaagtcctcaaactgaaaaaacccccttctaccctcgtagcccttatgctgttgccaaactttatgcttattggattactgtaaactatagagaagcttatgatatttttgcatgcaatgggattttatttaatcacgaaagtcctagaagaggagagactttcgtcactaggaagataacaagaggtttatcaagaattgatgaaggtttagaagattgtttgtatatgggtaatctggattcattgcgagattggggacatgcaagagactatgttgaaatgcaatggttgatgttacaacaaaaatttccagacgattacgtaattgctacaggcagaatggagtcagttagaagatttattgaaatttcggcgcaaaagcttggatggaataagataaataaaaaagagccagctattaagtgggaaggtaaaggtgttaatgaagtgggtattagagcagatacaaataaaattgttgtaaaagttgatccaagatattttcgaccaacagaggtagaacagctaaagggggatcccacaaaggcatatagccaacttggttggaaacccaagacaactttagaagagttaatcgatgaaatgattaaaaatgataaaaaacttgctaaaaaagaaaagatactagaagaggctgatttaaatgattcctaa

SEQ ID NO: 284585 - DNA, 610 bp, Unknown
  Bacterial polypeptide expressing nucleotide sequence isolated from the Sargasso Sea
aatggtgcctaaatctccctacggtgtctcaaaactttactcttattggattacaaaaatttatagacaagcttatggattttacgcatgtaatggaatactttttaatcatgaaagtccaagacgaggtgaaacatttgtaacaagaaaaattacaatgtttttcgcaaaaaaaatttgtggatcaaatgaattactttatattggaaatcttgatgctaaaagggactggggtcatgcgaaagactatgttgaaattcaatggaaaattcttcaacaaaaaaaaccagatgattatgtaattgccacaggaaaagctattagcgttagagattttattaatgaatgttgcaaatatttaaaactaaaaattaaatgggaaggtaaaggattaaatgagaaagcatatctaattaataaaggtaaaaaaaatttaattattaaagtagacaaaaaatattataggccattagaaattgactatctaaaaggaaatccaaaaaaagcacttaaaaagctgaaatataaattaaaatataatattaaacatcttgttaaagaaatgttggatgcagatattggattagcgagaaaaaacaaacttaaatga

SEQ ID NO: 284586 - DNA, 784 bp, Unknown
  Bacterial polypeptide expressing nucleotide sequence isolated from the Sargasso Sea
gcggattctcgaagcgatccggattctcgatctgcaacacaagacgcgcttttaccaggcttccacctcggaactgtacggcctcgtgcagcaggtgccgcagtccgagaccacgccgttctatccgcgcagcccgtatgcggtcgccaagctgttcgcgtactggaccacggtcaattatcgcgaggcgtatggactctatgcctgcaatgggattctgttcaatcacgaatcgccggtgcgcggcgaaaccttcgtgacgcgcaagatcacgcgcgccgtggcgcgcatcgcggtcggtatgcagaagaccctgtatctcggcaatctgtccgcgttgcgcgactggggccatgcgcgcgactacgtggagatgcaatggcgcatgctgcaacaggagcagccggaggactacgtcatcgccaccggggtgcagtacagcgtgcgtgaattcgttcagcacgccgccgccgagctgggtgtcacggtacgcttcgaaggcaccggtgtggatgaagtcggcattgtcgagaaggtggaagggcgcgagatcaagatgtcgcccggcgatgtgatcgtgcgtgtcgatccgcgctacttccgtcccgccgaagtcgagacgttgctgggcgatccgtcgaaagcccatgcgaagctcggctggcagccgaccacgccgttcagcgcgctcgtgaaggaaatggtgcgctcggattatcagatcgcaagacgtgacgcgcttgtcacgctggccggtttcacggcactggaacatcacgagtaa

SEQ ID NO: 284587 - DNA, 550 bp, Unknown
  Bacterial polypeptide expressing nucleotide sequence isolated from the Sargasso Sea
ctgacaccagcaagcccatatgcttgtgcaaaggtttatgcacacaatttttgccgtaactatagggagtcgtatggtatgcatatctccagtggaatactttttaatcacgaatcacctcgaaggggagaaacttttgttacaagaaaaattacaatggccgcagctaaaatcaaactaggccttcaaaaaaagctttatttgggcaatttagatgcgaaaagagattggggctttgctggtgattatgttgaggcaatgtggttgatgacacaacaagaaaaacctgacgattatgttattgcaacaggagaaactcatactgttaaagaatttttatatgaggtttttaatcatgccggactaaatgttgaagaccatgttgaaatagatgaaaggctttttcgaccccatgaagttcccttgttgcttggtgaccccacaaaagcgaaaaagaatcttggttgggaaccatcggttaaatttgaggaattggccaaaatgatgtattatagtgaccttaagagaattagggagtattctaaatgaa

SEQ ID NO: 284588 - DNA, 703 bp, Unknown
  Bacterial polypeptide expressing nucleotide sequence isolated from the Sargasso Sea
atgagtcgagccaaggttgcattgataactggagttactgggcaagatgggagttatttggctgagctgcttctttctaaagactatattgttcacggaatcaagcggcgttcttcttcatttaatacaagtcgcattaatcatcttttcaaggatccccatgaccaagacaaaagatttactttacactatggagacttgactgatagcacaaatattattcgcataattcaacaggtaaagcctgatgagatttataatcttggtgcacaaagtcatgtcgcagttagttttgattcacctgaatacacggcgaactgtgatgcattaggtactcttaggatattagaggctgttcgagtcttaggattgacaaaatctacaaagatttatcaagcaagtactagtgagctttatggcatggtacaggaaacaccccaaaaagaatcaacgcccttttatccgcggagtccatatggcgttgcgaaattgtatgcatattggattacagtgaattatcgggaaagttatggtatttttgcatgtaacggtattttatttaatcacgaaagccctcgccgaggtgaaacctttgttacaaaaaaaatcaccagaggtttaactcgaattcaccttggaatagataaaggtttgtatatgggaaaccttgactctttgcgggattggggtcatgctcgcgatt

SEQ ID NO: 284589 - DNA, 845 bp, Unknown
  Bacterial polypeptide expressing nucleotide sequence isolated from the Sargasso Sea
tcaaactgtggtttcaaatttaattagaccgtttaaaccaaatgaaatatataaccttgctgcgcaatcacatgtagcagtttcctttgaagttccagagtatactgcaaatgctgatgcattaggagcgttgaggatattagaagctattagatcaaacaatttaacaaattatacaaaattctaccaagctggaacatctgaaatgtatggaaaagtcgaaagaacaccacaaaatgaaaaaactaatttcagaccaatcagtccttatggtgttgcaaaagtatatgctcactggattacaataaactatagagaagcctataatatatttgcatgcaatggtattttatttaatcatgaaagtcctagaagaggagaaacatttgttacaaaaaaaatagtaaatgctttatgtaagataaaatatggattgcaagataaattatttttaggaaatttagatgcaaaaagagattggggacatgcaaaagattatgttgaaggaatgtggaaaattttacaacaaaaaaacccagatgactatgtattagctacaggaaaacaatattctataagacaatttgtcaatatggtttgtaaaaaactagatatgaaaatttcatggaaggggaaaggaattaatgaaaaatgttatgataataccaaaaaaaaaaccattattgaacttgataagacttatataagacctttagatgttcaaaccttactaggtgatgcaaaaaaagctagtaaaatcctaaaatggaagcctaaaataaatattcataatctgattgatgaaatgattaattttgagttaaaaaaattaaatcatgattaaa

SEQ ID NO: 284590 - DNA, 565 bp, Unknown
  Bacterial polypeptide expressing nucleotide sequence isolated from the Sargasso Sea
cgtcgctttttaataacgcaacgtgttgatcatatttatcaagatccccatgtcgaaaatagtcacttcaagcttcactatggcgacctatctgacactttaaatttgactcgtcttttgcgtgatattgagcctgatgaggtatataatttgggtgcgcaatcgcatgtggccgtgagttttgaaagcccagagtataccgcggacgttgacgcagtcggcacacttcggttgcttgaagctatccgttttttaggattagagcagaaaacaaagttttatcaggcctcaacttccgaattgtatggattggtgcaagaaaccccacaaaaagagacaacaccatttcacccacgctctccttatgcaattgctaaactttactcatattggatctgtataaactatcgtgaggcatatggcatgtatgcctgtaatggtattttatttaaccatgagagtccacgcagaggagaaacctttgttacgcgtaaaattacacgtggtttagcaaatatagcattgggtttggagcagtgtcttcatatgggaaatattgatgcaa

SEQ ID NO: 284591 - DNA, 622 bp, Unknown
  Bacterial polypeptide expressing nucleotide sequence isolated from the Sargasso Sea
ttagatatacctcaaaatgaaaaaacacctttttatcctagaagtccttatggtgtagctaaattatatgcttattggataacaataaattatagagaggcttacaatatttttgcttgcaatggtattttgtttaatcatgaaagtccacgaagaggagaaacttttgtttcaagaaaaatagttaggggacttttaaaaataaaaaacaatttacaagattgcctatatctgggaaatctaaatgctaaaagagactggggtcatgccaaagattatgttgaagcaatgtggttaatgctacaacaagacaaacctgatgattatgtgatttcttcagggattcagtttagtgttaaggattttattaatctggttgctaagaatcttgatatagagttagtttggaaaggtgaaggattaaatgaacaagctttttttaatgataaagttattataaaaattgataaaagatattttcgtccaactgaaatagatagtttgttgggtgattcttcaaaagctaaagaaaaacttaattggttaccaaaaatttcatttgaaagtttagtgaaagaaatgattacagaagaagaaaaattgatccaaagttcaagatgaa

SEQ ID NO: 284592 - DNA, 824 bp, Unknown
  Bacterial polypeptide expressing nucleotide sequence isolated from the Sargasso Sea
aattactttgcatccagcttctctagaaagttatgctagtatggttaaaataatacaaaaaataaaaccaactgaagtttatcatttagctgctcaaagttatgttgattattcttttagagatgaattctctactttaaatacaaatataaacggaactcattatatcctctctgctttaaaggatttttcgcccaaatctaaattctattttgccggatcttcagaaatgtttggaaaagctaaaaataagcctcaaaatgaaaaaacatccttttaccctagatctgcttatgggatttcaaaagtgactggttatgaattaactcgaaattatagagaagcatacaaccttcactgtagtactggaattttatttaatcacgaatctccaagaagaggatttgaatttgttacaagaaaaatatcacatggtgttgctatgataaaatgtggccttcagaaagatttagtattaggaaatttagatgcaaaaagagactggggtcacgcaaaagattatgtcgaagctatgtggctaatgttacaaaaaagaaaaccagatgattttgtaattgcaactaatgaacaacattcagtaaaggactttgcaaaacttgcattttcaattgtaggtttagattataaaaaatttataaaaattgacaaaaatctctacagaccggctgaagtacaaacacttttaggggattattctaaagctagaagaattctaaaatggaaacctaaagtttcatttaaaaatcttgtaaaagatatggtattatctgatttagaatttgttaaaaagtcaggttattaaa

SEQ ID NO: 284593 - DNA, 628 bp, Unknown
  Bacterial polypeptide expressing nucleotide sequence isolated from the Sargasso Sea
aagagactcctcaaatgaaaatacaccattctatccacgatcaccttatggcgtagcgaagctttatggatattggattattgtaaactatcgtgaagcatataatctttttgcttgtaatggtatattgtttaatcatgaatcagaaagaagaggggagacttttgtaacaagaaagattactcgtgcggcttccagaataaaggaaggattgcaggaaaaattgtttattggaaatcttgatgcaaagagagattggggatatgccccagaatatgttgaagggatgtggttgatgctccaacatgatcagccagaagattttgtgctttctaccggtgagacccattctgttagggaatttatagaacttgcattccaagagctcaatatcaaacttgcatggaatggcaaagatgaaaatgaaataggaattgacgaaataactggaaaaaccttagtagaagttgataaaaaatattttcgcccaactgaagttgatgtattaattggtgattcatcaaaggcaaagaaaaagttaggatggaaagcaaaaacgccttttaaagaattggtcagaaaaatgaccaattctgattgggaaaaagtaaagaggcgcggttattaa

SEQ ID NO: 284594 - DNA, 852 bp, Unknown
  Bacterial polypeptide expressing nucleotide sequence isolated from the Sargasso Sea
acggtgatgtaacagacactatttcagttccttcaataattaaaaaaataagtcctaatgaaatatataatcttgcagcacaatctcatgtcgcagtatcttttgaagttcccgaatacactgcaaatgctgacgcaatcggagcattaagaattttagaagctataaggtttcacaaattagaaaaaaaaacaaaattttaccaagctggaacatctgaaatgtttggaaaagttttagaaactccacaaaatgaaaaaactccgttttacccgcgaagtccttatggtgttgcaaaactttacgcccattggataacagtaaactatcgagaagcatataaaatttttgcatgtaacggaatattatttaatcatgaaagtccagtcagaggtggcacttttgttacaaaaaaaatagtaaacgctttagtaaaaataaaattaggcaagcaaaaaaagttgtatctgggaaatcttgatgccaaaagagactggggacacgcaagggattatgttgaagcaatgtggaaaatgctacaaaaaaaaacaccctctgattacgtaatatcaactggaaaacaatatactgttaaagaatttttaaacctagtcctaaagaatttaaatatgaaatataaatggaagggaaaaggatttaattccagatgctattttaaaaataaacttatagtagaatgtgacaaggaatattacagacctttagaagtagacactttgctaggagactcaagaagagcgaaaaaagagcttaattggagaccaaaaactaatataaaagaactaattaatgaaatggtcaaatcagaattaaaaagtattaaaaattagt

SEQ ID NO: 284595 - DNA, 799 bp, Unknown
  Bacterial polypeptide expressing nucleotide sequence isolated from the Sargasso Sea
aatgggtaaaaaagctttaattacaggtataacgggtcaagacggttcatatttatctgactttcttctaaaaaaaaaatacaaggttcatggcctaattcgaagggtagcggctgaagacaaaactcacaggctttggagactaaagcatatacttcatagaattactcttcattctgcatcactagaaagttatgcaagtattgtaaaaattattcaaatgcttaaacctgatgaagtttatcacttaggtgcacaaagttatattgattatgcttttaaagatgaattctctacactaaatacaaatataaatggtactcattatctgctttcagcaattaaagaattttctcctaaaacaaaattatattttgctgcatcttctgaaatgtttggaaaagttcttgaaataccgcaaaatgaaaaaacacctttttatccaagatcgacttatggaatttcaaaagttgcaggtttcgaccttactagaaactacagagaagcttataatcttttttgttgcagtggaattttatttaatcatgagtcacctagaaggggatttgagtttgtcacaagaaaaattactcacgcagttgctagaataaagtatggcctgcagaaagatttaaagcttggaaatatagatgcaaaaagagattggggtcatgcagaggattatgttgtagcaatgtggttaatgcttaataaaagaaaaccagaagattatgttataagtaccggcaaacaatattctgttcgagattttgccaagctggctttcaaggaagttggt

SEQ ID NO: 284596 - DNA, 591 bp, Unknown
  Bacterial polypeptide expressing nucleotide sequence isolated from the Sargasso Sea
tcactgtaaattacagggagtcttacgatttctttgcctccaacggaattcttttcaatcacgaatcacccattcgcggagaaacttttgttacaagaaagattaccagagcagttgcaaggatttctttgggactacaaagctcactctatttaggaaacctggacgccaaaagagactggggacacgcaaaagactatgtagagggcatgtggaaaattcttcagcatgataaagctgaggattttgttctagcgactggtgagacaacaacggtcagagactttgtcagcaaatcctttaaacacgccggcattcaaattaattgggaagacagtggagtaaacgagatagggaaaaatgccgataatggagaaacattggtcaaggtcgatgagcgttattttcgtcctgcagaggtagacttgctgatcggtaaccccgaaaaggccaaaagcattctcaactgggaaccaaagtatgacctggatagcttgattaaagacatggttgataacgacatccaggaagccaaaaaagatacctatttaaaacaaggcggcttcaaaacgatgaactacttcgaatagc

SEQ ID NO: 284597 - DNA, 553 bp, Unknown
  Bacterial polypeptide expressing nucleotide sequence isolated from the Sargasso Sea
caatggaattttatttaatcatgaaagtccaagaaggggagaaacttttgtgacaagaaaaattacaagaggtctatcacaaattgatctagggctttcagagtatttatacatgggaaatattgatgctattagggattgggggcatgcaaaagattatgttgaaattcaatggaaaatactacagcaagaaaagcctgatgattatgtagtggctactgggcgacaagaaagtgtaagaagatttattgacctttcagcaaagcaactaggttggggtggtatttattgggaaggatcaggagttaatgaaataggaagaagaaaagacaatcaaaaagtagttattaaaatagataaaaaatattttcgtccctgtgaagtaaataaattagttggagattcaaccaaagcaaacaaaaaattaggatggcatccaaagataaaacttgaggaattagtagctgacatgattaaaaatgataaagagttggctaagaaagaggctctattaatccaaaaaggatatgaattaaatatcccaaaagaataa

SEQ ID NO: 284598 - DNA, 930 bp, Unknown
  Bacterial polypeptide expressing nucleotide sequence isolated from the Sargasso Sea
atttgattgaattgctgcttgaaaaaggatattcaattcatgcaatagtaagaagagtaagtgctggcattcaatctaagagtaggataaaacacctactaggtcacgagtcattgtccatacatgatggtgatttatccgattcagcgtcattagtcgcatgcctcaatgatataggggcggacgaattctataacctcggtgcgcaatcgtttgtacctcactcctggaagtccccagtccatactttagacatcactggagctggaactctcagatgtctagaagcaatcaggctaacaaatcctgagactaagttctaccaggcaggaagtagtgagcaattcggaatggttcaggaaattccccaaacagaaactactcctttttatccaagatccccttatggatgctcaaaggtatattcttatcacataactaaaaactacagagagtcgtatggaatgttctgtaccaatgggattttgttcaaccatgagagtcctaggcgtggactcgaattcgtaactaggaaggtgacaaattgtgttgctcagatcgcactaggaaaatcttctaaatttacaattggaaatatggatgctaagagagattggggctatgctagagactacatggaagggatctggtcactaatgcaattagatactccggaagatgtcatcttagccacaaataagacttggtctgtacggagtctgattgagattgcattttctaatatagaaatggacatcacatgggaaggagaaggagtagaagagaagggttactgcgcagatggagttttacgggttgaagtagacgaaaaactattcaggcccgcagaggttgatctcttgattggggatttctcaaaggcaaatcgtctcacaggatgggagccaaaaacaagtttgaagaattgat

SEQ ID NO: 284599 - DNA, 522 bp, Unknown
  Bacterial polypeptide expressing nucleotide sequence isolated from the Sargasso Sea
aatgaaagcattaatcacaggtattactggacaggatggatcgtaccttgctgaacttctccttgagaaaggatatgaagttcatggtatagtccgtcgttcttctctcattaatacacataggatcgatcacatatatgataagatccaactccattatggagacttgaccgactctggtagcatcattagtttagttcaaaaaattaaaccaactgaggtgtataatcttgctgctatgagtcatgttaaggtgtcatttgaaatacctgagtatactggtgaggtagatgctcttggaacccttcgtcttctagaagcaattcgtcttctagatcatgagtgtaagttctatcaagcatctacttcagagttatatggattagtgcaagaagtcccacaaaaagaaactacacctttctatcctcgtagtccttatgggtgtgctaagttgtatgcctattggataacaaaaaactatcgtgaagcatatggaatccatgctagtaatgggattctatt

SEQ ID NO: 284600 - DNA, 829 bp, Unknown
  Bacterial polypeptide expressing nucleotide sequence isolated from the Sargasso Sea
aattagaataatacaaaaagtaaaacctgatgaaatttataacttaggggcacaaagtcatgttaaggttagtttcgagacacctgaatacactgctaattctgatgctttaggaacaattagaatgctcgaggcaataagaacactaaacatggaaaaaagtgtacgtttttatcaagcatctacttctgaaatgtttggtaagtcacctcctcctcagaatgaagatacattatttcagccaagaagtccttatgcggctgctaaactgtattcatattgggtgactaaaaactatagagaagcatataacatatttgcatgtaatggtattttatttaaccatgaaagtccgctacggggtgaaacttttgtaacaagaaaaattaccagagcgatagctgatatttatcatggaaaaaaaaataagttttggataggtaatttagacgctaaaagagattggggccatgcaaaagattatgtagagggtatgtggaaaattattaattataaaaaaccagaagactttgtattagcaactggaaaaagtttttcagttagagatttttgtgagatagcatttaaagaaataggaattaccataaaatggaaagggaaaggtcttaaagaaaaaggttatgatgctaagaataataaagtattggttgctgttgataaaagatattttagacctaccgaagttgattatttgcaaggagatgcaaataaagctaaaaggctcttaaaatggaagcctaagataaagtttggtgatcttgtatctgaaatgattaaaagtgatattgacaatacggttgctagataa

SEQ ID NO: 284601 - DNA, 626 bp, Unknown
  Bacterial polypeptide expressing nucleotide sequence isolated from the Sargasso Sea
aacaacaccgttcaatccacaaagcccatattctattgcaaaaatgtattcttttcatatgactaagctctatcgagaagcttttggaatgtttgcaagcaatgggattctttttaatcatgaatctccactgaggggtgaaaattttgttaccagaaaaattactttaggtttagcaaaaataaaattgggacatgagaaaaaactatcattaggtaatttaaatgctaaacgagattggggacatgctaaagattatgtaaatgcgatgtggaaaatactgcaaactaatgagccaagagattacgttattgctacaggtgaacagtatggtgtaagagagtttgtagaaaaagcagcattacatattgatcttaagattagctggaaaggcgatggcattaatgaaattggagttgatcaagatggacgcactattatagatataagagaagaatattataggccagctgaagtagaaacattactaggcgacccaagtcttgcgagaaaagatctaaattggaaaccaaaaagaaccttcgattcactggttgaagagatgatgacttcagatttagctcttctaagagatggtcagatgccaaaccctttttcagaataac

SEQ ID NO: 284602 - DNA, 833 bp, Unknown
  Bacterial polypeptide expressing nucleotide sequence isolated from the Sargasso Sea
aatgggtgtgactttgaaaaaaaaggcgttgattactggaataacggggcaagatggtgcatatctcgcccaatttcttttagacagaggttatgaagtacatggtgtacgcaggagaacatctgtttctaataccgaacgaataacgcatttaatagagcaacagaagaagtttccgaattcattaaatttgcactatggagaaatgaccgatggcactgtcttgactaagattataaaggcagtggaaccagatgaagtatacaacttggctgcacaatctcacgttgcaacaagttttgacgagcccgaatacactgccaattctgatgctctaggtccccttaggttgcttgaagctattaggttccttggattgggagaaaaaactcgattttatcaggcaagtacatctgaactttatggcttagtgcaggaatcaccccagacggaaaaaacaccattttatccgagaagtccttatgcagtggcaaaactatatgcttattggattacagtaaattacagggaagcttatgggctttttgcttgcaacggcatactgttcaatcatgaaagtccagtgcgaggtgaaaactttatcacaaggaaagtcacaaaggcgctaacacgaattcgcgtaggcctccaagattgtctattccttggtaacctagactctctgagagattgggggcatgccaaagattatgttgaaatgcaatggttgatgctgcagcaagagcagccaaaagactatgtgatagctacgggaacgcaacatagcgttagggatttagtcaatttagttgcacactgcctaaatattcaaa

SEQ ID NO: 284603 - DNA, 698 bp, Unknown
  Bacterial polypeptide expressing nucleotide sequence isolated from the Sargasso Sea
tgaactatatggagatgtaagagagacaccccaaaatgagcaaactcctttttatccaagatcaccatatgctgtagcaaagctttatgctcattggctagtagttaattatagagaggcctatggaatgtattgctgtaatggcatactttttaatcacgaatctccacgcaggggagaaacttttgtaacaagaaaaattacaagagggctatcaaatatctttatggggctagaaccttgtttatatatgggaaatcttgactcgttgagagattggggtcatgcaaaagattatgtagaaatgcaatggttaatgcttcagcaaaacactcctgaagactttgttatagccagcggccaacagtattcggtaaggcaattcatcctttgggctgctaatgaattaggaattgaattagggtttgaaggtgagggcctttccgaaataggcgttgtaaagagtattaaaaactcttcagaaactcaattaaaaaagggagacacaattatacaagtggacccaagatactttagaccatctgaagttgatgcgttattaggtgattcatctaaagcttgcgaaaagcttaattggaaacctaagatttctgctcaagagatgtgcgcagaaatggtaagagaggatcttttgaatgctaaaaaggacattttacttcgaaaagaaggttattaaa

SEQ ID NO: 284604 - DNA, 606 bp, Unknown
  Bacterial polypeptide expressing nucleotide sequence isolated from the Sargasso Sea
aaacaaacttctatcctttgagtccatatggagtagcaaagttatacgcatactggataacaataaattatagagaagcttataaaatatttgcagtaaatggaattttatttaaccacgaaagtccaaggagaggagagacatttgttacaaaaaaaatagtaaagggtttatgtaaaataaaatatggttatcaaaaaaaactttatctcggaaatttagatgcaaaaagggattggggtcacgcccttgattatgttgaggcaatgtggaaaatgttacaacaaaaacatcctgaagattttgtaattgcaactggaaaacaatttaaaataagagattttgtcttaatggtatcaaaaaaattaggcatgaaaattgtgtggagaggaaaaggccttaatgaagtaggatatgatatagttagcaaaaagactattattgaaatagataaaaattatattagacctctagatgtaaatactcttctaggagactcacgaaaagcgagaaaaaaattaaattggaaacctaaaattaacatcgaaaatctaattaatgaaatgatagctgatgaaataaatttaatagaaaatctaaggtaat

SEQ ID NO: 284605 - DNA, 813 bp, Unknown
  Bacterial polypeptide expressing nucleotide sequence isolated from the Sargasso Sea
catgaaaaaaaaaagtgctttaatttttggtataacgggtcaggacggatcttatttagcagaatttttattaaaaaaaaaatatatagttcatggagttaaaagaagatcttcatcatttaatacaggaagaatagatcatttatatcaagatccacatgaaaaaaaaagaaactttattttacattatggagatgtaacagatgcgatatctgtttcttctattattgaaaatataaaacctgatgagatttataatcttgccgcacaatctcatgtagctgtttcatttgaggttccagaatatacagctaatgccgacgcattaggtgctctaagaattcttgaggcaattaaatttcataatttacaaaaaaaaacaaaattttatcaagctggtacttcagaaatgtttggtaaagttttagaagtacctcaaaatgaaaaaacaccattttatccaagaagcccttatggtgtagcaaaagtttatgctcactggattactgtaaattatagagaagcttacaatatatttgcctgtaacgggattctatttaaccacgagagtcctgtaaggggtgaaacttttgttacgaaaaaaattgtttcagcactttgtaaaattaaatatggaaaacaaaaaaaattatttttaggaaatctagatgctagaagagattggggtcacgcaaaggattacgtaattgcaatgtggaaaatgcttcaacaaaaaaaacctgatgactttattatttctactggtaagcaatattcagtaaaggagtttgttaatttggttttaaaagaatt

SEQ ID NO: 284606 - DNA, 775 bp, Unknown
  Bacterial polypeptide expressing nucleotide sequence isolated from the Sargasso Sea
tcgtgtttcgtttgatcagccggaatatacggctgacatcgtagcgactggcacgctgcgcctgcttgaggcaacccgcgagtatatcgcgatggctgaggatccagtgagggtttatcaggctggatcgtccgaaatgtacggatctgcgccggccccgcagagtgaggcgacaccatttgcaccccgcagtccctacgccgtggggaaggtggccggttattggtatgccgctaattatcgagaagcttacggcatgtacgtggcgaacggcattctcttcaatcacgagagcccccgacgcggggagacatttgtgacgcgcaagataacccgcgctttggggcgcattcgtcacggtcttcaagaaaggctctatcttggcaatctcgatgctaagcgggattgggggttcgccggcgactatgtcgaagcgatgtggctgatgctacaacaggatacggctgatgatttcgttatcgcgacgggggagacttactcggtgaaggagttcttgaccgcggcctttgataaggctgccatggattggcaggaattcgtcagtattgatgagcgctatttccgtccgaccgaggtggatatccttttaggtgatccgaggaaagcacgtgaaggccttgattggtcgcccaaggtcgatttcgacgccctggtatcaatgatggtcgagcatgatttggagctggcgcagcgcgaaaagacgctggtggatgctggtcatgagatttccttggagggtattgcggttggctga

SEQ ID NO: 284607 - DNA, 468 bp, Unknown
  Bacterial polypeptide expressing nucleotide sequence isolated from the Sargasso Sea
aatgtgtaaaagagctttaataacaggtgtgaccggtcaagatggttcttatttgacagaattgttgcttgagaaaggttacgaggttcatggtattattcgtagaagcagttcttttaatacgggtaggattgatcacataattaatgatgaaaaatataagaatcaatttttatttcattacggagatattacagatgccagtaatctaaaccgtattttggaaaaaatagagccagatgaaatttataaccttgcagcacagagccatgtgcaagtctcatttgaaatacctgattatactgcacaagtggatgcgttaggtacactgcggtttctagatgcgattcgggagacgcatctaaaaactaagttttatcaggcctccaccagcgaactctatggtaaagtacaggaatcaccacaaaaagaaacaacgccgttttatcctcgttcaccatatggtgt

SEQ ID NO: 284608 - DNA, 730 bp, Unknown
  Bacterial polypeptide expressing nucleotide sequence isolated from the Sargasso Sea
atgcctgattatactgcgcaggttgatgcattgggtacacttcgttttcttgatgcgattcgagaagttgggcaaaaaaaagtaagattttatcaagcgtcaacaagtgaactttatgggaaagttttagaaacgcctcaatctgagaaaacccaattttatcctcgttcaccatatgctgtagctaaactttatagttattggattattaggaattatagggaagcttataatttatttgcttcaaatggaattttatttaatcatgaatcacctaggaggggagaaacgtttgttacgcggaaaattgttcgtgcagcagtaatgattaaattgggcttgcaggagaatttggttttaggaaatattgatgctaaaagagattggggttatgctccagaatatgttgaaggaatgtggaagattctccagcatactgaagctgatgattttgtacttgctacgggtaagagtcatagtgttagagaatttatagaacttaccttttcagaattaggtattaaaattgattggattggagaaaaagaaaatgaagtaggaaaagataaagattcaggtagaacattgatatttattgattctaaatattatcgcccaactgaagttgaaactcttttaggaaatccagaaaaagccaaaaaaaaattagggtggcagtcatccacaagtttaaatgagctagttaaaattatggtgaatgctgaaatga

SEQ ID NO: 284609 - DNA, 604 bp, Unknown
  Bacterial polypeptide expressing nucleotide sequence isolated from the Sargasso Sea
ggatactggatcacaaccaattatcgtgaagcctataacatatatgcctgcaacgggattctcttcaaccatgagtcacctgttcgaggagagactttcgttaccagaaaaattacccgtgcggctgtccgaatttcaatgggtactcaagagcaagtatatctggggaacttggatgcaaagcgggactggggtcatgcaggcgattttgtagatggtatgtggcgaatgttgcaacaggaaaatccggaggactttgtgctggctaccggagtaacaaccacaatacgtgaatttgctgagagagcttttgcaaaagttggaatcactctgggatggtccggaaggggtgttgatgaagtaggtcgtgatactaaaacaggaaatactgttgtttctgtagatcccacttatttcagaccgactgaagttgatttactgattggtgatgctactaaagccagaaaaaaactaggttggaaaccgacacttgatttacagcaaatgattgaagaaatgattacgtcagatctcgaagaggctcgtaaagatcagtacatgcaaagtgccggttttaagtctaatggagtaaatgaagattgat

SEQ ID NO: 284610 - DNA, 680 bp, Unknown
  Bacterial polypeptide expressing nucleotide sequence isolated from the Sargasso Sea
tctgattaccggcatcacgggccaggacggcagctacctggcggaactcctgctggagaaggggtacgtggtgcatggcatcaagcgccgggcgagcagtttcaacaccacccggatcgatcacctctaccaagacccacacgaaaacgacccgcgcctggtgctgcactacggcgacctcatcgacagcaccaacctgatccggatcatccagcaggtgcagcccgatgagatctacaaccttggtgcccagagccatgtggccgtgagcttcgaggcgccggaatacaccgccaattccgatgcgctcggcaccctgcgcatcctcgaagcggtgcggatgctgggccttacgaaaaaaacccgcatctatcaggccagcaccagtgagctctatggcttggtgcaggaggtgcctcagaaggagtccacccccttctatccgcgcagtccctacggcgtggccaagctctatgcttactggatcacggtgaactaccgcgaggcttacgggatgtatgcctgcaacggcatcctgttcaaccacgagagcccacgccgcggcgaaacgttcgtgacccgcaagatcacccgcggcctggcgcggatcgaggcggggctggaggattgcgtgttcatgggcaatctcgactctttgcgcgactggggccacgcccgcg

SEQ ID NO: 284611 - DNA, 610 bp, Unknown
  Bacterial polypeptide expressing nucleotide sequence isolated from the Sargasso Sea
aaccacccctttttatccaaggtcgccatacggagtagcaaaactatatgcttattggattataattaactatagagaagcttatgatttatttgcttgtaatggaatcttattcaaccatgagagcccaaggcgaggagaaacatttgttactagaaaaattacacgagctgcagcacgaataaaaatgggaatacaagaaaaaatttcattggggaacctaaatgctaagagagattggggctatgctccagattatgtagagggtatgtggagaatgcttcaattagataaacctgaagattttgttctagcaactggtgaaacgcattcagttagagagttcgttgagctttctttcaatgagctgggaattaaaattgattgggaaggtgaaaatgaaaatgaaataggaagagatagcttaactggaaaaattattgttgaggtagacaaaaattatttcaggcctacagaagttgacttattgataggcgatgcttcaaaagcaaaagagaagttgggttggagcgcttcgacatcctttaatgatctagttaaaattatgattgaacatgattttaaaaaggtaaaaaaacgtggatattaa

SEQ ID NO: 284612 - DNA, 711 bp, Unknown
  Bacterial polypeptide expressing nucleotide sequence isolated from the Sargasso Sea
cgcgaagtacaaccagatgagatatacaatttgggtgcgcaaagtcacgtggccgttagtttcgagagtccagaatatacagcaaataccgatgctctaggggccctacgtctgttggaagcaatacatttcttgggacttgaaaaaaaatgtaagtactaccaagccagtacatcagagctatacggaaaggttctcgaaactccccagacagaggacacccctttctacccaagaagcccgtatgcagttgccaaattatacgcatattggatatccgtgaactacagggaagcatacggaatttttgcatgtaacggcattctctttaatcatgaaagcccgagaagaggagagacgtttgtcactaggaaaattacccgggggctaacgcggattttctgcggtcttgaggactgtttatacctcggaaatctagattctctacgagactgggggcacgctcgggattacgtagaaatgcaatggctgatgttacaacaagatgaaccagaagactatgtaattgcgactgggaggcaagagtccgtacgccgctttgttgaattatcaattgaatccttggggacaaccattaggtgggaaggctccggtctcgaagaggtcggaattagggaggacaacggagagatcatagtaaggatagatccgaggtactttaggccaactgaggtcgaaactttattggga

SEQ ID NO: 284613 - DNA, 895 bp, Unknown
  Bacterial polypeptide expressing nucleotide sequence isolated from the Sargasso Sea
agttcatggaatgtaagaagatcaagtactcctaatacttcaagaattaaccatattttaaaaaatcaaaactttatacttcattatggtgatttaacagatggaaataatttagtcaggataattaaagatgttagtcctgatgaaatatataatttaggtgctcaaagtcatgttgcggtaagtttcgaatctcctgaatatacagctaactgcgatgccttgggaactttaagaattttagaggcagtaaaaattcttggtttaatagaaaaaactaaaatatatcaagctagttcaagtgaattattcggattaattcaggagacacctcaaaaagaaaccacacctttttatccgagaagcccttatggggtagcaaaattatatgcttactggatagttgttaactatagagaatcatatggtatttttgcctgcaatggtattctttttaatcatgagagtcctcgaagaggggtaaattttgtcaccaaaaaaattacacgtggattagctaggataaatattggtctagatgattgcctttatatgggtaatattgatgctaaacgtgattggggtcatgcaagagattatgtagaaatgcaatggttaatgctccaacaagaaaaacctgaagattatgttattgcttcaggtcaaatggagtctgttagaagatttattgaaatagcagctgaaaaattgaattggaacaatggctctggccctggaattatttgggaaggagagggtgtaaatgaaattggaagaagagctgatactaataaaatagttataagaatagatccaaaatactttagaccagccgaggtagagcaacttcttggtgatccgtcaaaagcatcttcaaaactggatggaagccaaa

SEQ ID NO: 284614 - DNA, 584 bp, Unknown
  Bacterial polypeptide expressing nucleotide sequence isolated from the Sargasso Sea
aatggtaataatttttaagaacatcaaaaaagctcttattacaggaataacaggtcaagacggtagctatcttgcagaatttctattaaataaaggatatgaagtgcatgggataaaaagaagagcgagtagtttcaatacctccagaattaattatttgtatgaagatcctcatgaaaaagatacaaagtttattcttcattatggtgatctaacagatagttcaaatttaataagaattatacaaaaaatccaacctgacgaaatttataatttaggagctcagagtcatgttgccgtaagttttgaaagtcccgaatacactgctaattgcgatgcgctaggtatcctaaggatccttgaagcagtcaggatcctcaatcttggagagaaaacaaaaatatatcaagcaagcactagtgaactatatggactaattcaagagtctcctcaaaaagaaactacacctttttatcctcgtagtccttatggggtcgcaaagctttatgcatactggataactattaattatagagaagcctatgggatttatgcttgcaatggaattctatttaaccatgaaa

SEQ ID NO: 284615 - DNA, 601 bp, Unknown
  Bacterial polypeptide expressing nucleotide sequence isolated from the Sargasso Sea
agaaaccactcccttctatccccgttcaccctacggggttgcaaagctttacggttattggattacggtcaattatcgggaggcatatggccttcatgccagcaacggtattcttttcaatcatgaatcaccccttcgcggagaaactttcgtcacccgtaagatcaccatggctgtggcgcgtatttcccggggactccaggagtgtctctatcttggaaatttggatgcaatacgagactggggacatgctagggattacgtcgaggggatgtggagaatgttgcaacagcccaagcctgacgattacgtgctggccacaggcgtcagtgtgagtgtccgaaagtttaccgaaaaagccttcaacgttgtaggcatttatttaaaatgggtgggggccgatgaatctgaaatcggaatggatgcctcgaacggaaacgttattgtacgtatagatcccaactactatcgtcccaccgaggttgatttgcttctaggagacgcttccaaagccaaagaaaaactcagttggacacctgtatgcaatctggatgaactcgtaaaagagatggtgcaggaggacctcaacttattcaaataa

SEQ ID NO: 284616 - DNA, 605 bp, Unknown
  Bacterial polypeptide expressing nucleotide sequence isolated from the Sargasso Sea
tgaaactacttctttttacccaagaagcccatatggagttgccaaactatacgcgtattggatagtagttaactatagagaatcatacggaatcttcgcatgtaatggaattttatttaatcatgaatcacccaggcgaggagaacacttcgtcactagaaaaattactaaggggttaagcaaaattgcaaatggcttattagattgcttatatctgggaaacatagattctcttagggattggggtcatgcaaaggattatgtagaaatgcaatggagaatgttgcaacaagagaggccagaagattatgtaattgctactggacaacaaacatcagtaagagacttcgttgaattatgtgccaaaagtctccattggggaggtatcgtatgggaaggggaaggtgttaacgaagtaggaagaagaaaagataatggaaaaattattataagaattgatccaaatttatttcgccctgcagaagtccatagcttactaggaaatccagagaaagcatacaaaaaacttggctggaaacctacatacaatattgagcaattagtcgatgaaatgataagagaagataaatttaatatgaattaaa

SEQ ID NO: 284617 - DNA, 344 bp, Unknown
  Bacterial polypeptide expressing nucleotide sequence isolated from the Sargasso Sea
aatgcccgagtacacggccgatgtctcaggtgtcggcacactccggattctggatgcgattcgatctgccggtctcgcatcgactgtcaggttctatcaggcctcgacctcggagctctacggcaaggtgcaggagattcctcagaccgagacgactcctttctatcctcgctcaccttatgcggctgccaagctctatgccttttggatcaccaagaactatcgtgaggcttacaacatgcacgcctcgaatgggatcctcttcaaccacgaatcgccacgccgtggtctcacctttgtgacgcgtaagatcacgaggtgtgtggccctcatcaaagctgggc

SEQ ID NO: 284618 - DNA, 592 bp, Unknown
  Bacterial polypeptide expressing nucleotide sequence isolated from the Sargasso Sea
tatgaaaaaagtagcacttataactggaatcacaggtcaagacggatcatatcttgctgaattattattgtccaaaggatatgaggttcatgggattgtcagaagaatagctttagaagatgagactcacagactttggagaataaggaaaattttaaaaaatttaaatttacatgcgggttccctagagagttatgcgagcttatttaatattattttaaaaataaaaccaacagaagtttaccatttggcagcacaaagttatgttgactattcttttcaagatgaattttctactcttaatataaatattaatggtacccactacctactttctgctgttaaagaatttggtccaaacaaggtgagattttattttgcaggttcatcagaaatgtttggaaaggttaaagagattccacaaaaagaaagtacaccttttaatccacgatcttcttatggcatatcgaaggtaacaggatttcatatggtaaaaaattacagagaagcttataaagttcatgcttcaagtgggatattgtttaatcacgagtctccaagaagaggatttgaatttgtaactagaaaaata

SEQ ID NO: 284619 - DNA, 706 bp, Unknown
  Bacterial polypeptide expressing nucleotide sequence isolated from the Sargasso Sea
taggtttctgaaaataaaaaagataaaattttatcaagcgagtacatctgaattatttggagagacatataaaaaaaatatattcaatgagaaatcaaaattccatcctaaatctccttatggagtagcaaaactttattcatattggattacatcagtttatagagaggcttatggaatattcgcgtgtaatggaattttattcaatcacgagagtcctagaagaggggaaacatttgttactagaaaaattacacgatttttaacaagaaaaaaattaggttctaaagatattttatatttaggtaatctaaatgctaagagagattggggacatgcaaaagactacgttgaaatgcaatggagaattttacaacaaaaaaaaccagatgactttgttgtagcaactggacaaactcaaagtgttaggcaattcattgatactgcagtcaaattattagatatgaaaatcaaatggcaaggtaaaggattaaaagaaaaatgctatcttattaataaagaaaaaaaagaattattaattaaaattgataaaaaatactttagaccaaatgaggtaaactatttaaaaggtgatgcgagtaaagcttttaaaaaattaaaattcaaacctaaattttcatttaaagacttagtaaaagacatgatcataaatgatcttaaattggcgcaaaaagaacaaaaataa

SEQ ID NO: 284620 - DNA, 445 bp, Unknown
  Bacterial polypeptide expressing nucleotide sequence isolated from the Sargasso Sea
atgaaaaaagccttaataaccggcatcactgggcaggacggttcctatctggcagaactgttactagaaaaaggttatgaggtgcatggtatcaagcgccgttcttcttcatttaacactcagcgcgtcgatcatatttatcaggatccgcatactgacaaccgtaacttcattctgcattatggcgatttgactgacagctcaaatcttatccgtttggtgcagcaaattcagcctgacgaaatttataatttgggtgcacagagccatgtggcggtaagtttcgaatctcctgaatacactgccgatgtggatgccatgggtacattgcgcttgctagaggcaatccgtttacttgggcttcaaaataaaacccgtttttatcaggcgtcaacttctgagttgtatggcttagtgcaggaaacacctcaaaaggaaagcactc

SEQ ID NO: 284621 - DNA, 499 bp, Unknown
  Bacterial polypeptide expressing nucleotide sequence isolated from the Sargasso Sea
atgagtattaataaaaaagcattaataaccggtataactggtcaagatgggagttatcttgcagaatttttactaaagaaaggttatgaagtgcacggaattaagaggagatcaagtagttttaatacagaaagaattgatcatatttatcaagatccgcatgtaaacaataaaaaattcattttgcattatggagatttgactgacagtacaaatataataagaataattcaagtggttcaacctgatgaaatttataatttaggtgctcaaagtcatgttgctgtaagttttgaatctccagaatatactgccaatagtgacgcgttaggaacattaagaatattagagacaataagaatacttggaatgataaaaaaaacaaaaatatatcaggcgagtacaagtgagatgtatggattggttcaagaagttccgcaaaatgagaaaactcctttttatccaagaagcccatacggagtgcaaaactatacgccca

SEQ ID NO: 284622 - DNA, 712 bp, Unknown
  Bacterial polypeptide expressing nucleotide sequence isolated from the Sargasso Sea
tgcaatcggcgctttaagaatattggaagcaataaaatttcataaattggaaaaaaaaactaagttttatcaggcaggaacttctgagatgtttggcaaagttcaagaaactcctcaaaatgaaaaaactcctttttatccaagaagcccttatggagttgcaaaagtttatgcacactggattacagtaaattacagggaagcttataatatatttgcttgtaacggaattttatttaaccacgaaagtccagttagaggtgaaacttttgttacaaaaaaaatagtctctgcattatgcaaaattaaattaaaaaaacaaaaaaaattatttttaggtaacattaacgcaaaaagagactggggacatgctaaagattatgtacaggcaatgtggaaaatgcttcaaaaaaaaaggcctgatgactatgttattgcaacaggaaaacaatattctgtaaagcaatttgttaatttagttttaaatgaattaaaaattaaattttattggaaaggaaaaggtataaattccaaatgttatgataaaaagggaaattgtattattgaatgtgataaatcttactatagaccattagaagttgatactcttttaggaaacgctaaaaaagcaagaagtctgctaaattggaagcccaaagtttctataaaaatgttagtaaaagaaatggttaattttgaactgaaaaattaa

SEQ ID NO: 284623 - DNA, 713 bp, Unknown
  Bacterial polypeptide expressing nucleotide sequence isolated from the Sargasso Sea
aatgaaaaaagtcgctttaataacaggtataacaggtcaagacggatcttatttagctgaacttctactcaaaaaaaggtacaaggttcatgggatcgtcagaagagtagcgctagaagacagaactcacagactttggaggttacaaaagattctaaagcagattaacttgcattctgcttcattagaaagttatgcaagtattgttaaaattgttcaaaaaacaaaaccaactgaaatttatcatttaggagcacaaagttatgttgattattcatttaaagatgaattttctactttaaatactaatataaacggtactcactatttgctttccgcaataaaagatttttctccaaaatcaaaattttattttgcaggatcatctgaaatgtttggaaaagtgagaaatgtacctcaaaatgaaaaaactgcctttcacccaagatccgcttatggaatttcaaaagtcacaggccatgacctaacaagaaattatagagaagcatacaacctacattgttgtactggaattttgtttaatcacgagtctccaagaagaggctttgaatttgtaacaagaaaaatttctcatggtgttgccagaattaaatatggttttcaaagagagctgaaattgggaaacttagacgcaaaaagggattgggggcacgctcatgattacgttgaagccatgtggttaatgcttcaac

SEQ ID NO: 284624 - DNA, 549 bp, Unknown
  Bacterial polypeptide expressing nucleotide sequence isolated from the Sargasso Sea
aatcacctttaagaggagaaacttttgttaccagaaaaattacaagaggaattgctcaagttgctttaggaatggataagcaactatttatgggtaacattgatgctaagagagactggggacatgccaaagactacgttgaagccatgtggcttattcttcagcaaaacaatgcagaggactatgttatagcaacaggagaaacaaccagcgttcgagattttattgcaatggcatttcttgaaataggagttacaattaaatttaatggtactgacattaatgaagttgctattgttgaatccatagatgagtcaaaatatttagaatatatgggttctgaatttggagagcatgggcgattagagcttggtgatcaagttttaagtattgatgagaggtattttaggccaacagaagtagagcttttaattggagatccaacaaaatcaaaaacaaaattgaattggcaaccaaagtatgatcttaaaggtctgatcgaagaaatggtcaaatctgatgttcagctttttaggtcaaaattataag

SEQ ID NO: 284625 - DNA, 721 bp, Unknown
  Bacterial polypeptide expressing nucleotide sequence isolated from the Sargasso Sea
atgaaaaaaaaaatcgctctaatcactggtattacaggccaagatggatcctacttagctgagctgcttttgaaaaaaaattatattgtccatggtttaattagaaaatcttcaacttttaatactaaaagaattgaccatttatatattgatcctcataataaaactaatttttttttacattatggtgatttaactgacagcaatagtatttacaacattattcacaaaataaaacccaatgaagtttataacttgggagcccaaagtcatgttggtgtatcatttgacaatcctgaatttacagctgaggtatctggcataggtactctaagaattttagaagcaattagatttttaaaaatgaaagatattaaattttatcaggcaagtacttctgagttatttggtgaaacttatggaaaatcaatttttaatgaaaaatcaaagtttcatcctaagtctccatatggtgtagcaaaattatatgcttattggatcacgtctgtatatagagagtcttatggtatttttgcatgtaatggtattttatttaatcacgaaagtcctaggagaggagaaacttttgttacaagaaaaataactcgttttcttacaaaaaaaaagttaggttcaaaagatacgctttacttaggaaatcttaatgcgaaaagagattggggacaaacaaaagattatactgaaatgcagtggagaattt

SEQ ID NO: 284626 - DNA, 507 bp, Unknown
  Bacterial polypeptide expressing nucleotide sequence isolated from the Sargasso Sea
atggtattttattcaaccacgaaagtccgttgcgaggagaaacatttgtaacgcgtaaaatcacccgtgcggttggacgcataaagttggggctgcaggataaactatatcttggtaacttggatgctaaacgagactggggattcgcgggcgactatgtcgaggtgatgtggaaaatgttacagcacgataagccagatgattttgttgttgctaccggtgaagcccactccgtgcgagaatttttagagtcatccttcgaacacgcaggccttgattggaaaggccatgttgagatcgaccaacggtatttccgcccaactgaagtagaccacttgttgggtgatgcttcaaaagcgtctcaagacttaaattggaggccgaaggtagatttcaagcagctcgtggcaatgatggttgatcacgatatggttcatgctgaacgtgaaaagcttcttgtggatgctggtcattcagttggtcctttaggtttaccaaatggctaaa

SEQ ID NO: 284627 - DNA, 586 bp, Unknown
  Bacterial polypeptide expressing nucleotide sequence isolated from the Sargasso Sea
ttatggcgtatcaaaggttttttcgcattggatgactataaattatagagaatcttataatttatttgcatgtaatgggatacttttcaatcatgaaagcccaagaaggggtgaaacatttgttacaagaaaaattacaatggggctagttaaaataaaattaggtttacaaaaaaaattaattttaggaaatatttatgcaaaacgtgattggggccatgcaaaagattatgttgaagcacaatggctaattctacaacaaaaaaaagctgatgattatgtgattgcctcaggaaaacaattttcagtcaaacattttataaatattgtagccagagaattaaaaatgaaaattaaatggaaaggtaaaggaattaatgaaaaagcctatgatgataagaataatgtaatcattgaatgtaataaaaaatattttagaccaagtgaggttgaaacattattaggaaacccattaaaagcaaaaaagattttaaagtggaaaccaaaaatttcattaaaattactggcaaaagaaatgatacaaaatgatttaaagctattttctcaaaatgataaaaaaaagtga

SEQ ID NO: 284628 - DNA, 795 bp, Unknown
  Bacterial polypeptide expressing nucleotide sequence isolated from the Sargasso Sea
aatgagaagtaaaaaaaaagttgctcttataactgggataacaggtcaagatggaagttatttaaccgaattacttttaaaaaaagattatgaagtacatggaataaaaaggagatcgagtaatttcaatactcaaagaattgatcatctttaccaagacccacacaatcctgagccagcattaattcttcattatggagatttaactgacagtacaaatataattaagataattcaagaagtaaaacctgatgagatttataatcttggtgcacaaagtcatgtttcagtaagttttgaatctcctgaatatactgctaatagtgatgctttaggaactttaagaatacttgaggcagtaagattattaggtttaggcaataaaacaaaaatttatcaagcgagtacaagtgaactttatggccttgtacaagaagttcctcagagagaaactactcctttttatcctagaagcccatacgcagtttccaaactatacgcctactggataattgttaattatagagaatcatacggaattttcgcttgtaatggtattctttttaatcacgaaagtcctaggagaggagaaacatttgtaactagaaaaataactagagggctatcaagaattaatgaaggcatagaagattgtgtttatttaggaaacttaaattctttgagagattggggacatgccagagattatgttgaaatgcaatggagaatgcttcaacaagccaacccagctgattatgtaatctcaactggtagacaagaatcggtaagaaaatt

SEQ ID NO: 284629 - DNA, 592 bp, Unknown
  Bacterial polypeptide expressing nucleotide sequence isolated from the Sargasso Sea
aatgggtaataataagaaagcactaattacaggtgtaactggacaagatggaagttatttagctgaactactaattcagaaaaattacattgttcatggaatcaaaagacgatcaagtagctttaatacctcaagaattgatcatatttatcaagacccacatattgagaattcaaattttatacttcattacggagatttaacagatagtactaacttaataaaaataattcaagaaatacagcccgatgaaatatataatcttggagcacaaagtcatgttgcagtaagctttgaaagccccgaatatactgccaacagcgatgcagttgggacattaagaattcttgaggctattaggatattaggccttgaaaaaaaaactaagttttaccaagcaagtactagcgaattatatgggttaatacaagaatctcctcaaaaagaagacacaccttttcaccctcgtagtccttatgcagttgcgaaactttatgcttattggataacgataaactacagagaagcttatggtctatttgcttgtaaaggcatattattcaatcacgagagtcctagaagaggagagaca

SEQ ID NO: 284630 - DNA, 655 bp, Unknown
  Bacterial polypeptide expressing nucleotide sequence isolated from the Sargasso Sea
tatgaaaacagcaattgttacaggggtgacaggacaagatggctcctatttgtgtgaacttttgttagaaaaaggttataaagtcgtaggactcaagagaagaacatctctgataacaactgatcgtatagatcatatttacaatcatgaaaattttcaattagaatattttgatctaaatgatacgggcagtatctacaggttgttgataaaatatgctcctgacgaattttataatttagccgcccagtctcatgtgcgagtatcttttgatattcccgaacatacagcagatggaattgctatgggcacattgcgaattctcaacgccatcaaagaggtgtgtccccgtacacgcttttatcaggcatcatcctcagaaatgtttggggataatcccgaataccctcaagatgaaaatactcttctctgtcccgcttcaccttatgcttgtgcaaaggtttttgcacatcaccttgtaaaaaattaccgcaaatcctacggtctccatttatccagtggaatcttgtttaatcatgaatcccctcgtcggggagaaacttttgtgacaagaaaaataactttagcagccgcacgaataaaattaggattacaagattttttatatctgggaaacttagatgctaaaagagat

SEQ ID NO: 284631 - DNA, 608 bp, Unknown
  Bacterial polypeptide expressing nucleotide sequence isolated from the Sargasso Sea
gtatgcctactggattactattaattatcgcgagtcttacggaatgtatgcctgtaacggtatcttgtttaaccacgaaagcccgcgccgtggtgaaacatttgttacccgcaagattacccgcggactcagtcgtattaatgcaggtcttgagcaatgcatctacatgggcaaccttgaatccaagcgtgactgggggcatgcccgtgactatgttgagatgcaatggagaatgcttcagcaagatgctccagaagactttgtgatcgccacaggacgtcaggaaactgtccgtcgttttatcgagcttgctgcgaatcaaattggttggggtggtatccaatgggaagggaatggtctgcaggaggtcggacgtcgtcctgataacaacgaaattgttgtgcgtattgatccgcgttattttcgtccagcagaagtagagactctcttgggtgatcctacgagagccaaagataaactaggctggattcctgcaacttctctggagcaattggtggctgagatggttctcaatgactgtgatgaagccagaaaagaagcttatctgagacgcaaaggatttgatgtggtaggagcatacgaatgac

SEQ ID NO: 284632 - DNA, 547 bp, Unknown
  Bacterial polypeptide expressing nucleotide sequence isolated from the Sargasso Sea
tcatcctagatctgcatacggtatttcaaaggttacaggatatgatttgaccagaaactatagagaggcctacgggcttttttgtagcacagggattttatttaatcacgagtccccgagaagaggatttgaatttgttacaagaaaaatttcacatagtgtagcaaaaataaaactaggcttgcaaagagaattaaaactggggaatttgaattcccttagagactggggtcacgccaaggactatgttgaagctatgtggttaatgcttcaacaaagaaaaccagatgatttcgtcattggaactggaaaacagtattccgtaagagaatttgcaaaaactgctttttctattgtaggtttagattacaagaaatatattaagatagataaagcactttttagacctgctgaagtcactacattactagccaatccatctaaagctaaaaaaacattaaaatggagacaaaaaatatcttttaaacaactcgtgaaagaaatggttgaatcagatctaaaatctgtaaaaagatctggttattag

SEQ ID NO: 284633 - DNA, 550 bp, Unknown
  Bacterial polypeptide expressing nucleotide sequence isolated from the Sargasso Sea
aacggcattttatttaatcatgaatctccagttagaggcgagacttttgttacccgtaaaattactagagcgctagcacgtatatcattaggcttacaagaaaaactctatttgggtaatttggatgctaagcgtgattggggtcatgccaaagattacgttgaaatgcaatggttaatgttacaacaagaaaaaccagatgatttttgtattgccacaggaatacaatactcagttcgtgaatttgtaaattttgcctggagtcatttaggaaagacaattttatggaaaggcgaaggccaggatgaaaaagggtatgattctgagacaggaaacttaatcgttgaagttgacccaagatattttcgtccaacagaggtagaaacattattaggtgatccatctaaagctaaggaaaaactaggatgggagccaaaaattactatccaagaaatggttgatgaaatgatggaacatgacctcaatattgccaagcgtgattcattagttaaagagcatggctttaaagtacctgactttaacgagtaat

SEQ ID NO: 284634 - DNA, 508 bp, Unknown
  Bacterial polypeptide expressing nucleotide sequence isolated from the Sargasso Sea
atgaataagaagaaagttgctttaataactggcatcaccggtcaagatggatcatatcttgctgaatttttaatttcaaaaggttaccaagttcatggaattaaaagaagatccagttcattaaatactcaaagagttgatcatatttatgaagatcctcacgtaaaaaataggtcttttaatctccattatggcgatttaactgactcatcaaacctcattagaatcattcaagagatcaaaccaactgaaatatataatttagcggctcaaagtcatgtggctgttagtttcgaaagtccagaatatactgctgatgttgacgctctaggtacacttagaattctagaagcaatccgaattctaggcctagaaaaaacaactaagttttatcaagcttcaacctctgagttatatggtttagtacaggaaatacctcaaacagaaacaactcccttttatcctagaagtccatatgcagtagctaaactttatgcatattggatag

SEQ ID NO: 284635 - DNA, 745 bp, Unknown
  Bacterial polypeptide expressing nucleotide sequence isolated from the Sargasso Sea
aatgaaagctctaattacaggcattacaggtcaagatggatcatatcttgctgagtttttattaaaaaaaggttacgaggttcatggaatagtaaggagggttgcattagaaaatcaagaacatcgcctttggagaataaataaattacgaagtagaatacgacttcacgcaggatctatggaaagttatgcaagtatatttaaaattttcaataaagtaaaacctaatgagttttatcacttagctgcccaaagttatgtagattattcctttcaagatgagttttcaacgttatcatcaaatatatcttcaactcattattgtctttcagcaataaaagagagtggtcttaatactaaattttattttgcaggctcttcagaaatgtttggaaaggttaaaaaggttccacaaaatgagaatacacctttttatcctcgatcaccttatggtatttcaaaagttgcaggttttgaattaactagaaattatagagaatcatacggtctacatgcttcatcaggaattttatttaatcatgagtcagaaagacgtggttttgaatttgttacaagaaagatttctcatgcagtagcattgattaaattgaaaaaattaaaacttttagaattaggaaatttgcaagcaaaaagagattggggatatgcacctgaatatgtaaaagcaatgtggttaatgcttcaacaaaaaaaacctgatgattatgtagtaggtactggagaa

SEQ ID NO: 284636 - DNA, 535 bp, Unknown
  Bacterial polypeptide expressing nucleotide sequence isolated from the Sargasso Sea
tatgaaaaaaaaagctctgatatttggtgttacaggacaagatggatcatacttatcaagcctgttaataaaaaaaggttatgaagtccatgggataataagaagatcttcatctttcaatactggaagaattgaacatttatatcaagacccgcacgaaaaaaacagaaaattaattttacattatggtgatgtaacagatgcaatttcagtttcctctttaattaaaaaaataattccaaatgaaatttataatcttgctgcacaatctcatgtggcagtttcatttgaagttcctgaatacactgctaatgctgatgctgttggagctttaagaattcttgaagctataagatttcacaaattagaaagaaaaacaaaattttatcaagctggaacttcggagatgtttggtaaagttttagaaacacctcaaaatgaaaaaacacctttttatccaagaagtccttatggagttgcaaaagtttatgcacattggataacagttaattatagagaagcttataatatcttc

SEQ ID NO: 284637 - DNA, 820 bp, Unknown
  Bacterial polypeptide expressing nucleotide sequence isolated from the Sargasso Sea
atggcaaaagttgctcttataacaggcatcacaggtcaagatggttcctatcttgcagagttattgctatcaaaaggttataaagttcacggaattgtaagacgggtagccttagaagatgaaacacatcgactgtggagaataaggcatattttaaaagacgttacattacatgcgggatctttagagagttacgctagtttatttaatatcattttaaaaataaaaccagacgaagtttatcatttgggtgcacaaagttatgtgggctattcatttgaagatgaatattctacttttaatattaatcttaacggtacccattatgttttatcagccgtaaaagaatttgctgctagcaaagtaagattttactttgctgcatcttctgaaatgtttggaaaaattaaagaaagcccccaaaatgaagaaacttcttttcatccaagatcttcttatgggatatctaaagttactggtttttatttaaccagaaattatagggaagcttacaagctgcatgcttcaaatggaatattatttaatcacgagtctccaagaagaggttttgaatttgttactagaaaaatttcttctgctgtcgctagaataaaaaaaggtctacaaaagaaacttaaactaggaaatattcaagcaaaaagggattggggccatgccaaagattacgtagaagctatgtggttgatgctgcaacaagatgtgccgggcgattatgttattggaactggcaaagaacatactgttgaagattttgctaaaaaagcttttggtcatgtgggtttaaattataaagattata

SEQ ID NO: 284638 - DNA, 526 bp, Unknown
  Bacterial polypeptide expressing nucleotide sequence isolated from the Sargasso Sea
atgataaaaagtaataaggttgctttaattactggagttacaggccaggatggcagttatttagctgaattacttctagaaaaaggttatctagtccatggcttaaaaaggcgttccagttcatttaatacttcaaggattgatcatttatatcaagatccgcacgagaaagatgctaggtttatccttcattatggagatttaattgatagtactaatataatgaagttaatagaaaaaattaagccagatgaaatatataatttaggtgcccaaagtcatgttgctgttagttttgaaacaccagagtataccgctaattgtgatgcattaggaattttaagaattcttgaagctgttcggaatttaaacctcacaaaaaagaccaagatttatcaagcaagtacaagtgaattatatggtcttgtgcaagaggtacctcaaaaggaatcaactcctttttatcctaggagtccttatgcagttgcaaaattatatgcttattggatagttgtaaattaccgag

SEQ ID NO: 284639 - DNA, 640 bp, Unknown
  Bacterial polypeptide expressing nucleotide sequence isolated from the Sargasso Sea
catgtcggagaacggcggcaaacggcagaagaccgatccctcgacgacgatcacgacgacgcacaaggtcgcgctcatcaccggcatcaccgggcaggacggcagctacctcgccgagctgctgctcggcaaagggtacgaggtgcacggcatgatccggcggtcgtcatcgttcaacaccggccgcatcgaggagctctaccaggacccgcacgtcgatacgcggaagctcatcctgcactatggcgacctcaccgactcgaccaactgcttcgagatcatctcgaaaatccggcccgacgaggtgtacaacctcggcgcgcagtcgcacgtcaaggtgtcgttcgagatgtcggagtacacggcggacaccgacggcatgggcgtgctgcggctgctcaacgccatccgctccgccggcctcaccaccacgacgcgcttctaccaggcctccacctcggagctctacggcctcgtgcaggaggtgccgcagaaggagacgacgcccttctacccgcgctcgccgtacgccgtcgccaagcagtacgcctactggatcgtcgtcaactaccgcgaggcctacggcatgcacgcctccaacggcatcctcttcaacacgagtcgccccgccgcgggccga

SEQ ID NO: 284640 - DNA, 736 bp, Unknown
  Bacterial polypeptide expressing nucleotide sequence isolated from the Sargasso Sea
aatgcaggttctcagcaaaaaagccatcgttaccggcatcactgggcaagatggagcctacttggcccaactgctactcaataaaggctattcggtttatggtacctaccggcgtaccagttcggtcaatttctggcgcattgaggaactggcaatacagtcccatcctaaccttcacctggtggaatacgatctgacagatttgggcgcaagcattgcactcgtgcagaaaattcagcccgacgaaatctataacctggccgcccaaagcttcgttggcgtcagctttgagcaaccctctgctactgcccaaatcacgggcatcggtgccctgaatctgctggaggccatccgcttggtcaacccgcgcatccgcttctaccaagccagcacctctgaaatgttcggtaaggtgcaggccataccgcaggttgaagacacccctttctacccccgcagtccctacggcgtcgccaaactgtacgcccactggatgaccgtcaactaccgcgagagctacggcatgtttgccagcagtggcatcctcttcaaccacgaaagccccttgcgcgggcgcgaatttgtcacccgcaaaattacagacagcgtggccaaaatcaagctgggcaagctcgacgttctagaacttggcaacatcgatgccaagcgtgattggggctatgcccaagagtacgtagagggcatgtggcggatgctgcaggccgaccagcccgac

SEQ ID NO: 284641 - DNA, 1045 bp, Unknown
  Bacterial polypeptide expressing nucleotide sequence isolated from the Sargasso Sea
tatgagccaaccacgcaaagcgatcatcaccggcgtatccggacaggacggcgcctatctgaccaaactgctgctcgacaagggctaccacgtgaccggcacctaccggcgcacgagttcggtcaacttctggcgcattcgtgagctcggcgtgctcgatcatccgaatctgcgtctggtcgaacacgatctgaccgatctcggctccacgctgcgcctgctcgaaggcgcgcaggccgacgagctgtacaacctcgcggcgcagagcttcgtgggcgtctcgttcgaccagcccgtgacgaccgccgaagtgaccggcatcggcgcgctgaatctgctcgaaggtatccgtatcctgaatccgaagacgcgtttttatcaggcctcgacctcggaaatgttcggtctcgtgcaagcggtgccgcagcgcgaggacacgcccttctacccgcgcagcccgtacggcgtggccaagctgttcgcgcactggtcgaccatcaactatcgcgagtcgtacaacctgttcgccagcagcgggattctgttcaatcacgaatcgccgctgcgtggccgcgaattcgtgacccgcaagatcaccgacacggtcgcgaagatcaagctcggcaagcaggacacgctggaactcggcaatctgagcgccaagcgcgactggggcttcgcgctcgaatacgtggaaggcatgtggcgcatgctgcaagccgatgaacccgacaccttcgtgctcgccaccggccgcaccgagacggtacgggacttcgtgcgcatggcgttcgccgccgcgggctatcagctcgaatggtcgggtaaggaagagcgcgaaaccggcatcgacgtcgccacgggtaagacgctggtgcgcgtgaatccgaagttctaccgcccggcggaagtggatctgctgatcggctgcgcggacaaggcgcgcgaaaagctcggctggaagccggaaaccacgctcgaacagctatgccacatgatggttcatgcggacctcggccgcaacgagcatcacgagacgttctga

SEQ ID NO: 284642 - DNA, 613 bp, Unknown
  Bacterial polypeptide expressing nucleotide sequence isolated from the Sargasso Sea
tatgaaaaaagctattatttttggtattactggtcaagatggatcctatcttgctgagcttttattaaagaaaaaatatacagtgcatggggtaatcagaagatcttcatcatttaatacatctagattaaatcatttatatcaagatcctcatattaaaaatagaaaattaattttacattatggagatgtcacagactcaatatctgtttcttctttaataaaaaaaactttacctcatgaaatttataatctagcagcacagtcacatgtagcagtatcctttgaagttcctgagtacactgcaaatgccgatgctataggagctttaagaattttagaggcaataaggttccacggtctcgaaaagaaaacaaaattttaccaagcaggtacatctgaaatgtacggtaaggtaatgcaagttccacaaactgagaaaactcctttttacccaagaagtccatatggagttgcaaaagtatatgcgcattggataacagttaattatagagaagcttataatatatttgcttgtaacggaattttatttaatcatgagagccccagaagaggtggaactttcgtaacaaaaaaaattgtaaatggtctg

SEQ ID NO: 284643 - DNA, 1075 bp, Unknown
  Bacterial polypeptide expressing nucleotide sequence isolated from the Sargasso Sea
atgagtaaaaagaaagcattgattacaggcattactggacaggatggcgcatatttagctgaatttctgctaaataaagattatgaggttcatggccttaggagaaggtcttcttcattcaacacaggaagaatagatcatctttattctgatccatattatgctgatacctctctttttttgcatcatggagatatgactgactcttcaagcctcatccgtatacttcaaacagttaaaccagatgaaatatataatcttgccgcacaaagccatgtacatgtttcctttgaagagccagaatatacagctaattcagatgctattggggctttgagactattagaaggcatgaggctgcttaatttaaaaagtacaaagttttatcaagcatcaacatcagaactgtatggagaagttaaagaaatacctcaaaatgaagaaacaccatttaatcctcaatcaccatatgcgatatcaaaactttattcctattggataacaattaactatagaaaatcatatggactatttgcatcaaatggaattctattcaatcatgaatctccagttagaggtgagacattcgtgactaggaaaattaccagagcgttagccagaattaatctagacttacaagaaaaactcattctaggaaatctagatgccaaaagagattggggtcatgcaaaagattttgttaaagcacagtggatgatattacaacatgacaaacctgatgattttgtaatatcaaccggtaaggagcacacagtaagagaatttgtggaaaaagcagctaagctccttgggtttgaaattgtgtggaaaggtaacggcataaatgaagtcggtatagatatcaaaacaaacaaggaaattatcgctatagatgagaaatattacaggccctcagaagtccaaacactattgggagactcatccaaagctcaaaaagaactgggttggagtccagaaacatcatttgatgagcttgttgaagaaatgattgattatgatcttaaattggcaaaacaagagatgagtactgacaaatcattctcatatttctaaa

SEQ ID NO: 284644 - DNA, 982 bp, Unknown
  Bacterial polypeptide expressing nucleotide sequence isolated from the Sargasso Sea
atgaaaaagaaaaaagcgcttattacagggataacagggcaggacggaagttacctagcagaacacctactttcgcttggatatgaagttcatggaattgttcggagggtagcattggaagaccctactcatcatttgtggagacttttgtcaattgcagatcgcttaaatttccattcgggaactttagagagttttccagcgctttacaaaatattaagagatgtacaacctgatgagtgctaccatctggctgcgcagagctttgtttcaatctcatttgaagatgagttttcaacaatgcaaaccaacatcaacggtacgcattatcttcttgcagcaatcaaggatacgtccccggaatgccgtttttactttgcaggttcatcggaaatgtttggcatggtcgaagaaacaccccaaagagaaacaactcgttttcatcctagatcagtttatggtattaccaaagttgcaggttttgaacttactcgtaattatcgtgaagcctacaatttgtttacctgtacaggaattcttttcaatcatgaatctccaagaagaggcttcgaatttgttactcgaaagatttcttctaccgcagctcgaattaaacttggattggagaaagaattaaggcttggtaatattgacgcaaaaagagactgggggttttcaggtgaatatgtgcagatgatgcactccatgctacagcaggaaaacccagatgatttcgttattggaacaggtgaaactcactcagtcagagaatttttgcaaattgtttttgaagatcttaaactgaattatgaagattttcttgttattgatcaacgtttttatcgtcctgctgaagtagaaattttagtggcagatccttccaaagcaagggaaaaattaggatgggatcctaaagtaacttttacagaaattgctctaaaaatggttaggtatgattatgacaatttaaaaaaaggttaac

SEQ ID NO: 284645 - DNA, 1033 bp, Unknown
  Bacterial polypeptide expressing nucleotide sequence isolated from the Sargasso Sea
atgaaggcactaataacaggaataacaggtcaagacggctattatctagcaaaattactaatagaaaaaggatatgaagttcacggaacaattcgtagatcctcaacaataaacactgatagaatagacccgttaatttcagaatttgaagaagttggaaagctaaatctccactactccgatttacttgactctgcctctttaaactcattaattaatcaaatccagcctgatgaaatatataatttagctgcgcagtcccatgttgctgtatcttttaaaaatccaatttatacaacacaaacaggaacccttggttcagttgcccttttagaagctgtcaggcattcaaataaagaaataaaattttatcaagcttcctcctctgaaatgtatggtggcattaataaagaaatgttaaatgaaacatctccatttatacctaaaagcccttacgcagcttctaaagtattcgctcataatatgacaaaactttatagagaatcatatgacctgttctgtgtaaatggaatactttttaatcacgaatctccacatagaggacaaactttcgttacaagaaaaattaccagagctgttggaagaattgttaacaatttacaatctaagcttactcttggcaatctagatgcttcaagagattggggatttgcaggtgattatgttgaaggaatgtggttaatgcttcaacatgacacacccgatgactgggttcttgctacgggagaaacacatacagttaaagaatttttgcagaaagcttttgaatatgttgatttagattgggaaaagtttgtacaaacctctgaaaaatattttagaccaaatgaagtagagcacttactaggtgattcaactaaagctagaaaagaattaagttggtctccaaagactagttttgatgaattagtaaagttaatgattgatcatgacttagttttagctgaacaagaaaaagttcttatacaaaataatcttatgacacccacttgggaaaacccaacaatataat

SEQ ID NO: 284646 - DNA, 1036 bp, Unknown
  Bacterial polypeptide expressing nucleotide sequence isolated from the Sargasso Sea
tatgaaatcagcaatcgtaaccggtatttctggccaggatggcgcttaccttgccgagctcttgctcgataagggctatcaggtctacggcacctatcgccgcacgagctcggtcaacttctggcgcatcgaagagttgggcatcgcgaagcatccgaacctgcatctggtcgaatatgacctgacggatctgtcggcaagcatccggcttttgcagactaccggcgcaaccgaggtctataaccttgcggcacaaagcttcgttggcgtgtccttcgaacagccggttaccactgcggaaatcaccgggattggtccgctgaacctgctcgaggcgatccgtatcgtcaacccgaagattcgtttctatcaggcgagcacatccgagatgttcggcaaggtgcaggccgtgccgcagatcgaatcgacgccgttctatccgcgcagcccttatggcgttgcgaagttgtacgcacactggatcacggtgaattaccgcgaaagctacgacatcttcggctgcagcggcatcctgttcaatcacgaatcgccgctgcgcggccgcgagttcgtgacgcgtaaaattactgactccgtcgccaagatcaagctcggccagctcgacgtgctcgaactgggcaacatggatgcgaagcgtgactggggcttcgcgaaggaatatgtcgaaggaatgtggcgcatgctgcaggccgacgaaccggataccttcgtgctggccacgaatcgtacggagacggtgcgcgactttgtgcgaatggcattcaaggctacgggtgtcgacctccagttcaagggccaggacgaaaacgagatcggggttgatgttgcaagcggcaagacggttgtcaaggtcaatccgaagttccatcgccctgctgaagtcgatttgctgatcggcaacccggagaaggccaagcagaaactgggttgggaacccaagaccacgctcgagcagctgtgcgcgatgatggtcgaagcggacttgcgtcgcaatgagcgcggcttctcgttctga

SEQ ID NO: 284647 - DNA, 637 bp, Unknown
  Bacterial polypeptide expressing nucleotide sequence isolated from the Sargasso Sea
aatgaaagccttgataacaggaattacaggtcaagatggagcctatctcacacaactcttattagataaaggctatgaagttcatggcctactaagaaggtcttcgtctattaatacttctcgaattgatgacttaatttcagaatacacgccaaaaaataggcttcaattacattattctgatttgcttgattcttcttcaattaccaatttgataaattcaataaatcctgatgaaatttataatcttgctgctcaatcacatgtctctgtttcttttgagaatccaatttatacaactcaggtgggcacattggggtcgatcacaattttagaagcattgaaacactctgataaaaaaataaaattttatcaagcatcttcatctgaaatgtttggcggaagttcaaaagaaattcttgatgaaagctctgcatttaatccaaaaagtccttatggtgcatctaaggtatttgcacatgatattacaaaaatctacagggactcgtatgatgtttttggtgtaaatggaatattgtttaatcatgaatcacccttaagaggcgaaactttcgttactagaaagatttcaaaagccgttggaaggattgcagctggaatccaagaaaaattaaca

SEQ ID NO: 284648 - DNA, 919 bp, Unknown
  Bacterial polypeptide expressing nucleotide sequence isolated from the Sargasso Sea
ttgtcttacccatggagatctaacagattctactaatttgatccggatcatacaagaaactcagcctgatgaaatttacaatcttgctgcccaaagccatgttatggtttcatttgaaactccggaatatacagctaacgctgatgcactcggaactttaagaatattagaggcaataaggcttttggagttaactcataaaactaaattctatcaggcatcaaccagtgagctttacggtctggttcaggaagtaccacaaaatgaaaaaacaccattttatccacgatcaccatatggagtagcaaaactttatgcatactggattactgttaattatcgggaggcatataatatatttgcctcaaacgggatcctttttaatcacgagtcacctataaggggagaaacttttgtaaccagaaaaataacgcgtgcagcagcacgcatatcacttggtgttcaggaaagactatacctaggcaaccttgattccaagagagactgggggcacgcatgtgactatgtggaaggtatgtggagaatattacagcatgatatacctgaagattttgtattggcaactggaacaactacttcaatccgtgattttaccacacaagcattttctgaagctggcatttcactggaatggtctggaagtggtttgcatgaagttggaaaaaattctcaaacaggtaaattaattgtatcagttgatccagcttactttcgtcctactgaggtcgacttgcttataggtgacgcaaaaaaagccaaagatattcttggatggagtccaaaatgtgatttaaataaattggtacgtgaaatgatctcttcagatcttaaagaagcaagaaaagaccaatacctgctatctggaggttttcaaacaaaaaatacaaatggagattga

SEQ ID NO: 284649 - DNA, 472 bp, Unknown
  Bacterial polypeptide expressing nucleotide sequence isolated from the Sargasso Sea
catggtaaaaaaagctctcataactggagtcacggggcaagacggatcatatttattagaaatattattggaaaaaggttacgaggttcacggactgataagacgcagtagtagttttaatacaggaagaattgatcacattattaatgatgagaagtataatgaccggtttttctttcatcatggagatttgactgatgcatctggcttaaatagggttcttgaaaagataggtccaaatgaaatttacaacttagctgcccaaagtcatgtaaaagtttcttttgacattccggactacacagcccaggttgatgcattgggaacgctaagatttttagatgcaataagagaaacgcaaatcgacaccagattttatcaagcctctactagtgaattatttggtaaggtaaatgaaactccccaaaatgagaataccccattttatccaaggtcaccttatggagtcgca

SEQ ID NO: 284650 - DNA, 1033 bp, Unknown
  Bacterial polypeptide expressing nucleotide sequence isolated from the Sargasso Sea
atgaggaaagctttaattacaggaatcacaggtcaagatggatattatctcacaaaattattgcttaaaaaaggataccaagttcatggaataaaaagaagaacatctttgattaatacccaaaggattgatgaattttttaatgataaaaatttacatgataaaaattttagtctttatcatggtgatatgactgatagctcaagcttaattagaattcttaataaagttaaaccaaatgaaatttataatttagctgcacaaagccatgttagagtctcgtttgaaattccagaatatacagctaactcagatgctattggagttttaagattgcttgaagctgttaaatcagcaaacttagttaataaggtaaaaatttatcaagcctcaacatcggagctttatggaaaagctagggagacccctcaaaacgaaaatacacctttttatccaagaagtccttatggagtagcaaaattatatgctcattggattatagtaaattatagagaagcttataatttttttgcatgtaatggaattctttttaatcatgagtctcctttaagaggagaaacattcgtaacaagaaaaataacaataggtttatcaaaaattaaattaggtttgcaaaaaaatttaatattaggaaatttaaatgcaaaaagggactggggtcacgctgcagattatgcagaagcaatgtggaagatgatgcaattaaataaacctgaagattttgttattgctactggaaaacaatttagtgttagagaatttgttaatattgctgcaaaaaatttagaaataaatttgaagtgggttgggaaaggagttaatgaaaaaggaatagataaaaaaacaggtaaaataattatcaaaattgaaaaaaaatattttagaccaactgaagttgatgctttattgggtgattcaagcaaagctaggaaaattttaaaatggaaaccaaaattctcttttaatcaaatggtaaaagaaatggttgagagtgattttaatgaacaaaaaa

SEQ ID NO: 284651 - DNA, 692 bp, Unknown
  Bacterial polypeptide expressing nucleotide sequence isolated from the Sargasso Sea
aatgagaaaaaaagctttaattacaggtatcactgggcaagatggttcttatttagctgaatttcttttaaaaaaaaaatatcaagtacacgggctaatccgaagggttgccgctgaagataagacgcatcgtctttggagattaaaaaatattataaataaaattactcttcatgctgcttcactggaaagttacgcaagtattgtcaaaattattcaaaaaattaaacctgaagaagtttatcatctcggagctcaaagttatattgattacgcttttaaagatgaattttctaccattaatacgaatataaatggaactcattttattctgtccgctataagagatttttcaccaaagactaaattttattttgcagcgtcctcggaaatgttcggtaaggttcaacaaattccccaaactgaaaaaacaccattttacccaagatcaacctacggtatttcaaaagttgcaggatttgacttaacaagaaattatagagaagcttataatttattttgctgtagtggaattttgtttaatcacgagtcaccaagaagaggtttcgaatttgtaacaaggaaaattacacatgcagtagcaagaattaaatatggtttacaaaaagatttaaaacttggaaatatggatgcgaaaagagattggggccatgcagaggattatgtgcgag

SEQ ID NO: 284652 - DNA, 1048 bp, Unknown
  Bacterial polypeptide expressing nucleotide sequence isolated from the Sargasso Sea
catgagccaaactcgcaagaaggccatcatcaccgggatctcggggcaagacggcgcctacctgaccaagctgctgctcgacaagggctacgaggtcaccggcacctaccgccgtaccagctcggtgaatttctggcgcatcgccgagctcggcgtcgacacgcacccgaacctcacgctcgtcgagcacgacctgaccgacgccggctcgagcctgcgcctgctcgaacgcacgcagcccgacgagctgtacaacctcgccgcgcagagcttcgtcggcgtgtcgttcgaccagccggcgacgaccgccgaagtgacgggcctgggtccgctgaacctgctcgaggcgatccgcgtcgtgagcccgaagacgcgcttctaccaggcatcgacgtccgagatgttcggcaaggtgcagtcgattccgcaaacggaagcgacctcgttctatccgcgcagcccgtacggcgtcgcgaagctttacgcgcactggatgacggtgaactaccgcgagtcgtacggcctgttcggcagcagcggcatcctgttcaaccacgaatcgccgctgcgcggccgcgagttcgtcacgcgcaagatcaccgacaccatcgcgaagatcaagctcggcaaggcgacccgcctcgagctcggtaacctcgatgcgaagcgcgactggggctttgcgctcgagtacgtcgaaggcatgtggcgcatgctgcaggccgacgaacccgatacctatgtcctggcaaccaaccggaccgaaaccgtgcgcgacttcgtgcggatggcatttgcggcggccggctatcagatcgaatggagcggcaagggtgaacaggaacgcggcctcgacgcgtcgaccggcaacgtgctcgtggaagtgaatccgaagttctaccgccctgccgaggtcgacctgctgatcggctgcgccgacaaggccaaagccaagctcggctgggaaccgaaaacgacgctcgaacaactttgccagatgatggtcgaggcggatttgacgcggaatcaacaccatgacacgttctga

SEQ ID NO: 284653 - DNA, 850 bp, Unknown
  Bacterial polypeptide expressing nucleotide sequence isolated from the Sargasso Sea
gatgaaatctacaatttagcagcaatgagtcatgttagagtgagttttgatacacctgagtatactgctaatattgatggtttagggacactaagaatactagaagctgtgagactattaggtttagaaaaaaatataaaaatatatcaggcaagtacaagtgagttatatgggaaagtccaagaaacaccgcaaaatgaagaaactcctttttacccaaggagcccttatggtgttgctaaaatgtatgcatattggataactaaaaattatagagaagcttataaaatatttgcatctaatggtattttatttaatcatgaatcacctagaaggggagaaacttttgtgtccaggaaaatcacaagagctgcaacaagaatttcattagggctacaagattcattgttaataggtaatctaagtgcaaaaagagattggggacatgctaaagactatgttaagtcaatgtggttgattttacaacaagataagcctgacgattttgttattgcaactggacaaaattattctgttagagattttattaaaaaatcttttgaagtacttggtatagatattgattttaaaggtaaaggtgaaaaagaagtaggatatatttcaaagcttaatcaacccatgaaacatttaaaagtaaatgatataattataaaagtagacccaatttattatagacctaccgaagtggatacccttctaggggatgcatcaaaagcaagacaggtcttaaattggaagcctgaatataattttaaaacacttgtagaggagatgattgagcaagatttattgcttgcaaaacaagagaaactaataaaagaaatttaaa

SEQ ID NO: 284654 - DNA, 943 bp, Unknown
  Bacterial polypeptide expressing nucleotide sequence isolated from the Sargasso Sea
tttaattaatacagaccggataaatcatttatacgaggagccatacggaaaaaatcgaaagtttattttgcatcatggagatttaacagactcaacttctttaattagaattattcaagaggtacaaccagatgaaatttataacttggcagctcaaagtcatgtagctgtatcttttgaagaaccagaatatacagccaactcagatgcaataggggccttaagaatattagaggcaatccgtattttaaaacttgaaaaaaaaacaaagttttatcaagcctctacttcagaattatatggccaggttacacaaacacctcaaaatgaaaaaactcctttttatccaagaagcccttatggcgttgccaaattgtatgcttattggattacgataaattatagagaagcatatggtatttatgcttgtaatggtattttatttaatcatgaaagccctgttagaggagaaacatttgttactagaaaaataacaagagcgcttgcaagaattaaattaggattacaaaaaaatttatacattggaaacctaaatgctctaagagactgggggcacgcaaaagattttgtagaagcccagtggttgatgatgcagcaagaagaaccagaagattatgttatttcaacaggcaaacaatattctgttagagattttatcaatctggcatcaaagaatttgaatatgaaaattgaatggaaaggaaaagatttagatgaagtgggtgtatttaatggaacggatatagttaaagtagataaaagatactttagaccaacagaggtagaaaccttattaggcgattcaagtaaagcaaaaaaaaaattgaattgggagcccaaaatttcgtttgaagagctagtaaaagagatgtctaatgaagacttaaggttagcaaaaaaagataaatcttctaaattataa

SEQ ID NO: 284655 - DNA, 811 bp, Unknown
  Bacterial polypeptide expressing nucleotide sequence isolated from the Sargasso Sea
atggtaaaaagagcattaataacgggggttactggacaagatggcgctttattatctgaattattaattaataaaggttatcttgtgtatggagtaaagcgccgctcatcgtcatttaatacgggacgcgtggatcatctatattctgacccacacgaaaactcaacaaaatttcaaatgatgtatggggatatgacagatgctacaaatcttattcgtatcgtacaagaagtccaacctgatgaaatttataatttagcagctcaatcgcatgttcgagttagcttcgaaacagccgagtacacagcaaatgcagatgcacttggtacattaagactacttgaagcaataagaattttggggttaacaaaaaaaacaaaattttatcaggcttcaacttccgaaatgtatggaaatgttaaggagacaccgcaaaatgaaaacacatctttttatccacgttctccatacgcagtagccaaactttatgcatactgggttactgttaattatagagaagcatatgggatttatgctgcaaatggtattttatttaatcatgaaagcccaataagaggggaaacatttgttactaggaaaatcacaatggctgttgcagctatgcataccggaaaagaaaaaatactttatttgggtaatttagatgcaaaacgtgattggggccatgctaaagattttgtcgaagggatgagattaattctacaacagaatctacccagtgattatgtgcttgccactggtgaaaatcactctgtacgtgaatttgtggaattggcatttaaagagattg

SEQ ID NO: 284656 - DNA, 873 bp, Unknown
  Bacterial polypeptide expressing nucleotide sequence isolated from the Sargasso Sea
acctggtcgagcacgacctgcaggacctggggtcgtcgatccgcctgctgcaggaaagcgaggccaccgaggtctacaacctggctgcccagagcttcgtgggcgtgtccttcgaccagcccgtgctgaccgcgcagatcaccgcgctgggcgcactgaacctgctcgaagccatccgtgcggtcaacccgaagatccgcttctaccaggcgtcgacctcggagatgttcggcctggtacagcaggtgccgcagaccgagcagacccagttctacccgcgcagcccgtacggcgtggccaagctctacgcgcactggatgacggtgaactaccgcgagtcctacgacatgttcgcgtccagcggcatcctgttcaaccacgagtccccgctgcgcggccgcgagttcgtgacccgcaagatcaccgactcggtcgccaagatcaagctgggcaagctggatgtgctggagctgggcaacctggacgccaagcgtgactggggctttgccaaggaatacgtggaaggcatgtggcggatgctgcaggccgacaagccggacacctacgtgctggccaccaaccgtaccgagaccgtgcgcgacttcgtgacgatggcgttcaaggccatcggcgtggacctggcctggaatggcaccggcctggacgaagtgggcacctgcagcgcctcgggcaagaccctggtcaagatcaacccgaagttccaccgtccggccgaaagtggactgctgatcggcaacccggaaaaggccaagcgcgagctgggctggggaccgtccaccacgctggaagagctgtgcgagatgatggtggctgccgacctgcgccgcaatgaggccggcgcatcgttctgac

SEQ ID NO: 284657 - DNA, 842 bp, Unknown
  Bacterial polypeptide expressing nucleotide sequence isolated from the Sargasso Sea
aatgaaaaaaaaaatcgcattgatatttggaattaccggacaagatggatcatatcttgctgaattgttaataaaaaaaggttatctagtacatggtgtaaaaagaagatcttcatcatttaatactggaagattagatcatttgtaccaagatcctcatgaaaaaagaaaagtgttttttcttcattatggagatgtaactgacgcgatttcagtttcaactataataaaaaatgttaaacctgatgaaatttataatttagcagcacaatctcatgtagcagtttcttttgaagtgccagaatatacagcaaacgcagatgcaattggtgctttaagaatattagaatccatcaaatttcatggatttcaaaaaaaaacaaaatattatcaagctggaacttcagaaatgtttggtaaagtaagagaaacgccacaaaatgaaaatactcctttttaccccagaagtccttatggtgttgcaaaactatatgcacactggattacaattaactacagagaagcacataatttgtttgcatgtaatggaatcttatttaaccatgaaagtcctgttcgtggcgaaacatttgtaacaaaaaaaattgttaatgggttatgtaaaataaaaagaggatatcaaaaaaaactgtatttaggtaatttggaagcaaaaagagactgggggcatgctgaagattttgttgaagcaatgtggaagatgttgcaaaaaaaaactccttcagattacgttattgcaactggaatacaatattctgttagagattttgtaaataaagttttagaagagctcaatatacaatttaggtggaagggcaaag

SEQ ID NO: 284658 - DNA, 1033 bp, Unknown
  Bacterial polypeptide expressing nucleotide sequence isolated from the Sargasso Sea
aatgaaggctctcattaccggaattactggacaagatggttcgtatttagcagaattattaattgaaaaaggctatgaagtacacggaactattcgtagatcatcttcaatcaatacatcaagaattgatgatttaatctctaaaaatattaacacaaataaacttcatctacattatgctgacttacttgaccctgcatctatgtcaaatttagttactcagattgaacctgatgaagtatataatttaggcgcacagtcccacgttgcagtatcttttaaaaacccactctacacatcacaaacgagtgtattaggccctatttcattattagagtcaattagaaattccaagaaagaaattaaattttatcaagcttctagttctgaaatgtatggtggagaaggcgaaataagtcttaatgaagaatccccgttaattccaaaaagtccatatgcttcttcaaaactatttgctcatgaaacaaataagatatacagagaatcttacggaatattcggtgtaaatggaattttatttaaccatgaatctcctagaagaggtgaaacttttgttacaagaaaaataacgaaagcaataggaagaatccattttggtttacaagaaaaacttacacttggaaatttggaggcttcaagagactggggttttgcaggtgactatgtaaaagctatgtggatgatgatgcaaaatgatacaccagacgactgggttgttgcaacaggagaaacctacacagtaaaagattttttacttgcagcatttaaaatcgttgatttagactggaaagattttgttgttacatcagaaaaatacttcagacctaatgaagtcgattatcttcttggaaatcctaaaaagataaaagaaaagcttgggtgggagcccgaattagattttaatggtttagttaaaatgatggtagaaaatgatttaaatgaagctgaaaaggagcttacattagtaaaaaataatcttttaaaacctacctgggagtatccagctttatag

SEQ ID NO: 284659 - DNA, 985 bp, Unknown
  Bacterial polypeptide expressing nucleotide sequence isolated from the Sargasso Sea
aatgagaaaagtcgcattaattactggaatcactggacaagacggttcgtatcttgctgaatatctaataaaaaaaaaatacaaagtacacggaattgttagacgagttgccttagaagatagaagtcacaggttatggaggattaaacacattttaaaaaaaattcatatccacgcagcctcccttgaaagttacgcaagtattgttaaaattattcaaaaaataaaaccaactgaaatatatcacttagcagcacaaagttatgttgattattcatttagagatgaattttccactctaaacataaatataaatggaacacattatttattatctgcagtaaaagatttctcaccaagaacaaaattatactttgctggttcatcagagatgtttggtaaagtgcagcaaataccacaaagtgaaaaaaccccattctatccaagatctgcttatggaatatcaaaagtaacaggtcatgatttaaccagaaattacagagaagcatacaatcttttttgttgtacaggaatactatttaatcatgagtcaccgagaagaggttttgagtttgtaactagaaaaatttctcacggagtagcaaagataaaacttggaatggaaaaaaaattaatgttaggaaacttagatgcaaaaagagactggggacatgcaaaggattatgttgaggcaatgtggatgatgctacaaaaaaagagaccagatgatttcgtagttgctaccggcaaacaacactccgtgagggaatttgcaaaacaagcttttgcagttgcaggattagattataaaaaacacatagcaattgataaaaatctttttaggccagcagaagtaaatactcttttaggaaactattctaaagcaagaagaattttgaaatggaaacctaaaatttcattcaaaaatcttgttaaagatatggttgaatcagatattcaatcaataataaagtctggttattag

SEQ ID NO: 284660 - DNA, 973 bp, Unknown
  Bacterial polypeptide expressing nucleotide sequence isolated from the Sargasso Sea
ataacaggtcaggatggaagttaccttgccgaatttcttctaaaaaaaggctatgaagtacatggaataaaaagaagagccagtagttttaacacatcaagaattgatcatctatatcaagatccccatgtagaggaacaaaaattcatccttcactatggagacttaactgatagttcgaatttaataagaattattcagcaagtacaaccagacgagatatataacttaggagcacaaagtcatgttgcggtaagtttcgaaagtccagagtatacggcaaattcagatgcgcttgggactttaagattattagaggcaataaggatcttaggactaacaaaaacaacaaaattttatcaagcaagtacaagtgaattatatggtttagttcgtgaggttcctcaaaatgaaaaaacccctttttatccacgaagcccttatggagttgcgaaactttattcttattggataactgttaattatagagaagcctataaaatgtttgcttgtaatggaatccttttcaatcatgagagtcctagaaggggagaaacttttgttactaggaaaattactagggggttagccagaataaattcaggtttagaaaaagtcctttatatgggtaacctcgatgctaaaagagactgggggcatgcaaaagattatgtaaaaatgcaatggttaatgctccagcaatcagaacctgatgattttgtaatatcctcaggaagaatggaaactgtgagaagatttattgaaaaaactgcaaaagaaattggatggtctaaaaatgataaagaatcagcaattatttgggagggttcagggataaatgaaatcggaagacgtgctgacaccaatcaaatagtgataaaaattgatccaaggtattttcgtccaactgaagtccaacagttacttggagatgctacaaaagcaaaagaaaagcttggatgggaaaactgaa

SEQ ID NO: 284661 - DNA, 850 bp, Unknown
  Bacterial polypeptide expressing nucleotide sequence isolated from the Sargasso Sea
tatgaaaagagcactgattacaggactgacagggcaagatggttcttatcttgctgagtttcttctggaaaaaggatatgaggtgcatggtattaagagaagaagttcttcatttaatactgatagggtaaatcatgtttttaacacaagcaaaaatttctacatgcattatggtgacttgactgattctacgaatttaattcgtttgattcagataattcaacctgatgaaatctataatctaggtgctcagagtcatgtaaaggtttcttttgagactcctgagtatactgctaacagtgatgcaattggaactcttcgtatccttgaggcaattcgtattctcgggttagagaaaaagactaagttttatcaagcatctacctcagaaatgtttggtctggtacaagaaaatcctcagaaagagactactcccttttatccacggtctccatatggagtagcaaaactatatgctcattggattacgaagaattatcgtgagtcatatggaatgtttgcgtgttctggtatcctttttaaccatgaatctccacgtagaggtgagacttttgttactagaaagattacaagagaccttgcgcgagttagtttgggacttttgaagactctcagattgggcaatctggatgctaaacgtgactggggacatgctaaggactatgttcgtgctatgtggatgatgcttcagcaggatgatccagatgactttgtgatctccaccatggagcaaatcactgtcagagagttctgtgaacgcactggtaagtgtcttggaatggatattcggtggcaaggtaagggtgtagacgagattgggatcgattaa

SEQ ID NO: 284662 - DNA, 821 bp, Unknown
  Bacterial polypeptide expressing nucleotide sequence isolated from the Sargasso Sea
cccgcatgaaaaaaaaagaaatttctttttacattttggggatgtaactgacgcaatttctgtttcatctttaattaagaaaattaaaccaaatgaaatttataatttagcagcacaatcgcacgtagcggtatcttttgaagttcctgaatatactgcaaatgcagatgcgataggtgcattaagaattcttgaagcaataaaatttcatggacttgaaaaatttacaaaattttatcaagcgggaacttctgaaatgtttggtaaagtaaagcagataccacaaaatgaaaaaactcctttttatccaagaagtccttatggtgttgcaaaagtttatgctcattggataacagtaaactatagagaggcatataatatttttgcatgtaacggaatattatttaatcacgaaagcccagttagaggagaaacatttgtaacaagaaaaatagtttcagctttatgtaaagttaaacttggaaaacaaaaaactttatatcttggtaatctagatgcaaaaagagattggggacatgcaaaagactatgtgaaagcaatgtggaaaatgttgcaaaagaaaaaacctcaagactatgtaattgcaacaggtaaacagtatactgttaaacaatttgtaaatcttgttctaaaagaattagaaattaaatataattggaagggttcaggaataaattcaaaatgttacgattcaaatggtaactgcttggttaaatgtgataaagaatattttagacctctcgaagttgatactttgttaggagatgctaaaaaagctaaaaaagaacttaattggaaac

SEQ ID NO: 284663 - DNA, 714 bp, Unknown
  Bacterial polypeptide expressing nucleotide sequence isolated from the Sargasso Sea
aatgaaaaagaaaaaggctttaatatttggaataacaggtcaagatggatcatatcttgctgaatttttattaaataaaaattatattgttcatggtgttaaaagaaggtcttcatcttttaatacaggaagagttgatcatttataccaagatcctcatgagcaaagtagaaattttattctccactatggagatataactgatgcaatctccgtttcatctataattgaaaatataaaacctgatgaaatttacaatcttgctgcacaatctcatgttgcagtttcttttgaggtacctgagtatacagcaaatgcagatgctttaggtgctttaagaatattggaggcaatcaaattccataatttatcaaaaaaaacaaaattttatcaagcgggtacgtcagaaatgtttgggaaggttgtagaagttccgcaaaaggaatctactccattttatccaagaagcccatatggagttgcaaaagtatatgctcactggattacagtcaattatagagaagcatacaatttatttgcctgtaacggaatattatttaatcacgaaagccctgtaagaggagaaacatttgtaacaaaaaagattgtttccgctttgtgtaaaatcaaacttggtagacaaaaaaaactatatttaggaaatcttgatgcaaaaagagactggggacatgctaaagattatgttgaggctat

SEQ ID NO: 284664 - DNA, 686 bp, Unknown
  Bacterial polypeptide expressing nucleotide sequence isolated from the Sargasso Sea
ttatcaagcaagcactagtgaattatatggaaaagttcaaattagtccccaagatgagaatactcctttttatccaagaagtccctatggtgtcgccaaactgtatgcatattggatagtagtaaactacagagaggcttatggtatatttgcttgtaatggtattttgtttaatcatgaaagccctagaagaggagaaactttcgtaactagaaagataacaagagggctctcaagaatagaagctggtttagatgaatgcttatatatgggaaatttaaatgctaaaagagattgggggcatgcaaaagattatgtggctatgcaatggttaatgcttcaacaaaaagaagcaaaagattatgtaatttccacaggaagaatggaaacaataagaaagttcattgaattaactgcaaaacaaataggttggaataaaaataaaaatgaacctgccattatttgggaaggagatggaataaatgaaatcggtagaagagcagataataataaaatcgttataagagttgacccgaaatattttagacccactgaagttgaagaattaagaggagactcatcaaaagcttacaaagatatgggatgggaaccaaaaattactttggagcaaatgataaaagaaatggtagaggaggataaaaaagaagttcaaaaagatttataag

SEQ ID NO: 284665 - DNA, 868 bp, Unknown
  Bacterial polypeptide expressing nucleotide sequence isolated from the Sargasso Sea
tcttggtgcacaaagccatgtaagtgtgagtttgaaagcccagaatatacagctaatagtgatgctttaggcacactaagaattttagaagcgatcagaatactaaatttacaaaagaaaaccaagatatatcaggcgagtactagtgaactatttgggaaagtccaagaaacacctcagaaagaagaaactcctttttatccaagaagtccttatggagttgctaaattgtatgcatattggataacaatcaactatagagaagcttacgggatctttgcttgcaatggaatactttttaatcatgaaagtccaagaagaggagaaacatttgttactagaaaaataaccatgggtctggcaagaataaatgcagggttagaaaaatgtttatatttagggaatttggaatctaaaagagattggggtcatgcaaaagattatgttgtaatgcaatggctcatgctgcaacaagaaattccagatgactatgtaattgcaactggcagatctagcacagttaggtgttttatagagaaatgtgcagataacctagggtggggtagaaacaaaccaaaatctattatttgggaagataaaggtataaatgagattggacgaagagcagacactaatgaaattgtgataagaatagatccaagatattttcgcccaacagaggttgaagaattgttaggggatgcaagtaaagcaaaaaataaacttggttgggagccgaaaattaccttagaggaattaattgaagaaatgatgcataaagataccgaaattgctagaagagaatctttattaagaaaaaatggccttggagttttaagtcccaaagaagggtcaccatcaaattaat

SEQ ID NO: 284666 - DNA, 844 bp, Unknown
  Bacterial polypeptide expressing nucleotide sequence isolated from the Sargasso Sea
ccaaagccacgtggccgtcagttttgagagccccgaatacacggcggatgtcgacgccatgggcacattgcgcattctggaagccatccggattctggggctggagaagaaaacccggttttaccaggcttccacctctgaactctacgggctggtacaggagatcccccagaaggaaaccacgcccttttacccccgtagtccctatgccgttgccaagttgtacgcctactggataaccgttaattatcgcgaagcctacggtatgtatgcctgtaacggcattctcttcaaccacgaatcgccccgccgtggcgaaacctttgtaacacgcaagatcaccagaggcctggcaaacattgcccagggcctcgaaaagcgtctgtacatgggtaacctcgatgctctgcgcgactgggggcacgccaaagactatgtgcgtatgcaatggctgatgctccagcaggagcagccggaggatttcgtcattgccaccggaacgcaatacagcgtacgcgaattcattcagtggagcgctgagcaactgggaatcagcctgcgtttcgagggtgagggtgtcaacgaaaaagccatagttgaacgtatcaagggccgtaatgcgccggcactcgcacccggagacgtgatcgtggaagttgacccacgctacttccgccccgctgaagtggaaacccttctcggtgatccctccaaggcaaaggacaaattgggctgggtgcccgaaatcaccgcccgggaaatgtgtagagaaatggtagcccacgacctccagcaagcaaaacagcatgcgctactggtgaacacggctaccacgttgcagtaa

SEQ ID NO: 284667 - DNA, 715 bp, Unknown
  Bacterial polypeptide expressing nucleotide sequence isolated from the Sargasso Sea
cgcatctaccaagccagcactagtgagctttatggcctggtgcaggaggtccctcagaaggagtccacccctttctatccgcgcagcccctacggcgtcgccaagctgtatgcctattggataacggtgaactatcgcgaagcctacgggatgtatgcctgcaacggcatcttgttcaaccacgagagcccgcgccgtggagaaacgttcgtgaccagaaagatcacccgcggcttggcgcggattgatgcaggactagagcagtgcattttcatgggcaatctcgattcgctgcgcgactggggccatgcccgcgactacgttgaaatgcagtggcgcatgctccaacaggagcagccagaagacttcgtaatcgccacaggccgtcaggaatcggtgcggcgcttcatcgaactggccgcatctcagctgggctggggcggcatccagtggcagggggaaggacttcaggaaactggccgcagagctgacaacggcgagttggtggtttgcattgatccacgctacttccgtccagcggaagtggaaacgctactgggtgatcctgctaaagcgagggaaaagttggattggacgcctaccaccaccttagaagaacttgtggccgagatggtagctaaggatcgggaagatgctaaaaaagaagcctacctcaaacgtaagggcttctctgtggtgggtgcaagggagtaaa

SEQ ID NO: 284668 - DNA, 826 bp, Unknown
  Bacterial polypeptide expressing nucleotide sequence isolated from the Sargasso Sea
tatgtctcgtcgagctctgattaccggaataactggtcaggatggctcctatctggctgaacttctactatccaaagggtatgaagtccatggcctccggcgacgctcaagtacatttgggacagagaggatcgaacatcttatctttggtgatgatcctccgttgcatctgcactatggtgatctttcagacggcaatggattaatgcgacttctgagagaaatcgaaccacacgaagtctataacctcgctgctcagagtcatgtgcgcgtcagttttgatcagcccacctataccgctgatgtgactgccgtaggtacgttgcgactcttggaggcgattcgagatgtacaggacgatactggtcgtcaaattcgtttttatcaggcctccagttccgaaatgttcggaaaagtagttgagacaccacagaaagaaaccactccgttttatccgcggagcccctatggcgtcgcaaaagtgtatagccactggattactatcaactaccgcgagagctatgacctccacgcatcatgtggcattctttttaatcatgaaagtcccagacgcggtgagacctttgttactcgaaaaattacccgtgcagcaactcgcattaaactagggcttcaagaaaaattatacctaggcaacctcgatgcaaaacgagattggggttttgcaggtgactacgtagaagcaatgtggctcatgcttcaacaagaaactcctgatgattatgttgtcgcaaccaatgaactctattctgttcgagacttctgtgagaaaacctttggtcaacttgggctcaactatgaagat

SEQ ID NO: 284669 - DNA, 753 bp, Unknown
  Bacterial polypeptide expressing nucleotide sequence isolated from the Sargasso Sea
acaagatggttcttatttaactgaaatttttttaaaaaaagggtacgaagtacacggtctagtgagaaaaagcagtagttttaataccaggagaatagatcatataatcgaaagcaataaatacgctgattcctttttttttcattatggagatctaacggatccttcaagtctaaataggttattagaaagaataaaacctaaagaaatctataaccttggtgcacaaagtcatgtgaaggtttcgtttcaaattcctgattataccgctcaagtagatgcgattggcactttaagaatattggatgctttaagggaaacaaatcttgatgcaaagttttatcaagcttctacaagtgagctttttggaaaaactacagaattaccacaaaatgagaatacccctttttatccgagatctccttatggtgtagctaaattgtatgcatattggattgttgtaaattatagggaagcctataatatttttgcatgtaatgggattttattcaatcatgaatcgccgagacgaggaaaaacttttgttactagaaagattacttatgcggtatcaaaaataagtaaggggctgcaagatattttatatcttggtaatttggatgctaaaagagattggggttatgcaccagagtattgtgaagggatgtggaaaatgttacaacaaaaaacacctcaagattttgtacttgcaactggaaaaacaagttcagtgcgaaaatttgttgaattagc

SEQ ID NO: 284670 - DNA, 761 bp, Unknown
  Bacterial polypeptide expressing nucleotide sequence isolated from the Sargasso Sea
aatgggcacactaaagaaagcttttattacaggtgtaactggacaggacggaagttatctctcagaatttttgcttaaaaaaggttatatagttcatgggatcaaaagacgttctagtagtttcaatactggaagagttgatcatctgtatcaagaccctcatgaggacaatccccaatttttacttcattatggggatttgacagatagtacaaatttaattaacttaattcaaaaaatccaaccagacgaaatatataatcttggagctcaaagccatgtagcagtaagttttgagagtccagaatacactgcgaatagtgatgccttagggacacttagaatccttgaagccataagaagtcttgggatggcaaaaaaaacaaaattctatcaagcaagtactagtgaactttttggaaaagtacagcaagtcccacagaacgaagagacccctttttatccaaggagtccttatgcagcggcaaaattatatgcatattggataactattaactatagggaagcttatgacatttttgcatgtaacggtattttatttaatcatgaaagtcctagaagaggagaaacatttgtgacgagaaaaattactagaggaattgcaagaattgacgctgggcttgatgaatgtttataccttggcaacctagatgcgagaagagattggggtcatgcgagagattatgtagaaatgatgtggttaatgctgcaacaacatcgaccagatgattatgtaattg

SEQ ID NO: 284671 - DNA, 784 bp, Unknown
  Bacterial polypeptide expressing nucleotide sequence isolated from the Sargasso Sea
ctcgccgagctgctgctttcaaagggatacgaggtgcacggcattattcgccgctcgtcgtcgttcaacaccggccgcatcgaggagctgtaccaggacccgcacatcgacacgcgcaagctgatcctgcactacggcgacctcaccgactcgaccaactgctttgagatcgtctcaaaggtccggcccgacgagctctacaacctcggcgcgcaatcgcacgtcaaggtctcgtttgagatgtccgagtacacggcggacgccgacggcatgggcgtgctgcggctgctcaacgcgatccgctcggcgggtctcatcgagaagaccaaattctaccaggcgtcgacctccgagctctacggcctcgtccaggaggttccgcagaaggagacgactcccttctacccgcgctcgccctacgccgtcgcgaagcagtacgcgtactggatcgtcgtcaactaccgcgaggcgtacaatatgcacgcgagcaacggcatcctcttcaaccacgagtcgccgcggcgtggcccgacgtttgtcacgcgcaaggtcacgcgcgcggtcgcgaggatccacaaaggcttgcagaactgcctttacatggggaacatcgacgcgaagcgcgattggggccacgcaagggattacgtcgagatgatgtggatgatgctgcagcaggacacggccgatgattatgtcgtggcgacgggcgagacgaacacggtccgctcgttcatcgagctcgcgtttaaatgcattgatattacgattacgtggagaggga

SEQ ID NO: 284672 - DNA, 691 bp, Unknown
  Bacterial polypeptide expressing nucleotide sequence isolated from the Sargasso Sea
tatgtctaaagatgactcttataaaagaagaaaagtagctttaattactggagccacaggtcaagatggaagctatcttgcagagcttttaatagaaaaaggttatgaagttcatgggatcaaaagacgagctagcagctttaatacctctagagttgatcacttatatgtagatccgccggaaataaataaacctggattagagctgcattacggagatcttactgatagcagtaaccttatcagaatagttcagcaagttcagccagatgagatttacaaccttggagcacaaagtcatgttgcagtaagctttgaatctccagaatatactgctgatgttgatgcattaggaactcttaggatattagaaactgtaagaattcttggcttaatcaaaaaaactaggatttatcaggcaagtacaagtgaattgtatggattagttcaagaagttcctcaaaccgaaaaaactcctttttaccctagaagtccttatggagttgcaaagttatatgcttattggataactctcaactatagggaatcttatggtatgtatgcatgtaatggtattttgtttaatcatgaaagtccaagaagaggggctacatttgttaccagaaaaatcacgagaggattagcaagaattgatcaaggactcgaagaatatctctacatggggaattta

SEQ ID NO: 284673 - DNA, 649 bp, Unknown
  Bacterial polypeptide expressing nucleotide sequence isolated from the Sargasso Sea
gctaacagcgatgctcttggaactttaagaattcttgaagcaataaaaactttaaaattaatagacaatacaaaattttatcaagctagcacttctgaattatatggattagtacaagaaactcctcaaactgaaaaaacacccttttatccaagaagtccttatgcagtagcaaagctttatgcctattggatagcaatcaactatagagaatcttatggcttatttgcttgcaatggaattctttttaatcacgaaagtcctcgaagaggagaaacttttgttacgagaaaaataacaagaggattgtctcaaattgatgaaggactcacaaaatatctgtatttgggaaatatagacgcaataagggactggggtcatgctaaagattatgttgaaatacagtggaagatcttacagcaagataagccagaagattttgttgtcgcgacaggaaggcaaaaaagtgtcagaacattcattgaattggcggctaaagaattgggctgggggggtattacatgggagggtgagggaattaaagaaataggtaggcgaaatgatacaaatgaaatagtaattaaaattgataaaaaatatttcaggccttgtgaggtaaattctttggttggagacgctgccaaagcac

SEQ ID NO: 284674 - DNA, 775 bp, Unknown
  Bacterial polypeptide expressing nucleotide sequence isolated from the Sargasso Sea
ggcgctcgtccatgtggcagtcagttttgatctacctcaatataccgctaattcagatgctttagggactttagccttactcgaagcaatcagatttaataatcttgagggtaaaacaaaattttaccaagcttcaacttcagaattatatgggaaagttcaagaaatacctcaaactgaaaaaacacctttttatccaagaagcccatatgctgttgcaaagctctatgcttattggattgttattaattacagagaggcatatggaatccatgcgtccaatggtattttgtttaatcatgaaagtcctagaagaggtgaaacttttgtcacaagaaagataaccagagctgtggcagcaatagaaaaaggccttcaagataaactttatttaggtaacttaaatgctaaaagagattggggacatgctaaagattatgttgagatgatgtggatgatgcttcaaatggatcagcctgatgattatgtcgtagccacaaatgaaacacatgaagttagagagtttgtttctcttgcttttaaggctgtagataaagatattgtttgggaaggtgaaggtgttaatgagaaaggtattgataagttatcaggaaaagttttagttgaggtagatccaacatattttaggcctacggaagtagatttacttattggagattcaacaaaagcaaagaataaacttggctgggaacctaaaataaaatttgaagatcttgtcaatgaaatggttgaaagcgatttaaagcaaacttga

SEQ ID NO: 284675 - DNA, 894 bp, Unknown
  Bacterial polypeptide expressing nucleotide sequence isolated from the Sargasso Sea
ggagatttaacagatagttcaaatataataagaaccatacaaaatattaagcctcaagaaatttataatttaggagcacaaagccacgttgctgttagctttcagtctccagaatatacagcaaattgcgatgcattgggaactttgagaattcttgatgctattaaactattaggtcttgaaaaaaatacaaggttttatcaagcaagcactagtgaactttatggtttagtcagagagatacctcaatcagaaagcacgccattttacccacgaagcccttatgccgctgcaaaactttatgcatattggataactataaattatagagaagcatatggaatttatgcttgtaatggtattttgtttaatcatgagtccccaaaaagaggagaaacatttgtaactaggaaaataactaggggtttagctaggatagatcagggtttagattcatgcctttatcttggaaatttagaatcaaaaagagattggggtcatgccaaagattatgttgaaatgcaatggttaatgctccagcaagaggaagctgaagactatgttatcgcaacaggtaaaatggaaactgtcagaaaattcgttgagatatcagctaaaatgatgggttggcaaaagaataaggaaggtcccgcaattatatgggaagggaaaggagttaaagaaattggcaggagagctgataataatcaaattgttataagaattgatccacaatactttagacctactgaagttgatttacttgttggagatgcgacaaaggcgaaagaaaatctcggttgggaaaacaaagttactcttgatgaattaatcgctgaaatggtgagccatgatctaaatgaaaccaaaaaagaagtaattttaaataaaaag

SEQ ID NO: 284676 - DNA, 806 bp, Unknown
  Bacterial polypeptide expressing nucleotide sequence isolated from the Sargasso Sea
catgagtaaaaaagttgtgttaattacaggtattactggtcaggatggagcttatcttgctgaatatcttttaagcaaaggctatgaggttcatggcataaaaagaagaacttctttgttcaatacagatagaatcgatcatcttatcaaagaaaagaattttcattttcaccacggagatatgactgattcaagtagcatcgtgaatattatatctaaaacgaaaccttgtgaaatatataacttagcagcacagagtcatgttcaagtttcgtttgaagagcctgaatatacagcaaatgcagatggtattggggttttgagaatcctcgaagcaataagagcattaaatttggaaaatcacactaagttctatcaagcatcaacatcagaattatttggaaaggttcttgaaacacctcaatctgaaaaaacgcctttttatccaaggagtccatatggagttgcaaagctatatgcatattggattacagtaaattatagagaggcatacaatatttttgcatgtaatggaattctatttaatcacgagtctccattgaggggagagacctttgtcactagaaaaattacaatggcactagcaaaaattaaattaggatctaatgaagttcttaaattaggaaatttaaatgcattgagagactgggggcatgcaaaagattatgtaaagatgcaatggttaatgctacaacaagaaaaacctgatgattttgttatctcaactggtgtgcagtattctgtcagagattttgtaaataaagcctgtgaagtattagatataa

SEQ ID NO: 284677 - DNA, 853 bp, Unknown
  Bacterial polypeptide expressing nucleotide sequence isolated from the Sargasso Sea
aaacaagttcaacctgatgaaatttataatttaggtgctcaaagtcatgtagctgttagcttcgaaacacccgagtatacggcaaatagtgatgcattaggaatgctgcggattttagaagcagtgagaaacttaggtctttcaaaaaaaacaaaaatatatcaagcaagtacaagtgaattatacggtaaagtacaagaaattcctcaaaatgagaatacaccattttatcctagaagcccttacgcagttgcaaaactctatgcttattggataacaataaattatagagaagcatatggtttatatgcatgcaatggaatattatttaatcatgagagtccaagaagaggagaaactttcgtaactagaaaaatcactcgtggattatctaggatcaatgctggattggatagttgtttatttatgggtaatctagatgccaaaagagactggggacatgctaaagattatgtcgagatgcaatggcttatgctacaacaagaaaagcctgaagattttgtaatctctacaggacgtatggaaactgttagaagatttattgaaataacttcgaattatcttggttggaataaggatcataaaaatggaatcatttgggaaaatgaaggaactaatgaggttggtcttagggcagataccaaagaagttgtcgtcagagttgactcaagatattatcgacccactgaagtagaacaattattaggtgattcaaaaaaagcacgagaaaaattgggttgggaagcaaaaactaccctagaagaacttatttctgaaatggtaaattttgataaagcagaagcattaaaagaatctattctcaaaagaaaag

SEQ ID NO: 284678 - DNA, 790 bp, Unknown
  Bacterial polypeptide expressing nucleotide sequence isolated from the Sargasso Sea
aatttagctgcacaatctcatgtagctgtatcatttgaaaaacctgagtatactgcaaattctgatgctcttggaactttaagaatccttgaagctattagaatattaggcctagagaaaaaatgtcgtatgtatcaagcctcaacttcagaattatatggaaaagtacaagaagtacctcagacagaaaagactcctttttatccacgtagcccctatggcgttgctaagctttatgcctattggattacagtaaattatagagaagcttacggtctatatgcagtaaatggtattttatttaatcatgaatctcctaggaggagtcgtgcatttgtaacaaggaagattactaacggattaacaagaattaaacatggtgttcaaaacacactatatttaggaaatcttaaagccaaaagagattggggtcatgcaaaagactatgtcaaggctatgtggttaatgcttcaacaagacaacccagaagactatgttatatctacaggcatgcagtattcagttgaagattttattaatattgttgctgaggaattagaaatgaaaataaaatggaaaggccaaggagtagatagagtgggaattgatgtttcaagcggaaaagaaataattcagataagagaaaaatattttagaccatctgaagttaatgaattagttggagatccaaaaaaggcacttaaaaatctttgttggaaagcggataggtcaatcaatgatcttgttaaggatatgattaaaaaagtatgtaaatactttaaaataaaat

SEQ ID NO: 284679 - DNA, 877 bp, Unknown
  Bacterial polypeptide expressing nucleotide sequence isolated from the Sargasso Sea
aaacacaaagagaattgacgaattctttgaaaataaacaattgcatgataaaaaatttatactacatcatggagacatgacagacgcatcgagtctaacaagtattcttaataaggttaaacctaatgaaatttataatttagcagcacaaagtcatgtaaaagtatcttttgaaattccagaatatacagcaaactctgatgctattggtgttttaaggttattagaagcggtcagatcagcaaatttggaaaaaaaaataaaaatttaccatgcttctacttcagagctttatggaaaatcaaaatctcaaactcaaaatgaagataccccattttatcctagaagcccctacggagtggcaaaattgtacgcacattggataattataaattacagagaagcatacaatattcatgcttgtaatggaattttatttaatcatgaatctcctttaagaggagaaacatttgtaactagaaaaatcacaatgggtttaactaaaataaaacttggcttacaaaaaaatttactattgggtaatatttactcaaaaagagattggggtcatgctaaagattatgtagaagcaatgtggaaaatattacaatataaaaaaccagaagattttgtgatagcaactggaaagcaatactccattaaagattttgtaaatttaacagctaaatacttgaaaataaatttaaaatgggttggaaaaggaattaatgaaaaagcaattgataaaaaaactaacagagtaattattaaaattagtaaaaaatatttcagacctactgaagttgactcattgattggttcttttaaaaaagcaaaaaaacttttaaactggaaacctaaaataagtttaaataat

SEQ ID NO: 284680 - DNA, 871 bp, Unknown
  Bacterial polypeptide expressing nucleotide sequence isolated from the Sargasso Sea
cttcactacggcgacttgacagacacctctaacttaacacggttgatcagggatattgaaccagatgaaatctataacttaggggctcaatctcacgttgctgtgtcgttcgaagctccagaatatactgctgatgtggatgcactcgggactttgagaatccttgaggctatccgctttcttggcttggagcaaaaaactcgcttctatcaggcgtctacttcagagctttatggtctagtccaagaaataccacagcgggagacgacgccattctatccccgctcgccttatgccgttgcaaaaatgtatgcctactggattgctgtaaactaccgcgagagctacggcgtatatgcgtgcaatggcattctgtttaatcatgaatctccgcgccgtggtgaaacctttgtgacacgcaaaatcacccgcgggttgtcaaatattgcacttgggctggaagattgtctctatatgggcaatattgatagcctgcgcgactggggtcatgctaaagactacgtccggatgcaatggatgatgcttcagcaggatgtacccgaggacttcgtcatctcgaccggtgtgcagtattctgtacgagagtttatcgagtggtctgcgtgggagctaggcttgaccatagagttcagtggcagtggtgttgaggagatcggcacgattacggcagttgagggcgatctcgcgccttcattagcagtaggcgacgtggtcgtacgcattgatcctcagtacttccgtccggctgaggttgaaacacttttgggtgactcgactaaggcgaaggaaaaaaaaggctgggtcccggaaattaacgcccaggagatgtgcgcagaaatggtgcagcaga

SEQ ID NO: 284681 - DNA, 793 bp, Unknown
  Bacterial polypeptide expressing nucleotide sequence isolated from the Sargasso Sea
ttgagtaaagtagcatttattacaggtattactggacaagatggatcttatcttgctgaatttttattaaaaaagggatatacagtacatggactagttagacgctcatcttcttataatacaaaaagaatagatcatcttagggaagatgaggattcagagaattgtaaattttatactcattatggggatatgactgatactctatcattatttcatgtcatccaaaaagttcaacctgacgaaatttataacttagctgcgcaatctcatgttgctgtttcctttgaaaagcctgagtatactgcaaactcagatgcacttggaactttaagaatacttgaagctgttagaattttaggtttagaaaaaaagactcgtatataccaagcgtcaacctcagaattatatggaaaagttcaagaaatacctcagacagaaaaaacaccattttatccaagaagtccttatggcgttgcaaagctctatgcttattggattacggttaattatagagaagcatatggtctttttgctgttaatggtattctatttaatcatgagtcgccaaggaggagtcgtgcatttgtaacaagaaaaattacaaatggattgacaagaattaagtatggacatcaggattgtctttatttaggaaatcttaaagccaaaagagattgggggcatgcaaaagactatgtcaaagctatgtggttaatgcttcaacaagacaacccagaagactatgttatatctacaggcatgcagtattcagttgaagattttattaata

SEQ ID NO: 284682 - DNA, 925 bp, Unknown
  Bacterial polypeptide expressing nucleotide sequence isolated from the Sargasso Sea
cagtacgaatctgataagagtaatacaaaaagttcaaccagatgaaatatacaatttaggtgcccaaagtcacgtagcggttagctttgagaccccagaatatacagcgaattgtgatgctattggtattcttagaattcttgaggcagttaggattttaaatttaatcaaaaaaacaaagatatatcaagcaagtaccagtgaactttatggtctaatacaagaatcacctcaaagtgaaaatactccattctacccaagaagtccatatgcagttgcaaagctttatgcctactggataatcgttaattatagagaagcatatgatatgtatgcttgcaatggtattttatttaatcatgaaagtccaagaagaggagaaacatttgtcactaggaaaataacaagaggtctttcaaggatcgatactggtctggataattgcctttatttaggaaatcttgattcaaaaagagactggggtcatgcgaaagattatgtcgcaatgcagtggttgatgcttcagcaaaaaaaacctaaagattttgttatcgcaactggaagaatggaaactgtaaggaaattcatagaaataagtgctcaaaagcttaagtggtacaaagaaccaaatggaccatctataatttgggaaggagatggtgtaaatgaagttgggaagagagctgataatggcaatattgtgataaaaatagatccaagatactttagacctactgaggtaaatgaattacttggtgatccaaccaaagctcaaaaggaattaggatggactccaagaattactctcgaagatttaatttcagaaatgatactttgtgataaaaaagaagcaaaaaaagaattaatccttaaagaatcaggaataaatgttgaatctaattttgagtctccgccaagttattaa

SEQ ID NO: 284683 - DNA, 691 bp, Unknown
  Bacterial polypeptide expressing nucleotide sequence isolated from the Sargasso Sea
caattagattcaacaaatctagaaaacaaaacaagattttatcaagcatctacttcggaattatatggaaaagttcaagaaattcctcaaactgaaaaaacacctttttatccaagaagtccatatgcagttgctaaactttatgcatattggattgtcgttaattacagagaagcatatgatattcatgcctctaacgggatattgtttaatcatgaaagcccaagaagaggcgaaacttttgttacgagaaaaataaccagagcagttgcagctattgaaagaggtatccaagataagttatatctaggaaacttaaatgctaaaagagactgggggcatgccaaagattatgttgagatgatgtggatgatgcttcaaatggaacaacctgatgattatgttgtagcaacaaatgaaactcatgaggttagagaatttgtttcgcttgcttttaaagctgttaaaaaagacattatttgggaaggagatggcgtcaatgaaaaaggaattgataaatcaacaggtaaagttttagttaaagttgatccaatgtactttaggccaacagaggtagatttgcttattggagactcctccaaggcaaaagaaaagcttggctgggagcctaaaattaaatttgaagatctcgtgacagaaatggttgaaagcgatttaaaaagagtttaat

SEQ ID NO: 284684 - DNA, 1075 bp, Unknown
  Bacterial polypeptide expressing nucleotide sequence isolated from the Sargasso Sea
atgaaaaaagtacttattacaggtattacaggacaggatggctcatatttagcagagcttcttctagaaaaagggtatgaagttcatggaataaagaggagatcctcctcatttaatactgaaagaatagaccatatatatcaagattatcatgagtctgacaagaatttccatttacattatggagacctatcagactctttatcaatattttcattgatccaaaaaattaagcctgatgaggtctataatcttggagctcaatcgcatgttggagtttcttttgaaaatccggaatatacaggaaacgttgtggcacttggtgcgttaagagttcttgaatcaatcagacattgtggattgtcttcaaaaacaaagttttatcaagcttcatcttctgaattatatggaaaagtcagacaagttccccaaactgaaaaaacaccattctatccacgttcgccttatggagtagctaaactttatgcatactggataactgttaactatagagaatcttatggtatgtatgcatgtaacggaattctctttaatcatgagtcaccaagaagaggagaaacttttgtaactaaaaaaattactagaggtcttgctagaattgcacttggtattgaaaagtgtttgtatcttggaaatttagaagctttacgagactggggtcatgcaaaagattatgtagagatgcaatggttaatgttgcaacaaaaagaaccaagagattatgtaatctcctctggtgttgagtgcagtgtaagagattttgtcaaaatttcctgtaaaaaaatgggaattgagatcgcatttaaaaataaaggtttagacgaagtgggatatataaaatcattatccagattcaccgatacacttaaggtaggacaagaaattattagggttagtgagaaatatttcagacctgcagaagtagataagctattaggtgactctaatcttgcaaaagaaaagcttaaatggtctccaaaaatatcattagatgaactttgtgaggaaatgataaattatgatctcgagaaagagatgatagttaaaagatgaa

SEQ ID NO: 284685 - DNA, 758 bp, Unknown
  Bacterial polypeptide expressing nucleotide sequence isolated from the Sargasso Sea
catgtcacggcgagccctcattacaggagtcactggtcaggatggttcatatttggcagaacttcttctagccaaagggtatgaagtgcatggcctccggcgacgctcaagtacatttgggaccgagcgaattgagcatcttatacttggcgatgatcctcagttgcatctacactacggtgaccttgcagacggcaatggattaatgcggcttctcagagagattgaaccgcatgaggtctataacttggctgctcaaagccatgttcgcgtcagttttgatcaacctacatatactgccgatgtaactgccgtaggcacgttgagactcttagaggcgattcgggatgtacaggatgataccggtcgtcaaattcgtttctatcaggcctccagttcagaaatgttcggaaaagtagttgagacaccacagaaggaaacaactccgttttatccgcggagcccctatggcgtcgcaaaagtttatagccactggattactatcaattaccgcgagagctatgacctccacgcatcatgtggcattctttttaatcatgaaagccctagacgcggcgagacgtttgttactcgaaaaattacccgtgcagcaactcgtattaaactagggctccaagaaaaactatacctaggcaacctcgatgcaaaacgagattggggttttgcaggtgactacgtagaggcaataaggctcatgcttcaacaagaaactcctgatgattatgtgtcgcaaccaa

SEQ ID NO: 284686 - DNA, 1090 bp, Unknown
  Bacterial polypeptide expressing nucleotide sequence isolated from the Sargasso Sea
aatgaaatcgaccaatagaaaaaataaggtagctttaattactggcatcacaggacaggatggcgcatatttagctgagctccttctagataagggttatgaggtacatggtatcaaaagaagagcttctttgtttaatactgacagaattgaccatctgctaacaaataaatattttcatttccatcatggagatatgactgattctagcagcttagttaatataatttctaaattaagacctaccgaaatttataatcttgccgcacagagtcatgttcaggtttcattcgaagagccagaatacacagctaatgctgatggcattggagttctgagaattcttgaagctattagatcattaaaactagaagaccatacgagattttatcaagcatcaacttctgaactttttggcaaagtccttgaaacgccacaatctgagacgacaccattttacccaagaagcccatatggagttgcaaaactttatgcgtattggataactgtaaactatagagaggcatataatatttttgcctgcaatgggatcctttttaatcatgaatctccacttaggggagagacttttgtaaccagaaagataacgatggcattggccagaattaaaataggatcaggtgaagtgcttagattaggaaatctaaatgcgttgagggactggggtcacgcaaaggactatgtgagaatgcagtggatgatgttacaagaagataagcctgacgactatgtgattgcaacaggaatacaatattcagttcgagaatttgttaatgctacatgcgcagcgctcgacataaagatcacatgggacggagagggcattaatgagaaaggctatgatgagaaaggaaatattattgtagctgtagactctgcttattttagaccaactgaagtagagactcttcttggcgacttttcgaaagccaaggaaattcttaattgggaaccatcaatctcttttgaagagcttgtcaaagaaatggcagagtctgatttggagttagcaaaactaaatgcttcaaatgatttcaaagtaaataaattttataggacagatatatag

SEQ ID NO: 284687 - DNA, 901 bp, Unknown
  Bacterial polypeptide expressing nucleotide sequence isolated from the Sargasso Sea
ctgatcacaggcatcacaggtcaagatggaagctatcttgcagaacttctacttgaaaaaggttataaagtgcatggacttttaagaagatcaagtcaaaaaaatacacaacttatagatcatctttctaatgagaatcaaaaacaaaagatccaattgcactatggagacttaactgatagcagtaatatactcagacttattcaagatttaaaaccagacgaaatttataatttaggagcccaaagtcatgttcatgtgagttttgactcaccagaatatacagctcaagctgatgccttaggtccacttagaattcttgaagctgtcagatcactcgacttaacgaataagacaagaatttatcaagcaagtacttctgagctttatggactcgtaagggagactccacagaaagaaagtacaccgttctatcctaggagtccgtatggagttgcaaaattatatgcctattggataactgttaattatagagaatcttatggaatgtatgcttgtaatggaatactctttaatcatgaatcaccacgtagaggcgaaatttttgtcacaagaaaaataactagaggactaacacgaattaatgaaggtattcaagattgtttgcatatgggaaatattaattccttaagagattggggacatgcaaaagactatgtagagatgcaatggcggatgttacaacaagaaaaaccagaagattatgttattgcctcagggcaaatgacttccgttaggaagtttatagagatgtctgccgaagtgttagattggggaggtattatttgggaaggtgaaggtacaaaagaaattggaaaaagaaaagataatggtaagacagttataagaatagatccgaaatattacagacctgctgagg

SEQ ID NO: 284688 - DNA, 707 bp, Unknown
  Bacterial polypeptide expressing nucleotide sequence isolated from the Sargasso Sea
attagctttattagaagcaataagatttaataatctagaagataaaacaagattttatcaagcttcaacttctgaattatatggaaaagttcaagaaattcctcaaactgaaaaaacacccttttatccaagaagtccatatgcagttgcaaagctgtatgcatattggattgtcgtcaattacagggaagcatatgatattcatgcttctaatgggattttgtttaatcatgaaagtccaagaagaggtgaaacctttgttacgagaaagataactagagcagttgcagctattgaaagaggtatccaagacaaattatatttaggtaacttaaatgctaaaagagattgggggcatgcaaaagattatgttgagatgatgtggatgatgcttcaaatggagcaacctgatgattacgtagtagcaacaaatgaaacacatgaggtcagagaatttgtcacgcttgcttttgatgctgttaaaaaaaatattatttgggaaggtgaagggattaatgaaaaaggaattgataaatcaactggtaaagttttagttgaagttgatccagtttactttagacctacagaggtagatttgcttatcggtgatgcctctaaagcaaaagaaaagcttggctgggaacctaaaattaaattcgaagatcttgtcagtgaaatggttgagaatgatttagataatatttaat

SEQ ID NO: 284689 - DNA, 750 bp, Unknown
  Bacterial polypeptide expressing nucleotide sequence isolated from the Sargasso Sea
acggtatcgatttaaatatccctcttacgtacagatattctaggcccgatgtgtttgactacggctttggcccgttccgctgggttgtactttcaggtaagccagaggatttggataaaaccgatgcgattgcggcagaggtgctgcaacgccttatggcagaggcacctgaagaaattcagcagcagatgcaggataacatcacctggattaaagacgccaagcagaacaagctggtggtcggctcgcaggcacgaattttatatgccgatgctgaaggcaggatggagattgctgcagcgtttaatgtcgctattgcccgcggtgaaatcggcccggttgtgttggggcgcgatcatcacgatgtcagcggtactgactcaccgtttcgtgaaacctccaacatatacgatggcagccgttttaccgccgatatggcgatccacaacgtaattggtgacagcttccgcggcgcgacctgggtatccatccataacggtggcggcgtaggctggggcgaagtgattaacggtggctttggtatgctactggacggcactgttgaggcggatcgccggttaaaatcgatgctgctgtttgatgtaaataacggtattgcgcggcgcagctgggcgcgtaacgctgaggctgattttgccatcaagcgcgaaatggccagaacaccaaaactgagagtcacactggccaaccgggtcgacgacgatatcttggataagctggcgttttaac

SEQ ID NO: 284690 - DNA, 797 bp, Unknown
  Bacterial polypeptide expressing nucleotide sequence isolated from the Sargasso Sea
tgctgtaaacagtctatctgagatgggaaccaggttctgggactatgggaatgctttcttacttgaatcgggaagagccgatgctgaggtattctcagaagacggctcattccgatacccctcatatgttgaggatataatggggccgatgtgcttcgactacggcttcggccctttcagatgggtctgtacttccggcaacaaacaggatctctcaacgactgacgaaatagcacaggaggttctggaagaccttgcttctcgatgtcctgaagaaattcgaacgcagtacttggataatatcaaatggatttctgaagcagaaaaacacgatctggtagtgggaagtatggcaaggatattgtacgcggatgaggaaggccgtagacaaatcgccctccgcttcaatgaggccatttctgaaggtttgatcaccgcacccatagtcctgggacgtgatcaccacgatgtagccggtacggacagtccattcagagaaaccgctaatatctacgacggctcgatgtttactgcagatatggcagtacacaacttcgttggcgactcatttagaggagccacatgggtcagcctgcataacggcggaggagtcggttggggagaggtagtcaacggaggcttcggcatggtaatagacggatcagaagtatctgagagaaatatagactcgatgatttcatgggacgtgaataatggaattgcaaggaggtcatgggctaggaatgatggggcaaccttcgccattaccaaggctatggaaaaagaccccaaactgg

SEQ ID NO: 284691 - DNA, 904 bp, Unknown
  Bacterial polypeptide expressing nucleotide sequence isolated from the Sargasso Sea
tatgccggcaggcatttcattcgaagacggcatttctctactaagctcagatcccaaaaaattcagaggactagttcaatcctctctgaataggcacgtcaatgctgtaaacactctatctgagatgggaaccaggttctgggactatgggaacgctttcttacttgaatctggaagagccgatgctgaggtattctcagaagatggatcatttcgatacccctcatatgttgaggatataatggggccgatgtgcttcgactacggcttcggtcctttcagatgggtctgtacttccggcaacaaacaggatctcgcaacgactgacaaaatagcacaggaggtactggaagaccttgcttctagatgtcctgaagaaattcgaacgcagtacttggataatatcaagtggatttctgaagcagaaaaacacgatctggtagtgggaagtatggcaaggatattgtacgcggatgaggaaggccgtaggcaaatcgccctccgcttcaatgaggccatttctgaaggtttgatcaccgcaccgatagtactaggacgtgatcaccacgatgtagccggtacggacagtccatacagagaaacagctaatatctacgatgggtcgatgtttactgcagatatggcagtacacaacttcgttggcgactcattcagaggagccacatgggtcagcctgcataacggcggaggagtcggttggggagaggtagtcaacggaggcttcggcatggtaatagatgggtcagaagtttctgaaagaaatatagactcgatgatttcatgggacgtgaataatggaattgcaaggaggtcatgggctaggaatgccggggcaacctttcgcattacaaagccatggaaaaagactccaaactggacgtga

SEQ ID NO: 284692 - DNA, 244 bp, Unknown
  Bacterial polypeptide expressing nucleotide sequence isolated from the Sargasso Sea
atggctaaaagaattataaaagcgccaactggctctaaactcaattgtaaaaattggcaaatagaagcaccttaccgtatgattcaaaataatttagatcctgaagtagctgaaaatccagatgagcttgttgtttatggcggaaaaggcaaagcagcaaggaattgggattgttataattcaataatatctacactaaaaagtatgaatgaagatgaaactttgattattcaatccgggtaaa

SEQ ID NO: 284693 - DNA, 243 bp, Unknown
  Bacterial polypeptide expressing nucleotide sequence isolated from the Sargasso Sea
taccgcctctggagctaccctgggtgtcttttcatcacggcggtggtgtcggtattggcttctcccaacatgccggtcttgttatcctggccgatgggtcagagtctgcagatcagaagctggctcgagtgctctggaatgaccctgccacaggcgtcatgcgtcacgctgatgcgggctatgaggaggcgatcgattgcgcccgaacccatgggcttaacctgcccagtatcgggaaataat

SEQ ID NO: 284694 - DNA, 932 bp, Unknown
  Bacterial polypeptide expressing nucleotide sequence isolated from the Sargasso Sea
agaggcagctctaaggatgttgcaaataacctcgatcctaatgttgccgaatctccaaaagatttaattgtttatggaggttatggaaaagcagcaagagattgggattcatatgataaaatagtatctgcattaaaagaattggaaaatgatgaaacattattaattcaatctggaaaacccattgcggtatttaaaactcatgaatactctccaagagttttaatctctaattctatgattgtacctaaatggtctgattgggaaaatttcagagaattagataaaaaagggttaatgatgtatggtcaaatgactgcagggagttggatatatataggaacacaaggtattttgcagggtacctatgaaactcttgctgaggtagctagaagacattttaatggatcactaaaaaatactataacagtaactgctggattaggaggcatgggaggagcacagccattagcggttacaatgaatgaaggtgtaaatattagtatagagatatgtaaagatcgaattcttaagcgattaaatacaagatatttagactgttggactgatagttatacagaagctattgataaagcaattaaatataaaaaagagggaaaagctatatctattggactattggcaaatgcagcagatattcttccaaaacttttaaatgataatgtaattccagatattcttacagatcagacatcgtcccatgatgagctaaatggatatgtgcctaataatatgtcacttagtgaagccaataaactccgagatgaaaatccagataaatatatcagagaatcatacagaactatgggcgaacattgtaaatcaatgttagaaattgcaagtagaggtgcaattacttttgattacggaaacaatttaagggggcaggctaaggaaaatgctggagttcg

SEQ ID NO: 284695 - DNA, 163 bp, Unknown
  Bacterial polypeptide expressing nucleotide sequence isolated from the Sargasso Sea
tatggtcatcgtctgtgatggcaccgatgaagccgccgcgcgcattgcccgcgtgctgaccaacgacccgggcactggcgtgatgcgtcacgccgatgccggttaccagatcgccattgattgcgccaaggagcaaggcctgaatctgccgatgatcggttaa

SEQ ID NO: 284696 - DNA, 550 bp, Unknown
  Bacterial polypeptide expressing nucleotide sequence isolated from the Sargasso Sea
atggaatcaaatcaaattccccttcccccaacaggcacaaaacttaactgtaaaggttggcaccaagaagcagctcttagatgccttttaaataaccttcacccagatgtagctgaagacagagataatctcattgtctatggtggaaatgggaaagcagctagaaaccctaaagctctcagaaatataatagaagccttaaaaaagttagaaaataaccaaaccctcttaattcaatctggaaaaccagtagccattatacctagtcatgaacatggaccaagagtcctcattgccaactctaaccttgttccaaattggtctaactgggatcactttaaacttcttcgcgatcaagacaaatttatgtatgggcaaatgacagcaggatcgtggatctacataggttctcaaggaatacttcaagggacctacgaaacttttatggccgctgctgaaaaacattacggcgttggaagtgatttgagtaaaaagctcgttttaacagcagggattggtggcatgggcggtgctcagccattagctgtaa

SEQ ID NO: 284697 - DNA, 817 bp, Unknown
  Bacterial polypeptide expressing nucleotide sequence isolated from the Sargasso Sea
atggccgttcgggtagttgcaggtagtcgactgcattttgggtttcgtaacttgtgtttagaagaatcacacgtatacggagggataggagtgtgtctcgaagacccaaaagtggttctgaccgcggaaccagaaaaaggaatcatatgtgatgatgaaagtgctaaggagtatgcccagaaggctgtggatatattaggagtggaaggggcaaaagttgaaataaaagaaaaaatacccgctcatatggggttggggagtgggactcaattggcacttgccgtgtatacagctattgcagagacatatgggatagaaccgaaaagtcgagagtgtgctccaaaactaggtcggggggagagaagcggagtgggggtggcagcttttgagcaaggtgggtttaatattgatagagggcaagaagccagttcattgtcagtttttggggaggggagagaagcggagtgggaagtaccaagcattaaaactaatcttagaatcccagaggaatggatttttgtggttgtaaaattagaaattggagagggatatagtggaaacgaggagaaaaaattaataaattttgctattagggaagctagattggatgtcactagggagatagatcaggtgatagatagaattttgattcctgctatccaaaatgaaaactgtgctgagtttgggtttgcagttggggaaataaaccgtcttaatggaatctggtatgaaaaataccaaggaggagtatatcgacctccaattggcgatgtggtgggaaaattaaagaatagtagtaatatttcggagtggggca

SEQ ID NO: 284698 - DNA, 400 bp, Unknown
  Bacterial polypeptide expressing nucleotide sequence isolated from the Sargasso Sea
atgaagcgcaaaatatatcccccaaccggtaatagtttatcatgtgaaaattggcaaattgaagctgcatatagaatgattcaaaataatctacaccctgatgttgctgaaatgcctgaagacctgatagtatatggtgggaaagggaaagctgctcgggattggaaatcttttgattctatattagaaacattgaaacgtttacaaccagatgaaacccttttaatacaatctgggaaaccggttggagtggccaaaactcatatttattctcccagggtattaatcgcaaattctaatatagttcctaagtgggccaattgggagtactttgataaattagaaaaagatggattaatgatgtatgggcaaatgactgctggaagttggatatatattg

SEQ ID NO: 284699 - DNA, 886 bp, Unknown
  Bacterial polypeptide expressing nucleotide sequence isolated from the Sargasso Sea
atgaataaaataaaagcacctattggtacacaaatgaaatgtaaaggttggcatcaagaagcagcatatagaatgctccaaaacaatttggactgtgatgtggctgaagatccaagcaatttaattgtttatggtggatatggtaaggctgctagaaattgggaatcttatgataaaatattagaagctttaacaaaattagaaaatgatgagactttattaattcaatctggaaagcctgttgctgtttttcgaactcatgaatattctccgagagttataatttcaaactctatgcttgttcccaattgggctaactgggatcattttagacagctagatgaaaaaggcttaatgatgtacggtcaaatgactgcgggaagttggatttatataggtacacaaggtatcttgcagggaacatatgaaacacttgcagagattgctagaagagaatttaatggatcattaaagggaacactcacactaactgctggattaggtggcatgggtggtgcacagccattggcagtaacaatgaatgaaggtgtcaatataacagtagaagtagatgaaagtcgaattgataaaagattagaaacacaatatctggatatgaaaactgatttattttcaaatgcaattgaatatgcattaaaagctaaggaagaaaaaaaaccattatcaataggtcttattggtaatgctgcagatattttcccaaaatttattgaaaacaatattattcctgaaattgtaactgaccaaacatctgctcatgatgagttgtatggttatgttcctaatgatttatcttttaaagaggctgttgcattgcgagattctgatccaaatcaatatattgatttatcatataaatctatga

SEQ ID NO: 284700 - DNA, 223 bp, Unknown
  Bacterial polypeptide expressing nucleotide sequence isolated from the Sargasso Sea
ggcgctacttgggtatctttacatcatggaggaggtgttggtattggatattctatccattctgggcaggtcatagtagctgatggcagcgaagagatggcagagcgtattaaaaaagttcttaccaatgatccaggattgggaataattcgtcatgctgatgctggatataatgatgctattcgaaatgctaaatcctggtcaatagatataccaaaataat

SEQ ID NO: 284701 - DNA, 430 bp, Unknown
  Bacterial polypeptide expressing nucleotide sequence isolated from the Sargasso Sea
ttgaagagtattcatcctccgaaaggaaatagacttacatgtaaaaattggcaaattgaagccgcatatagaatgattcagcataatttggatccagacgtcgcagagattcctgaggagctcattgtttatggaggtaaagggaaggctgcccgaaattgggattcttttcatgctattttagaaactttaaaacgtcttgaaccagatgaaacattactagtccaatctggtaagcctgttggtgttgcaaagactcatacatatgccccaagggtacttattgccaattcaaacctggtacctgaatgggccacttgggaccattttaataaattagaaaaagatggtctaatgatgtttggacaaatgactgctggtagctggatatatattggtaccccaaggaatattgcagggtacttatgaa

SEQ ID NO: 284702 - DNA, 313 bp, Unknown
  Bacterial polypeptide expressing nucleotide sequence isolated from the Sargasso Sea
atgaccaatacacgccacaaccttcgcgacatttatccacctactgggacggagattaccactaagagttggctgaccgaggcccccatgcgaatgttgatgaacaatctgcatccagacgtggcggaaaacccgcatgaacttgtcgtctatggaggtattggccgtgctgcccgtacgtgggaggatttcgatcgcatcgttgcgggcttaaaggacctcgaggctgacgaaactctggtggttcagtcgggcaagccggtggccattgtccgaactcatgtggatgctccacgagtgctgattgctaatt

SEQ ID NO: 284703 - DNA, 245 bp, Unknown
  Bacterial polypeptide expressing nucleotide sequence isolated from the Sargasso Sea
catgactaatacacgccacaaccttcgcgacatttatccacctactggtacggagattacgaccaaaagctggctgaccgaggcccccatgcgaatgttgatgaataatctgcatccagacgtggcggaaaacccgcatgaacttgtcgtctatggaggtattggccgcgctgcccgtacgtgggaagattttgatcgcatcattgcgggcttaaaagacctagaggccgacgaaactctagtgg

SEQ ID NO: 284704 - DNA, 208 bp, Unknown
  Bacterial polypeptide expressing nucleotide sequence isolated from the Sargasso Sea
catcatggtggcggtgttggtatgggttacagccagcattcaggaatggttatttgttgtgatggaacaaaaaaagcttcagaaagaattaaaagagttttatggaatgaccctgcaactggcgtaatgcgccatgctgatgcaggatatgatattgctattgaaagtgctaaatatcacaaactcaatttgccgagtattaaataaa

SEQ ID NO: 284705 - DNA, 325 bp, Unknown
  Bacterial polypeptide expressing nucleotide sequence isolated from the Sargasso Sea
catgactaatacacgccacaaccttcgcgacatttatccacctactgggacggagattaccactaagagctggctgaccgaggcccccatgcgaatgttgatgaacaatctgcatccagacgtggcggaaaacccgcatgaacttgtcgtctatggaggtattggccgtgctgcccgtacgtgggaggatttcgatcgcatcgttgcgggcttaaaggacctcgaggctgacgaaactctggtggttcagtcgggcaagccggtggccattgtccgaactcatgtggatgctccacgagtgctgattgctaattccaatattgtg

SEQ ID NO: 284706 - DNA, 247 bp, Unknown
  Bacterial polypeptide expressing nucleotide sequence isolated from the Sargasso Sea
tttgttaatactgcaagtggtgcaacttgggtctcgttgcatcatggtggtggtgttggtatgggttacagccagcattcaggaatggttatttgttgtgatggaacaaaaaaagcttcagaaagaattaaaagagttttatggaatgaccctgcaactggtgtaatgcgtcatgctgatgcaggatatgatattgctattgaaagtgctaaaaatcacaaacttaatttgccaagtattaaataaa

SEQ ID NO: 284707 - DNA, 253 bp, Unknown
  Bacterial polypeptide expressing nucleotide sequence isolated from the Sargasso Sea
cttgatcaatactgccagtggtgcgacttgggtaagtctgcaccacgggggtggcgttggaataggattttcccaacacgctggcttggtaatagtggctgacggtacgccggaagcagcaaagcggctggagcgcgtgctgtggaatgatccagcttcgggcgtctggcgccatgcggatgctggttatgaagacgccgtgcgttgcgctaaggaccatgggctgagattgcctggcatactcggaaactaa

SEQ ID NO: 284708 - DNA, 823 bp, Unknown
  Bacterial polypeptide expressing nucleotide sequence isolated from the Sargasso Sea
atgaaacgccttgaccctacaagagaaatacgtgccccaagaggcgccgtgctcaatacaaaaagttggcaaactgaagcgccccttcgcatgctcatgaataacctagacccagaggtggcagagcatccgcaaaacttagtggtgtacggtggcattggcagagctgcgcgtgattgggcatcttacgacaaaattgttgaagtgcttaagcgattaaatactgatgaaaccttacttattcaatcaggtaaacccgttggggtttttcctactcatgaaaacgcgccccgagtacttattgctaactctaaccttgtgccgcattgggctaactgggaacaatttaacgccttagataaagaaggcctaatgatgtatgggcaaatgacggcgggctcgtggatatacattggctcacaaggcattgttcaaggtacttatgaaacctttgttagcgtggctaaagcccatttcaacggtgtagcaaaagggcgctggattctaacaggcggccttggcggtatgggcggtgcacagcctcttgctgcaacgatggcaggcttttctatgctggcagtggaggtagatgaaacccgaatagactttagaattcgcactggctatttagataaaaaagcccattcgttagatgaagcaatgaccatgttggaagaggccaaaaaagccgacaagcctgtatctatcggattattgggcaatgcagctgaagtatttccggctatgctagcgcaagggatcattccagatgtcgtgaccgatcaaaccagcgctcacgacccgcttaacggctatttaccgg

SEQ ID NO: 284709 - DNA, 688 bp, Unknown
  Bacterial polypeptide expressing nucleotide sequence isolated from the Sargasso Sea
ggcgtcgacaacgcattcgacttcccgggctttgtcccggcctatattcgtccgctgttctgccgcggcatcggtccgttccgctgggtggccctctccggcgatccgcaggatatctacaaaaccgacgccaaagtgaaagagatcatcaaagatgataagcacctgcaccactggctggatatggcgcgtgagcgcattagcttccaggggctgccggcgcgtatttgctgggtagggctggagtggcgccagaagctggggctggcctttaacgaaatggtccgcagcggtgaagtgtctgcgccgatcgtcattggtcgtgaccaccttgattctggctcggtcgccagcccgaatcgcgaaacggaatccatgcgtgacggctccgatgcggtgtccgactggccgctgctgaacgccttgctgaataccgccagcggcgcgacctgggtgtcgctgcatcacggcggcggcgtcgggatgggcttctcgcagcactccgggatggttatcgtctgtgacggtaccgacgaagcggccgcgcgtatagcccgcgtgctgcataacgatccggcgaccggggtgatgcgtcacgccgatgcgggttacgacatcgcgattgagtgcgcggcggaacaaggactgaatcttcctatggtggcagcaacgcaggggcaacgctgag

SEQ ID NO: 284710 - DNA, 897 bp, Unknown
  Bacterial polypeptide expressing nucleotide sequence isolated from the Sargasso Sea
gcgggcagctggatctacatcggcacgcagggcatcgtccagggcacctacgaaacctttgccgaggcaggccgcaagcacttcggcggctcgctggaagggcgctggatcctgacggcaggcctgggcggcatgggcggcgcgcagccgctggccgccacctttgcgggcgcggtgtcgctgaatatcgaatgccagcaaagcagcatcgacttccgcctgcgcacgcgctacgtggacaagcaggcgcgtgatatcgaccacgcgttggagctgatccagcagcacaccgcagccaaagaagccgtgtcgattgcgctgctgggcaacgccgcagaaatcctgcccgagctggtgcgccgtgccaaggccggtggcttgaagcccgacttggtcaccgaccagacctcggcccacgacctggtcaacggctacctgcccgcgggctggacggtggcgcagtggcgcgccgcgcagcaggatgtgacccagcatgaggtgctgaagaaggcggcggcccggtcgtgtgcggcgcatgtgcaagccatgctcgacttccagcacatgggcatcccggtggtggactacggcaacaacatccgccaggtggcgtttgacgaaggcgtgaaggacgcgttcgacttccccggttttgtgcccgcctacatccgcccgctgttctgcgaaggcaaggggccattccgctgggtggctctgtcgggcgacccggaagacatccgcaagaccgacgccaagatcaaggagctgttccccgagaacaaacacgtgcaccgctggctcgacatggcgggcgaacgcattgccttccagggcctgcccgcacgcatctgctggctgggcctgggcgagcgccacatcgcgggcctggccttcaac

SEQ ID NO: 284711 - DNA, 867 bp, Unknown
  Bacterial polypeptide expressing nucleotide sequence isolated from the Sargasso Sea
gatcccgatgtggcggaaaatccgcatgagctggtggtttacggcgggattggccgcgccgcacgggactgggaatgctatgacgccatcgtcaacgcgctgaccaaactggagaccgatgagacgctgctggtccagtccggaaaaccggtaggcgtattcaaaactcacgacaacgcaccgcgcgtgctgattgccaactccaacctggtgccacattgggctacctgggaacacttcaacgaactggacgccaaagggctggcgatgtacggccagatgaccgccgggagctggatctacatcggcagccaggggatcgtgcaggggacttatgaaaccttcgttgaggccgggcgtcagcattatcagggtaacctgagcgggcgctgggtactgaccgccggactgggcggtatgggcggggcgcagccgttagcagctacgcttgcgggggcgtgttcgctgaacattgaatgccagcaaagccgagtcgatttccgtctgcgtacccgttacgtggacgagcaggcgacatcgcttgacgatgcgctggcgcgtatcgacaaatacactcgcgagggtaaagcggtctccattgcgctgtgtgcgaacgccgccgacgttgtgccggaactggtgaagcgcggtgtgcgcccggatatggtcaccgaccagaccagcgcccacgatccgctgcatggttatctgccgtctggctggagctgggaagagtatcaggcaaaagcggtgtccgatccgcagggcacggtgcaggcggcgaaacgttcaatggcaacgcacgttgaggcgatgctggcgtttagcaaaatgggcgtgccaacgtttattacggcaacaacatcg

SEQ ID NO: 284712 - DNA, 817 bp, Unknown
  Bacterial polypeptide expressing nucleotide sequence isolated from the Sargasso Sea
gttattgctggtgcagtttttctgggtgtagatgtcgatgaaaaacgaatcgccaaacgactaaataccaagtatttggataaaatgactcatagtctagatgaagccctctctcttgttaaacaagcctgcgaaaataagcaggcactcagtattggcttggttggaaatgttgcagatgtcttatcaaaattaatccgattagatatgattcctgacattgtaacagaccaaacatctgctcacgatgaactaaatggatactttccaaatcagatgccttttgaagaagctctagactttcgcaaaaaagaccctgagcattaccgacaacaagcttttagaaccatggctgagcatgttaatgcaatgattgagtgtcaaaaaaaaggagccgtagtgtttgattacggcaataatatccgagcacaagctcagacagggggatgtaaagaggcatttgcctttgacggttttgttcctgagtttattcgaccgttgttttgtgaaggaaaaggccccttccgatgggcagctctttcggggaaccccaatgacatccatgtcatagacaatgccttattaaaagcttttccagacgataaaaagttatcaacttggcttactgctgctagggagcaaattgcttttcaaggactgccctgtcgaatttgttggtttggctatggagatcgagaaaaagcagggcttattattaatgatcttgtgagatcaggagaagtaacagcacctattgttattggacgtgatcacttagattgcggctctgttgcttctccttatagagaaacagaaa

SEQ ID NO: 284713 - DNA, 892 bp, Unknown
  Bacterial polypeptide expressing nucleotide sequence isolated from the Sargasso Sea
aaacctgtccgtaatgatccgaaacgcagcatccgtgcaccaagaggaactgagcttagttgcaagagctggctcaccgaggcaccgatgcggatgctgatgaacaacctcgacccggaagtcgcggaaaaaccggaagacctcgtcgtctacggagggattggacgtgcggcccgcaactgggactgttatgaccggatcatcgaaaccctcaagcgcctggagaaccaccagtcgctcctgattcaatccggaaaaccggtgggagttttcgaaactcatacggaagcaccgagggtgctgattgccaattccaacctcgtcccccactgggcgacctgggagcattttcatgaactcgaccgaaaggggcttttcatgttcggccagatgaccgccggttcctggatctacatcgccagtcaggggatcatccagggcacctacgaaaccttcgtggaactgggaaggcagcatttctccggagactggtccgggaagtggatcctcacctcaggcctgggcggaatgggcggagcccaacccctggcggcgaccatggccggggcatcgatgctcgctgtcgagtgcgacccttcaagaattcaccgaagattggaaacaggctacctcgatgaatcctcggaaacattggaagacgccctgaagatcctggaatctcatcatcagcagggtaaggccatttcggtgggactgcttggcaatgctgcagagattctaccggaaatgctgaagcgtggagttcgcccggatgccgtgaccgaccagacttcagctcatgacccgctcaatggctacctgcctgccggctggagcctggaaaaagcggaactgatgcggaaaaccgagccgaatgccgtcatcgaggccg

SEQ ID NO: 284714 - DNA, 646 bp, Unknown
  Bacterial polypeptide expressing nucleotide sequence isolated from the Sargasso Sea
tttgaagagtattcatcctcccaaaggaaaaagacttacatgtaaaaattggcaaattgaagccgcctatagaatgattcagcataatttggacccagatgtcgcagaaattccagaagagcttattgtttatggaggtaaagggaaagccgctcgaaattgggattcgtttgatactattttagaaactttaaaacgtcttgagccagatgaaacattactagtccaatctggtaagccagttggtgttgcaaagactcatacatatgcaccaagggtacttattgccaattcaaacctagtacctgaatgggcaacttgggaccattttaataaattggaaaaagatggtttaatgatgtttggacaaatgactgctggtagctggatctatattggtacacaaggaatactgcagggtacttatgagacttttattgcagcagcaaaaacacattggaacaaagataatctaaagggcaaacttgtattaactgctggattaggtggaatgggtggagctcagcccctagctgttacaatggcaggtggagttgtgatatgtatcgagatagatcagcaccgtgtacagagacgtcttgaaactaaatacttggataaagcaacagattcattcgaaaaagct

SEQ ID NO: 284715 - DNA, 914 bp, Unknown
  Bacterial polypeptide expressing nucleotide sequence isolated from the Sargasso Sea
ttgtgcctcactggggcaaatttgggatcactttaatgaattggataaaagaggtttggcaatgtacggccagatgacggcaggttcatggatttatattgggacccagggtattgttcagggtacttatgaaacctttgtagaggcaggacgacaacattacggcggaaaccttaaagggaaatggattctaaccgcgggacttggtggtatgggaggagcacaacctctcgcagctgtatttgctggagccagttgtctggcagtcgaatgtaatcccgaaagcatagagttccggttgcgtaccagatatcttgatgaaagggctgaaactcttgatgaggctttgcatatgataaatagctggacaaaggatgggaaaactaaatcagttggcttagtaggcaatgcagccgacatttttcctgaaatcgttaagagagaaattaaaccggatattgttactgatcagacttcagcccatgatccgacaaatggttatcttcctcttggttggagtatttccaaatggcgagaaaaaagagaaacagaccctaaagcggttgagaaagctgcaagaagatcaatgaggctacatgttaaggctatggttgatttttggcatatgggcgttccaaccttagattatggcaacaacatcaggcaggttgctctagaagaaggtttagagaatgctttcgattttccaggttttgttcctgcgtatataagaccacttttctgtagaggggtcggacctttccgctggtgtgcgctatcgggggatcccgaagatatttataagactgatgccaaggttaaagaattaatacctgatgacccgcatttacataaatggctagatatggctcgtgagcgaatagcgtttcagggattgcctgctcgtatatgct

SEQ ID NO: 284716 - DNA, 550 bp, Unknown
  Bacterial polypeptide expressing nucleotide sequence isolated from the Sargasso Sea
tgatgaggcgatgaaggagcttttccccgaaaatactcaccttcacaaatggttagatatggcccgagagcgcattagcttccaaggcctaccagcacgcatatgctggatcgggctaggggaccgtcatcgtgctggactgaagttcaacgagatgattgccagtggtgaattaaaagccccggtggtaatcggccgggaccatttggatagtggatcggtagccagccccaaccgtgaaactgaggcaatgaaggatggctctgatgcggtcagtgattggcctctactcaatgccttgatcaatactgccagtggggcaacctgggtaagtttgcaccatgggggtggcgttgggataggattttcccaacatgctggcttggtgatagtggctgacggcacgccggaagcagcaaagcggctggaacgcgtgctgtggaatgatccagcttcgggcgtctggcgccatgcggatgcaggttatgaagacgccgtgcgttgcgctaaggaccacggactgagattgcctggcatactcggaaactaa

SEQ ID NO: 284717 - DNA, 709 bp, Unknown
  Bacterial polypeptide expressing nucleotide sequence isolated from the Sargasso Sea
catgggaaaacctgtccgcaatgatccgaaacgcagcatccgtgcgccaagaggaaccgagctcagttgcaagagctggctcaccgaggcaccgatgcggatgctgatgaacaaccttgactcggaagtcgcggaaaaaccggaagacctcgtcgtctacggagggattggacgtgcggcccgcaactgggactgttatgaccggatcatcgaaaccctcaagcgcctggagaaccaccagtcgctcctgattcaatccggaaaaccggtgggagttttcgaaactcatgcggacgcaccgagggtactgattgccaattccaacctcgtcccccactgggcgaactgggaacattttcatgaactcgaccgtaagggacttttcatgttcggccagatgaccgccggttcctggatctacatcgccagccagggaatcatccagggcacctacgaaaccttcgtggaactgggaaggcagcatttttccggagactggtccgggaagtggatcctcaccgcaggcctgggcggaatgggcggagcccaacccctggcggcaaccatggccggggcatcgatgctggctgttgagtgcgatccttcaaggatccgccgaagattggaaaccggctacctcgatgaatctgcggaaaccctggaggacgccttgaagatcctggaatcccatcatcagcagggcaaagcc

SEQ ID NO: 284718 - DNA, 472 bp, Unknown
  Bacterial polypeptide expressing nucleotide sequence isolated from the Sargasso Sea
gttaccagcccgtatatgttgggtaggtctgggagaccgccaccggctgggactcgcctttaacgaaatggtcgccaagggtgaactcaaggctccggtagtcataggacgtgatcaccttgacggaggttcagttgcctcgccaaaccgtgaaacggaagcaatgaaggacggttccgatgccatttctgattggccactgttaaatgctcttttaaactgcgcatcaggagccacttgggtcagcttccaccacgggggaggtgtgggaatcggcttcagtcaacatgccggtttggtaatctgctgcgatggtactccagaagcaggaaagcgtatcgaacgggtgctgtggaacgatccagcgaccagtgtcatgcgccatgccgatgctggttacgaaaccgcccttgaatgtgcccgtgaaaaaggattaaatctgccaggaataatggatacggtacaggcatga

SEQ ID NO: 284719 - DNA, 739 bp, Unknown
  Bacterial polypeptide expressing nucleotide sequence isolated from the Sargasso Sea
atgaaaattaatataaaacctcctgttgggaatcagttaatttgtaagaattggcaaattgaagcgccttttagaatgattcaaaataaccttcaccctgatgtagcagaagatcctgaaaacttggtcgtatatggtggaaaaggaaaagctgctagaaattgggattgttataatattataattaaatcattaaaaaatttaaatgaagatgaaacacttttgattcaatcaggcaagccggtaggtataataaagactcataagagttcacctagggtattaattgctaattcaaatatcgttcctaattgggctaattgggatcattttaatgagctagataaaaatggtttaataatgtatggtcaaatgacagctggatcttggatatatataggtactcaaggaattttgcaaggcacatatgaaacttttgcggcagctgcaaaaaaacactttggcaatgatttgactggtaagcttgtagtatcagcgggccttgggggaatgggaggggctcagccattatctattacaatgaataatggcgttgctttaattattgaaatagatcctacgcgtattcaaaagcgtatagacaccaattatcttgaatattcaacagaatcattaaatgatgcgataaataaggtcaaaaaagcaataaatgatagaaaaccactatcagttggattattaggtaatgcggctgatataataccaaaaattagctgaa

SEQ ID NO: 284720 - DNA, 889 bp, Unknown
  Bacterial polypeptide expressing nucleotide sequence isolated from the Sargasso Sea
cagatgaccgccggttcctggatctacatcgccagccagggaatcatccagggcacctacgaaaccttcgtggaactgggcaggcagcatttttccggagactggtccgggaagtggatcctcaccgcaggcctcggcggaatgggcggagctcaacccctggcggcgaccatggcaggggcatcgatgctcgctgtcgagtgcgatccttcaagaatccaccgcagattggaaaccggctaccttgatgaatctgcggaaaccctggaagacgccctgaagatcctggaatcccatcatcagcagggtaaggccgtttcggtgggactgcttggcaatgcagcagagattttaccggaaatgctgaaacgtggagtccgcccggatgccgtgaccgaccagacttcggctcatgacccgctcaatggttacctgcctgccggctggagcctcgacaaagcggaactgatgcggaaaaccgagtcgaatgccgtcatcgaggccgccaaggattcgatggcaactcatgtgcgggccatgcttgactttcaccgtaaagggatacccaccatcgactacggcaacaacatccgacagatggcccttgaaaaaggagttgaggacgcattcgattttcccggcttcgtccctgcctgcatccgtcccctcttctgccgcggttatggccccttccgctgggctgcgctttcaggagacccggaagacatctaccggaccgatgagaaggtgaaggaactgattccggaagatccccatctccataattggctcgagatggcaaagaaacgtatccagttccagggacttccggcaaggatatgctgggtcggtctggccgaccgtacaaggctcggggtcgccttcaacg

SEQ ID NO: 284721 - DNA, 844 bp, Unknown
  Bacterial polypeptide expressing nucleotide sequence isolated from the Sargasso Sea
ggcggcgcccagccactggccgcgaccctggccggggcttgctcgctgaacatcgaatgccagcagagccgtatcgacttccgcctggaaacccgctacgtcgacgagcaggccactgacctcgacgacgccctggcacgcatcgccaagtacaccgccgaaggcaaggccatctccatcgccctgcatggcaacgccgccgaaatcctcccagagctggtcaaacgtggcgtgcgcccggacatggtcaccgaccagaccagcgcccacgacccactgaacggctacctgcctgccggctggacctgggaacagtaccgcgaccgcgcgcagaccgaaccagctgcagtggtcaaggctgccaagcagtcgatggccgtgcacgtgcaggccatgctggacttccagaagcagggcatcccgaccttcgactacggcaacaacatccgccagatggccaaggaagagggcgtggccaatgccttcgacttcccaggcttcgtcccggcctacatccgcccactgttctgccgaggggtcggcccgttccgctgggcggcgctgtccggtgaagccgaggacatctacaagaccgacgccaaggtcaaggaactgatccccgacgacgcccacctgcaccgctggctggacatggcccgcgagcgcatcagcttccagggcctgccggcacgtatctgctgggtggggctgggccttcgcgccaagctgggcctggctttcaacgaaatggtccgcagcggcgagctgtcggcaccggtggtgatcggccgtgaccacctcgactccggctcggtatccagcccgaaccgcgaaaccgaggcca

SEQ ID NO: 284722 - DNA, 906 bp, Unknown
  Bacterial polypeptide expressing nucleotide sequence isolated from the Sargasso Sea
gaacttagtaccgcattggggaaactgggagcatttcaacgaattggatgccaaaggtcttgcaatgtatggtcaaatgacagcgggttcttggatttatatcggtagtcaaggcatcgttcaaggaacttacgagacttttgtcgaagctggtcgccaacattacaatggtaatttaactggtcgttgggtacttactgctggtttaggtggtatgggcggtgctcaacctttggctgcaacacttgctggtgcatgttcactgaatatcgaatgccaacaagccagtattgatttccgtttacgtacccgttatgtcgatgagcaagcaacggatttagatgatgctttagcccgtattgaaaaatatactaaagaaggcaaggcgatttcgattgcactgcatggtaatgctgctgaaattttacctgagctggttcgtcgtggtgtccatcctgatatggtcacagatcaaaccagcgcacatgatccattgaatggttatttgccaattggttggacatgggaagaatatcgtcaacgtgctaaaactgagcctgaagcagttgttaaagctgctaaaaaatctatggcgaagcatgttcaagcaatgttggatttccaaaaaatgggcgtaccaacctttgactatggcaacaacatccgtcaaatggcgcaagaggaaggcgtggaaaacgcatttgatttcccaggctttgttccagcttatattcgcccattattttgtcgcggtgtaggtccattccgttgggttgcactttcaggtgatccagaagacatctataaaacagatgcaaaagtaaaagagttaattcctgatgatgagcatttgcatcgttggttagatatggcacgtgaacgtattagcttccaaggtctaccagc

SEQ ID NO: 284723 - DNA, 507 bp, Unknown
  Bacterial polypeptide expressing nucleotide sequence isolated from the Sargasso Sea
tatgaaacgcctcgaccctacaagagaaatacgtgccccaagaggcagtacgctaaatgcgaagagctggcaaactgaagcgccgcttcgcatgttaatgaataacctggatccagacgttgcggagcatccgcaaaatctggtggtttacggcggtattgggcgtgcggcccgtgactgggcgtcttacgacaaaattgtagaagtactcaagcggttaaatactgatgagacgttgctggttcaatcaggcaaacctgttggggtatttcccactcacgaaaatgcacctcgtgtgttaattgctaactctaatctcgtaccccattgggctaattgggagcactttaacgctctggataaagaaggtttgatgatgtacgggcaaatgaccgcagggtcatggatatacataggctcgcaaggcattgtgcaaggcacgtatgaaacctttgttagcgtggccaaaacgcattttgaaggaagcgctaaaggacgctggatttt

SEQ ID NO: 284724 - DNA, 642 bp, Unknown
  Bacterial polypeptide expressing nucleotide sequence isolated from the Sargasso Sea
ttgtacctgaatatattaggcctttattctgtaagggtatggggccttttagatgggtcgcattatcgggagatgaagaagatattttcaaaacagatcaaatggtattagaaatgttttctgataatctagctttatgtaaatggatcaaaatggcgcaggagaaagtggaatttcaaggtctcccatctagaatttgttggcttggttacggggaaagagcaaaatttggattaaaattaaatgaaatggtgagaagtggagaactttcagcacctattgtaataggcagagatcatttggattgtggatctgttgcatccccaaatagagaaactgaagcaatgttggatggaagtgatgcagtcgcagattggcctatattgaatgctttattaaacactgctagtggagcttcatgggtttcttttcatcatggcgggggtgtaggaatgggatattctttgcattcaggccaggtattagttgccgatggtaccaaagagatggattcaaggttgcatgctgtattaacaaatgatccaaaaatgggcatctatagacatgcagatgctggctataaagatgctatcgaaaattctaaaaaatggaatataaatattccaatgattaaatcttaat

SEQ ID NO: 284725 - DNA, 502 bp, Unknown
  Bacterial polypeptide expressing nucleotide sequence isolated from the Sargasso Sea
aatggacaagcgacacgacccaagccgccgtattattgcgccccatggtagccaattaagctgcaaaagctggttaaccgaagcgccaatgcgcatgttaatgaacaacttacatcccgatgtggccgagcgcccagaggatttagtggtttacggcggtatcggccgcgcggcccgcgactgggactgctatgacaagattatcgaagtgctaaaacgcctcgaagacgacgaaaccttaatggtgcaatcgggtaaaccagtgggcgtattccgcacccacgcggatgcaccgcgcgtgctgattgctaactctaacctagtgccacattgggcaaactgggaacacttcaacgagttagataagcaaggtttggcgatgtatggccagatgactgcgggttcttggatttatatcggcactcagggcattgtccaaggcacctacgaaacctttgttgccgtggcaaaacaacactttggcggcgtggctgccggtaag

SEQ ID NO: 284726 - DNA, 897 bp, Unknown
  Bacterial polypeptide expressing nucleotide sequence isolated from the Sargasso Sea
taataactgatcaaacatcagctcatgatgagctagatggatatattccaaataatatgtcatttagtgaagcccttagattaagagaatctaatcctgatctttatattacagaaagctatagggctatggctgagcattgtgagggaattttaaaattaaaaaaaatgggaagtattgcatttgattatggaaataatcttagaggtcaagcacaaaaagcaggtgttaaaaatgcttttgactttccaggctttgtgccagcatacatcagagatttattttgtgaaggtaaaggtccttttaggtgggtagctttatcaggtgacccaaatgatatttataaaacagatgaaaaagtattagaaatgttttctgatgataaaacattagtgagatggattaaattggctagggaaaaagttaaatttcaaggtttgccttcccgtatatgttggttagggtataatcaaagagcaaagtttggtttagctttaaatgagatggttgcaaatggcgaactttctgctccaattgttattggtagagatcatttagattgtggttctgtcgcgtcaccttatcgtgaaacagaagatatgaaagatggctcagatgctgtagcagattggcctttattaaatgctatgacatctacagctagtggcgctacatgggcatctatacatcatggtggcggcgttgggatgggacttgcaattcatgctggccaagttatatgtgtcgatggaactactgaaatggcaaaaaggatagaggccgtattaacaaatgatccaggaatgggtctcttacggcacgcagacgcaggatacgatgatgcaattaaaaattcaaaaaattggaatcttaatattccaatgattaatgagtaat

SEQ ID NO: 284727 - DNA, 440 bp, Unknown
  Bacterial polypeptide expressing nucleotide sequence isolated from the Sargasso Sea
catggatcgcaagttagatcaatcgcgagagatcaaggcacccacaggtacaaacctcaattgcgcatgctggacgatcgaggcggcatttcgcatgctgcaaaacaatctcgaccgagaagtggccgaaaacccggatgagctggtggtttatggcggcatcggacgggcggctcgtagctgggcggatttcgacaaaattatcgagaccctgaaggcgctccaagagcacgaaactctgctcatacagtcgggaaagcctgtcggcgtgttcactacacacagcgacgccccccgagtgattatcgctaactccaatcttgtaccgcattgggcaaactgggatcacttcaatgagttggaccagaagggcctgatgatgtttcggcaaatgacggcaggctcttggatttacatcggtacgcaggggattgttcagg

SEQ ID NO: 284728 - DNA, 337 bp, Unknown
  Bacterial polypeptide expressing nucleotide sequence isolated from the Sargasso Sea
agattgtggctcagtagcatctccttatagagaaacagaaaatatgctcgatgggtcagatgctgttgctgattggcccatattaaatgctctcattaatgctgtaaatggtgctagttggattagctttcaccatggaggtggtgtcggtatgggatactctttacatgctggtatggttatcgtagcagatggaacaaatgaggctcgagaaaaattatcacgtgtccttaattccgatccagggatgggagttctaagacatgcagatgctgggtataaaatagcacgtgagaaagctgaaagctcagatataaaaataccttttctcaactaa

SEQ ID NO: 284729 - DNA, 291 bp, Unknown
  Bacterial polypeptide expressing nucleotide sequence isolated from the Sargasso Sea
atggttcagatgccgtttcggattggccattactcaatgctttattaaatacagctggcggcgcaacttgggtgtcattacatcacggtggtggtgtagggatgggtttctctcaacactctggagttgtgatcgtatgtgatggtacagatgaagcagcagcacgtattgctcgtgtactcaccaatgacccagcaacaggggtcatgcgtcatgctgatgcaggttatgacattgcgattgattgcgcgaaagagcaaggtttgaacttgccaatgatcacgcaataaa

SEQ ID NO: 284730 - DNA, 702 bp, Unknown
  Bacterial polypeptide expressing nucleotide sequence isolated from the Sargasso Sea
tagccaattccaatctcgttcctcactgggcgacctgggagcattttcatgaactcgaccgtaaggggcttttcatgttcggccagatgaccgccggttcctggatctacattgccagccagggaatcatccagggaacttatgaaacctttgtggaactgggaaggcagcatttttcaggagactggtccgggaagtggatcctcaccgcaggcttgggcggaatgggcggagcccaacccctggcggcgaccatggccggggcatcgatgcttgctgtcgagtgcgacccttcaaggatccgccgaagattggaaaccggctacctcgatgaatcctcggaaaccctcgaggagtccctgaagatcctggaatcccatcatcaacagggcaaagccgtttcggtcggactgcttggcaatgctgcagagattctaccggaaatgctgaaacgtggagtccgcccggatgccgtgaccgaccagacttcggcccatgacccgctcaatggctaccttcctgcaggctggagcctggaaaaagcggaactgatgcggaaaaccgagccgaatgccgtcatcgaggccgccaaggattcgatggcatctcatgtgcgggccatgcttgactttcaccgtctgggcattcccaccattgactacggcaacaacatccgacagatggccctgaaaaaggggtgag

SEQ ID NO: 284731 - DNA, 700 bp, Unknown
  Bacterial polypeptide expressing nucleotide sequence isolated from the Sargasso Sea
cttagaggtcaagcaatgaagtctggagttcaaaatgcttttgattttccaggttttgtacctgaatatataagaccattgttttgtgaaggtagggggccttttagatgggttgcattatctggagaaaaagaagatatttttaaaactgacaataaaataatggaaatgtttccaaatgataatacgttaactcgatggattaaattagctcgagaaaaagtaaaatttcaagggctgcctgcaagaatttgctggttgaattatgaacaaagatctcaatttggagttgaattaaataatatggttgcaaaaggtgagctttcagcccctattgtaattggaagagaccatttagatactggttctgttgcttcaccatatagagaaactgaaggtatgttggatggctctgatgcagttgctgattggccgttattaaatgcactaatgaatactgcaagtggtgctacatgggtatctattcatcatggtggtggagttggtatgggtttatctattcattcaggacaagttatttgtgctgatggcactaaagaaatggaaaaaagacttgaacgtgttcttagtaatgaccctggcattggaatattgcgtcatgctgatgcagggtatgaaaatgctaaatatcatgcaaataattggaatatagaaattcccatgaaagaaaataattaaa

SEQ ID NO: 284732 - DNA, 767 bp, Unknown
  Bacterial polypeptide expressing nucleotide sequence isolated from the Sargasso Sea
ttaccgaagaggcgtgcgccccgacatcgttaccgaccagacaagcgctcacgatccgatcaatggttacctgcctcagggttggaaactggcagagtggcgtgaaaagcgcgagagtgatccgaaggcagtcgaaaaggcagcacgcgccagtatgaaagtgcacgtccgagcaatggtggatttctggaatgatggagtgccaactctggactatggcaacaatatccgccaggtggctttggacgaagggttaaaaaacgcttttgccttccctggtttcgtacccgcctacatcagaccactattttgtaggggaattgggccattccgctggtgtgctttgtcaggcgatcctgaagatatctacaagaccgatgaggcgatgaaggagcttttccctgaaaatactcaccttcacaaatggttagatatggcccgagagcgcattagcttccaaggcctaccagcacgcatatgctggatcgggctaggggaccgtcatcgtgctggactgaagttcaacgagatggtcgccagtggtgaattaaaagccccggtggtaatcggccgggaccatttggacagtggatcggtagccagtcctaaccgtgaaactgaggcaatgaaggatggctccgacgcggtcagtgattggcctctgctcaatgccttgatcaatactgccagtggtgcgacctgggtaagtctgcaccacggaggtggcgttgggataggattttccacaacacgctgggcttggtaat

SEQ ID NO: 284733 - DNA, 463 bp, Unknown
  Bacterial polypeptide expressing nucleotide sequence isolated from the Sargasso Sea
catgggaaaacctgtccgtaatgatccgaaacgcagcatccgtgcgccaagaggaaccgagcttagttgcaagagctggctcacggaggcaccgatgcggatgctgatgaacaacctcgacccggaagtcgcggaaaaaccggaagacctcgtcgtctacggaggaattggacgtgcggcccgcaactgggactgttatgaccggatcatcgaaaccctcaagcgcctggagaaccaccagtcgctcctgattcaatctggaaaaccggtgggagttttcgaaactcatgcagacgcaccgagggtgctgattgccaattccaacctcgtcccccactgggcgacttgggagcattttcatgaactcgaccgaaaggggcttttcatgttcggccagatgactgccggttcctggatctacatcgccagccagggaatcatccagggcacctacgaaaccttt

SEQ ID NO: 284734 - DNA, 451 bp, Unknown
  Bacterial polypeptide expressing nucleotide sequence isolated from the Sargasso Sea
gtgccgaatttgctggttttcttacggtgaacgagaaaaagcaccttttcttattaatgaacttgttcgtagcaggcaagttaaagcgccaattgttattggtagagaccaccttgactgtggttctgtcgcttctccaaatagagagacagaagggatgaaagacggctcagatgctgttgcagactggcctattcttaatgctcttattaactgtgcaaacggagcgacttgggtcagctttcatcacggtggtggagtaggaatggggtactcactccatgccggaatggtcattgttgctgatggcacaaaagaagccgagagaagacttgcaagggtcttaaactctgaccctgctatgggcgttttaaggcatgctgatgcaggttatgacaaggcaaaggaagtcgcaagagactctaagcttaaaattccaatgcttgattag

SEQ ID NO: 284735 - DNA, 999 bp, Unknown
  Bacterial polypeptide expressing nucleotide sequence isolated from the Sargasso Sea
gttgtctatggcggaatggtagagctgctaggactgggaaagactttgaccaaatcgtgcaaagttttaaagaattggaagaaaatgaaactcttgtcattcaatcaggtaagccagttggaatatttgagactcatgcggatgctccaagagtcttgatagctaattcaaatctcgttccgcattgggcaacttgggaacacttcaatgaattggataaaaaaggtttagccatgtacggtcagatgacggccggttcgtggatatatattgggacacaaggtattgttcagggaacatacgaaacttttgtggaggcaggtaggcaacattatagcggagatcttacgggcagatggatcttgactggtggtcttggtggaatgggaggcgcacagccattagctgccgttatggcaggtgcatgctgtctagtcgttgagtgtgatgaaagccgtgctgattttcgtctgaggaccggttacgtcgatgaaaaggttaagacacttgatgaggctctttctctcatcaacaaatggactacagctaaagaagccaaatccgttggtttgattgggaacgcggctgacatttttcctgaacttgtcagacgtggcatcaaaccggatatagttactgatcaaaccagtgcacatgatccgattcatggttatttaccgcaaggatggtccttagcagaatggagggaaaagcaagaaatcgatcccagatgtgtcgagaaggctgcaagggcctcaatgaaaaaacatgtagcggctatggtcgatttttggaatatgggtgtacctacacttgattatggaaacaatattcggcagatagcaaaggaagagggtcttgagaatgcatttgccttccctggttttgtcccagcttatatacggcctcttttttgtcgtggggtaggaccgttccgatggtgtgctttgtctggtgatccgaaagacccatttataaaactagattcaaaaaagtgaa

SEQ ID NO: 284736 - DNA, 934 bp, Unknown
  Bacterial polypeptide expressing nucleotide sequence isolated from the Sargasso Sea
gctgctagaaactggaagtcttacgatcgtattattagttgtctacaagagctagaggatgatgagacattattgattcagtcaggaaccccagtaggaatctttcagactcatgaagaagcccccagggtgttgattgcaaatgccaacttagtgggcaggtgggccaattgggagcattttcgtgagctggacaaaaaagggctcatgatgtacggacaaatgactgcaggttcatggatctatataggcacgcaaggaatccttcagggtacctatgagacttttggtgccatgggaaagaagcacttcggctccaacttagaagggaagtggatattgacagggggcatgggtggtatgggtggagcccaaccattggcggccaccatgaatggcgcctcaatccttgtagtggaagtggatccagatcgcattgaaagaaggttgaacactggctactgcgacaagatgacgtatgatatggcggaggcactagaatggattaagagggcaacagagaaaaaaaacccattgagtgttggtttggtcggaaactgtgcagaaatcctgcctcagatggtgaaggaacaggtgataccagacattgttaccgatcagacttcagcgcatgatcctttaaatggctatgtaccagcagggttgtccttgttagaggcagattcattacgagaatcagacccagaggaatatctcaagcggtccatggaatctatgcggattcattgtgaggccattgtggcaatgatgaaaaaaggtagctatgctactgattatggaaataatttgaggacccaggcgtatgatgctgggtatgaagccgcattctcttttccaggttttgttcctgagtatatacgtccgttattttgtgaaggaaagggtccctttagatgggctgcgctttctggaa

SEQ ID NO: 284737 - DNA, 757 bp, Unknown
  Bacterial polypeptide expressing nucleotide sequence isolated from the Sargasso Sea
tgcgggccatgcttgactttcaccgactgggggattcctaccatcgactacggcaacaacatccgacagatggcccttgaaaaaggggttgaggacgcattcgattttcccggcttcgtccctgcctgcatccgtcctctcttctgccgcggttatggtcccttccgctgggccgcgctttccggggacccggaagacatctaccgtaccgatgagaaggtgaaggaacttattccggaagatccccatctccataattggctcgagatggcgaagaaacgcatccagttccaggggcttccggcaaggatttgctgggtcggtctggctgaccgtgcaaggctcggggtcgccttcaacgacatggtccggagcggagaattgaaggctccggtggtgatcggcagggaccatcttgattcaggatccgttgccagtccgaaccgtgaaaccgagggcatgcgtgacggtagtgacgccatctccgactggccactgctgaatgccttgctcaacaccgccggtggagcaacctgggtcagcatccaccatggcggaggggtcgggatgggattcgcccagcatgcgggaatggtgatcgtatgcgacggaagtcccgaagcggaaatgcgattgaggcgcgtgttgcgcaacgatcccggcaccggagtcatgcggcatgctgatgccggctatgaagaagcccttgccagtgcacgggaaaacgatctcgacctccccatgctgggccgttgaa

SEQ ID NO: 284738 - DNA, 620 bp, Unknown
  Bacterial polypeptide expressing nucleotide sequence isolated from the Sargasso Sea
ggcaactcatgtgcgggctatgcttgactttcaccgactggggatccccaccatcgactacggcaataacatccgacagatggcccttgaaaaaggggttgaggacgcattcgattttcccggtttcgtccctgcgtgcatccgtcccctcttctgccgcggttatggccccttccgctgggccgcgctttccggggacccggaagatatctaccgtaccgatgagaaggtgaaggaactgattccagaggatccccatctccataattggctcgagatggcgaagaaacgcatccagtttcaggggcttccggcaagaatatgctgggtcggtctggccgaccgtgcaaggctcggggtcgccttcaacgaaatggtccgaatcggagaactgaaggctccggtggtgatcggcagagaccaccttgattcaggatccgttgccagtccgaaccgtgagaccgagggcatgcgtgacggcagtgacgccgtctccgactggccactgctgaatgccttgctcaacaccgccggtggagcaacctgggtcagcctccaccatggcggaggggtcagggatggggttcgcccagcacgcgggaatggtgatcgtatgtgac

SEQ ID NO: 284739 - DNA, 586 bp, Unknown
  Bacterial polypeptide expressing nucleotide sequence isolated from the Sargasso Sea
gggtggccttatcttggcgatcccgatgatatctacaaaacagatcagaaagttcttgaattattttcttcaaacaaatctttgtgtaattggattgaaatggctcaagaacaagttcaatttcaaggactgccttctcggatttgttggttgggctataatgaaagagcaaaatttggattagctttaaatgatatggttcgaactggagaactgtctgcaccaatcgctattggaagagaccacttagattgtggatcagttgcttcaccaaatagagagacagaatcaatgaaggacggtagtgatgctatcgcagattggccaatattaaatgcattactaaatactgcaagtggagctacatgggtttcatttcatcatggtggcggtgtaggtatgggatattctctacatgcaggtcaagtaattgtagcagatggtacaaaagaattagaagtacgattaaaagctgtattaactaatgatccgggtatgggaatttatcgtcatgccgatgctggttatactgatgcccaagctaatgctgaaaaatggaatatagatattcctatgtcaaaataag

SEQ ID NO: 284740 - DNA, 855 bp, Unknown
  Bacterial polypeptide expressing nucleotide sequence isolated from the Sargasso Sea
taatcttaatggaaaattagttttaactgctggattaggaggtatgggaggtgcgcagcctttagcagtgaaaatggctgggggtgcaattatttgtattgaaatagacccaaatagaattcaaaaacgtattgatacaaaatacttagattgttctactaaatcacttgaggaggcattaaatattgccaaagaatcaatgaaaaaaaacaatccaatctctatagggttgttaggaaatgctgctgatattatacctgaggttgtaggtactgattttgttccagatattgttacagaccaaacatctgcacatgatgaattagtcggttatattccaaataattactcaatagaagaagctaattatttaaggcaatcagataaagaaaaatatatctttgaatcaaagcgctctatgggagaacatgtaagagggatgctaaagctaaaagataagggctcaatcgtatttgattatggaaataacatcagatctcaggcattagaggcaggtgtgtcaaatgcttttgatttaccgggttttgtaccagaatatataagaccattattctgcgagggaaaaggcccatttcggtgggttgcattatctggtaacccagaggatatttataaaacagataaaaggttaattgaaatcttcccagaagatgaagcgctatgtaattggattggaatggcagggaaagaagtacagtttcaaggcttaccctcaagaatatgttggttaggctacggtcaaagagaaaaatttggtcttgccctaaataagatggttcgtacaaaagaactatcagctcctattgtaattggaagagaccatttagactgtgg

SEQ ID NO: 284741 - DNA, 799 bp, Unknown
  Bacterial polypeptide expressing nucleotide sequence isolated from the Sargasso Sea
gacgccctgaagatcctggaatcccatcatcagcagggcaaagccgtttcggtgggactgcttggcaatgcagcagagattctaccggaaatgttgaaacgtggagtccgcccggatgccgtgaccgaccagacttcggctcatgacccgctcaatggttacctgcctgccggctggagcctggaaaaagcggaactgatgcggaaaaccgagccgaatgccgtcatcgaggcagccaaggattcgatggcaactcatgtgcgggccatgcttgacttttaccgactggggatccccaccatcgactacggcaacaacatccgacagatggcccttgaaaaaggggttgaggacgcattcgatttccccggcttcgtccctgcctgcatccgtcccctcttctgccgcggttatggtcccttccgctgggccgcgctttccggggacccggaagacatctaccgtaccgatgagaaggtgaaggaactgattccggaggatctccatctccataattggctcgagatggcgaagaaacgcatccaattccaggggcttccggcaaggatatgctgggtcggtctggctgaccgtgcaaggctcggggttgccttcaacgacatggtccggagcggagaactgaaggctccggtggtgatcggcagggaccacctcgattcaggatccgttgccagtccgaaccgtgagaccgagggcatgcgtgacggcagtgacgccgtctccgactggccgctgctgaatgccttactcaacaccgccggtggagcaacctgggtca

SEQ ID NO: 284742 - DNA, 682 bp, Unknown
  Bacterial polypeptide expressing nucleotide sequence isolated from the Sargasso Sea
accatggccgggggcatcgatggtcgctgtcgagtgcgatccttcaagaatccgccgcagattggaaaccggctacctcgatgaatccgcggaaaccctggaggaggccctgaagatcctggaatcccatcatcagcagggcaaagctgtttcggtcggactgcttggcaatgctgcagagattttaccggaaatgctgaaacgtggagtccgcccggatgccgtgaccgaccagacttcggctcatgacccgcttaatggttacctgcctgccggctggagcctggaaaaagcggaactgatgcggaaaaccgagccgaatgcggttatcgaggccgccaaggattcgatggcaattcatgtgcgggccatgcttgactttcaccgtcaaggcattcccaccatcgactacggcaacaatatccgacagatggcccttgaaaaaggggttgaggacgcattcgattttcccggcttcgtccctgcctgcatccgtcccctcttctgccgcggttatggccccttccgctgggccgcgctttccggggacccggaagacatctaccgtaccgatgagaaggtgaaggaactgattccggaggatccccatctccataattggctcgagatggcaaagaaacgcatccagttccaggggcttccggcaaggatttgctgggtc

SEQ ID NO: 284743 - DNA, 731 bp, Unknown
  Bacterial polypeptide expressing nucleotide sequence isolated from the Sargasso Sea
catgacccgtcacgatccttcccgcagcccgcgcgcgccgcgcggcaatacgctcaactgcaagtcctggcagaccgaggcgccgttccgcatgctgcagaacaacctcgacgccgaagtggccgaggaccccgcctcgctggtggtctacggcggcatcggccgcgccgcgcgcgactgggagagctacgacacgatcctggaaacgctcaggcgcctggacgacaaccagaccctgctggtgcagtccggcaagccggtgggcgtgttccccacccatcccgacgcgccgcgcgtgctgatcgccaactccaacctggtgccgcactgggccaactgggagcacttcaacgagctcgataaaaagggcctgatgatgtacgggcagatgacggccggctcgtggatctacatcggctcgcagggcatcgtgcagggcacctacgagaccttcgtggagatgggccggcagcattacggcggcagcctggccggcaagtggatcctcaccgccggcctgggcggcatgggcggcgcgcagccgctggccgcgtcgctggccggcgccagcagcctgaccatcgaatgccgccagagcagcatcgacttccgcctgcgcacccgctacgtggacgaacaggccagcgacatcgacgacgcgctggcgcgcatcgccaggtacaccgccgccggcgaagccaggtcgatcgccctgctcggcaacgccgccg

SEQ ID NO: 284744 - DNA, 865 bp, Unknown
  Bacterial polypeptide expressing nucleotide sequence isolated from the Sargasso Sea
cccaataaatggatatttacctaaaggttggagtttaaatgaatggaaggaacaaagggaaaaaaacccaaaattagtagaaaaagctgctagagagtctatgaaggaacatgtagaagcaatggttgagttttggaatagaggaataccaacactcgattatggaaataatataaggcaagttgcattagatgaaggactcaaaacagcatttaaatttcctgggtttgttcctgcttatattcgacccttattttgtaagggtattggtccatttagatggtgcgcgctttcaggcgacccagaggatatttataaaactgataaaaaagttaaagaattaatcccagatgatatacatttgcataattggttggatatggctcgtgaaagaattaattttcaaggtttacctgcaagaatttgctgggttggattaggacagcgacacaaactcggacttgcatttaatgaaatggttgcgaatggagaactttcagctcctgtagtaattggaagagatcatttggatagtggttcagtagcaagtccaaatagagagacagaatcaatgattgatggttcagatgccgtaagtgattggcctcttttaaatgcactcttaaatacttcgagtggagcaacatgggtatctattcaccatggaggaggtgtaggaatgggttatagtcaacattcgggaatggtaatatgttgcgatggaactgaagatgcttcgaaaagggtagagagagttttatggaatgatccagctactggtgtaatgcgtcatgctgatgctggatatgaaattgcaatagaacacgcaaagaaaaataagcttaacttacctggaattttatag

SEQ ID NO: 284745 - DNA, 512 bp, Unknown
  Bacterial polypeptide expressing nucleotide sequence isolated from the Sargasso Sea
tttgacgaattcgaacacccgccggaatgtcggcgaaattcacagccccaccggcagcgacctgtctgccaaaagctggtcgacagaagcgccgatgcggatgctgatgaacaatctggatcccgacgtcgcggaacggccggaagaactggtggtctatggagggatcggccgcgcagcgcggaactgggaatgtttcgaaaccatcgtcgcccaacttaaaaacctggaagaggatgaaacccttctggtgcagagcggaaaacccgtcggcgtgttccgcacacacgccgatgcgccccgggtgctaattgcgaattcaaatattgtcgcccattgggcgacgctggatcatttcaccgagctcgatcgcgtcgggctgatgatgtacggccagatgacggcgggatcgtggatctatatcggcagccagggaatcgttcagggcacttacgaaactttcagcgaagtcggtcgacagcatttcggcggcgatcttacgggcaagtgga

SEQ ID NO: 284746 - DNA, 1585 bp, Unknown
  Bacterial polypeptide expressing nucleotide sequence isolated from the Sargasso Sea
tatgagcaatccacgtttagacccaagccgtgtgatccgagccgctcgcggcagcgaaattaccgccaagagctggcagaccgaagctgccaaacgcatgttgatgaataacctcgaccctgaagtggccgagcacccaacctctttggtggtatatggcggcataggccgtgctgcacgtgattgggcttgttacgacaaaattgttgaagtactggacagattaaacgacgaccagaccttattgatccaaagcggtaaacccgtcggtgtattcccaactcacccggacgcgcctcgtgtgttactggccaactcgaatttggtgcctaactgggctaactgggagcattttaacgagctggataaacaaggcctgatgatgtacggccaaatgacagcaggttcctggatctacattggtactcagggcatagttcagggcacctacgagacttttgttgccatcgccaaacaacattttgccggtgagccaaagggtaaatgggttctgaccggtggtttaggtggcatgggtggcgctcagccattggcggccactatggctggttttcatatgattgcctgtgaagtcgacgagtcccgtatcgatttccgcttacgcactgggtatgttgaccaaaaagcctacaacctggatgaagctttagctcagcttgaagctgccaaagcatcaggtaaacccacttctatcggcttattaggcaatgcagctgatatcttcgctgaactggtcgctcgtaatattattcctgatgtagtgacagaccaaacttctgcgcacgacccgttaaacggttacctgccacaaggctggactatgcagcaagcagcagagcgccgccttgaaagcgaaactgcagtagtacaagccgccaaagcctcaatggccattcaagtcaaagccactttggatatgcaaaccaaaggcgctgtggctgtggattacggcaacaatatccgccagatggcgcttgatatgggtgtggcgaacgcttttgattatccgggttttgtgcccgcttatattcgcccactgttttgtgaaggcataggtccattccgctgggtggcgttatccggtgatccggaagatatctataaaacagacactaaagtcaaagaactgatcccggacaatccacatttacaccgctggttggatatggcgcgtgaacgtattaaattccagggtttaccagctcgcatttgctggattggtttaaaagaccgcgcccgcattgcgttggcgtttaacgagatggtgaaaaacggcgagcttaaagcgccgatcatcattggtcgtgaccatttggattcaggctctgtcgccagtccaaaccgtgaaaccgaagccatgctggatggctcagacgctgtgtctgactggccattattaaatgctctgctcaatacagcaggcggcgcaacctgggtgtccttgcatcatggtggtggcgtaggtatggggtacagccagcattctggtgtggtgattttagccgacggtacagaggccgcagcacgtcgtttaggccgcgtactgtggaatgacccaggcact

SEQ ID NO: 284747 - DNA, 1005 bp, Unknown
  Bacterial polypeptide expressing nucleotide sequence isolated from the Sargasso Sea
aaatggcacaggatgcaattttaggccaaaggccattatctattgggttgttgggtaatgcggctgatatggtacctaaattcgttaagagaggtgttgtacctgatatagtaaccgatcaaacatcagctcatgacgaaatggttggatatattcctaatcactttacaatagaagaggctaataagcttagagggtctaacccaaaaaaatacaaacaagaatcaatacgctctatgggtgagcatgtcaaagcaattcttgatttacaagcaaaaggctcaatcgcatttgattatggtaataatatcagggctcaagctgttaaggcaggtattgagaatgcttttggtttcccaggatttgtccctgcttatattagacctcttttctgtgaggggaagggacctttcaggtgggttgcattatcaggagatcctaaagatatatatgccactgacaaaaagatcattgaattatttcccaatgataaagctttacagcattggatcgagatggcccagaaaaaagttaagtttcaaggacttccatctaggatttgttggctaggatataaccagagagcaaagtttggattagcgttaaatgaaatggtacggaatggtgaattatctgcgcctattgtaataggaagggatcatttagattgtggctcagtagcttcaccaaacagggaaactgaagctatgaaagatggaagtgatgctgtcgctgattggccaattttaaatgctctattaaatacagccagtggcgcttcatgggtttcatttcatcatggaggaggagtaggcatgggctactctcttcactcaggtcaagttattgttgccgatggtactaaagaaatggatgttaggctaaaaagggtattgactaatgatccgggtatgggaatctatagacatgctgatgcaggttatagtgatgcaatcaaaaacgctaaaaaatgggatgtcgatatacccatgaacaataaatagt

SEQ ID NO: 284748 - DNA, 1672 bp, Unknown
  Bacterial polypeptide expressing nucleotide sequence isolated from the Sargasso Sea
atggacaagcgacacgacccaagccgccgtattattgcgccccatggtagccaattaagctgtaaaagctggttaaccgaagcgccaatgcgcatgttaatgaacaacttacatcccgatgtggccgagcgcccagaagacttagtcgtctacggtggtatcggccgagctgcccgcgattgggattgttacgacaaaatcatcgaagtcctacaacgcctcgaagacgatgaaaccttaatggtgcaatcgggtaagcctgtgggcgtatttcgcacccacgccgatgctccacgcgtgctgattgctaactctaacctagtgccacattgggcaaattgggaacacttcaacgagctagataaacaaggtttggcaatgtatggccagatgaccgcgggttcgtggatctatattggtacccaaggcattgtccaagggacctacgaaaccttcgttgcagtggcaaaacaacactttggcggcgttgctgccggtaagtggatcctcaccggtggtttagggggtatgggcggcgcgcaaacgctggcaggtactatggctggcttctcagtgttagcctgtgaagtcgacgagactcgcatcgattttcgtctacgtacccgttatgtggataaaaaggccacttcattagacgaagccttggctatgatcaacgatgccaatgcctcgggcaaacccgtttccgtcggcctgttagctaacgccgccgatgtatttgccgaattagtgaagcgtggtattactcctgatgttgtcaccgaccaaacctctgcccacgatccgctgaacggctatttgccacagggctggaccatggcgcaagcggccgacatgcgtaaaaccgatgaggctgccgtcgttaaagcggctaaagcctcgatggcggtacaggtgcaagccatgctggatctgcaagcggcaggcgcagcgaccttagactatggtaacaacattcgccaaatggccttcgaaaccggcgttaaaaacgcgttcgatttcccaggttttgtgcctgcctatattcgcccactcttctgcgaaggtatcggcccgttccgttgggttgcgttatctggcgatcctgaggatatctacaagaccgacgccaaagtaaaagaactgatcccagacaatccacacctgcacaactggttagatatggcccgtgagcgtatcgccttccaagggctgccagcgcgtatctgctgggtgggtttaaaggaccgtgcgcgtttagcccaagcctttaacgagatggtgaaaaacggcgagctgtcggcgccgatcgtcattggtcgcgaccacttagactcaggctcagtcgccagccctaaccgtgaaaccgagtctatgatggacggttcagacgcagtatctgattggccattactgaacgctctgctaaacactgccagcggcgcgacttgggtatccttgcaccacggtggtggtgttggcatgggctttagtcaacactcgggcgtagtgatcgtgtgtgacggcactgaagctgctgctaaacgtgttggccgcgtgctgtggaacgacccagcgacaggcgtgatgcgccatgcggatgcgggttatgaaatagctaaaaactgtgcaaaagagcagggcttagatctgcccatgcttaaagactaac

SEQ ID NO: 284749 - DNA, 1741 bp, Unknown
  Bacterial polypeptide expressing nucleotide sequence isolated from the Sargasso Sea
tatgaaacgccttgaccctacaagagaaatacgtgccccaagaggcagtacgctaaatgcgaagagctggcaaacggaagcgccgcttcgcatgttaatgaataacctggatccagacgttgcggagcatccgcaaaatctggtggtttacggcggtattgggcgtgcggcccgtgactgggcgtcttacgacaaaattgtagaagtactcaagcgcttaaatactgatgagacgctgctagttcaatcaggcaaacctgttggggtatttcccactcacgaaaatgcacctcgtgtgttaattgctaattctaaccttgtaccgcattgggcaaactgggagcactttaacgctctggataaagaaggtttgatgatgtacgggcaaatgaccgcagggtcatggatatacataggctcgcaaggcattgtccaggggacttatgaaacatttgtgagcgtagccaaaacgcattttgaaggaagcgctgaaggacgctggattttgactggtggcttgggcggtatgggcggagcacagcctttagctgcaaccatggctggcttttcaatggtagctgtggaggtagatgaaactcgcatagatttcagaattcgcacgggctatttggacaaaaaagcgcattcgttagaagaagccatgcaactcctagaagaagccaaagaagaaggtaagccagtatcaattggtttgctaggcaatgctgctgaagtatttcccgatatgctagcaaaagggattatccctgacgttgtaaccgatcaaaccagtgcgcacgatccgttgaatggctatttaccagtggggtggacgctagatcaagctgaggcgcagcgtaaaaaagacgaagcgggtgttgtgaaaagtgctaaacagtcgatggcgctgcaagttaaagcaatgcttggcttccaacaagctggcgctgctactcttgattatggcaacaacattagacaaatggcgctagaagagggtattgagcatgcgttcgatttcccaggtttcgttcctgcttatattcgaccgcttttttgtcagggcatagggcctttcagatgggctgcgctgtcaggcgatccggaagatatctataaaacggacgcgaaagttaaagagcttatacccgacaacccccatctacataactggctagatatggctaaagaacgtattcagttccaaggcctgcccgcgcgtatttgctgggtggggctgggtgaaagacaaaagctggggcttgcctttaatgaaatggttcgcagtggcgagttaagcgcgccagttgtgattggacgggatcatctcgactctggttcggtagcttcacccaatagagaaacagaggctatgctcgatggttcagatgccgtatcagattggccgctgctgaatgccctattaaatacagcgggtggtgcaacctgggtaagccttcatcatggtggcggtgtaggaatgggctttagccaacactcgggtgtagtgattgtttgtgacggtacggacgaagcggctgagcgtattgctcgggttcttcataacgaccctgccacgggcgtaatgcgtcatgcagatgcaggctacgacattgcaaaagactgtgctgccaagcacaacttggatcttcccatggtcaatagcgcggctaataaccaaatccccgatagaacaggcactcattcaagctcgaacaaaagctttggcggggagaaatag

SEQ ID NO: 284750 - DNA, 445 bp, Unknown
  Bacterial polypeptide expressing nucleotide sequence isolated from the Sargasso Sea
tggttaaattatgaacaaagatctcaatttggagttgaattgaataatatggttgcaaaaggtgagctttcagctcctattgtaattggaagagaccatttagatactggttctgttgcttcaccatatagagaaactgaaggtatgctggatggctctgatgcagttgctgattggccgttattaaatgcactaattaatactgcaagtggcgctacatgggtatctattcatcatggtggtggagttggtatgggtttatctattcattcaggacaagttatttgtgctgatggcactaaagaaatggaaaaaagacttaaacgtgttcttagcaatgaccctggcataggaatattacgtcatgctgatgcaggatatgaagatgctaaatattatgcaaataattggaatatagaaattccaatgaaagaaaataattaaa

SEQ ID NO: 284751 - DNA, 1672 bp, Unknown
  Bacterial polypeptide expressing nucleotide sequence isolated from the Sargasso Sea
atggacaagcgacacgacccaagccgccgtattattgcgccccatggtagccaattaagctgcaaaagctggttaaccgaagcgccaatgcgcatgttaatgaacaacttacatcccgatgtggccgagcgcccagaggatttagtggtttacggcggtatcggccgcgcggcccgcgactgggactgctatgacaagattatcgaagtgctaaaacgcctcgaagacgacgaaaccttaatggtgcaatcgggtaaaccagtgggcgtattccgcacccacgcggatgcaccgcgcgtgctgattgctaactctaacctagtgccacattgggcaaactgggaacacttcaacgagttagataagcaaggtttggcgatgtatggccagatgactgcgggttcttggatttatatcggcactcagggcattgtccaaggcacctacgaaacctttgttgccgtggcaaaacaacactttggcggcgtggctgccggtaagtggatcctcactggaggtttaggtggtatgggcggcgcgcaaacgctggccgggactatggctggtttctctgtgcttgcctgtgaagtggatgaaacccgtatcgattttcgtctgcgtacccgttatgtggataaaaaggcgacttcactagatgaagccttggctatgattaacgatgccaatgcctcgggcaaacccgtatctgtgggcctgctggctaacgccgccgatatctttgccgaattagtaaagcgtggcattactcctgatgttgtcaccgaccaaacctctgcccacgatccgctgaacggctatttgccacagggctggaccatggcgcaagcggccgacatgcgtaaaaccgatgaagcagccgtcgttaaagcggctaaagcctcgatggcggtacaggtgcaagccatgctggatttgcaagcggcaggcgctgcgaccttagactatggtaacaacattcgccaaatggccttcgaaaccggcattaaaaacgcgttcgatttcccaggttttgtgcctgcttatattcgtccacttttctgcgaaggtatcggcccgttccgttgggtggccctgtctggcgatcctgaggatatctacaagaccgacgccaaagtgaaggagctgatccccgacaatcctcacctgcacaactggttagatatggcccgtgagcgtatcgccttccaaggtctgccagcgcgtatctgctgggtgggcttaaaggatcgtgcacgtttagcccaagcctttaacgagatggtgaaaagtggcgagctgtcggcgccgatcgtcattggtcgtgaccacttagactcaggctcagtcgccagccctaaccgcgaaaccgaatctatgatggacggctcagacgcagtatctgactggccattattgaacgcgctgctgaacactgccagcggcgccacttgggtgtcgctgcaccacggtggtggtgtcggcatgggctttagccaacactcgggtgtggtgatcgtgtgtgacggtactgaggccgccgctaaacgtgttggccgcgtgctgtggaacgaccctgcgacaggcgtgatgcgccatgcggatgcgggttatgagatcgcgaaaaactgtgcaaaagagcagggcttagatctgcccatgcttaaagactaac

SEQ ID NO: 284752 - DNA, 1049 bp, Unknown
  Bacterial polypeptide expressing nucleotide sequence isolated from the Sargasso Sea
tgaaacaaaatatcttgatacatctgttaagacgctagatgaggctataataatagctaatcaggcaaaaaataacaaagaggctatcacaattggcttagaaggaaatgctgcagatatagtgcctaaaatggttgaattaaactttgttcctgatatgatcaccgatcaaacatctgcgcacgatgaattagatggatatattccaaatggtttatcaattaaagaatcaaatgatctccgaaaatctgattcaaaaagatatatttctgaatcttataaagcaatggttacccattgtgaagcgatcattaagcttcaagcgatgggatccatagcttttgattatggaaataatttgagaggtcaggcaaaaaaagctggtctaaaaaatgcttttgactttcctgggtttattccagaatatattagaccccttttttgccaaggcaaaggtccatttaggtgggttgcgctatctggagacccggatgatatatataaaactgatgctgcggtattggagatgtttccagatgataaggtgctatctaattggatcaatatggcaaaagatcaagttcaatttcaaggattgccatctagaatttgctggttaggctataatcaaagagcaaaatttggagtcagactaaatgaaatggtggctaggggagagctatctgcaccgatagtaatcggcagagaccatttagattgcggatctgtggcttcgccatatagagaaacagagtccatgaaagatggttctgatgctgttgcagattggcccttgctaaatgcattgcttaatacggcaagcggatctacttgggtatctattcaccaaggtggaggagtgggtatgggtttatccattcacgcagggcaggtactttgcgttgatggatcaaatgaaatggccttaagggcagagcgcgttttaaccaatgaccctgcaactggaataattcgccatgtcgacgcaggatatgatgatgctattaaaaatgcagatcaatgggatgttgatattccatctctataat

SEQ ID NO: 284753 - DNA, 1660 bp, Unknown
  Bacterial polypeptide expressing nucleotide sequence isolated from the Sargasso Sea
atgagtaataaaaacattaaagccagtataggcaatcaattggaggccaaaagctggcaaacagaagcaccgttgagaatgattatgaataatttagatcgcgatgtggctgaaaatccagatgaattaattgtttatggtggaattggaaaggcggcaaggaactgggaatgctatgaaactattgtgtccgaattaaaaaagcttgaagacaacgagacgttgctgattcaatctggaaaaccagttggtatttttaagacacacacagacgcgccaagagttttgatcgccaattcaaatcttgttccagcttgggcaaattgggagcacttcaacgaattagataaaaaaggtttaatgatgtacgggcaaatgaccgcaggctcttggatatacattggaagccaaggtattgttcaaggcacttatgagacttttgttgaaatgggccgtcagcattttgatggggatctttctggtcgctggatattgacagcagggcttggaggaatgggcggagcacagccgcttgcagcaaccatggccggtgcctctttattggcaattgaatgtgatcaagataggatccaaaagagactgagtactgggtatttggacaaaaccgcagataatcttgatgaagccctggaaatgattcaatcatcaatcgataacaaagagccgatctcagtggggctattggggaatgtggtggatattttacccaaaatgatcgaaatgaaagtaaaacctgatattgtgaccgatcaaacatcagcacatgatccagtcaatggttatctcccgtccggttggagcattgatgaatgggataaaaaaagaaaaagccatccagagattgtggccaaatatgctaaagaatctatggcaaaacatgttgaagcgatgctcgcttttcatgggcaaggaattccgactgttgattatggaaataatttaagacaaatggcatttgatcaaggtgtaagtgccgcattttcttttcctggttttgtaccagcatacgtaagaccgctgttttgtagaggaattggaccattcagatgggttgcactctcaggtgatccagaggacatatataagacagatgcgaaagtaaaagaactgatgcctaatgatagtcatcttcatcggtggctagatgcagcgcagaaaaaaattaaatttcaaggtttgcctgcaaggatatgctggttaggtctaggcgatagagacagaatggcccttgcttttaatgagatggttaggaaaggtgaattgagcgctccgatagtgatagggagagatcaccttgatagtggatcagttgctagccctaatcgtgagacagaagatatgctagatgattctgatgccgtatcagactggccattactgaatgctcttttaagtacagcaagtggcgctacttgggtctcattgcatcacggaggtggtgtgggaatgggttactcgcagcactcaggcttagttattgtgtgtgatggaacaattgaagcagacgagagaatatcacgtgttttatggaatgatccagcgagtggtgttatgcgtcatgctgatgcaggataccaggaagcacttgaatgtgcatctcaacataaccttaatttaccaatgcaaaagaaaaattaga

SEQ ID NO: 284754 - DNA, 1399 bp, Unknown
  Bacterial polypeptide expressing nucleotide sequence isolated from the Sargasso Sea
atgaaaaataatattaaacctcctattggtaataatttaacctgtaaaaattggcagattgaagcgccataccgaatgatacaaaataatcttcatcctgatgtggcagaggatccagaaaatttagtagtttatggtggtaagggaaaagcagcaaggaattgggattgttataaggctataattcgatcattgaaagcactaaatgaagatgagacgcttttagtccaatcaggtaaacctgttggagtagtaaaaacccacctttctgcgcctagagttttaattgctaattcaaatttagtccctaactgggctaattgggaacatttcaatgagctggatagaaatggtttgactatgtatggtcaaatgacagctggttcctggatatatataggtacacaaggaattttacagggaacatatgaaacatttgcagctgcagcaaagcagcattttgatagtgatttaagaggaaaactagttgtgtctgcaggtttaggaggtatgggaggagctcaacctttagctgttacaatgaataatggtgtggctttaattgttgagtctgatccttcaaagattcaaaggcgtttagatacacaatatcttcaatattctacggaatcattaaatgaagcgattagtatggttaagaaagctataaatagtaaaaagccattatccgttgggctattaggaaatgctgcagatattataccaaatttagccaaaatggatataatacctgattttgttaccgatcaaacatcagctcatgacgaattagatggatatatcccaaatggctatacttatcaagaagctttagctttaagaaaaaataatccagatgaatatattaaagagagctatcgtgcgatgagcgaacattgtaaaggtatactagcactgaatcagaaaggttctatatgctttgattatggaaataatcttagaggtcaagcaatgaagtctggagttcaaaatgcttttgattttccaggttttgtacctgaatatataagaccattattttgtgaaggtagggggccttttagatgggttgcattatctggagaaaaagaagatatttttaaaactgacaataaaataatggaaatgtttccaaatgataatacgttaactcgatggattaaattagctcgagaaaaagtaaaatttcaagggctgcctgcaagaatttgctggttaaattatgaacaaagatctcaatttggagttgaattgaataatatggttgcaaaaggtgagctttcagcccctattgtaattggaagagaccatttagatactggttctgttgcttcaccatatagagaaactgaaggtatgctggatggctctgatgcagttgctgattggccgttattaa

SEQ ID NO: 284755 - DNA, 1675 bp, Unknown
  Bacterial polypeptide expressing nucleotide sequence isolated from the Sargasso Sea
atgactaaccgactcgacacaagtcgcgtaatacgtgcaccgcatggcgatatgataagcgcaaaaagctggcaaactgaagcggcaaaacgcatgctcatgaacaatttagaccctgaggttgcagagcatcctcacgcattagttgtttatggtggtattggtagagcggcacgtgattggccaagttttgataaaataatagcaaccctagaccgattaaatgatgacgaaacattgcttgttcagtcaggtaaacctgttggcgtatttaaaacacacagcaatgctcctcgcgttttaattgcaaattcaaacttggtaccccactgggctaactgggagcacttcaacgaactagataaaaaaggtttaatgatgtacggccaaatgacggctggatcttggatttatattggctctcagggcattgtacaaggcacatacgaaacatttgtagctatggctaaacaacactttaatggtcaagctaaaggtaaatgggtgttaacaggtggccttggtggcatgggcggcgcgcagccactggcggcaactatggcgggcttttgcgccttagttgttgagtgtgacgaaagccgcatcgattttcgcattaaaactggctacgttgatgtaaaagccacaaatcttgaacatgcactgcagttaattactgacgcatgcgttaacgacaaagcaatttcggttggcttgctgggcaacgctgcagatatatttagcacacttgtaagcagtggcattacacccgatatagtgactgaccaaacatcagcacacgacccacttaatggttacttaccacaaggttggactatggagcacgccgcaaaaatgcgtgaacaaaatccaaaagcggttgtaaaagcagccaaacaatcaatggctgtacaagttaatgccatgttagccctacaaaaagcaggcgcagcaaccactgactacggtaataatatccgccaaatggcatttgaagaaggtgttacaaacgcatttgatttccctggctttgttccagcttatatccgcccattattttgccaaggtataggcccgtttcgatgggtcgctttatcgggcgatccagaagatatttataaaacagatgctaaagtaaaagaactaatccctgatgatgcacatttgcacaattggcttgatatggcgcgcgaacgcattcaattccaaggcttaccggctcgtatatgctgggtgggtttaaaagacagagcacgcttagcactggcatttaatgaaatggtaaaaaatggggagcttaaagcacctattgttattggccgtgatcatcttgattctggctcagtagcaagccctaatcgtgaaacagaaagcatgaaagatggttcagatgccgtctctgattggcctttgcttaatgcgttgcttaacacagcaagtggcgctacgtgggtatcacttcaccatggcggtggtgtaggaatgggctttagccaacactcaggtgttgttattgttgccgatggtacagacgaagcgaaagcacgtgttggtcgcgtgctttggaatgaccccgctaccggtgtaatgcgccatgcagatgccggttacgatatcgcaaaaaactgtgccaaagagcaaaacttagacttaccaatgctgaacgaggaataat

SEQ ID NO: 284756 - DNA, 826 bp, Unknown
  Bacterial polypeptide expressing nucleotide sequence isolated from the Sargasso Sea
atgccaaattcacgccacaatatccgcgacgtttatccgccaacaggtaatcagatcacggcaaaaagctggcttaccgaggcaccaatgcgcatgctgatgaacaatttgcatcctgatgttgctgaagatcctcatgcccttgtggtatatgggggcattggccgtgccgcccgtacgtgggaagattacgacaagatggttgcaactttgcaagaccttgaaactgatcagacactgctggtgcaatcgggaaagccggtgggcgtttttcgcacacataaggacgccccgcgggtgcttattgctaactctaatctggtgccgcactgggccacgtgggatcattttaatgaattggataagcgcggccttgccatgtatggccagatgaccgcggggtcatggatttacattggcacacaaggaattgtgcagggcacgtatgaaaccttcgttgaggctggccgccagcattataaaggggatttaactgggcgctggattttgacagcaggccttggtggtatgggcggcgcacaaccattagctgcagtgatggctggtgcgtgttgcctggccgttgaatgtgatgagtcccgagcagactttcgacttcgtacacgctacgttgatgaaaagacccattcattggatgaggcgttggccatgataaagggctggtgtgacgcaggcgaggccaagtctgttgcgttgattggaaacgctgctgatgtgttcccagagcttgtgcggaggggggtcaagcctgatattgtcacggaccaaacatctgcgcatgacccgctccacggctacttgcccc

SEQ ID NO: 284757 - DNA, 599 bp, Unknown
  Bacterial polypeptide expressing nucleotide sequence isolated from the Sargasso Sea
ccccttccgctgggccgcgctttccggggacccggaagacatctaccgtaccgatgagaaggtgaaggaactgattccggaggatccccatctccataattggctcgagatggcgaagaaacgcatccagttccaggggcttccggcaaggatatgctgggtcggtctggccgaccgtgcaaggctcggggtcgccttcaacgacatggtccgaagcggagaactgaaggctccggtggtgatcggcagggaccacctcgattcaggatccgttgccagtccgaaccgtgagaccgagggcatgtgtgacggcagtgacgccgtctccgactggccactgctgaatgccttgctcaacaccgctggtggagcaacctgggtcagcatccaccatggcggaggggtcgggatgggattcgcccagcacgcgggaatggtgatcgtatgcgacggaagtcccgaagcggaaatgagactgaggcgcgtgttgcgcaacgatcccggcaccggagtcatgcggcatgccgatgccggctatgaagaagccctcgccagtgcgcgggaaaacgatctcgacctccccatgctaggccgttgaa

SEQ ID NO: 284758 - DNA, 1690 bp, Unknown
  Bacterial polypeptide expressing nucleotide sequence isolated from the Sargasso Sea
catgaaccatccgaaacacatcgatccccgtctcgatccgacgcgcacgatccgcgcgccgcgcggcagcgagaaagtctgcaagacctggctggccgaagcggcctaccggatgatccagaacaacctcgacccggaagtcgccgagcatccgcatgcgctcgtcgtgtacggcggcatcggccgcgcagcacgcaactgggaatgctacgaccagatcctcgcgtcgctgaaggatctcgaagagaacgagacgctgctgatccagtcgggcaagccggtcggtgtgttccgcacgcacaaggatgcgccgcgcgtgctgctcgcgaactcgaacctcgtgccgcactgggcgaactgggatcacttccacgagctcgatcgcaagggcctgatgatgtacggccagatgacggccggcagctggatctacatcggcagccagggcatcgttcagggcacctatgaaacgttcttctcggtcgcgaaccagcacttcaacggcgatccgtcgggccgctggatcctgacgggcggcctgggcggcatgggcggcgcgcagccgctggccgcgacgatggccggtttctcgatgatcgcggtcgaatgcgacgagacgcgcatcgacttccgcctgaagacgcgctacgtcgacaagaaggcgacgacgctcgacgaggcgctcggcatgatcgaggaagccaagcgcaccggcaagccggtgtcgatcggcctgctcggcaacgcggccgacgtgttcgcggaactcgtcacgcgcggcatcacgccggactgcgtgaccgaccagacgagcgcgcacgatccgatcaacggctacctgccgcaaggctggaccgtcgcgcaatggcgcgaagcgcagaaggtcgatccgcagagcatcgtgaaggtcgcgaagcagtcgatggccgtccaggtgcgcgcgatgctcgcgctgcaggaacgcggcgcggcgacgctcgactacggcaacaacatccgccagatggcgctggaaatgggcgtcgagaacgcattcgacttcccgggcttcgtgccggcgtacatccgcccgctgttctgcgaaggcaagggcccgttccgctgggtcgcgctgtcgggcgatccggaagacatctacaagaccgaccagaaggtgaaggagctgatccccgacgatccgcacctgcacaactggctcgacatggcgcgtgagcgcatcgcgttccagggcctgccggcacggatctgctgggtcggcgtgaaggatcgctatcgcctcggccaggcgttcaacgagatggtcaagaacggcgagctgaaggccccgatcgtgatcggccgcgaccacctcgacaccggttcggtcgcgagcccgaaccgcgagacggaagcgatgaaggacggttcggacgccgtgagcgactggccgctcctgaacgcactgctgaacaccgcaggcggcgcatcgtgggtgtcgctgcaccatggcggcggcgtcggcatgggcttctcgcagcactcgggtgtcgtgatcgtcgccgacggcaccgccgaagcgcacgagcgtctcggccgcgtgcttctgaacgacccggcgacgggcgtgatgcgccatgcggatgccggctacgaactcgcgcagcagacggcccgcgaagccggcctgaagctgccgatgctcggccgctga

SEQ ID NO: 284759 - DNA, 1450 bp, Unknown
  Bacterial polypeptide expressing nucleotide sequence isolated from the Sargasso Sea
ggccgtgccgcgcgtaactgggattgcttcgatcagatcctcgcgtcgttgaaggatctgaacgaggacgagacgctgctgattcaatcgggcaagccggtcggcgtgtttcgcacgcatgcggacgcgccgcgcgtgctgctggcgaattcgaacctggtgccgcattgggcgacgtgggaacacttccacgaactcgatcgcaagggtctcatgatgtacggccagatgacggcgggcagctggatctacatcggcagccagggcatcgtgcagggcacctacgaaacgtttttctcggtggcgaaccagcatttcaacggcgatccgtcgggtcgctggattctgacgggtggtttgggcggaatgggcggcgcgcaaccgctggccgcgaccatggccggcttctcgatgatcgcggtggaatgcgatgagacgcgcatcgacttccgtctgaagacccgttacgtcgacaagaaggcgaagacgctcgacgaagcgctcgccatgctcgacgaagcgaagaagtccggcaagccggtttcgatcggactcctcggcaacgccgccgatgtgttcgccgagtgcgtgacgcgcggcattacgccggattgcgtgaccgaccagaccagcgcgcacgatccgattcacggctatctgccgcaaggctggagcgtcgaagactggcgcgagcgtcagaaaaccgcgccggacagcatcgtgacgccggccaagcagtcgatggccaagcaggttcaggcgatgctggcgttgcaggcgcgcggcgcggccacgctcgactacggcaacaacatccgccagatggcgttggaaatgggcgtcgaaaacgccttcgatttcccgggcttcgtgccggcctacatccgtccgttgttctgcgaaggcaaggggccgttccgctgggtcgcgctgtcgggcgatcctgaagatatctacaagaccgatgcgaaggtcaaggaactgatccccgacgatccgcatctgcacaactggctcgacatggcgcgcgaacgcattgcgttccaggggctgccggcgcggatttgctgggtcggcgtgaaggatcgctatcgtctgggccaggcgttcaacgaaatggtgaagaacggcgaactgaaggcgccgatcgtgatcggccgcgatcacctggacacgggttcggttgcgagcccgaatcgcgaaaccgaatcgatgaaagacggttcggacgcagtcagcgactggccgctgctcaatgcattgctgaacacggcaggcggcgcgtcgtgggtctcgctgcatcatggcggcggcgtcggcatgggcttcagccagcactcgggtgtggtgatcgtcgctgacggtacggatgccgcgaaggagcgcctcggccgtgtgctgtttcacgatccggcaaccggcgtgatgcgtcatgcggatgcgggctatg

SEQ ID NO: 284760 - DNA, 442 bp, Unknown
  Bacterial polypeptide expressing nucleotide sequence isolated from the Sargasso Sea
gtggcgtcagaaactagggctggcgtttaatgaaatggtgcgcagcggtgaagtatccgcgccgattgttattggccgtgaccatctggactccggttctgttgccagcccgaaccgcgaaactgaagctatgcgtgacggctcagacgccgtatccgactggccgctgctgaacgcgctgcttaacaccgccagcggcgcgacctgggtgtcgctgcatcacggtggcggggtcggtatgggcttctctcagcatgccgggatggtgattgtttgcgatggcaccgatgaagccgcggcgcgtatcgcccgggtcttacataacgatccagcgaccggggtgatgcgtcacgccgacgccggatatgacattgcggtggaatgcgccgtcgaagaagggctaaatttgccgatggttaccgcgacgcaggagaaacgctga

SEQ ID NO: 284761 - DNA, 848 bp, Unknown
  Bacterial polypeptide expressing nucleotide sequence isolated from the Sargasso Sea
ggcgcgcgctgcaaaatccgctccccaggaggtgaacgtcgccgcccgccactccatggcccgtcaggtcgaagccatgctgaccctgcaatcccgtggcgccgcgaccctggattacggcaacaacatccgccagatggcgctggaggagggggtgaaaaacgccttcgacttccccggcttcgtcccggcttacattcgcccgctgttctgcgagggcattggcccgttccgctgggtggcgctctccggcgatccggaagatatctacaagaccgaccagaaggtgaaggagttgatccccgatgatcctcacctgcacaactggctcgacatggcccgcgagcgcatcgccttccagggcctgccggcgcggatctgctgggtcggggtgaaggatcgggtacgtctcggcctggccttcaacgagatggtcaagaatggcgagctgaaagcgcccatcgtcatcggtcgcgaccacctggattccggctcggtggcgagcccgaaccgcgagaccgagtcgatgatggatggctccgatgccgtctccgactggccgctgctcaacgccctgctcaacacggccggcggcgcgacctgggtctccctgcaccacggtggcggggtcggcatgggcttctcccagcattccggcgtggtgatcgtctgcgacggcaccgatgacgccgccaggcgggtcggtcgggtgctgcgcaacgacccggccaccggggtgatgcgtcacgccgacgccggctacgagattgccatcaactgcgcccacgaggcgaaactggatctgccgatgattgacggcgccaacggtgtcaaaggaaaggtgtaac

SEQ ID NO: 284762 - DNA, 1654 bp, Unknown
  Bacterial polypeptide expressing nucleotide sequence isolated from the Sargasso Sea
tttgaagaatattcatccacctattggcaacaatcttaaatgtaaaaattggcagattgaagcggcttatagaatgatccaacataatttggatccagatgtagcagaaatcccagaagaacttattgtttatggtggtaaaggaaaagctgcgagaaattgggaatcatttaacgcaatcttaaggactttagagcgacttgaaccagacgaaacattgctggttcaatctggtaagccagtcggtgtagcaaaaacacactcttatgcaccaagagtacttattgccaattcaaatttggtccccaaatgggctacgtgggatcattttaataaacttgaaaaagatggtctaatgatgtttggacaaatgactgctggtagttggatctatattggtactcaaggaatactgcagggtacttatgaaacctttattgctgcagctaaaaaacattggggaatagattctcttaaaggaaaactaattttaacctctggattaggagggatgggtggtgcacagcctttagctgttacaatggcaggtggagttgtaatatgtattgagatagataatcatcggattaatagacgtcttgagacaaactatctagataaagctacagattcctttgaaaaagcaataaaaatggctaaggatgcagtttttaaaaaaataccactctctattggtttattgggtaatgctgcagatatagttccaaaatttgttagtagcgatattattcctgacatggtgaccgatcaaacatcagcgcacgatgaactgattggatatataccaaatcattatacgatagaagaagctgataaactgcgagaatccaatccaaaaaagtataagcatgaatcgattcgatctatgggagaacatgtaaatgcaattctagagcttcaaaggaaaggctctattgcatttgattatggaaataatattagggctcaagctgaaaaagcaggtgtaaaaaatgcgtttgattttccaggttttgttcctgcatatattagacctctattttgtgaaggtaagggaccatttaggtgggttgccttatctggcgacccaaatgatatatataatacagataaaaaggtgattgagttatttcctaaagataaagctttatgtcattggatcgaaatggcgcaaaaaaaagttaagtttcaaggacttccatctagaatttgttggttgggttatggccagagagcaaaatttggtttagccttaaatgctatggtaaagagtggtgaattatcagcgccaattgttataggtagagatcatttagactgtggctctgttgcatctcccaatagggaaactgaaagtatgaaagatgggagtgatgctgtcgctgactggccaatactaaatgctttattaaatacagctagtggtgcatcgtgggtatcctttcatcatggaggaggtgtaggtatgggctactcgttgcactcaggtcaggttattgttgcagatggtacagatgaaatggacgcaaggttgtctgtagtattaaacaatgacccaggtatggggatttatagacatgcagacgcaggttatagtgacgcaattgaaaatgctaaaaaatggaatattgatattccaatgcttgaaaaatag

SEQ ID NO: 284763 - DNA, 1598 bp, Unknown
  Bacterial polypeptide expressing nucleotide sequence isolated from the Sargasso Sea
ggtttacggcggtattgggcgtgcggcccgtgactgggcgtcttacgacaaaatcgtagaagtactcaagcgcttaaatactgatgagacgttgctggttcaatcaggcaaacctgttggggtatttcccactcacgaaaatgcacctcgtgtgttaattgctaattctaaccttgtaccgcattgggcaaactgggagcactttaacgctctggataaagaaggtttgatgatgtacgggcaaatgaccgcagggtcatggatatacataggctcgcaaggcattgtccaggggacttatgaaacatttgtgagcgtggccaaaacgcattttgaaggaagcgctgaaggacgctggattttgactggtggcttgggcggtatgggcggagcacagcctttagctgcaaccatggctggcttttcaatggtagctgtggaggtagatgaaactcgcatagatttcagaattcgcacgggttatttggacaaaaaagcgcattcgttagaagaagccatgcaactacttgaggaagccaaagaagctgggaagcctgtatcaataggattgctcggcaatgctgctgaagtatttcccgatatgctagcgaaagggattattcccgaggttgtgaccgaccaaaccagtgcgcacgatccgttgaatggctatctaccagtggggtggacgctagatcaagctgaggcgcagcgtaaaaaagacgaagcgggtgttgtgaaaagtgctaaacagtcgatggcgctgcaagttaaagcaatgcttggtttccaacaagctggcgctgctactcttgattatggcaacaacattagacaaatggcgctagaagagggtattgagcatgcgttcgatttcccaggtttcgttcctgcctatatacgaccgcttttttgtcaaggcatagggcctttcagatgggctgcgctgtcaggcgatccggaagatatctataaaacggacgctaaagttaaagagcttatacccgacaacccccatctacataactggctagatatggccaaagaacgcattcaattccaaggcctgcccgcgcgtatttgctgggtggggctgggtgaaagacaaaagctggggcttgcctttaatgaaatggttcgcagtggcgagctaagcgcgccagttgtgattggacgggatcatctcgactctggttcggtagcttcaccgaatagagaaaccgaggccatgctcgatggttcagatgccgtttcggactggccgctgctgaacgccctactaaatacagcgggtggtgcaacctgggtaagccttcatcatggtggcggtgtaggaatgggttttagccaacactcgggtgtagtcattgtttgtgacggttcggacgaagcggctgagcgtattgctcgggttcttcataacgaccctgccacgggcgtaatgcgtcatgcagatgcaggctacgacattgcaaaagactgtgctgccaagcacaacttggatcttcccatgatcaataacgcggctaataatcaaagccctgatggaacaagcacacattcaagcgcgaacaaaagctttggtggggagaaatagt

SEQ ID NO: 284764 - DNA, 1302 bp, Unknown
  Bacterial polypeptide expressing nucleotide sequence isolated from the Sargasso Sea
catgggaaaacctgtccgtaatgacccgaaacgcagcatccgcgcgccaagaggaaccgagctcagttgcaagagctggctcaccgaggcaccgatgcggatgctgatgaacaaccttgacccggaagtcgcggaaaaaccggaagacctcgtcgtctacggagggattggacgcgcggcccgcaactgggactgctatgaccggatcatcgaaaccctcaaacgcctggaaaaccaccagtcgctcctgattcaatccggaaaaccggtgggagttttcgaaactcatgcggacgcaccgagggtgctgattgccaattccaacctcgtcccccactgggcgacctgggagcattttcatgaactcgaccgtaaggggcttttcatgttcggccagatgaccgccggttcctggatctacatcgccagtcaggggatcatccagggcacctacgaaaccttcgtggaactgggaaggcagcatttttccggagactggttcgggaagtggatcctcaccgcaggcctgggcggaatgggcggagcccaaccgctggcggcgaccatggccggggcatcgatgctggctgtcgagtgcgatccttcaaggatccgccgaagatttgaaaccggctacctcgatgaatctgcggaaacattggaagacgccctgaagatcctggaatcccatcatcagcagggcaaagctgtttcggtcggactgattggcaatgccgcagagattttaccggaaatgctgaaacgtggagtccgcccggatgcggtgaccgaccagacttcggcccatgacccgctcaatggctacctgcctgcaggctggagcctggaaaaagcggaactgatgcggaaaaccgagccgaatgccgtcatcgaggccgccaaggattcgatggcaactcatgtgcgggccatgcttgactttcaccgtctgggcattcccaccatcgactacggcaacaacatccgacagatggcccttgaaaaaggggttgaggacgcattcgattttcccggcttcgtccctgcctgcatccgtcctctcttctgccgcggttatggccccttccgctgggccgcgctttccggggacccggaagacatctaccgtaccgatgagaaggtgaaggaactgattccggaggatccccatctccataattggctcgagatggcgaagaaacgcatccagttccaagggcttccggcaaggatttgctgggtcggtctggccgaccgtgcaaggctcggggtcgccttcaacgacatggtccggagcggaga

SEQ ID NO: 284765 - DNA, 1231 bp, Unknown
  Bacterial polypeptide expressing nucleotide sequence isolated from the Sargasso Sea
acctacgaaaccttcgttgccgtggcaaaacaacactttggcggcgtggctgccggtaagtggatcctcaccggtggtttaggcggtatgggcggcgcgcaaacgctggccggtactatggcgggtttctctgtgcttgcctgtgaagtggatgaaacccgtatcgattttcgtctgcgtacccgttatgtagataaaaaggcgacttcacttgatgaagccttggctatgattaacgacgcgaatgccgcgggcaaacccgtatctgtgggcctgctggctaacgccgccgatatctttgccgaattagtgaagcgtggcattactcctgacgttgtcaccgaccaaacctctgcccacgatccgctgaacggctatttgccacagggctggaccatggcgcaagcggctgacatgcgtaaaacagacgaagcctccgtcgtaaaagcggctaaagcctcgatggcggtacaagtgcaagccatgctggatctgcaagcggcaggcgcggcgaccttagactatggtaacaacattcgccaaatggccttcgaaactggtgttaaaaacgcgttcgatttccccggttttgtgcctgcttatattcgtccactcttctgcgaaggtatcggcccgttccgttgggtagccctgtctggcgatcctgaggatatctacaagaccgacgccaaagtgaaggaactgatccccgacaatccacacctgcacaactggttagatatggcccgtgagcgtatcgccttccaaggtctacctgcgcgtatctgctgggtgggcttaaaggaccgtgcgcgtttagcccaagcctttaacgagatggtgaaaagcggcgagctgtcggcgccgatcgtcattggtcgtgaccacttagactcaggctcagtcgccagccctaaccgtgaaaccgaatctatgatggatggctcagacgcagtctctgactggccattactgaacgctctgctaaacacagccagcggcgcgacttgggtgtcgctgcaccacggtggtggtgtcggcatgggctttagccaacactcgggtgtggtgatcgtgtgtgacggtactgaggccgccgctaaacgtgttggccgcgtgctgtggaacgaccctgcgacaggcgtgatgcgccatgcggatgcgggttatgagatcgcgaaaaactgtgcaaaagagcagggcttagatctgcccatgcttaaagactaac

SEQ ID NO: 284766 - DNA, 1669 bp, Unknown
  Bacterial polypeptide expressing nucleotide sequence isolated from the Sargasso Sea
gatgtctgacttaattaaaaattcaagaatagttaaaccccctacaggagataagataacagcaaagtcgtggtcaacagaagcacctatgagaatgttgatgaataacttacatccagatgttgctgaaaaccctaatgaacttgttgtttatggaggtataggaagggcagctagaagttggcaagattttgataaaattgtttcaagcttaaaatctcttgacgaagatgaaacccttttggttcaatctggtaagcctgttggcattttcaaaactcatgaagatgctccaagagtactgatagctaattcaaacttagttccaaattgggctaattgggatcattttaatgaacttgataaaaaaggtttagcaatgtacgggcaaatgaccgcaggttcatggatatatataggcacccaaggaattgttcagggtacttacgaaacttttgttgaggctggaagacagcattacaatggagatttgaaaggaaaatggattttgacagcagggcttggtgggatgggtggcgctcagcctttagctgctgtaatggcaggagcatgttgtttagccgttgaatgcaatcctgaaagtatagactttcgtttgagaacaggttacctggatgaaaaagctgaaagtctaaaagaagctcttgaaatgataaaagcatggacatcctctggagtatcaaagtctgttgggctacttggtaatgctgcaactatttttacagaaattgcagaaatggggattaagcctgatatcgtaactgatcaaacaagtgcccatgatccaaccaatggttatcttcctgaaaactggtctataagtgaatggaaagataaaagagaaaccaatccaaaattagttgaagcagaagcaagaaaatcaatgaaaaaacatgtgcaagccatggtgtctttttggaataagggagtgccaacactagattacggtaataatataaggcaagtcgctttagacgaaggactggagacagcattctcatttccaggttttgttccggcatacatccgtccattattttgtaaaggtattggtccctttagatggtgtgctttgtcgggggatccggacgatatttataaaacagatgctaaagtaaaagagcttattccagatgataaacatcttcacaaatggctagacatggctagagagagaataaaatttcaaggtctgccagctagaatttgttgggtaggtttaggtcaaagagataaattaggcttagcattcaacgaaatggtagctaaaggagaactttcagcaccgattgttattggaagagatcacttagacagtggttcagttgctagtccaaatcgcgaaacagaagcaatgaaggatggatcagatgctgtaagtgattggccacttttaaatgctttgttaaatactgcaagtggtgcaacttgggtttcgctgcatcatggtggcggtgttggtatgggttacagccagcattcaggaatggttatttgttgtgatggaaccaaaaaagcttcagaaagaattaaaagagttttatggaatgaccctgcaactggcgtaatgcgtcatgctgatgcaggatataatattgctattgaaagtgctaaatatcacaaacttaatttgccgagtattaaataa

SEQ ID NO: 284767 - DNA, 1287 bp, Unknown
  Bacterial polypeptide expressing nucleotide sequence isolated from the Sargasso Sea
gacggctgggagttggatatatatttggcactcaaggtattttgcgaggtacttatgaaacctttatatctgctgcaaaggttcactggggtaatgataatctcaagggtaagctagttttaactgcaggtcttggaggtatgggaggcgctcagcccctagctgtgagtatggctggtggtgtttcaatatgtgttgagatagataaaaatataataaagcgtagaattgatactaaatatttagataaatcagctgataatgtagatgaagcgattataatggctaaaattgcgcttgaagataaaaagccactaagtattggtttattaggaaatgcggctgatatcataccaaaattcgtggaaaaaaatataataccagatctggttacggatcaaacatctgcccatgatgagctagatggatatatccccaataatatttcttttgatgaggcgattttattgaagaatgctgatcctaataagtttaggaaagaaagtattaggtcaatgggaatacatgtaaagggtatgctggaattacaggataaaggttcaattgtatttgattatggcaataatattagagcgcaagcaaagaaagcaggagtagaagctgcattcaacatcccaggttttgttccggaatatattcggccactattttgtgaagggaaggggccatttagatgggtagctttatctggaaaagtggaagatatttacaaaacagatgaacttatattaagtatgttccctaatgataaagcattatgccattggattaaaatggctaatgaaaaagtttcttttcagggattaccatcacgaatttgctggctaggttttaaagatagagcaaaatttggcttaaaactcaatgaaatggtggcatctggggaattgtctgggcctattgtgattggtagagaccatctggattgtgggtctgtcgcatctccaaatagagagacggaatcaatgaaagatggatccgatgctattgctgattggcctcttttaaatgccttgatcaatacagccagtggtgcttcttgggtttcaatacatcatggtggtggggtagggatgggctactccattcatgcgggtcaggtaattgtagcagatggaacttctgaaatgaaagaacgtatatcccgtgttttaaccaatgaccctggtattggcgtgatcaggcacgcagatgcaggctatagtgaggctattgtaaatgcacgtaattgggatatagatattccattaattaagaaaaaatgat

SEQ ID NO: 284768 - DNA, 1173 bp, Unknown
  Bacterial polypeptide expressing nucleotide sequence isolated from the Sargasso Sea
agtggatcctcaccgcaggccttggcggaatgggcggggcccaacccctggcggcgaccatggccggagcatcgatgctagctgtcgagtgcgacccttcaagaattcgccgaagattggaaaccggctacctcgatgaatccgcggaaaacctggaggaggccctgaagatcctggaatcccatcatcagcagggcaaagctgtttcggtgggactgcttggcaatgctgcagagattctaccggaaatgctgaaacgtggcgtccgcccagatgccgtgaccgaccagacttcggcccatgacccgctcaatggctatctgcctgccggctggagcctggaaaaagcggaactgatgcgaaaaaccgaaccgaatgccgtcatcgaggccgccaaggattcgatggcaactcatgtgcttgccatgcttgactttcaccgtttgggcattcccaccatcgactacggcaacaacatccgacagatggcccttgataaaggggttgaggacgcattcgatttccctggcttcgtccctgcctgcatccgtcccctcttctgtcgcggttatggccccttccgctgggctgcgctttccggggaccctgaagacatctaccgaaccgatgagaaggtgaaggaattgattccggaggatccccatctccataattggctcgagatggcgaagaaacgcatccagttccaggggcttccggcaaggatatgctgggtcggtctggctgaccgtgcaaggctcggggtcgccttcaacgacatggtccggaacggagaactgaaggctccggtggtgatcggcagggaccacctcgattcaggatccgttgccagtccgaaccgtgagaccgagggcatgcgtgacggcagtgacgccgtctccgactggccgctgctgaatgccttgctcaacaccgccggtggagcaacctgggtcagcatccaccatggcggaggggtcgggatgggtttcgcccagcacgcgggaatggtgatcgtatgcgacggaactcccgaagcggaaatgagattgaggcgcgtgttgcgcaacgaccccggcaccggagtgatgcggcatgccgatgccggctataaagaagccctcgccagtgcacgggaaaacgatctcgacctccccatgctgggacgttgaa

SEQ ID NO: 284769 - DNA, 160 bp, Unknown
  Bacterial polypeptide expressing nucleotide sequence isolated from the Sargasso Sea
aatgtctaaaattaaaggatgcataaccgctttaataaccccatttgattctgatgggaaaattgatgaatcggcttttgaaagcttaatattaaggcaaattaaaaatggggtccatggtttagttccatgtggtacaactggtgagtcacaacactaa

SEQ ID NO: 284770 - DNA, 283 bp, Unknown
  Bacterial polypeptide expressing nucleotide sequence isolated from the Sargasso Sea
gatgaaagatttaggaagattaattacagccatggttactccatttaaagataatggagatgttgattatgaaagagctaaagaatttgctaaagctcttgtagatactggatctgatggacttctcattggaggaactactggagagtcaccatcaatgaatgaagatgaaaaacttcagctatttaagtcagttaaggaagctgttggggatacagcatcggttatagcaggaacaactgataataatactatagcctctgtagatttatctcagaaagct

SEQ ID NO: 284771 - DNA, 496 bp, Unknown
  Bacterial polypeptide expressing nucleotide sequence isolated from the Sargasso Sea
tactaatttaccaattatggcttacaatattccaggtagaacgggcacgcttattgaactagatactttagaaaaattagtgaatgatatctctatacattcaattaaagatgcagtaggcgacttaaaattttctaaagatcagattgatttaattggtgataaagtaaaaatttactcaggagacgatgcattaacctatgattttgttaaaaatggtgcagtaggtgttgtatcagttgcatcacatgtagttggtaatgaaatatctcaaatgattagccttattaagtcaggcgatattgatcaagcagaagaaattaatacttcattacaagaattcttttcattaatatttgaagaacctagccctggtccaatcaaggatattttatctcaaacctgggaggatgtagggatgcctttattgcctattacatctataagtggtgatttaagcttgaaattaatggataattataaaaaaatacaataa

SEQ ID NO: 284772 - DNA, 181 bp, Unknown
  Bacterial polypeptide expressing nucleotide sequence isolated from the Sargasso Sea
catgttcaaaggttcaatcgtcgccctgatcaccccctttcgacagggcaagctggatgaagaggcgctggcgcgtctggtggagtggcatatcgaacagggtacccacggcatagtgccggtgggcaccaagggcgagagcccgatcctgacccatgacgaacactgccgggtagggagc

SEQ ID NO: 284773 - DNA, 748 bp, Unknown
  Bacterial polypeptide expressing nucleotide sequence isolated from the Sargasso Sea
tacaggtgagtcaccaacactatcacattatgaacatgaaaaaatagttgaggaatgcataaaagttgcagataatagagttcctgttattgcaggcgctggatcaaattcaactcaagaggcttgcaagcttgctaagcatgctgcaaaagcaggagcacaagcgattcttgttgtaactccttattataataagccaactcaagatggcttatactctcattttatgactgttgctgatgctgcaaaaattcctttaattgtttatgatatacctggaaggtcaataatacctgtgcatgatgaaacattagtaaaactttgtgagaataatgaattaatagatggtattaaagacgctactgctgatatttcaaggccgccaagacttttaaggttaattggaagtggtttttctcaactctcaggagaagatgcaacagcattaccctatttagctgcaggtgggcatggttgtatttcagtttcatcaaacattattccaaatttattgtcagaaatgcataattcttggaaaaatggtgattttaaaaatgcattttatattcatctgaaattgataaatctacatgatgcgatgttctgtgaaagtagcccaggtcctgttaagtttgctgctgaaaaaataggcttatgtaactcagaggcgaggttgcctattgtaaaaatttcagaaacaagcgaaaatcaagttttgtctgccttagaagaatgtaagttaatttga

SEQ ID NO: 284774 - DNA, 628 bp, Unknown
  Bacterial polypeptide expressing nucleotide sequence isolated from the Sargasso Sea
tatgagcgatttcggcaagctattaacagcagtcataactccttttgataacaatggggtgcttaacaccgatactttgtggagaatatgtaaaaaattagttcacgaaaaatctgacggcttagttttatcaggaacaactggtgaatcaccaaatttaacaaaagaagatagaaaaatcatctattcaactgctaaagattccgttggaggtaaggcaaagataatagctggtaccggtacatactctactaaagaatctatagagtatacaaaaatggctaatgacataggtgtcgacggcataatgattgtgacaccgtattattcaaaaccatcacaatttggaattttgcagcattttgaacagatttccaaaaatactgacttaccaattatggcatacaatattcctggtcgaacagcgtcgttaattgaaattgaaactttagaaaaacttgttgatgatattgggatacattccataaaagatgctgtaggggatttggaattctctaaaaatgaaatagagatacttaacgataaagttgatatttattcaggtaatgatggtgagactatagaaaatgtgaagatgggtggaaaaaggtgttgtctccagttgctt

SEQ ID NO: 284775 - DNA, 781 bp, Unknown
  Bacterial polypeptide expressing nucleotide sequence isolated from the Sargasso Sea
gattgtctgcggaaccaccggggaaggttatttgatggattgggaagaacacctgatgctcatcgcccacagtgtcaaccgcttcggtgatgaactcgtgatcgtcggcaataccggcagcaacaacacccgtgaagccctgaaagccacccattacggttttgccttcggtatggatgcctcactccagatcaatccctactacggaaaaacgtccgaaaaaggactcagggaacactttaaccgtgtgctcgaccttggccctgccatcatctacaacgtgtcttccagaaccggtcaggacctccaaccggaacttatcgaatccctggcggaacactccaacctcgtcggcgtcaaagaatgttccggaaacgaaagaatgggttactacgaatctaaggggattgcctgctggtccggaaatgatgaccaatgctttgaaggccgtcaccgaaatcaatcccatggagtcatttccgttattgcaaacctgttaccagggttgatgcgcaaactcatggatgatgataactccgaactcaaccaaaggctgcagcccctgatggcgtggctctttcacgtgccgagtcccaatgccctgaataccgctatggccatgaccggcgccgcccctccggtctttcgcttgccctatgcccccctggactccaatgccaggcaggaaggatttcagcttctcaatgctttttctgatgaagaaagagtcggcaatactctgaaattgatggatgattcggaatttgaactgagttgctga

SEQ ID NO: 284776 - DNA, 715 bp, Unknown
  Bacterial polypeptide expressing nucleotide sequence isolated from the Sargasso Sea
agataggaaaataatttattcgacagctaaagactctgttggagacaaagcaaagataattgccggaactggtacgtactctactagagaaactatagagtatacaaaaatggcgaatgacataggtgttgatggaattatgattgtaactccgtactattcaaaaccttcacaatttggaattttgcagcattttgaacagatttcaaaaaatactgacttaccaattatggcttacaatattcctggaagaacagctactttaatagaaattgaaactttagaaaaacttgttgatgatattgggatacattccatcaaagatgcagtaggtgatttggacttctctaaaattgaattagatgctcttaaggaaaaagttgacatctattcaggaaatgacgctgagacgatagagttcatgaagttgggtggtaaaggtgtagtctcagttgcttcacatattgttggaaatcaaatatacgagttaataaatcatgttcttaatgatgagattgaatcagctgaacacttgcaaaatcaactgttacctctttttgatttattatttgaagaacctagtcctggcccagttaagtacttacttacacaaacgtgggaagatgttggagcacctctgatgcctattactaatatttctgacgatttagccaataaattactggataatttccaaaaaattaagaataattaa

SEQ ID NO: 284777 - DNA, 238 bp, Unknown
  Bacterial polypeptide expressing nucleotide sequence isolated from the Sargasso Sea
atttctcagatctgtaaatttaatttgaataaagaatttgataaagcaatcgatttaaacaaaagattctttaatctatatgatcttttattcgttgaatctaatccaattcctgtaaaatgggcattagaaaaaatgaaaaaaattgattctggaattagactcccactcgtttctttaaaaaaagtttttcatgaagaaatttccaacgaattatcaaaattagaactaatatgaa

SEQ ID NO: 284778 - DNA, 694 bp, Unknown
  Bacterial polypeptide expressing nucleotide sequence isolated from the Sargasso Sea
tgatatcgcagttcaagaatgtaacggaaagattcctgtaatctctggtactggctcaaactctacatctgaagctattgaattgtccaaatatgccgagaaagcaggatcagatgcattgctggttgtcacgccttattataataaaccaactcaagaaggtttgtatcaacattataaaaaaattaatgataacgtaggtatacctattattatttataacattccttctcgttctgttatcgacatgtcagtagaaacaatgacaaaactatatgaattaaaaaatataataggcgtcaaagatgcgactggaaatctaaatagagttgatcaacaacttaaagcaatgggaaaagaatttgtacagttaactggtaacgacgataatgctcttgaatttaataaaagaggtggaacaggagctataagtgtaactgcaaatatagcagctaaattatgttctgattttcaaaattcttgtgctaataattttaaagagtctgaaaagctagataaaattttacaaccagttcacgcagcaatgtttatagaaagcaatccgtcaccagtaaaatatgcagcttcacttctaggcatgtgtgatccagatgttagattacctttagttcaagttaaagaagaaactaaaaaaaaagtatctgaagctcttaaagtagcaaatatactttaa

SEQ ID NO: 284779 - DNA, 544 bp, Unknown
  Bacterial polypeptide expressing nucleotide sequence isolated from the Sargasso Sea
catgacagtcttgttcaaagggatcattcccgccctcatcacgccgatgacggcatcggaagaggtcgatgaagcgggtttgcgcgcactgatcgaacgcctgatcgaggccggtgtgcatgcgctgttcgtgctcggcaccaacggcgaattcatcgcgttgaacgaagcggagaaactgcggatcgcgacaatcgccgtcgaccaggcgcgctcgcgtgtgccggtgattgccggtaccggcgcgtatgccacgcgcgacgtgatcgatctgaacagcaagatgctcgacgtgggcgtggatgcggtgtcggtgatcacaccgtatttcaacggcgcgacgcagccggaactgttcacgcactatgaacggatcgcacgggccaccaccttgccggtgatgctctacacgattcccgcgaaggccggcatcaccttgaccgtggacacggtgcgccgcctggccgagatccccaacattcgcggtatcaaggatagcggtggggatttcgaccgtttgctgcaactgatcaatctgcgccgc

SEQ ID NO: 284780 - DNA, 342 bp, Unknown
  Bacterial polypeptide expressing nucleotide sequence isolated from the Sargasso Sea
tatgttcacaggatcaaatgttgctttagtcactccgtttaaaaatgataaacttgatgatgaaacttacattaagttaatccattttcatattgaaaatgggacaaatggtttggtacccgctggaacaactggtgagtccccaactttaagccatgatgagcatgaaagagtaattgatttatgtgtcaaggaaagtaatggaaaattgcctgtatttgctggcacaggttcaaactctactgaggaagcaatttcactgacaactcatgctgaaaaaatgggagcagatggagctttaatcgtcacaccatattataacaaacctacccaagagggact

SEQ ID NO: 284781 - DNA, 643 bp, Unknown
  Bacterial polypeptide expressing nucleotide sequence isolated from the Sargasso Sea
ataggaagctcgtctacattagaagcctgtgagcttgcagatgtagctttaaaaaataatataaatgaatgtttagcagtaacaccttactacaataaaccttctcagaaaggactgtctcttcactatcaagaattgtgcaaaacaggggctaatataatgttgtataacgttcctggaagaacaggagtcgatcttttacccagaactgttcttgagcttgctgaaatagagaatatcacaggtataaaagaagctgtaaatactgaggacagatttagagatctattagaagtaaaagcaattaggcctgaatttttattgctgtcaggagatgacccaacattcgttagttttatgagagagggagcagatggaattatttctgtggccgcaaatgtaattcctaaacaaataaaagaattaagcgatttatgtttttctaaaaaatttgaagaggcaaaaacaattaatgagaaatatttaaatttttatgaacttttatttacagaagcaagtccaagtccttgtaaattcttacttgaaaaaatgtcgttactagagaataatcttagattacctttacacccactttcagaggaatttagggaaaaaatatatgaagcttttaataaaatttagt

SEQ ID NO: 284782 - DNA, 190 bp, Unknown
  Bacterial polypeptide expressing nucleotide sequence isolated from the Sargasso Sea
atgttcaaaggatcaaatgttgctttaattacaccatttaaaaataatggtttagatgaggaagcatatataaaattaatccatttccacattgataatggcaccaatggacttgtcccagcgggcacaacaggtgagtctcccacattaagtcatgatgaacaccaaagagtaatagatttatgtataa

SEQ ID NO: 284783 - DNA, 649 bp, Unknown
  Bacterial polypeptide expressing nucleotide sequence isolated from the Sargasso Sea
gattgagggggtagtagaggtggcggaaagacgatttgacaacgccttctgtgcggtgcgtccgccgggacatcatgcagaaaatgattatgcaatggggttttgtttttttaacaacattgctcttgccgctgaatttttatgctcagagatgggtttcaagcgtatactgatttttgattttgatgtgcatcatggtaacgggactcagcatctatttgaggagcgcgatgaggtgtatttcgtaagcatgcatcaagatcctcgtacctgttatcctggaactggttatgcagatgaaaggggaatgggtggaggtgccggatatactctgaatgttcctgttatagccggaacgggagacgatgaatatttgcagattttttatgatcgagtacagccgaagatggaagaatacaaaccggactttattttagtttctgccggatttgacgcgcatagggacgatcctctggcctcacttaacctaacagaacatgcatacatggtgttgacgagtgaactcaaaaaaatggctgagaagtttgcggaaggcagaattataagcatgcttgaaggaggttatgatttaaatgcactttcatccagtgtccgggaacatttgaatattttacagtcagaggattaa

SEQ ID NO: 284784 - DNA, 163 bp, Unknown
  Bacterial polypeptide expressing nucleotide sequence isolated from the Sargasso Sea
aaatgaaattttatttgttgagtctaatccaattccaataaaatggatgttaaatagaattggtagaatcactgacggcattagattaccattaactaaatttgattcacaattccatgctcaagcagaagatattcttaaagaattaaatttactcaattaa

SEQ ID NO: 284785 - DNA, 181 bp, Unknown
  Bacterial polypeptide expressing nucleotide sequence isolated from the Sargasso Sea
ttgaacggatcgcttaggcaaggaagcccaaaatttaatggctcaatgacagcattaattacaccttttgaaaatggtgaattagatttaaaatcattcaaaaaaattgttaattttcaaatagataatggaacaaatggccttattcctgtaggcactacaggtgagtctccaactctat

SEQ ID NO: 284786 - DNA, 592 bp, Unknown
  Bacterial polypeptide expressing nucleotide sequence isolated from the Sargasso Sea
aggtgtcgacggcataatgattgttactccatattattcaaaaccatctcaatttggaattttgaagcattttgaagaggtttctaataacactgacttaccaattatggcatacaacattcctggtcgaacagcaactttaattgaaattgatactttagaaaaacttgttgatgatattggaatacattccatcaaagatgcggtaggggatttggaattctctaaaaatgaattagaagcactaaaagataaagttgatatttattcaggtaatgatggtgagactatagagttcatgaagatgggtggaaaaggtgttgtctcagttgcttcccatgttgtcggaaataatatttacgatttaataaaccatgtacttaatgatgaggttgaatcggctgaacacttgcaaaatcaacttttacctctttttgatttattatttgaagaaccaagtcctggtccagttaagtacttacttacgcaaacgtgggaagatgttggatcaccattaatgcctataacggacatttctagtgaattagccaataaattattggataatttccaaaaaattaagaataattaa

SEQ ID NO: 284787 - DNA, 711 bp, Unknown
  Bacterial polypeptide expressing nucleotide sequence isolated from the Sargasso Sea
aaaaggttgtggagctttgcgtagaagaagctaatggccgtgtttcggtaatcgctggagcagggtcgaactctacagcggaggcaatcgaatttacaaagcatgctaaagctgctggtgctgatgcagcactccatgttacgccgtactataataaacctacgcaagaaggaatgtatcgccattttatgaccatagcggatgcggtggatcttcctattatcatttacaatattccgccaagaagtgtaattgatatgagcttgggtactatgaaacgcttgtcggagcattccaatatcgtgggagtaaaagatgctacccaggatttggttcgtccattagctactcggctagagataggaccagatttctgccagctctcgggtgaagatgcgacaattgtcccttatctttctcagggcgggcacgggtgtatatctgtcacttgcaatgttgcacctgggccgctttcaaaaatgcataaagcttggcaaaagggtgatttggatacagttcgtgaaattaatgataggttgctacctcttcatgatgcgttattttgtgagacaagcccggggccagtgaaatatgcagcccatcttctaggtctttgctcacctgacgcgcggttacctatttgtgaaattgcagaagacagtaaaacaaaggtagcggcggcaatgcggcatgcaggtttaatcaattaaa

SEQ ID NO: 284788 - DNA, 205 bp, Unknown
  Bacterial polypeptide expressing nucleotide sequence isolated from the Sargasso Sea
atgttcaaaggatcaaatgttgctttaattacaccatttaaaaataatggtctagatgaggaagcatatataaaattaatccatttccacatcgataatggtactaatggacttgtgccggctggtacaacaggtgaatcgcctacgttaagtcatgatgaacatcaaagagtaatagatttatgcataaaagaaagtaatggaa

SEQ ID NO: 284789 - DNA, 279 bp, Unknown
  Bacterial polypeptide expressing nucleotide sequence isolated from the Sargasso Sea
cttgttacaaggtagcattgtcgctttagtcactccaatgcatgcagatggcagtattgattgggaagcgcacgagaggttggtccaatggcacgttgagtcagggactgccggtatagtgccgatgggcactactggagagagcgcaaccctcaatacgcaagaacatctggaggttataagtagaaccattcaactcgccaacggaagaatttctgttgttgcaggaactggaagtaattcaacggaagagaccttgcatcagacgaaagaggcaga

SEQ ID NO: 284790 - DNA, 643 bp, Unknown
  Bacterial polypeptide expressing nucleotide sequence isolated from the Sargasso Sea
acatattcaactaaagagtctatttgagtatacaaaaatggcaaatgatttatgtgtagacggaataatgattgttacaccttactattccaaaccatcacagtatggaatattaaaacattttgaacttatttctgaaaatacagagttaccaatcatggcttacaatattccaggtaggacagctactcttattgaacttgcaaccattgaaaagttggtcgatgacgtagggattcattctataaaagatgcagttggagatttggagttttcaaaattggaattagaagcattaaaagacaaagttgatatttactccggtaatgattctgaaactatagagtttatgaaaatgggtgcaaaaggggttgtttctgttgcgtcacatattgtaggcaaagaaatctatgaattaattgaatccgtaagttcagatgaacttgaatctgctgaacaaatgcaaaaaacacttcttcctatgtttgatatgttgtttgaggaacctagtccaggacctgtaaagtttcttcttacagaaacttgggaagatgttggatcacctttaatgccaattaccgacataactcctgatttagccaataaattattacaaaattataaaaaaattaaaaaagattaa

SEQ ID NO: 284791 - DNA, 211 bp, Unknown
  Bacterial polypeptide expressing nucleotide sequence isolated from the Sargasso Sea
atgtttaaaggttcaaatgtagcacttataacaccattcaaagataataatctagatgaagaaaattatataaaattaataaattttcatcttgaaaataatacaaatggtttagttcctgcaggaacaacaggagaatctcccactttaagccatagagagcatgaaaaagtaatagaaatttgtataaatgaagtaaaaggaaaaatcc

SEQ ID NO: 284792 - DNA, 446 bp, Unknown
  Bacterial polypeptide expressing nucleotide sequence isolated from the Sargasso Sea
gatggatgattgctctgccagtatcgtagctttagtcacaccactaaactatgatcatgaagttgatttgttagccttaaagcgtattttagatttacatgtagaagctggcacagaaggtattgttttatttggctctacgggtgagggtgttttattatcaacaaatgataggcgcacaatcctgagctatatctttgaggagtatcatctaaacattcctgtttgggttacatgcactcacccttgtgtgtctactgtactgtcattaatctctgagagtaaggactttccaatagagggtgtcatggttgcatgcccaatgtacataaaacccagtcaatcaggattaattcaatatttttcaacgattgcagatcaagcacatgtaccagttatgttgtataacgttccaagtcgaactgggtgttcgcttttgcctgaaa

SEQ ID NO: 284793 - DNA, 289 bp, Unknown
  Bacterial polypeptide expressing nucleotide sequence isolated from the Sargasso Sea
gggcggcaagggcaatatctccgtcaccgccttcgttgcgccgcgtgccatgagcgatctgtgcgccgccgccatgcgtggcgaggctgccatcgcccgtgccatcaacgaccgtctgatgccgctgcacaaggcactgttcctcgaatccaacccgattccggtgaaatgggcgctgcacgaaatgggcctgatgggcgacggtattcgtctgccgctgacctggctcagcccgcgctgtcacgaaccgctgcgccaggccatgcgccagtgcggtgtattggcttaa

SEQ ID NO: 284794 - DNA, 433 bp, Unknown
  Bacterial polypeptide expressing nucleotide sequence isolated from the Sargasso Sea
tttgcataaaaatataataggcataaaagatgcaacaggagaattgaaaaatttagaagagattcagagactatgcgaaaaacaaatttcggaagaaaattttttcttatattcaggtgatgatgcttcttcttgcgagtttatgaaaagagggggacatggaacaatttcagtgtcctcaaacattgtaccaaaacttgtttctgaaatgacaaaattagctatgagtaaaaataaagaagcagaaaaaataaataaaaaaatcgatacactcaataaagttctttttgtagagtcaaatccaattcctgtaaaatatgctttatatttgatgggtttagctccattaggtattagattgcctcttacagttcttgatcaaaaatatcgagagaatttaaaacaggaacttataaagttacagttaatataa

SEQ ID NO: 284795 - DNA, 562 bp, Unknown
  Bacterial polypeptide expressing nucleotide sequence isolated from the Sargasso Sea
tattataataaaccaacacaagagggactgtaccagcattacaagtctattaatgatagtgttggtattccgattatcatttataatataccttccagatctgttattgatatgtctgtagatacaatggccaggttatatgagttaaaaaatattaaaggtgtaaaagatgctacaggtgatttaaatagggtgactatgcagcttaacaaaatgggaaaagagtttattcaattaacaggagaagatgataatgcgcttgaatttaataaaagaggaggagtcggttgtataagtgttactgctaacgttgcaactaaactttgtgctgattttcataaagcttcattatcgagagataatgaaaccgcgcaatcgatcaataagcttttatctccattacacaaagcactcttcattgaaagcaatccttcaccagtaaaatatgctgcatctcttttaaaattatctctagctgatgtaagattacctttagtacaagttacagagaatacaaaaaaagaaatagaaaaagcgcttaaatttgcaaaacttctctaat

SEQ ID NO: 284796 - DNA, 283 bp, Unknown
  Bacterial polypeptide expressing nucleotide sequence isolated from the Sargasso Sea
tctgtaggtgctgtaggagtagtaagtgttgcaagtcatttagttggattgcaattgaaagagatgattagttcctttcaaagtggagaggtttccaacgctcttgatattcacgaaaaacttcagcctcttttcaaagcactctttatgactactaatccaataccaattaaggctgctttggagcaatctggatggaatgtaggtaatcctagaagtcctttgtcaccattaagcaatgacatgaaaaagcaactatcttttatcctgaaatccctataat

SEQ ID NO: 284797 - DNA, 361 bp, Unknown
  Bacterial polypeptide expressing nucleotide sequence isolated from the Sargasso Sea
gaagcaaaggaaattggagaattctatttatattctggtgacgatcctactgcaactagttttatccttaacggaggaaagggcacaatctcagttacagctaatattgttcctgaaattatttctgaaatttgtaaactgtctcttgatggtgattctcaaggagctttagatctcgacagcaagctcgaagagttgaacgaaatgctgtttgtagagtctaatccaatacctataaaatggcttttaaacagaattggaagaatttctgacggaattaggttgcctttatcgccctttagtcataaatatcacaatgatgcggaagaaatccttaaaaaattaaatctattaaattagc

SEQ ID NO: 284798 - DNA, 146 bp, Unknown
  Bacterial polypeptide expressing nucleotide sequence isolated from the Sargasso Sea
tatgttcaaaggatcaaatgttgctttaattacgccgtttaaaaacaatctattagacgaggaagcttatgttaaattaatacattttcatattgaaaatggaactagtggtcttgtgccagcaggtaccacaggagaatctccaa

SEQ ID NO: 284799 - DNA, 218 bp, Unknown
  Bacterial polypeptide expressing nucleotide sequence isolated from the Sargasso Sea
aatgtttaaaggaagtataccagcattaattacgccttttgctaatggggaagtagattatttatcatatgaaaaattaattgaatggtcgatttcagaaggttcacatggatttgtaccttgtggcactacaggagagtctcctactttatctcacaatgaacacaaaaaaattatagaaagttgtattaagtgtgttgataaaagagtgccagtaa

SEQ ID NO: 284800 - DNA, 358 bp, Unknown
  Bacterial polypeptide expressing nucleotide sequence isolated from the Sargasso Sea
tcagaacgcaaagatgattttttactctattcaggagacgatccaacatcaactcaatttatattaaatggaggagcaggaactatctctgtcacagcaaatattgttccaaagattatttccgatatatgtagtcttgctttagatggtcaaaaagattccgcacttcaacttgataagcaattggttaaattaaatgaaattttatttgttgagtctaatccaattccaataaaatggatgttaaatagaattggtagaatcaccgacggcattagattaccattaactaaatttgattcacaattccatactcaagcagaagatattcttaaagaattaaatttactcaattaaa

SEQ ID NO: 284801 - DNA, 181 bp, Unknown
  Bacterial polypeptide expressing nucleotide sequence isolated from the Sargasso Sea
tatgtttaaaggttcaaatgttgcattaattactccatttaaaaataacaagttagatgaggaaaattatatcaaattaattgattttcatctaaaaaatggaacaaacggactggtgcccgcaggtaccactggagagtctccaactttgaaccataaagagcatgaaaaggttatagaa

SEQ ID NO: 284802 - DNA, 214 bp, Unknown
  Bacterial polypeptide expressing nucleotide sequence isolated from the Sargasso Sea
tatgttcaaaggatcaaatgttgctttaattacaccatttaaaaataatggtctagatgaggaagcatacataaaattaatccatttccacatcgataatggtactaatggacttgtgccggctggtacaacaggtgagtcccctacgttaagtcatgacgagcatcaaagagtaatagatttatgtataaaagagagtaatggaaaaattcct

SEQ ID NO: 284803 - DNA, 639 bp, Unknown
  Bacterial polypeptide expressing nucleotide sequence isolated from the Sargasso Sea
aagccactcgttacggttttgccttcggtatggatgcctccctccagatcaatccctactacggaaaaacgtccgaaaaagggctaagggaacactttaaccgtgtgctcgaccttggccctgccatcatctacaacgtggcttctagaaccggtcaggacctccaaccggaactcatcgaatccctggcggaacactccaaccttgtcggcgtcaaagagtgttcaggaaacgaaagaatgggttactacgaatcaaagggaattgcctgctggtcgggaaatgatgaccaatgcttcgaaggccgtcaccgaaatcaatcccatggagtcatttccgttattgccaacctgttaccagggttgatgcgcaaactcatggatgaggataacactgaactcaaccaaaggctgcagcccctgatggcgtggctttttcatgtgccgagtcccaatactctgaataccgccatggccatgaccggcgccgcccctccggtctttcgcttgccctatgcccccctggactccaatgccaggcaggaaggaattcagcttctcaatgctttttccgatgatgaaagagtaggcaataccctgaaattgatggatgactcggattttgaattgagctgctgaa

SEQ ID NO: 284804 - DNA, 532 bp, Unknown
  Bacterial polypeptide expressing nucleotide sequence isolated from the Sargasso Sea
tttgcaacattttgaacagatttcaaaaaatactgatttgccaattatggcttacaatattcctggaagaacagcaactctaatagaaatcgacactttagaaaaacttgttgatgatatcggaatacattcgataaaagacgcagtaggggatttaaatttttctaaaactgaactagaagtacttaaggacaaagttgatatctattcgggtaatgatggtgagactatagagttcatgaagatgggtggaaaaggtgtagtctctgttgcttcacatgttgttggaaatgaaatttttaatttaataaatcatgttcttaacgatgagattgaatctgctgaacaattgcaaaatcaacttttacctttttttgatttattatttgaagaacctagtccaggtccagtcaaatacttacttacagaaacttgggaagatgttggatcacctctaatgcctatcactaacgtttcagacgatttagcgagtaaattattagaaaatttccgaaaaattaagaataattaa

SEQ ID NO: 284805 - DNA, 564 bp, Unknown
  Bacterial polypeptide expressing nucleotide sequence isolated from the Sargasso Sea
ctacacaagagggtttgtatcaacattataaagcaattaatgacaatactaaccttccaatcataatttataatattcctagcagatgtgtaattgacatgtctgttgatactatggcaaggttgtttgaacttaaaaatattgcaggggttaaagatgcgacaggtgatttgagtagacttgacgaaacaataaaaaaattaggacatgaatttattcagctaacaggagaggatggtttagcttttgaatttaacaagagaggtggagtagggattatttctgttacagctaatatagcacctaagctttgttctgatttccaaaaatattcaaaatctaaatctgataatgaaataaaagaggctgaaagaattgatcaaatattacaaccattgcataaatcactttttattgaaagtaatccagcacctgttaaatatgcagcaaaacttcttggattatgtgatgataaggttagattgcctttagttgaggttgcagacaaaacaaaagaagaagttaaaaaatcacttttatcagcaaaattaattaatgattaaa

SEQ ID NO: 284806 - DNA, 181 bp, Unknown
  Bacterial polypeptide expressing nucleotide sequence isolated from the Sargasso Sea
atgtttaaaggttcaaatgtagcacttataacaccattcaaagataataatctagatgaagaaaattatattaaattaattaattttcatttagaaaataatactaatggcttggtaccagcaggaacaactggtgaatctcccactttaagccacaaagaacatcaaagggttatagagc

SEQ ID NO: 284807 - DNA, 211 bp, Unknown
  Bacterial polypeptide expressing nucleotide sequence isolated from the Sargasso Sea
atgaaatatcaaggatcttattgtgcactaataacaccttttaaagatgataaatttgatgaaaagggctttattaaaataattgaatggcacattaagcaagggactcagggaattgtgccttgtggcactactggagagtctccaaccttaagccatgacgagcataaaaaagtagttgaattagcagtagaaacatctggtgggtcac

SEQ ID NO: 284808 - DNA, 295 bp, Unknown
  Bacterial polypeptide expressing nucleotide sequence isolated from the Sargasso Sea
atgttattttcaggttcttatacagcacttttaactccattttctaatggtaaagttgattataattcttataaaaaactaattgaacatcaaataactaatggtacgcatggattagtaccggttggaacaactggtgagtctccaactttaacccatgaagaacataaaaaagttattgaagtttgtattgaacaagtgaatgggagagttcctataatagcaggagcaggttctaattcaactgttgaagctattgattttgttaaacatgcttgtagtgccggagcagatg

SEQ ID NO: 284809 - DNA, 342 bp, Unknown
  Bacterial polypeptide expressing nucleotide sequence isolated from the Sargasso Sea
aatttatgatttattctggagatgatcctaccgcaacgcaattcatgttaaatggaggttcaggaaccatatctgttactgctaatgttgttccgtcgattattgctgaaatatgcactcaagctttatcaggggagagtaagaaagctattgagttgaatttagaaatagagcaacttaatgaaattttattcgttgaatctaatcccattcctgtaaaatggatactaaacagattgggtaggattccaggaggtttaaggctacctctggtggaattagatgataaatttcacaatcaagctgaactaatattaaaagaattaagtctacttaattaaa

SEQ ID NO: 284810 - DNA, 529 bp, Unknown
  Bacterial polypeptide expressing nucleotide sequence isolated from the Sargasso Sea
gagcattacaaatctattggctgataattcaaacataccaattataatttacaacatacctggtaggtccattgtagatatgtctatagatactatgattaagttatcaaaattaaaaaatattgtaggtgttaaagatgctacaaatgacttattcagaccagttttaactagtaaaagaatgaacagtaatttttgttatttatcaggtgaagatggaactgctttagcttatttggcacaaggaggtcatggatgtatttcagttaccgctaatatagcaccaaaattatgttcagaaatgcaccaacaatggagagatggaaatataactaaagctcaagaaataaatttaaaattagcaagtctgcataatgctctatttttagagtcaagtccagggcctgttaagtatgccgctcatttaaaaggtctttgtgaaccagatactagattacctcttgttgaaattaatgacaaaacaaaggcagaggtaaaaaattgtttaaaagataacgacttgatttaa

SEQ ID NO: 284811 - DNA, 502 bp, Unknown
  Bacterial polypeptide expressing nucleotide sequence isolated from the Sargasso Sea
aattataatttacaacattccgccacgatcagttgtagatatgtcagttgatacaatgtctagactttttgagttaaaaaatattgtgggagtgaaagatgctacaggaaatttagatagagtagatgagcaaagaaaaaaaatgggacctgattttattcaattgtctggagaggatggtacggcgttagagtttaatatgagaggaggttgtggttgtatatcagtaactgctaatgtagcaccaaaactatgctctgaatttcaagaagcttcgatagcaaaaaataatagcaatttgctttccaaagctaaaacgattaatgaaaagttaatgccacttcataaatcattatttatagaaagtagtccaagtccagtaaaatatgcgacgagcttactaaatttatcatcagatgaagttagattacctttagttaaaattactgacgaatcaaaaaaagcagtaaaatctgcaatgttatatgcaaatttactttaa

SEQ ID NO: 284812 - DNA, 682 bp, Unknown
  Bacterial polypeptide expressing nucleotide sequence isolated from the Sargasso Sea
aaagactctgtaggggataaagcaaaattaattgcaggaacaggtacttactcaactaaagaatctattgaatatacgaaattagcagaggatttaggaatggatggcataatgatagtcactccttattattcaaaaccatcacaatatggaatattaaaacattttgaagcaataagtaacactacaaatttaccaattatggcttacaatattccaggtagaacgggcacgcttatagaactagaaactttagaaaaattagtgaatgatatctctatacattcaattaaagatgcagtaggcgacataaaattttctaaagatcagattgatttaattggtgataaagtaataatttactcaggagacgatgcattaacctttgattttgttaaaaatggtgcagtaggtgttgtatcagttgcatcacatgtagttggtaatgaaatatctcaaatgattagctatattcagtcaggcgatattgatgaagcagaagcaattaatacttcactacaagaattcttttcattaatttttgaagaacctagccctggtccaatcaaggatattttatctcagacatgggaggatgtaggaatgcctttattacctattacatctataagtgatgatttaagcttgaaattactggattattataaaaaaatacaataaa

SEQ ID NO: 284813 - DNA, 275 bp, Unknown
  Bacterial polypeptide expressing nucleotide sequence isolated from the Sargasso Sea
aatgttcaatttacaaggttcaattgtcgctttagtaaccccgatggaaacggacgggaagattgactggcaagctttaaaagatttgattgaatggcaaattaactcaggcagtgcagggcttgtaatagtaggcaccactggagaatctgctactttagatgtatcagaacatgttcaagtaatagagaattctgtcaagatagcagatggaagaataaagatagttgcagggactggtgcaaattcaactaaagaagcagtttatttaactg

SEQ ID NO: 284814 - DNA, 313 bp, Unknown
  Bacterial polypeptide expressing nucleotide sequence isolated from the Sargasso Sea
tatgccaattaatttaaaaggaagtatggttgcaatcgttacaccaatgcatagtgatggacagttggatatgtcagcgtttaatagactagttgaatggcattattcagagggaacaagcgccatcgtggtagtcggcactacaggggagtccgcaacgttaagtacgcaagagcattgtgatctcgtttcttcttgcgtagaagcagcgaaaaagcgtattccgattattgcaggcacgggctctaactcgacagaagaggccttgtactttacaagttccgcgaaagagtgtggagccgatgcttgtctg

SEQ ID NO: 284815 - DNA, 544 bp, Unknown
  Bacterial polypeptide expressing nucleotide sequence isolated from the Sargasso Sea
tatggttgcgcactttaacgcaattgcagatgccagcgatcttccggttattctttacaatgtgcctgggcgtacagttgcagacatgttacctgaaaccgtagcagagcttgccacacataagaatatagttggtcttaaagacgccaccggcgatattgcgcgattaaaagcaacacagccccttgttccagaagactttgtaattcttagtggtgatgatggcactagctgtgagtttatgtgcgaaggcggacatggcgttatctctgtaaccgccaatatcgtgcctaaagcaattgcacaaatgtgcgaaactgcactggacaaagaatttgataagtgtcgtgacattgatgcgtctattaagctgcttcacgacgaactatttatagagccaaatccagtaatgccaaagtgggcattatataaaatgggcatgatggaaagcgctgttatgcgattacctatggttttaccggaactatcaagccaaaaacgtatcgaagaactactaaaaaaatacgcattgatttctggttaa

SEQ ID NO: 284816 - DNA, 628 bp, Unknown
  Bacterial polypeptide expressing nucleotide sequence isolated from the Sargasso Sea
atgcagaacggagccgtccaacctagcccgattacgatcgaggtggttggcgccgaccttgagtacgtcgtccgcgaaatgcgttccaccgtgcttcggatggcctactcccccatcctcaccgagacccacgacttcttttgtggcatcaccaacgcgatcggcgagatagtggcgatcaatgtcgacgtcccgttccacatgttcgcctgtaaggacgcggtgaacgcggtcaccgaagcgtacggagacgacatccaccccggtgatcagttctggatgaacgacccctggcaggtcggttcccatttgaacgacaccgcgttgatcactccattcttcgtcgatggcgagatacggatgtgggtgtccgccggggcgcactacggggatatcggggggacagtgcccggcagtgcgagcggcgaatgcaccgagatatttcacgaaggcatccgggtaccggcggttcgatgccgccgaggcgacgagatcaacgaagaattcctgcgcattctcctggctaatgtacgtcagccctttgagtcgaggggtgttttcctcgcccaatcgaacacaaccctgctcgcgcaaaagcgtatgacaaagctctacgagcgctacggcg

SEQ ID NO: 284817 - DNA, 562 bp, Unknown
  Bacterial polypeptide expressing nucleotide sequence isolated from the Sargasso Sea
acctactcaagaagggctatatcagcattataaaaaaattaatgataatgttggactaccgatcattatatacaatattccttcaagatcagttatagatatgtcggtaaatactatgtcaagattatatgaattaaaaaatattataggagttaaagacgccaccggagatttgaaaagagttgatcaacaattaaaaagtatgggaaaagattttttgcaattaacaggagaagatggaaatgctttggaatttaataaaagagggggcaaaggttgtattagtgttacagcaaacgttgctgctaaactctgttctgattttcaatcagcatcattgtctcataatgatgatgagaaacaggctaaagccaaagagatagacttagcccttgcccctttgcataaagctttatttatagaaagcaatccatctccagtaaaatatgcagcttctttgctgaagctatcttctgaagatgtccgcctacctttagttaaagttaaagaggaaactaagattttaattaaagaagcacttaaagttgctaaattactttaa

SEQ ID NO: 284818 - DNA, 277 bp, Unknown
  Bacterial polypeptide expressing nucleotide sequence isolated from the Sargasso Sea
atgttttttggaagtatacctgctgtaattactccttttaaagattatgaagtagattataattccttaaataatatagtaaatcatctaattgataatggatctaatggtcttgttccgtgtggaacaactggggagtcaccaactttatcacatgaagaacataaaaaaataatcgaagaaacaataaggatctcagataaaagagttcctattatagcaggaactggctctaataatactgctgaggctattgactatactaaacatgctgaaa

SEQ ID NO: 284819 - DNA, 220 bp, Unknown
  Bacterial polypeptide expressing nucleotide sequence isolated from the Sargasso Sea
ctctggtgccgacggtgctttggtcgttgttccttattacaataagccacctcaagaaggtctttataaacatttcagttctattgctaattctgcaaaggatttgcctcttatgctttataacattcctggaaggacaggatgtaatttattacctgatactgtgaagaaacttatggatttctcaaatattctcagtattaaagctgcaagtcggtag

SEQ ID NO: 284820 - DNA, 160 bp, Unknown
  Bacterial polypeptide expressing nucleotide sequence isolated from the Sargasso Sea
atgtttaaaggatcaaatgttgcgttaataacaccatttaaagataataagctagatgttgaagcttatattaaaataatacattttcatttaaaaagtggaacaaatggcttagtccctgctgggaccacaggtgaatctccaaccattaaatcatgaa

SEQ ID NO: 284821 - DNA, 667 bp, Unknown
  Bacterial polypeptide expressing nucleotide sequence isolated from the Sargasso Sea
atggttgaatttggtaaactaataaccgcagcaataactccatttgataaaaatggtgtaatcaacacagatactttatggaggttgtgcaggaaattaattcatgataaatctgaatcattagttctcactggaacaactgcagaatcaccaaatttaactaaagaagatagagaaataatttattcaacagcaaaagactctgtaggggataaagcaaaattaattgcaggaacaggtacttactcaactaaagaatctattgaatatacgaaattagcagaggatttaggaatggatggcataatgatagtcactccttattattcaaaaccatcacaatatggaatattaaaacattttgaagcaataagtaacactacaaatttaccaattatggcttacaatattccaggtagaacgggcacgcttatagaactagaaactttagaaaaattagtgaatgatatctctatacattcaattaaagatgcagtaggcgacataaaattttctaaagatcagattgatttaattggtgataaagtaataatttactcaggagacgatgcattaacctttgattttgttaaaaatggtgcagtaggtgttgtatcagttgcatcacatgtagttggtaatgaaatatctcaaatgattagctata

SEQ ID NO: 284822 - DNA, 898 bp, Unknown
  Bacterial polypeptide expressing nucleotide sequence isolated from the Sargasso Sea
aatgcaactgaataaaattcgtggatcaatccccccaatcattacgccctttgtaaatggagaagtggattataaaacatatgcatcattgattgagcatcaaataaagaatggatctcatgggattcttgtgaatggaactacggctgaaccatcaacattaactctcgatgagagaaataaattaattaacatagctgtggaagttgccaatggaaaaattccagtaattgctggtacaggatctcaatcgataatagaaacaaagatacttaccaatcatgctgttaaggctggtgttgactcattgttgattgtcactccttattatatcaaacccccccaaagaggattaattgaatattatctggaattaacggaaaaaattgatataccttggatgatctatcatattccaggaagaacggctgtaaatgtcactcttgaaacaatgaagatattaagtgataaatcagctaattttgttgggatgaaacacgcggtcaatgatctgggttttgtaacagaatgtctttctgcttttggctctgatttcaagatatttgttggtcttgaggagctttcatttccaatgctaagcattggtgcatgtggcctgatgaatgctgttggtaatcttcgtccaaatattctttctgaaatgtgcgaggcggtatggaacaaaaataatgaaagaggcctagaactgcatcatcaattactcgaaattaatcaagcagtcttttatgacacaaacccaatacctataaaatacatgatgaaaaaactgggcataatgaaaaacaatgaacacagattgccaatgatgtctgctacagtcgagctagaaaaaagactcgatattgttctaagaaatagtggccttttagaggattag

SEQ ID NO: 284823 - DNA, 748 bp, Unknown
  Bacterial polypeptide expressing nucleotide sequence isolated from the Sargasso Sea
tatggttgaatttggtaaactaataaccgcagcaataactccatttgataaaaatggtgtaatcaacacagatactttatggaggttgtgcaggaaattaattcatgataaatctgaatcattagttctcactggaacaactgcagaatcaccaaatttaactaaagaagatagagaaataatttattcaacagcaaaagactctgtaggggataaagcaaaattaattgcaggaacaggcacttactcaactaatgaatctattgaatatacgaaattagcagaagatttaggaatggatggcataatgatagtcactccttattattcaaaaccatcacaatatggaatattaaaacattttgaagcaataagtaatactacaaatttaccaattatggcttacaatattccaggtagaacgggcacacttatagaactagatactttagaaaaattagtgaatgatatctctatacattcaattaaagatgcagtaggcgacataaaattttctaaagatcagattgatttaattggtgaaaaagtaaaaatttactcaggagacgatgcattaacatttgattttgttaaaaatggtgcagtaggtgttgtctcagttgcttcacatgttgttggtaatgaaatatctcaaatgattagccatattcagtcaggcgatattaataaagcagaagaaattaatacttcattacaagaattcttttcattaatattgaagaaccta

SEQ ID NO: 284824 - DNA, 487 bp, Unknown
  Bacterial polypeptide expressing nucleotide sequence isolated from the Sargasso Sea
taatattcctggcagatctgtgattgatatgtcagtggatacaatggctagactctatgaattaaaaaatatagttggcgttaaagatgcaacgggtgatttagatagagttaatcagacacttgaaaaaatgggcaaagattttattcaattaacaggtaatgatgataatgcttttgaatttaataaacgtggtggggtaggtactattagtgtaacagctaatattgcacctaaactttgttcagattttcaaaaattctccaaatcagacaccgataacgaaatgaaagaagcagaaagattagataaaatattacaaccagttcatcactcaatgtttgttgagagcaatcctagtcctgtaaaatatgctgcaaaacttttaggactttgtgatgacaatgtaagactaccacttgtaaaagtaacagacacaacaaaagaaattgtaaaaaaagctcttcagtctgctaagttaatttaa

SEQ ID NO: 284825 - DNA, 229 bp, Unknown
  Bacterial polypeptide expressing nucleotide sequence isolated from the Sargasso Sea
catgacttcccccgctgccctgtctcccacaccctttggccgcgttgtcacggcgatggtcaccccgtttgatgcttcgggtgcggtggatcttcccctggcgggacgcttggctcgtcatcttgtggagcagggttccgatggcctggtggtgagcggtaccaccggtgaatctccccacctgagctggcaggagcagttgcatttgctgcaggccgtgcgtgaggcg

SEQ ID NO: 284826 - DNA, 295 bp, Unknown
  Bacterial polypeptide expressing nucleotide sequence isolated from the Sargasso Sea
gatgcaagcgttaaatggaagtttagtagcattaataactcctatgaatttaaaaggggaagttgattttgactctctagaaaagttaattgaatggcacatagctaatgatactaatggtattgtatcagtaggaacaacaggggaatctgctacattaaaagttgatgaacatttaaaagttattgaacatacggtcaaatgtgtcaatggaagaattcctgttattgctggttctggttcaaattcaactactcaagcaatagagaccacaaccgagtcacaaagaattgga

SEQ ID NO: 284827 - DNA, 211 bp, Unknown
  Bacterial polypeptide expressing nucleotide sequence isolated from the Sargasso Sea
aatgagcagtcttagttctgctccttttggacgtgtgatcaccgcgatggtgactccgtttgcgaccgatggatcccttgatctgccgttggcggcgcgcctggcaaagcatttggtggagaacggttccgatggcctgctggtctgcggcaccacgggtgaatcaccgaccctcagctgggatgagcagttggccctgatcaagaccgtg

SEQ ID NO: 284828 - DNA, 196 bp, Unknown
  Bacterial polypeptide expressing nucleotide sequence isolated from the Sargasso Sea
atgtttaaaggatcaaatgttgctttaattacaccgttcaaaaataatcaactagatgttgattgttatatcaaattaattcattttcatttaaaaaatggtactaacggcttagttccggctggaaccacaggagaatctcccactttgagccataaagagcatgagcaagttatagaattatgtattaaggaag

SEQ ID NO: 284829 - DNA, 316 bp, Unknown
  Bacterial polypeptide expressing nucleotide sequence isolated from the Sargasso Sea
atgattccagacaaaactgagtgtaataatccactatttggaaaaatattgactgcaatggttactccatttactgaaaatggagatgtagattatgaactagctataaaactctcaaattatctttttgagaacggctctgatggaatagttttatgtggcactactggagaatctccgactctttcatggactgaacagcatgatttatttattgcagtaaaaggatctttggattcaagctgtaaagtaattgttggcactggtagtaactgtacaagcgaggccgtggaagctacaaaaaaagcctacgact

SEQ ID NO: 284830 - DNA, 883 bp, Unknown
  Bacterial polypeptide expressing nucleotide sequence isolated from the Sargasso Sea
atgaccgccatcaaaaccccttacaaatccgggggtgagatcgacctggactgttatgacgaactggtcacggaacagatgcgcaatggggtggaagggttgattgtctgcggaaccactggagaaggccatttgatggattgggaagaacacctgatgctcatcgcccacagtgtcaacagcttcggcgatgaactcgtgatcgtcggcaataccggaagcaacaacacccgtgaagccctgaaagccacccgttatggttttgccttcggtatggatgcctcactccagatcaatccctactacggaaaaacgtccgaaaaagggctcagggaacactttaaccgtgtgctcgaccttggccctgccattatctacaacgtgtcttccagaaccggtcaggaccttcaacctgaactcatcgaatccctagcggaacactccaacctcgtcggcgtcaaagagtgttcaggaaacgaaagaatgggttactacgaatctaagggaattgcctgctggtccggaaatgatgaccaatgctttgaaggccgtcaccgaaatcaatcccatggagtcatttccgttattgccaacctgttaccagggttgatgcgcaaactcatggatgaggataactccaaactcaaccaaaggctgcagcccctgatggcctggctctttcatgtgccgagtcccaatgccctgaataccgccatggcaatgaccggcgccgtccctccggtctttcgcttgccctatgccccccttgactccaatgccaggcaggaaggatttcagcttctcaatgctttttcggatgaagaacgagtcggcaatactctgaaattgatggatggttcagattttgagttgagttgctgaa

SEQ ID NO: 284831 - DNA, 748 bp, Unknown
  Bacterial polypeptide expressing nucleotide sequence isolated from the Sargasso Sea
atccccaaccctgaataatgatgaacataaaagagttatagaaatagccgttaaagaaagtaagggaaaaattccagtaatagcgggatctggttctaattctaccgaggaggcggtaaacttatcaaagcatgctgaaaaagctggagcagatgctctactaatagttactccgtattacaacaagccaacgcaagagggattgtatcaacattacaaattaataaatgacaacgttggaataccaattataatttataatattcctcctagatcagttatagatatgtccgtagatactatggctagacttttcgaattaaaaaatattgctggtgttaaagatgctacagcagacttagaaagagttgacaaacaaatgaagaaaatgggtcctgagtttattcaattatcaggagaggatgcaactgcgttagagtttaatatgagaggtggtacagggtgtatttctgttacagcaaatgtagctgcaaaactttgttcagattttcaagatgcatcactagctaaaaataataacaatctattatcaaaagcaaaagaaattaatgaaaaactaatgccattacacaaagctttgtttatagaaagtaatccaagtccagtaaaatatgcagcaagtttattaaatctctcatcagaagaagttaggctaccactagtaaaattaacagaaaatacaaaaaaggaagtacaaaaagctttaaagattgcaaatctgctttaa

SEQ ID NO: 284832 - DNA, 883 bp, Unknown
  Bacterial polypeptide expressing nucleotide sequence isolated from the Sargasso Sea
gatgaccgccatcaaaaccccgtacaaatccgggggtgagatcgacctggactgttatgacgaactggtcacggaacagatgcgcaatggggtggaagggttgattgtctgcggaaccaccggagaaggccatttgatggattgggaagaacacctgatgctcatcgcccacagtgtcaaccgcttcggtgatgaactcgtgatcgtcggcaataccggcagcaacaacacccgtgaagccctgaaagccacccgttacggttttgccttcggtatggatgcctcactccagatcaatccctactacggaaaaacatccgaaaaaggactcagggaacactttaaccgtgtgctcgaccttggccctgccatcatctacaacgtgtcttccagaaccggtcaggacctccaaccggaactcatcgaatccctggcggaacactccaacctcgtcggcgtcaaagaatgttccggaaacgaaagaatgagttactacgaatctaaggggattgcctgctggtccggaaatgatgaccaatgctttgaaggccgtcaccgaaatcaatcccatggagtcatttccgttattgccaacctgataccagggttgatgcgcaaactcatggatgcggataactccgaactcaaccaaaggcttcagcccctgatggcgtggctttttcatgtgccgagtcccaatgccctgaataccgccatggccatgaccggtgccgcccctccggtttttcgcttgccctatgccccccttgactccaatgccaggcaggaaggatttcagcttctcaatgctttttctgatgaagaaagagtcggtaataccctgaaattgatggatgactcggattttgaattgagctgctga

SEQ ID NO: 284833 - DNA, 304 bp, Unknown
  Bacterial polypeptide expressing nucleotide sequence isolated from the Sargasso Sea
atgttcaaaggatcaaatgttgctttaattactccatttaaaaatgataaacttgatgatgaaacttatattaagttaatccattttcatattgaaaatgggacaaatggtttagttcctgctggaacaactggggagtccccaactttaagccatgatgagcatgaaagggtaattgatctatgtgtaaaagaaggcaatggaaaattacctgtatttgctggcaccggctcaaattctacagaggaagcaatttcattgactactcatgcagaaaaaatgggagctgatggagctttaattg

SEQ ID NO: 284834 - DNA, 580 bp, Unknown
  Bacterial polypeptide expressing nucleotide sequence isolated from the Sargasso Sea
cttgcatgtcacgccctattataataaacctactcaggagggaatgtaccggcattttatggctatagctgatgccgtcgatctgcccataatcatatataatattccgccaagaagcatcatcgatatgagtgtggatacgatgaaacgtttatcggagcataccaatatcgtgggggtgaaagatgctacacaggatttggtccgtccattagctactagactagagattggggcagatttttgtcaactttccggtgaggacgcgactatcgttccttacctctcgcaaggtgggcatggatgtatatctgtcacttgtaatgttgcgcctggaccgctttctaaaatgcataaggcttggcaaaggggagatttggacactgttcgggaaattaatgatagattattacctcttcacgacgccttattttgtgagacaagcccgggtccagtaaaatatgctgctcaccttctgggattgtgttctccgaacgcccgtttgcccatatgtgaaatagctgaagatagtaaaactaaggtagctgcggcaatgcggcacgcaggcttaataaactaa

SEQ ID NO: 284835 - DNA, 598 bp, Unknown
  Bacterial polypeptide expressing nucleotide sequence isolated from the Sargasso Sea
actgtcttttaccttttgggcactttttaaagcactattccattttttttgcttaataaaatcaattgtttcttttgctctctcaaaatcttttttattaagaacttttgaactttttacttcttttgatgaaactttatatgtaattggtttttttctagggtacacaaatgtagatgatacttgtgtttttacgtcttctttaatttccttttttatttctttatttttaacagcctcttttttttgttcaactacggctggtttactctcatcttttttttctaataatggctttggtgcaggtagatttttattaatactttcttggatctgtttttctgattttttaaaaattgatggttttttttgcggaaataagaaaccagtctctgaatatacgatactaactttcaaaaatgataataaaaatactagactaattaatctattaagcataagtttaaggatatctatcttatattgttttatgcttaaaggatcaattgttgcattaattaccccatttaaagatgataatcttgatgaaaacacatataaaagtttaattaattatcacttaaataatggcactaat

SEQ ID NO: 284836 - DNA, 142 bp, Unknown
  Bacterial polypeptide expressing nucleotide sequence isolated from the Sargasso Sea
atgttcaaaggttcaatcgtagcgttaataacaccgtttaaaaataataaattagacgaggaaaattacagagaaatattacaacaccatcttaaaaacggcactaatggcgttgtaccggctggtacaactggtgaatctc

SEQ ID NO: 284837 - DNA, 593 bp, Unknown
  Bacterial polypeptide expressing nucleotide sequence isolated from the Sargasso Sea
aggagcaaactacggattagtcgttacaccatattataataaacctaatcaattaggtttgattaaccatttcaaaaaaattgcaaaagtttcgcctttaaaacaacttatttacaatataccaggaagatcaattgtagacttgtcttttgatagctttaaagaattaaataaagtatcaaacattgtcggtataaaagacgcctccaatgatatgtcaagacctttaattatgagaacttttatgaaaaaagattttaattatttgtcaggtgaagatggaactattgctggttttttagctcaaggcgggcatggctgtatatcagttacagctaatgttgctcctaaacttacatcaatgctccactattattggaaaaaaaagaattataaggaatttgataaagtaaatttaaaattagctccattatcaaaaatattgtttgctgaacctaaccctacaccagctaagtatgccctctctttaatgggtaaatgtaaagctaatataagagaacctttgtatgaattaagctctgatacaaaaaaacaagtaagaaaaataataaaagatttaaattttatttaat

SEQ ID NO: 284838 - DNA, 607 bp, Unknown
  Bacterial polypeptide expressing nucleotide sequence isolated from the Sargasso Sea
gatgataaccggaagcattgttgcgttggtaacgcccatgcaccccgacggcgctattgattggtccgcgtacgcccgcctgatcgaataccatatcgaatcggacaccggtggtttgggcgtggtgggcacgacgggcgaaagcccgacactgacggtgcccgagcactgtgaggtaattcggtttgctgtcgagcaagccggggggcggattccggtggtggccggtacaggcggtaactcgactcatgaagcgatcgaactcaccgtgtcggcggccgaggcgggcgcggactattcactgtccgtgacgccctattacaacaagccgacacaacaaggcctgtttgagcattttcaggcggtggcgcgttcggtcaacctgcccatcattctctataacgtccctggtcgcactggctgtgatttgttgaatgacacggtggttaagctcagccaaatcgacaatgtagtggccattaaagatgcaaccggcgatgtggcacgcggcgcagcgctgatcgaagctgtgccggatggtttcgcggtgttttccggtgacgacgccacggcgcttgagctgatgcgccgcggagggcagggcaac

SEQ ID NO: 284839 - DNA, 151 bp, Unknown
  Bacterial polypeptide expressing nucleotide sequence isolated from the Sargasso Sea
catgtttaaaggatcattaccagcaatggtcacaccgtttgacaacggcgaagtggatgtgaaagggctaaaaaaccttgtaaattggcatattgagcagggaagtcatggacttgtacctgtcggcacaactggtgagagcccaacttaa

SEQ ID NO: 284840 - DNA, 823 bp, Unknown
  Bacterial polypeptide expressing nucleotide sequence isolated from the Sargasso Sea
tgttgattataattcattcgaaaaaataatagaatatcatattttaaatggttctaatggtttagtgccatgtggaacaactggtgagtctccaacattatctcatgacgaacataaaaaaattattgaagagacaataagaatttgcgacaaacgtattccaattatagcaggaactggatctaataacacaattgaggctttagaatatactaagcacgctgaaaaagcaggtgcagatgcagcactaattgttacaccttattataataaaccaacacagtctggtctttatgaacattataaaatcatttctgaaaatacttcgataccaattattatatataacatacctggtagatctatcgtagacatgtctattagcactatggttgaattatctaaattaaaaaatattattggcgtaaaagatgccactaacgatttatttagacctcttttaacaaaaaatattatgaattctgatttttgttttttatctggcgaggatggaactgctttagcatttttagctcaaggtggacatgggtgtatttcagttactgcaaatattgcacctaaattatgctccgaaatgcataatgcttggaggaaaggagatattaatttagctcaagaaataaatataaaacttgcaaaattgcataattcattatttttagagtcaagtcctggtcctgttaaatatgcggcgtctttaataggcctatgctcttctgaaacaagattacctcttgttgaaataagtcaagagactaaaaatatagtaaaaaattgtttaatagaaaatcaacttatttaa

SEQ ID NO: 284841 - DNA, 340 bp, Unknown
  Bacterial polypeptide expressing nucleotide sequence isolated from the Sargasso Sea
tatgtttaaaggttcaaatgtagctttagtaacaccatttaaaggcgatagtcttgatgaggaaacttatataaaaattattaattttcatttagaaaatggaacaaatggacttgttccagctggtacaacgggtgagtctccaactctttcacatagagaacatgaaaaagttatagagttatgcatacaagaagctaaaggaaaaattcctgtaattgcaggcactggatcaaattccactacagaggctatatcactcacagagcatgcagaaaaggctggagcagatggtgccttgatagttacaccctattataacaaacccacgcaggagggc

SEQ ID NO: 284842 - DNA, 742 bp, Unknown
  Bacterial polypeptide expressing nucleotide sequence isolated from the Sargasso Sea
gttggcacaacgggagaatcagcaacactaaataaagaagagcgcgaagaaatatttaaatttgcgaagggttcaacagatatccctttaatggcaggaataggaagctcgtctacattagaagcctgtgagcttgcagatatagctttaaaaaacaatataaatgaatgtttagcagtaacaccttactacaataaaccttctcaaaagggactgtctcttcactatcaagaattgtgcaaaacaggagctaatataatgttgtataacgttcctggaagaacaggagtcgatcttttacccaaaactgttcttgagcttgctgaaatagaaaatatcacaggcataaaagaagctgtaaatactgaggacagatttagagatctattagaagtaaaagcaattagacctgaatttttattgctgtcaggagatgatccaacattcgttagttttatgagagagggggcagatggaattatttctgtggccgcaaatgtaattcctaaacaaataaaagaattaagcgatttatgtttttctaaaaaatttgaagaagcaaaaacaattaatgagagatatttaaatttttatgaacttttatttacagaagcaagtccaagtccttgtaaattcttacttgaaaaaatgtcgttactagagaataatcttagattacctttgcacccactttcagaggaatttagggaaaaaatatatgaagcttttaataaaatttagt

SEQ ID NO: 284843 - DNA, 757 bp, Unknown
  Bacterial polypeptide expressing nucleotide sequence isolated from the Sargasso Sea
actactggtgagtcggcaacgcttaattttaatgatcatgtaaaagttctagaaaaaacaattagctacatcgataataaaatagttgcaattgcaggaactggagctaactcaaccgatgaagcaattgagcttaacaaagctgctagctcaattgggtatgagtttgctctttcagtaacgccatactacaacaaacctactcaaatgggacttgaagcacattacaaaaaaattgcagatagctcagaaattaaaaatattttatataacgtgccttctagaaccgcatgtgatttaaagcctgacacggtaaataaacttattaatcataaaaatattgttggaataaaagaagcagtagatgacccaagtagatataaagcattaattgaaatagcaaataattcttcagaacccttttatgttttatctggagatgatccgaccttttttgattttatgaaaagcggtggtcatggagtaatctcagttgcagctaatgttattccagcccaagttgctgagatcgcagtaagttgtcttaatggtaacttcgaagatgctaaagaaataaatcaaagatataaaaatctatttgaacttttatttattgaatctaatccaataccagtaaagtggatgttaaaaaaaatgagcaagattgacggtggaataagacttccattaacggaattacaagaaaaaaatcatgcttctattgaagatgagatgttaaaattcaagctcttatgag

SEQ ID NO: 284844 - DNA, 192 bp, Unknown
  Bacterial polypeptide expressing nucleotide sequence isolated from the Sargasso Sea
tatgtttaaaggttcaatcgttgctttaataacgccattcaaggataatgtgctagatgaggacaaatatagatttcttattggtcatcatataaagaatggcacaaaaggtgtagtcccagcaggcaccacaggagagtcaccaactctaaaccatgatgagcataaaaaaataaatgaaattgcagtaaa

SEQ ID NO: 284845 - DNA, 235 bp, Unknown
  Bacterial polypeptide expressing nucleotide sequence isolated from the Sargasso Sea
atgttttttggaagtattcctgcagtaattacaccttttaaaaataaacaagtagattacaaatctcttgataaaattgttaatcacttaattttaaatggatcaaatgggctagtcccatgtggaactacaggtgagtccccaaccttatctcatgaagagcataaaagtataatagagcagacaataaaaattagtgataaaagagtgccagttatagctggaactggatcaa

SEQ ID NO: 284846 - DNA, 862 bp, Unknown
  Bacterial polypeptide expressing nucleotide sequence isolated from the Sargasso Sea
tcttatactgcacttttaactccatttgctaatggtaaagttgattatgattcttataaaaaactaattgaacatcaaataattaatggtacgcatggattagttccagttggaacaaccggtgagtcaccaactttaacccatgaagaacataaaaaagttattgaagtttgtattgaacaagtgaatggtagagttccaataatagcaggggcaggttctaattcaactgttgaagctattgattttgttaaacatgcttgtagtgccggagcagatggacttcttgtagttaccccttactataacaaacccactcaagctggtttaaaagctcattacttagcattagctgaaaaaagttctaaacctataataatttatgacattccaggaagatctgtaattggaatgactgatgaaacaatgttagaactttcaaaacacgatttaatacttggagttaaagatgctaccgctgatcttggtcgaccaacaagactattaaacttaattggagaagattttattcaattatctggcgaagatggaactgctcttccatatttggcggctggaggacatggatgtatatcagttacagcaaacattgctccaaatcttttgtctcgaatgcataatgcttggaaacagggagatattgaaaactgccttcagataaataaacaattaatgccccttcatgatgcattattttgtgaaactagtcccggacctctcaaatatgctgcctcgttacttggtctgtgcagtgacgaaacaaggttgccaatagttgaaatttatccagaaagcaaagaaaaagttcaattagctcttcaaattgcagaattaatttaaa

SEQ ID NO: 284847 - DNA, 232 bp, Unknown
  Bacterial polypeptide expressing nucleotide sequence isolated from the Sargasso Sea
atgttcaaaggatcaaatgttgctttaatcacaccatttaaaaataataagctcgacgtagagtcttatataaaattggttcattttcatttaaaaaatggcacaaacggattggttccagctggtacaaccggtgagtccccaactcttaatcatgaggagcatgaaaaggttatagaaatatgtattaaggagagcaatggcaaaattcctgttatcgctggcacaggtc

SEQ ID NO: 284848 - DNA, 197 bp, Unknown
  Bacterial polypeptide expressing nucleotide sequence isolated from the Sargasso Sea
tcttgttcctgccggaactacaggcgagtctccaactttaaatcatgatgagcatcaaaaagttatagaaatatgcataaaagaatctaatgggaaactacctgttattgctgggactggatcaaactctacagaggaggcaatctctttaacaaaacatgctgaaaaagttggagcagatggagcattagtggtga

SEQ ID NO: 284849 - DNA, 652 bp, Unknown
  Bacterial polypeptide expressing nucleotide sequence isolated from the Sargasso Sea
atgattacagacaaaactgagtgtaataacccactatttggaaaaatattgactgcaatggttacaccatttactgaaaatggagatgtagattatgaattagctataaaactctcaaattatctttttgagaacggttctgacggaatagtgttatgtggtactactggagaatctccgactctttcatggactgaacagcatgatttatttattgctgtaaaaggatctttggattcaaactgtaaagtaatagttggtactggtagtaattctacaagcgaagctgtggaagctacaaaaaaagcctacgactctggtgccgacggtgctttggtcgttgttccttattacaataagccacctcaagaaggtctttataaacatttcagctctgttgctaattctgcaaaggatttgcctctaatgctctacaacattcctggcaggactggatgcaatttattacctgatactgtgaagaaacttatggatttctcaaatattctcagtattaaagccgcaagcggtagaatagaagaagtaacagaactaagagctatttgtggctccgaactctctgtatatagtggcgacgattcattgttgcttccaatggttatctgtaggtgctgtaggagtagtaagtgtg

SEQ ID NO: 284850 - DNA, 454 bp, Unknown
  Bacterial polypeptide expressing nucleotide sequence isolated from the Sargasso Sea
tcgatatcacctagtattgtgagtaagcttatggattgcagtaatgtagtcagcttcaaagctgcaagtggaacaacagacgaagtgactcaattaagaaactattgtggatcagatttagctatttatagcggagatgatgctttggttttaccaatgctttcagttggagcagtaggtgttgttagtgtggctagtcatttagttggacctgatttgaagaaaataatagagagatttttagaaggaaaatacgctgaggcactttatttgcatgaaatactacaacctctttttaaatctcttttttcaaccacaaatcccattcctgttaaagctgcacttcaacttattggttggtctgttggacctcctagaagtcctttagtctctttaaacagcgaaatgaaagaagaactcatgaagatactctcttctatgggattgatttgat

SEQ ID NO: 284851 - DNA, 644 bp, Unknown
  Bacterial polypeptide expressing nucleotide sequence isolated from the Sargasso Sea
taattcgacttctgaggctattgaggctacaaaggaggcagcgaattcaggtgcagatggtgcgctagttgtgttcccttattacaacaaaccaccacaagaaggattagaagttcattttcgagcaatagctaatgctgctcctcagttacctttgatgctttataacatccctgggcggacagggtgttcgatatcgcctagtattgtaagtaagcttatggattgcagtaatgtagtcagtttcaaagctgcaagtggatcaacagaggaagtgactcaattaagaaactattgtggatcagatttagctatttatagcggtgatgatgctttgcttttaccaatgcttgcagtaggagcagtaggtgttgttagtgtcgcgagtcatttagttggtcctaacttgaagaaaattatagaaagttttttagaaggaaaatacactgactcactctatttacacgagacattacaacctctttttaaatccctgttttcaaccacaaatcctattcctgttaaagcggcacttcaactgattggttggtctgttggacctcctcgaagtcctttagtctcattaaacagagaaatggaagaagaactcttgaagatactctcttctttgagattgatttgat

SEQ ID NO: 284852 - DNA, 557 bp, Unknown
  Bacterial polypeptide expressing nucleotide sequence isolated from the Sargasso Sea
tcaagaaggaatttatcaacattttaaagctataaacgatagttgtgacttacccattgttatttataatattcctggaagaagtgttatagatattgatatagacacaatgataaaactatcaaaattaaagaatattgtcggtgttaaagattcttctaatgatttaactagacctttattaacctctcaatctataagtaaagatttttgtcaaatttcaggagaagatgcgacagtagttcctttcttatctcaaggaggacacggatgtatttctgttactgcaaatattgctcctaaattatgttcagaattacataatgcttggcaaaaaaataatcttaaaaaagttaaattattgaattcttatctttttcctttacacaatgctttgtttctagaaacaagccctggtccagtaaaatatgcagcttctcttttgaggatttgttctgatgaattgagacttcctttagttaaaatatcatcaataaataagaaaaaaattaaaaacactttaagtaaattaaaacttaaaccaattaaaaaataaa

SEQ ID NO: 284853 - DNA, 851 bp, Unknown
  Bacterial polypeptide expressing nucleotide sequence isolated from the Sargasso Sea
tatgagcgatttcggcaagctattaacagcagtcataacccctttcgataggaatggggttcttaacactgatactttgtggagactatgtaaaaaattagttcacgaaaaatctgacggcttagttttatcaggaacaactggtgaatctccaaatttaacaaaagaagatagaaagattatctattcaactgctaaagactctgttggagataaggcaaagattattgctggtactggtacttactctactaaagaatctatagagtatacaaaaatggctaatgacataggtgtcgacggcataatgattgtgacaccgtattattcaaaaccatcacaagatggtattttgaagcattttgaagagatttctaaaaacactgacttgccaattatggcatacaatattcctggtcgaacagcaacattaattgaaattgatactttagaaaaacttgttgatgatattgggatacattccatcaaagatgcggtaggagatttggaattctctaaaaatgaattagaaacacttaagggcaaagttgatatttattcaggtaatgatggtgagactatagagttcatgaagatgggtggaaaaggtgttgtctcagttgcttcgcatattgtcggaaatgaaatttacgatttaataaaccatgtacttaatgatgagattgaatcagctgaacatttacaaaatcaacttttacctctttttgatttattatttgaagaaccaagtcctggtccagttaagtacttacttacccaaacttgggaagatgttggattaccattaatgcctattactgacatttctagtgaattagccaataaattat

SEQ ID NO: 284854 - DNA, 895 bp, Unknown
  Bacterial polypeptide expressing nucleotide sequence isolated from the Sargasso Sea
tcagcaagtttgatgaccgctatcaaaacccctacagggccggatggggaagtggacctggaaacctttgacagcctggtggaagcacaaatcaaaagtggtgttgagggtctgattgtctgcggtacaacgggtgaaggtcacctgatggactgggaagagcatcttatgctgattgcgcactgtgtgaatcaatttggcgatcaacttgccattgtgggtaacaccggcagcaacaacactcgagaagcactgaaaggaactaaatatggttttgcctttggaatggacgctgcgcttcagataaatccctactatggaaaaacttcggaatcaggccttaaagagcatttcgcaagggttttggatttgggaccgtctattatatacaatgtcccctcccgcactggacaggacttacagccggaattgattgaaaaactggcagagcatccgaatttgattggtatgaaagaatgtgcgggaaatgaaagaatggggtactatgaatcaaaaggcatagcctgctggtctgggaatgatgaccagtgttttgaaggacgtcacagacacggttctcacggagtgatttccgtaatcagcaacctgcttcccggcctgatgcgacggttgatagataatgatgatcctgatctgaatgaacgcctgctgccacttatggcctggctgtttcatgttcccagcccaaatgcacttaatactgtgctgagcatgacaggggcgattcagcccgttttccgtcttccttattcaccggtcgatttaaccgcacgccaagagatatttgaaatgcttcagggttttgaagcagaagactgggttggttcaggactggagctgatggacgataggcagtttgttcttactgcttgag

SEQ ID NO: 284855 - DNA, 404 bp, Unknown
  Bacterial polypeptide expressing nucleotide sequence isolated from the Sargasso Sea
aatgcttaaaggatctataccagcaataataactcccttttcaaatggtgatgttgactatgatagtttcgaaaaaatattaaattggcaaatcaaaagtggaatatctggagtaacagtttgcggaaccacaggggagtccccaactttatcacatgatgagcatatgaaattagttgagttcgcaataaaagttgcttcaaaaaaaatacctgttattgccggcacaggatctaattccactaaagaggcaattgaatttactaaacacgcctataaagcaggagcaaactacggattagttgttacaccatattataataaacctaatcaattaggtttgattaaccatttcaaaaaaattgcaaaagtttcacctttaaaacaactttattacaatatac

SEQ ID NO: 284856 - DNA, 391 bp, Unknown
  Bacterial polypeptide expressing nucleotide sequence isolated from the Sargasso Sea
ttgcttgtgtttgttgtcgtgcgtcattaccataggcagcctgaaaattttggagccttgagcatgtttagcggaagtattgttgctttaatcacccctatggatcctgtcggtgctgtggactatgacagcctgaagcgattggtggattttcatttaagcaatcagactgacgctttggtgatcatgggaacgacgggggagtctgttactttaagtttcgctgagcaacagcaagtactcaaggctgtgttggcgcaggtggacggacgtattcctgttattgctggtaatggctcaaattcaactgccgacgcggttgaaaagactaaaactttatctgccttgcctgttgcaggttttttaacggtaacgccttattacaacaagc

SEQ ID NO: 284857 - DNA, 568 bp, Unknown
  Bacterial polypeptide expressing nucleotide sequence isolated from the Sargasso Sea
aatgttttttggaagtttaccagcaattataactccatttaaaaataaagaagttgattatagttcatttgaaaaaattgttaatcatcttattgaaaatggatcaaatggtttagtgccatgtggaactacgggtgagtctccaactctatcgcatgaggaacataagaaaataattaatgaaactataaaaattaatgatcacagattaccaataattgcaggaactggttcgaacaatactgaagaggctatagattatacaaaatatgcagaaagtgctggtgctaatgcggccttgatcgtaactccatactataataaaccaacacaaaaaggtttatatgctcattttaaaataattgctgattcagttaaattgccgataataatttataacattccgggaagatctgtaattgatatgtctatagaaactatgattgaattatcaaaaatagaaaatgtaattggtgttaaagacgctacaaatgatttgtttagaccattacttacagctgctaaaatgaaaaatgatttttgttatttgtcaggtgaagatgaacag

SEQ ID NO: 284858 - DNA, 502 bp, Unknown
  Bacterial polypeptide expressing nucleotide sequence isolated from the Sargasso Sea
atgagtgatttaggccgtctaataactgccatgataacccctttcgatgataaaggtgaaatcgattatgaagaagctggtcatttagccacttcattgattaactcaggtagtgatggagtaatagtttcaggtactacaggtgagtccccagccttgtctaaagaagaaaaaattaaattattatccgcagtgaaagaggcagtaggaaataaaggatctgtgattgcaggtaccagtaataacaacactcaagaaagcatagaaataagccaagctgctcaacaagccggagctgatgggctacttttaactgtcccttattataataaaccgcctcaacaaggtttgtatgaacatttcaaattgatagctgaaagtgtagatgttccatgtatgttatataacgttccaagtaggactagtaccaatatgacagatgaaaccacagtaagattgagtcacattgaaaatatagttggtgttaaagaagcgagtagtg

SEQ ID NO: 284859 - DNA, 599 bp, Unknown
  Bacterial polypeptide expressing nucleotide sequence isolated from the Sargasso Sea
tgcagatgcagctcttgtggttacaccttattataataaaccgacacaggaaggtttgtatcaacattataaagctattaatgataattgtggaataccaataattatttataatattccatctagatcagtaattgatatgtcggtagaaacaatggcaaaactttttgaattaaaaaatataatcggagttaaggatgcaacaggtgatttaaatcgtgtagatcaacaaaaatctaaaatgggagaagagtttattcaattaacaggaaatgatgataatgcctttgaatttaataaaagagggggagtaggttcgataagtgtaactgcaaacgtagctccaaaattatgttctgattttcagaaattttctaaatcttcaaacgcaaatgaaattaaggaagctgaaagattagatgaaatacttcaaccattacataaatcattatttatagaaagcaatccctcaccagtaaaatatgttgcaaaattaatgggcctttgtgatgatgtagtaaggcttcctttagttaattgcacaaaggaaacaaaaaaaattttagaagaagtttcgaaaaaagctaaattaatttaat

SEQ ID NO: 284860 - DNA, 672 bp, Unknown
  Bacterial polypeptide expressing nucleotide sequence isolated from the Sargasso Sea
tatgttttttggaagtattcctgcagttataactccttttaaaaacagagatgttgattattcatcactcagtaatattaacgaatttttaattaatgaaggatctaatggtcttgtaccatgtggaactactggtgagtcaccaaccttaactcatgatgaacacaaaaaaataattgaagaaactattagattggctgacaaaagagttccaataattgctggtacaggatcaaataacactattgaagccattgaatatacacagcatgctgaaaaagtaggagctgatgcagctcttgtggttactccttactataataaaccaacacaaaaaggtttatatgaacattataaaaatatcgctgaaaatacatcacttccaattataatttataatattcctggaagatcagtagtagatatgaccattgaaacaatgattgaatgttcaaaaattaaaaatataattggagttaaagatgcaactaatgatttatttagacctcttttaactcaaagaaaaatgaatggagaattttgttatttatctggggaggatggtacagctttagcatttttagctcaaggaggtaatggatgtatttctgtttctgcaaacgtagcacctaaaatatgctctgaaatgcataaagcatggagatcaggtga

SEQ ID NO: 284861 - DNA, 518 bp, Unknown
  Bacterial polypeptide expressing nucleotide sequence isolated from the Sargasso Sea
aattgctttaaatagtaaattaccaattgttttatataatgttccttcaagaactggatgtaatttatcagctgaaacagtttttaagctctcggccaataaaaatattattggaattaaagaggcaaatcctgatcttgaacaactaaaaaaaattattaaactttgtccatcttcttttcaagttgtttctggtgacgatttatctgtacataaggccataaattttggtgcagttggatctatttcagttattggaaatgcctttcctaaacaatttaaaaatttgattaatttatcaattagttcagatcaaagcctctccgaaaaggctttttataaattaaaaagaataattaaccttatttttgaagaaggtaatcctactggaataaaatgtttactcaacaaccttggattttatgagaattttttaaggatgccattaactccggcgagtgaggaacttaaaattaaaataataaaagagattaagtatttatcatatcaaaaataat

SEQ ID NO: 284862 - DNA, 538 bp, Unknown
  Bacterial polypeptide expressing nucleotide sequence isolated from the Sargasso Sea
tttgacttcacatgcagaaaaaataggtgccgatggagctctaattgtgactccttattacaacaaaccgacacaagagggactttttcaacattataagtcaattaatgataaatgcggtataccaattattatttataatattccagggagatcagtaatcgatatgtcagttgatacaatggcaagattatatgaactgaaaaatattattggtgttaaagatgctactggagaattaaatagggtagatcaaactttaaaaaagatgggtaaagattttttacaattaactggtaatgatgataatgctttagaatttaatagaagaggaggagtaggcgcaataagtgttacagctaatattgctccaaaactctgttcaaaatttcaaaaactttctatagaaaatgaagaaaaatctctttctgaagctaaaacaattgataaaattttacaaccagttcatcattctatgtttgttgaaagcaatcctagtccagtaaaatatgcggccaagcttttaaatctttgtgag

SEQ ID NO: 284863 - DNA, 510 bp, Unknown
  Bacterial polypeptide expressing nucleotide sequence isolated from the Sargasso Sea
atgataaatgcgaacttcccatagtcatttacaatatacctgggcgatcatcaattgatatgagccctgaaacaatgggtcgtttggccaagttaccaagagttattggtgttaaagatgcaaccggtgatttagcaagagtatgcgcccagcgtattacatgtggaactgattttttacaaatatctggtgaagacgcgactgctcatggatttaacgctcaaggtggtgtcggctgtatttctgtcacggcaaatgtggcaccaaaattatccgcacaactacaggctgcaacattagctggtgattacgacaaagctcttgaattacaagataaactcatgcccttgcatcatgcaatttttactgaacctgggcttgtgggcgtaaagtacgcaatgagtcttttaggtttatgttcagacgaagtaaggctgccactaataccactaagtaatgaaacaaaaaaactcattaaatctgcaattcagactgcaggcttgacttagt

SEQ ID NO: 284864 - DNA, 439 bp, Unknown
  Bacterial polypeptide expressing nucleotide sequence isolated from the Sargasso Sea
aatgtttaaaggatcaattgtagcgttagtaactccctttaaaggaaatgaaattgacgaatttgctctaagaaagcttgtcgattggcatatatctgaaggtacagatggaatagttcctgtgggaactacaggtgaaagcccaactctaaatcatgatgaacatgagcgagtagtggaaattgttattgatcagagcaataagagagtaccaattattgctggaacaggatcaaattctactgtggaagctattaacttattaaaacacgcagagagtgccggtgctgatgcggcacttgtagttactccttattacaataaacctactcctgagggattatatgctcattatgaggcgttagactcagcttcttctggtattccaataattatttacaatattccatcacgctcagtcattgatattaatgttgat

SEQ ID NO: 284865 - DNA, 561 bp, Unknown
  Bacterial polypeptide expressing nucleotide sequence isolated from the Sargasso Sea
tttcttaaagtgagtaattctaacataattaaaaaatttaaggtaaatccctatataaacgaaaaaaatcagtcgatttttgctggtattggtgttgctgttgttactccctttactgaaaataatgaaatagataaagaggcaatttataagcttagcgatcatctttttttcaatggtatatcatatgtagttgtacaaggaacaacaggtgaatcatctgttttgaatgatcaagaaaaaaatcttgtaaattctttatttactgatgcattcaagggtcgccttcctttgattttaggaatgagttcgaacaatacaagatacatatgcgacttaatttcaaactatgattttagtggttttgaagcaattatgtctgtttgtccttattacaacaaaccatcacaagatgggatttttcagcatttttcaaaaatttctgacctttcacctttgccattaattttatataatgttcctggaagaacatcatgtgatatttctaataatacaattattaaattaagtgaatacagtaaaaacataattgggattaaa

SEQ ID NO: 284866 - DNA, 704 bp, Unknown
  Bacterial polypeptide expressing nucleotide sequence isolated from the Sargasso Sea
ggagaatctccaactttaagtcatgaagagcatcagagagtaatagaactttgtgttaaagaaagtaatggcaaattaccagtatttgcaggcacaggatcaaactcaactgaagaggcaatttctttaacttcacatgcagaaaaaatgggtgctaatggggctcttatagttacaccttattataataagccaacccaagagggtctttttcaacattataagtctataaatgataaatgtggaattcctattataatttacaatataccaggtcgatctgtaattgatatgtcagtagatacaatggcaagattatatgaattaaaaaatataattggtgttaaggatgctacaggagatttaaatcgagtaaatcaaactttaaataaaatgggaaaagattttattcaattaactggtaatgacgataatgcactagaatttaataagagaggaggtgttggtgctataagtgttactgctaatattgccccaaagctttgttcagagtttcaaaaattttcaatattaaatgatgataaatcaataaaggaggcaaaaaaacttaatgatattttgcaacctattcatcattcaatgtttattgaaagtaacccaagtccagttaaatacgcagcaaaattacttaatctttgtgatgatgcagtaagacttccgctagttaaagtcacgaaactcac

SEQ ID NO: 284867 - DNA, 526 bp, Unknown
  Bacterial polypeptide expressing nucleotide sequence isolated from the Sargasso Sea
ttgaaaggaagtgtcgtagcaattgttaccccaatggacaataaaggatcaattgattttgactcatttagtaaattaattaagtttcatgaagattcagaaactgatggaatagttcttgttggcacaacaggagaatcagcaacgctaaataaagaagagcgcgaagaaatatttaaatttgcgaagggttcaacagatattcctttaatggcaggaataggaagctcgtctacattagaagcctgtgagcttgcagatgtagctttaaaaaataatataaatgaatgtttagcagtaacaccttactacaataaaccttctcagaaaggactgtctcttcactatcaagaattgtgcaaaacaggggctaatataatgttgtataacgttcctggaagaacaggagtcgatcttttacccagaactgttcttgagcttgctgaaatagagaatatcacaggtataaaagaagctgtaaatactgaggacagatttagagatctattagaagtaaaagcaatta

SEQ ID NO: 284868 - DNA, 431 bp, Unknown
  Bacterial polypeptide expressing nucleotide sequence isolated from the Sargasso Sea
gatgaacaaattaagagggacaggcattgccatggtcactccttttaaaggagacaaatcagtagattttgaagcactcaccactttgaccaatcacttgatagagggcggagtagactatttagtggtcatgggtaccaccgctgaaagtccaaccttaagcaaggtagaaaaaataaaggtgctagatcatgtattgcaaattaatgatggacgtttgcccatagtatatggtatgggtgggaattcaactcaagctttagttgatgaatttaatcatgcagatttagaaggagttgatgcgattctttctgctagcccatattacaacaagccgagtcaaataggcatcattgagcattataccaaaatagctgatgcctctccaaggcctgtaattttgtacaatgtacctggaagaacagcctcaa

SEQ ID NO: 284869 - DNA, 253 bp, Unknown
  Bacterial polypeptide expressing nucleotide sequence isolated from the Sargasso Sea
tatgtttaaaggttcaaatgtagctttagtaacaccatttaaaggcgatagtcttgatgtggaaacatatataaaaattattaattttcatttagaaaatggaacaaatggacttgtgccagcgggtacaacgggtgagtctccaaccctttctcatagagaacacgaaaaagttatagagttatgtatacaagaagttaaaggaaaaattcctgtaattgcaggtactggatcaaattctactgcagaagcc

SEQ ID NO: 284870 - DNA, 673 bp, Unknown
  Bacterial polypeptide expressing nucleotide sequence isolated from the Sargasso Sea
cgttatagctggaacaggatcgaactcaacctctgaagctattgagttatctaaacatgctgaaaaaactggagcaaatggacttttgattgtcacaccttattataacaaaccaacacaagagggattgtaccaacactacaagctaatcaatgacaatgttggaataccaattattatttacaacattccctctagatctgtaatagatatgtcagttgatactatggcaagactatttgagttaaaaaatattgtcggagtaaaagatgcaacagccgatttaaatagagtagatgaacagttaaaaaaaatgggtaaagaatttattcaattatctggagaagatggaacagctttagaatttaatttacgcggtggtgtaggctgtatttcagttacggcaaatgtagcagcaaaactttgctcagaatttcaagatgcatctctaagtaaaaataatagtaatcttttatcaaaagcaaaattaattaacgagaaattaatgcctcttcatacagcattgtttatcgaaagtaatccaagtccagttaaatatgctgcaagtttattaaatttatcatctgatgaagtaaggcttcctcttgtaaaaattaccgaaaaaacaaaaaaagaagtagagaaagccctgaagattgccaaattgctttaa

SEQ ID NO: 284871 - DNA, 712 bp, Unknown
  Bacterial polypeptide expressing nucleotide sequence isolated from the Sargasso Sea
aatgtcaccagcaacaacagacatagttttttcgggttcttgtaccgcccttgtgacgcccttcgacagtggccagttggataaaaacgcattttgcaaacttgttgaatggcagatagaaagcggaaccgatgcgttaatcccagtagggaccaccggcgagtctccgactttatcacatcaggaacacgatgttgtcgtagagctgtgtatcaaacaagctgcaggtcgagtgccggttattgctggtgctggttctaatagtactgcagaggccgtccgcctcgctaggcacgctggtaaggtgggtgcagatgcggtattgattgtcagtccttattacaacaagcccactcaagacgggctttatcaacatttttccgctgttgccgaggctgtgtctgtgccagtcattgtttatgatattcctggccggtcaatcgttcaggtagctgaggagactttggtacgccttgccgctgattaccctaatataagcggaatcaaagacgccactgcagatgttgcacgcccaacccgcattcgtaatcttctcggcgccaactttgcgcaactatctggggaggatgcgacagctcttccatatcttgccgcaggtgggcatggctgcatttcggttacggcaaatgttgctccaaaactgctcagcaatatgcacaaggctggacgactggtgatattgccgcggcgc

SEQ ID NO: 284872 - DNA, 664 bp, Unknown
  Bacterial polypeptide expressing nucleotide sequence isolated from the Sargasso Sea
aagctgtaaagtaatagttggtactgggagcaactgtacaagcgaagctgtggaagcgacaaaaaaagcttacgactctggggcagacggtgctttggtcgttgttccttattacaataagccgcctcaagaaggtctttataaacatttcagttctattgctaaatctgccaaggatttgcctcttatgctctacaacattcctggcaggactggatgcaatttattacctgaaactgtgaagaaacttatggatttctcaaatattctcagtattaaagctgcgagcggtagaatagaagaagtaacagaactaagagctatttgtggctccaaactctctgtatatagtggcgacgattcattgttgcttccaatgttatctttaggtgctgtaggagtagtaagtgttgcaagtcatttggttggattgcaattgaaagagatgattcattcttttcaaagtggaaaagtttccaaagctcttgctattcatgaaaaacttcagcctcttttcaaagcactctttatgactactaatccaatcccaattaaggctgctttggagctatcgggatgggatgtaggtaatcctagaagtcctttgtcacctttaaccaatgacatgaaaaagcaactatcttttatcctgaattccctataa

SEQ ID NO: 284873 - DNA, 141 bp, Unknown
  Bacterial polypeptide expressing nucleotide sequence isolated from the Sargasso Sea
tatgcttaaaggatcaattgtagctttaattaccccatttgatggtgataacctgtgtgaggaaagttatataaaactcataaattatcatttagaaaatggtactaatggtgttgtccctggaggaaccactggcgagtc

SEQ ID NO: 284874 - DNA, 217 bp, Unknown
  Bacterial polypeptide expressing nucleotide sequence isolated from the Sargasso Sea
atgtttaaaggatctcatacagcattaattacgccttttgacggtaaatctattgatgaaaaatcatttaggtctctgatagattttcaaatatcagaaggcatacatggactggttcctgtaggcacaacaggtgagtcaccaactttaagccacgaagaacacaagttggcagttgaaatatgtgtgaagaaacagcaaaacgtgtaccagtaat

SEQ ID NO: 284875 - DNA, 688 bp, Unknown
  Bacterial polypeptide expressing nucleotide sequence isolated from the Sargasso Sea
tttgctaggctctttaagaaaagaaaatccacaatttataggatctatgactgctttaattactccatttgaaaatggacgattagatgtaaattcttttaaaaaaattgttaatcatcaaattaagaatggtacagatggtttaatccctgttggtacaactggcgaatctccaactttgtcgcatgatgaacatcaaaaagttgtagatgtttgcattcaagaaagttctggaagggttccaattattgctggagctggatctaactcaacaaaagaagcatctaaactagcttctcatgctggtaaagcaggtgcggatgcggttcttgttgtgaccccttattataacaaaccgacccaatcaggtttatattctcattttatgtcagtagctgatgcagcaaaaatacctcttattgtttatgatattcctggtagatctatagttcctgttcatgatagcactttagttaaactttgtgaaaaccatgaattaatttctggaattaaagatgcaacagcagatatatctaggccccccagacttttaagattaattggtagtggtttctcacaattatctggtgaggatgcaacagccctaccttaccttgctgctgggggccatggttgtatttcagtatcatctaatatcgcaccaaaattattagcagaaatgcatgat

SEQ ID NO: 284876 - DNA, 400 bp, Unknown
  Bacterial polypeptide expressing nucleotide sequence isolated from the Sargasso Sea
atgtttaaaggttcaaatgtggctttagtaacaccttttaagggcgatagtcttgatgaggaaacttatattaaaattattaattttcatttagaaaatggtactaatggacttgtgccagctggtacaacaggcgaatctccaactttatcacatggagaacatgaaaaagtaattgagctttgtataaaagaagcaaaaggaaaaatacctgttatagccgggacaggatcaaactcaactgttgaagcaatttcactaacaaagcatgctgaaaaagctggagcagatggtgcattgatagttaccccatattacaacaagcctactcaggagggcttatatgctcattataaagctataaatgacagctgtgggatacctataataaatttataat

SEQ ID NO: 284877 - DNA, 881 bp, Unknown
  Bacterial polypeptide expressing nucleotide sequence isolated from the Sargasso Sea
aatggttgaatttggcagactacttactgcaatgattaccccattcaatgctgacggaacaattaattttccacaagcacgaaaactagcacaatctcttgtttcttctggaacggaaggtttagtaataggtggaacaacaggcgaagcaccatcaatgtcagatgatgaaaaaatcagattatttgcagaagtaaaagaagctgtaggagattctgcagctgtaattgcaggaactacagacaacaaccacaacaaatctatagaactttctaaagaagctgaaaaagtgggagccgatgctcttttattaactgttcccgcctataacaaacctacacaagaaggtttgtatagaaatttcaaagcaatagctgaagcaacttctctacctggcattctatataatgttccatctagaacttctttaaacatgagtgttgaaacaacacttagattagctgaaattgataacataatcggtgtaaaagaagcttctagtgatttcactcaaatcactactattattgacaaagcacctgacggttttaatgtttggtcaggcaatgatgatgaaacatttcccataatgtgtgttggaggatatggaatagttagcgtagcctcacacatcttaggtaatcaaattaaaacaatgattgggtatatattagatggcaatttagaaagtgctgcaagtgagcacaaaagacttcttcctatatttaaagccttattttgggtaacaaatcctattccagttaaatatgctgtcaacaggcatggatttaatgcaggaattcacaggcttccactatgtgaacccgatcaatcttttatagaagattttaaccctgtaatggattcttatagtatcgatt

SEQ ID NO: 284878 - DNA, 614 bp, Unknown
  Bacterial polypeptide expressing nucleotide sequence isolated from the Sargasso Sea
tgctgaaagaattggtgctaacggggcactgatagttacaccttattacaacaaacccacacaagaaggcttgtatcagcattataaagcaataaacgataaatgtggaatacctattattatttataatattccaggtagatccgtgattgatatgtctgttgatacaatggctaggttatatgaactaaaaaatataattggtgtaaaagatgccactggtgatttagatagagttaatcaaacagttaaaaaacttggtaaagattttttacagttgacaggtaatgatgataacgcctttgaatttaataaaagagggggctcaggcgcaattagtgtaacagccaatattgctccaaaactttgttcagactttcaaaaatatacaaaatcttcaaatgataatgatattgaacaagcagaaagattagatgaggttcttcaaccacttcatcatgcaatgtttattgaaagtaacccaagtcctgtaaaatatgctgctaagttattacacctttgtgaggatgatgtgaggctaccgttagtaaaagtcaccgacaaaacaaaagagatcgtaaaaaaagctttgcttttagcaaaattgatttaat

SEQ ID NO: 284879 - DNA, 313 bp, Unknown
  Bacterial polypeptide expressing nucleotide sequence isolated from the Sargasso Sea
atgaattatcaaggatcatattgtgcattaataacaccattcaaaaatggtactattgataaagacagtttcattaatatcgttaaatggcatataacgcaaggaactaaaggtattgttccatgtggtactactggagaatctcctactttaagtcacaatgaacataaagaaatagtagaattagcggttgaagcggcagaaaaaaagatgcaagtaattgctggaacaggttctaattcaactgccgaagctatatcattaacaaagcacgcaaaagatgcaggggcagatagtgcattgatagttgtcc

SEQ ID NO: 284880 - DNA, 694 bp, Unknown
  Bacterial polypeptide expressing nucleotide sequence isolated from the Sargasso Sea
atgactcaggccgccaccctctcgccaacgcctttcggccgtgtggtcaccgcgatggtgaccccctttgatgccagcggtgctgtggatctcagtgttgccgcaaacctggcccgtcacctcgtggatcagggctccgatggattgctggtgtgcggcaccaccggtgaatcgccgaccctcagctgggatgagcagttgcaactgctgcaagcagtgcgcgaggccgtgggcggtaacgccaaggtgttggcgggcacgggcagcaattccacagcggaagcggtggaggccaccaaggaagcggcggcggccggcgcagatggcgctctcgtagtggtgccttactacaacaagcctcctcaggagggtctggaggcccatttccgggctatcgcggaagcggcacctgagctgccgttgatgctttacaacatccccggccgcaccggctgcagcatcgctccggccacggtggctcggctgatggactgccccaacgtggtgagtttcaaggccgccagcggcaccacggaagaggtcacggccttgcggctggcctgcggtccgcagttggcgatctacagcggtgacgacggcctcacccttccgatgcttgcggtgggtgctgtgggcgtggtgagtgtgggcagccatgtggcgggccctgagatccgcgccatgatcgaggcct

SEQ ID NO: 284881 - DNA, 268 bp, Unknown
  Bacterial polypeptide expressing nucleotide sequence isolated from the Sargasso Sea
atgtttaaaggttcaaatgtagctttagttactccattcaagaataataatcttgatgaagaaacatatattaaaattattaattttcatttagaaaatggcactaatggtttagttccagccggaacaaccggtgagtctccaacattatcccataaagaacatgaaaaagttatagaactttgtattaaagaagcaaaaggtaaaataccagtgattgctggaactggttcaaattcaacatctgaagcaatttcattaacaaaac

SEQ ID NO: 284882 - DNA, 418 bp, Unknown
  Bacterial polypeptide expressing nucleotide sequence isolated from the Sargasso Sea
atgaataaatttaaaggggcaggagttgccttaattacgccatttaagtctgatttttctgttgattttatagcacttgaaaaattagttgaacatcaaatcaataacggaactaattatttagttgttcaaggaacaactggtgagtctgctactttatctgacaaagaaaaaactgcagttttggattttgttgtcgaggtaaattcgggtagattgcctgttgtattaggagttggtggcaacaatacccaagctgtaggaaaacaactaaaatcatgggaaaagtctaaagttgatgggtttttatctgttagtccatattataataaaccatctcaaaaaggactagttgctcattataagcatttaagttcatgtactgatttgcctattattttgtataatgttcctggaa

SEQ ID NO: 284883 - DNA, 652 bp, Unknown
  Bacterial polypeptide expressing nucleotide sequence isolated from the Sargasso Sea
aggcactggttcaattcgacagcagaagctattgaattatcaaaacatgcagagaactctggtgcagatggtcttttaatagtaacgccatactataataaacctacacaagagggtttgtttcaacattacaaatcaataaacgacaatgtgggcattcctattataatctacaatataccctcaaggtcagtaatagacatgtccgtcgatacgatggcaagattatacgaattaaaaaatattaaaggagtaaaagatgcgacgggtgatttaaaaagagtgacaatgcaacttaataaaatgggaaaagattttattcaattaactggagaagatgacaacgcaattgagtttaataaaagaggtggtgtagggtgtataagtgtaaccgcgaacgttgcaactaaactttgtgcagattttcataaagcttctttatcaaatgataatgaaacagctttaaaaattaataaacttttgtcaccattgcataaagcactttttattgaaagtaatccatcaccagttaaatacgctgcatctcttttaaaacttgcacctcctgaagtaagactacccctggtccaagttatggaaagcactaaaaaagaagttgaaagagctcttaagtttgcaaaacttctctaat

SEQ ID NO: 284884 - DNA, 322 bp, Unknown
  Bacterial polypeptide expressing nucleotide sequence isolated from the Sargasso Sea
atgtttaaaggttccctagtggccttaattacgccgtttctagatggaaaagtagatgaaaatgctttcagaaaactagtgaattggcagattgacgaaggtacggacggattaataccagttggtactactggtgagtccccaacgttaagtcacgaagaacataagcaggtggtcgagctatgtgtagatgaagcaaacggtcgcgtacccgttatagcgggtgccggttcaaactctactgcagaagcagttgaatttactgcccatgcaaaagaagcgggagctgcggctgctcttcacgtgacgccctattacaata

SEQ ID NO: 284885 - DNA, 241 bp, Unknown
  Bacterial polypeptide expressing nucleotide sequence isolated from the Sargasso Sea
aatgttcaaaggaagtatacctgccgtaataacaccattcgatggtgataaagttgattatgtttcattttcaaaagttttaaatcatttaatagataatggatcacatggacttgttccttgtgggacaacaggtgaatcacctacgttatcgcacgacgaacataaaaaaataattgaagaaacaattataattgctgataatagaattccagttatagctggtactggttctaataat

SEQ ID NO: 284886 - DNA, 301 bp, Unknown
  Bacterial polypeptide expressing nucleotide sequence isolated from the Sargasso Sea
atgttcaaaggatcaaatgttgctttaattacgccgtttaaaaataatctattagatgaggaggcctatgttaaattaatacattttcatatcgaaaatggaactagtggtcttgtgccagcaggtaccacaggagaatctcccacattaagtcatgatgaacatcaaaaagtaattgatctttgcataaaagaaagcaatggaaaaattccggtcatagctggaaccggttcaaattcaacagaggaagctatttcattgacctcacacgctgaaaaagcaggtgcaaatggtgctctta

SEQ ID NO: 284887 - DNA, 729 bp, Unknown
  Bacterial polypeptide expressing nucleotide sequence isolated from the Sargasso Sea
aatgcttaagggctcaattgtagcgcttgccacaccttttttaggtgaaaaagttgatgaaaaagcttttcaagaattggttgattggcagattaatcaaggaactaatggcttgttaccagttggaactactggagaatctccaactctttctcatgaggagcataaaagagttgttgagatgtgtatcgatatctcatctaaaagagttccggttttggctggagctggttctaattctactgatgaggctatagctttagcaaagcatgctaaaggtgcaggtgctgatgccatacttgttgtaacaccatattataataaaccaactcaaggtggtttatttgctcattttaaggcaattcatgatcaagttgatattcctatagttgtttataatattcctggaagaagtgtggttgatataaaccaaggtactttggttaaaatagcagagttgcccaatgttataggtattaaagatgctacatcaaatatttcaagagtttcttctactcgcctgattttaggttcagatttttgccagttatctggagaagatgctactgcactagcatttatggctcatggtggtcatggttgtatttctgttactgctaatgtagctccaaaactatgttctcaattttatgaggcatggttcaataatgaccctgttacagcgctttcaataaatgataaacttatgccccttcatatttctctttt

SEQ ID NO: 284888 - DNA, 547 bp, Unknown
  Bacterial polypeptide expressing nucleotide sequence isolated from the Sargasso Sea
agggctgtaccaacattacaaagcgattaatgataaatgtgggatccctattataatttataatattccaggcagatcagtaattgatatgtcggttgataccatggcaagattatatgaactaaaaaatattgttggtgtaaaagatgctactggcgacctagatagagttaatcaacaattaaataaaatgggtaaagactttattcaattaactggaaatgatgataatgcatttgaatttaacaaaagaggtggagtaggcactattagtgtgactgcaaatattgcaccaaaactttgttcagaattccaaaaaaattcaatatctaaaaacgaagtggatcttgcaaaagcaaaagagttagataatattttacaaccagttcatactgcaatgtttgttgaaagcaatcctagtccagttaaatatgcagctaaactaatgaatttgtgtgatgatgaggtgagattgccattagttaaagttactgaggagactaaaataattgtaaaaaaagccatagagactgcaaaacttatttaa

SEQ ID NO: 284889 - DNA, 619 bp, Unknown
  Bacterial polypeptide expressing nucleotide sequence isolated from the Sargasso Sea
agcaacaaatcttgatggttttgatgcaataatgtctgtttgtccttattataacaagccttctcaagatggtctttacaatcattttttaaatatttctcaagctacaactaaaccgattttaatgtacaatgttccaagtagaacaggtgttaatattaataatgaaacaataattaatatttacaaaaattctgataacatagttggtgttaaagaagcatctggagaggtaaacagaattaaacagttaaagtcaaaactagagaatgattttttagtaatatcaggggatgattttacaatgattgatgcgataaggaatggtgctgatggaataatttctgttgctgcaaatgtatatcccaagattatggttgaaacctacaatcaaataatttctgatataaataatgtaaaaacattaaatgataataatttcgtgttaaatgaatttataaatttgatctttgaagaatgtaatccatctggaataaaatatgcattaagtaaattaaatttgtgtagcagtaaagttagattacctttgagcgagatatctgaaaacttaaaatataaaattgagaaatttattaaaaaataccctcctattaattaa

SEQ ID NO: 284890 - DNA, 469 bp, Unknown
  Bacterial polypeptide expressing nucleotide sequence isolated from the Sargasso Sea
tatgttttttggaagtataccggcagtaataactccctttgcaaataataaagttgattatttatcatttgaaaaaattgtagactttttaatttcaaatggatctaatggacttgttccatgtggtacaactggagagtctccaactttatctcacagtgaacataaaaaaattatcgaagagtgtataagaattactgataaacgaattccaataattgcaggtactggatcgaataatactcttgaagcaatagaatatacaaatcatgctgaaaaagttggtgcggatgcagttttggtagttactccttattataataagcctacgcaattaggtttatataatcattataagtctattgcagaaaacacaaaacttccaattataatttataatattcctggaaggtctgttgtagatatgactatagaaacaatgattgagctttctaaaataaaaatatag

SEQ ID NO: 284891 - DNA, 316 bp, Unknown
  Bacterial polypeptide expressing nucleotide sequence isolated from the Sargasso Sea
atgtttaaaggttcaaatgttgctttagttacacccttcaagaatgataagcttgatgaggaatgttatataaaacttattaattttcatctagaaaatggcactaacggccttgtaccagcaggaacgacaggagaatcacctacattgtctcatgccgaacataacaaagtaatcgagctctgcattaatgaagccaaaggaaaaatacctgttatagcaggaacaggctctaattcaacagatgaggctgtagcactaactaaacatgccgaaaaagctggagccgacggagcattagttgttacaccatatt

SEQ ID NO: 284892 - DNA, 757 bp, Unknown
  Bacterial polypeptide expressing nucleotide sequence isolated from the Sargasso Sea
atcaccaacgcttactcacgatgaacaaatcgcgctaattgaagcagtcgcaaattcggttgatgctccagtaatagcaggaacaggcagcaacgatactaaagcagccgttgagcttacccagcgagctcaggcagtaggggcatcaggcatccttagcgttactccctactacaaccgaccctcacagcagggtttacttcaacatttcacgattatcgccgagtgtacggaccttccagtgatgttatacgacattcctattcgaagtggaagaaaaatcgaaactaaaacgattcttgaactagctcataatcttaagaatatcgtagcgctcaaagatgcagccggggacccatcagaaacagcctccctgctttctcaatcacctgacggatttcaaatttactcaggcgacgactcactaaacttagcactcctttcgattggagcttcgggagtagtcggagttgcaacgcattggacaggggctgaacaccagaatctagtgcatgcaattataaatggagactatgaagcggcaaagaaaatcaatcaatcccttcaagattcttttgccttcgagtcaactcttgatgcacccaatcctatccccacgaaagtaatgatgaatctcctcggattcaacgttgggcatgggagagcacccatggatacagttcctgaaggtcttttagagaaagcccaaagtattgtttcagctacaattgtcggatcccaaatgggtttctcgtaa

SEQ ID NO: 284893 - DNA, 342 bp, Unknown
  Bacterial polypeptide expressing nucleotide sequence isolated from the Sargasso Sea
tatgtttaaaggatcaaatgttgctttaattacaccatttaaaaacaatcaacttgacattgattgttacattaaattgatacattttcatttaaaaaatggaacaaatggcttagttcctgctggtacaacaggagaatctcctacattaagtcacaaagaacacgaaaaggtaatcgagttgtgtattaatgaagttaaaggaaaaataccgattattgctggcaccggttctaattcaactgaagaagcaatatctttaaccaagcatgctgaaaacgctggtgcagatggagctttgatagttacaccttattataacaaaccaacccaagaagggct

SEQ ID NO: 284894 - DNA, 441 bp, Unknown
  Bacterial polypeptide expressing nucleotide sequence isolated from the Sargasso Sea
agaagctggagatctatccaagtatgctgaaaaagcacgatcggatgctttgctcgtagttactccttattataataaaccaactcaagaaggattgtatcaacattataaaaaaattaatgacaatgtaggcataccaataattatctacaatataccttctaggtcggtaatagatatgtcagtagaaacaatgacaagattatatgagttaaaaaatatagctggcgtaaaagatgcaactggagatctcaatagagttgatcagcaattaaaatcaatgggaaaagaatttgtacaattaactggaaacgatgataatgcccttgaatttaataaaagaggtggagttggttctataagtgtaactgcgaatatagctgctaagctttgctcagaatttcaaaaatcttgcgtaaatgattttaaagactctgataa

SEQ ID NO: 284895 - DNA, 719 bp, Unknown
  Bacterial polypeptide expressing nucleotide sequence isolated from the Sargasso Sea
tgctctgaaaaataagctcccgctaatattaggaataagttcaaacagcactactgaactttgtgacttaattagcaaaactgatacaacaggtttcgaggcaattatgtcggtatgcccatactataataagccatcacaagagggaatttaccaacattttaaaaacgctgttgatatttctccattaccaatattgctttataatgtccctggcagaacatcttcagatattagtgacgatacaattataaaattaagttcatactcaaaaaaaattattggaattaaggaagcttcaggaataaccaatagaatagctaatcttagaaaaaatactcatgatgagtttttggtaatttctggggatgattttacaatgattgatgctgttagagctggtgctgatggtattatttcagttgctgcaaatgcttatccaagcatcatgaattcaacgtatattcaattattgtacgagaatgataaatcaaaaccacaaaatatttcaaaaacaaaactaaattcatctgaatttgtcttaaataactttttccaattaatttttgatgaagggaacccgagtggaataaaatttgcattgagcaaattgaatttgtgtaaagaaaaagttagattacctttgaccggaatctcaaataaattgaaagataaaattttaaaatttttaaaaaaatatccagctaatgacttataga

SEQ ID NO: 284896 - DNA, 745 bp, Unknown
  Bacterial polypeptide expressing nucleotide sequence isolated from the Sargasso Sea
actgggtgaatcacctacattatcacatgaagagcataaaaaaattgtagaagaaactataagaataaatgataaaagagtaccaattatagcagggactggatctaataatacgcttgaagctatagagtttacaaatcatgcagaaaaagctggtgcggatgctgcactagttgttactccatactataataaacctactcaaaagggtttatatgaacactataaatcaatatgcgaaaattcaaatattccaattataatttacaatatacctggaagatcaataatagatatgacaattgatactatggttgaactatcaaaactaaaaaatattattggtgtaaaagatgcaacgaatgacttgtttagacctgttttaactagaaaaaatcttcataaagatttttgttatctatcaggagaggatggaacagctttagcttatcttgcacagggtggtcatggttgtatttctgttaccgctaatattgctcccaaattgtgttctgaaatgcataaacattggagagatggtaatattaaaaaagctcaagaaataaacttaaaattatcaaatttgcatcatgcattatttttagagtccagcccaggtccaataaaatatgcagcttttttaaaaggcctatgtgaactagatacaagattaccattagctgaaattagtaatacaactaaagatgcagttagaaaatgtttaaaagaaaatgatttaatttag

SEQ ID NO: 284897 - DNA, 424 bp, Unknown
  Bacterial polypeptide expressing nucleotide sequence isolated from the Sargasso Sea
aatggctcgattcggtaaagttttaaccgctatggttacgcccttcggcgaatcaggagatttagatcttagtgttgccgcgtctcttgcaaattggcttatagctaatgggaacgacggtctagttatagctggaacaacaggagaatcacccaccctaactcatgatgagcaagctgaattgatcgcaaccgtagtgaatgcagttgacgctcctgtaatcgcaggagctggtagtaatgacaccagtgctgctatcgagctaactcaaaaagcagatcaggctggtgcctccgcaattttaagcgtaacaccctattataaccgaccttcgcaagccggattaatggatcatttccgagcgatagcaggagcgaccgaacttcctatagttctctatgacatacccgctcgaagtggaaga

SEQ ID NO: 284898 - DNA, 545 bp, Unknown
  Bacterial polypeptide expressing nucleotide sequence isolated from the Sargasso Sea
tcagcattacaaggctataaatgacaagtgtggcataccaattataatttacaatattcctgggagatcagtcattgatatgacagtagatactatggcaagattgtttgaactgaagaacatagttggagtaaaagatgcaactggtgatttgaatagagtagatgagactttcaaaaaaattggaaatgaatttatccaactaacaggtgaggacggtcttgcttatgaatataataaaagaggtggcgtagggtgtatttctgttacagccaacatagctcctaaaatgtgttctgatatgcaaaaattttcaaaatcagaagataaagatgagcagaaaaaggctggagagatagataaaaaacttcaacctgttcataaatctttgtttattgagagcaatccatcaccagttaaatacgcagctaaattaatcggcctttgtgatgataatgtgagattacctttggtaacagttttagatgaaacaaaagctgaggttaaaaaagctcttatatctgccgaattaattaatgaataaa

SEQ ID NO: 284899 - DNA, 278 bp, Unknown
  Bacterial polypeptide expressing nucleotide sequence isolated from the Sargasso Sea
tatgttttttggaagtataccagctcttataactccattcgataatgagaaagtagattatttggcttttgaaaaaataattgaaaattgtattattaacggttcaaatggtttagttccctgtggaacaactggtgagtcaccaaccttatctcacagtgaacataaaaaaattatagaagaatgtataaaaattaacgatacaagagttcctattatagctggcacaggttctaataacactgaagaagcaatagattttacaaaacatgctgaaa

SEQ ID NO: 284900 - DNA, 721 bp, Unknown
  Bacterial polypeptide expressing nucleotide sequence isolated from the Sargasso Sea
atctcataatgaacacaaaaggattattgatatctctgtaaaagaatgtaagagcaaaattcctgtagttgctggaactggttcgaactcaacaactgaagcagtagaactttctaaatatgctgaaaaagctggttcagacgctttgttagtagtcactccatactataacaaaccaacacaagaaggactgtatcaacattacaaaaaaattaatgacaatgtgggtattccaataattatctacaatattccttcacggtcagtaatcgacatgtctgtagagactatgacaaaattatatgaattaaaaaatatagcaggtgtaaaagacgcaacaggtgatctcaatagagttgatcaacaactaaaagcaatgggcaaagagtttattcaactgacaggaaatgatgacaatgctttggaatttaataagagaggtggggtcggttcgattagtgttacagctaacattgctgctaaactttgttctaattttcaaaaatcatgcttcaacgaaattaaagaagcagaaaaattagataagattttacaaccagttcatacggctatgtttttagaaagcaatccttcccctgtaaaatatgctgcttcacttttaggcatgtgtgatcctgaagtaagattgccattagttcaagttcaagaaagaactaaaaaaaaaatatcagaagctcttaaagttgctaaaatactttaa

SEQ ID NO: 284901 - DNA, 736 bp, Unknown
  Bacterial polypeptide expressing nucleotide sequence isolated from the Sargasso Sea
atgactgccattaagactccttacaggccggatggggaagtggatctaacaacctttgacagcttggtagaagcacagataaaaaatggtgtggagggacttattgtttgcggtacaacaggagaaggacaccttatggattgggaggagcatcttatgcttattgcgcactgtgttaataaatttggagatcatctgaccattgtcggcaacacggggagcaacaatactagagaggccttgaaaggtacaaaatatggtttttcatttggaatggacgcagcgctacagataaatccctattatgggaaaacttccgaagcaggtcttaaggaacatttcacacgggttttggatttgggaccatcaatcatatacaacgttccttcccgcactgggcaggatttacagcctgacttaattgagaaactagctgaacatcagaattttattggaatgaaagaatgtgcgggtaatgaaagaatggggtactatgagtcaaaaggcattgcttgttggtccggaaatgatgatcagtgttttgagggacgtcacagacatggttctcacggagtgatttccgtaatcagcaacctgtttccaggcctcatgagacgtctgatggataatgacgatcctaatttaaatgaacgcctgcaaccattgatggcttggttgtttcacgttccaagtccaaacgcactgaatacagtaatgagcatgactggagcaattc

SEQ ID NO: 284902 - DNA, 644 bp, Unknown
  Bacterial polypeptide expressing nucleotide sequence isolated from the Sargasso Sea
tgaagaagcagtatcactgacgaagcacgctgaaaaagctggtgcagacggtgctctagttgttacaccttattacaacaagcccactcaagaaggtttatatcaacattacaaagcgataaacgataacacaagcttaccaatcatcatttataatatccctggtagatgcgtaatcgatatgtcagttgatactatggcaaaactatttgagctaaaaaatatagcaggtgttaaagatgctacaggtgatttaaatagattagatcaaacaattaaaaaattaggatcagattttattcagcttacaggtgaagatggactagctcttgaatttaataagagaggcggtgtaggtataatttcagttacggcaaatattgccccaaaacaatgttctgatatgcaaaaattttctaaatcaatgaatagtgatgatattaaaaaagccgaacatatagataaaattttgcaacctctacataaatcactttttatagaaagcaatcctgctccagttaaatatgctgcaaaaattttaggactttgtgacgatgaaataagactccctttagttaatatacaaaaaaaaactgaggaagaggttaataaggccctttccttagccaaactagttgactaat

SEQ ID NO: 284903 - DNA, 619 bp, Unknown
  Bacterial polypeptide expressing nucleotide sequence isolated from the Sargasso Sea
gtatgctgaaaaaattggtgctaatgcagctttagttgttactccatattataataaacctactcaagaaggtttataccaacactttaagtcaataaatgacaactgctctattccaattataatttataatatacctcctcgatcagttgttgatatgagcgtcgatacaatgtcaagactttttgaattaaaaaatattattggagtcaaagatgcaacaggagatctaaacagagttgatctacaaagaaaaaaaatggggcctgattttatacaattgtctggtgaggatggaacagctttagaatttaatctacgtggtggagtaggatgtatatctgttacagcaaatgttgccccaaaactttgttctgaattccaagaagcatcaatttctaaaaataatagcaatttgctggctaaagctaaacaaataaacgaaaaattaatgcctttgcataaatcattatttattgaaagtagcccaagtccagtaaagtatgcggcaagcttgttaaatcttagttcagatgaggtgaggttgccattggtaaaagtaactgacgaaaccaagaaagttgttaaatcagcaatgtcacatgctaatttaatttag

SEQ ID NO: 284904 - DNA, 434 bp, Unknown
  Bacterial polypeptide expressing nucleotide sequence isolated from the Sargasso Sea
ttctaatcatcaaaacataattggaataaaagaagcagtaaataatcaaaaaaggattaatgagcttgttaaaatatccaaagaatctcaagaggattttctaattttttctggagatgatgaatccttttttaatttgatcagttcaggaggtcatggagtaatatcagttgctgcaaatgtgatacctaaatccatatctaatatttgcaaattaataatggaagaaagaatcgaagaagctaatgaactaaataaaaaatatcaaatactttacgatttattatttgttgaatcaaatcccattcctgtaaaatggatgttatcaaagatgggatttataaaaaattctttaagattacctcttattaatcttgataagaaatttgaagaaaatataatgtctgaaatgataaaattaaaattattatgaa

SEQ ID NO: 284905 - DNA, 307 bp, Unknown
  Bacterial polypeptide expressing nucleotide sequence isolated from the Sargasso Sea
tttgaaaggatcgcttaggcaaggaagcccaaaatttaatggctcaatgacagcattaattaccccttttgcaaacggtgaattagatattaaatcattcaaaaaaattgttaattttcaaatagacaatggaacagatggtcttattccagtgggcactacaggtgagtctccaactctaacacattatgagcatgaaaaaatagttgaggaatgtataaaagttgcggataatagagtacctgttattgcaggcgctggatcaaattcaacacaagaggcttgtaagcttgctaagcatgccgca

SEQ ID NO: 284906 - DNA, 589 bp, Unknown
  Bacterial polypeptide expressing nucleotide sequence isolated from the Sargasso Sea
tgcacttatagttactccttactacaataagcctactcaagaaggtctttaccaacattataaagctataaatgacaaatgtggaattccaataattatttacaatattcctggaagatcagtaatagatatgtctgttgatacaatggctaagttatatgagttaaaaaatataataggcgttaaagacgctactggtgatttgaacagagtagatgaaacactaaaaaaaatgggcaaagattttatgcaattaactggaaatgatgacaatgcattagaatttaataaaagaggtggtgttggagctattagtgtaacagcaaatatagcaccaaaactttgttctgaatttcaaaaattttctgttatgaatgatgaaaaatcaaaatctgaatctgaaaaactaaatgaaattttacaacccgttcatcattcaatgtttgttgaaagtaacccgagtccagtaaaatatgctgcgaaattattaaacctttgtgaggacgatgtaagactaccgttagttaaagtaacagactcaacaaaagaaattgtaaaaaaagctcttaagtctgcgaatttgatttaa

SEQ ID NO: 284907 - DNA, 568 bp, Unknown
  Bacterial polypeptide expressing nucleotide sequence isolated from the Sargasso Sea
tattacaacaaaccaactcaaaaaggactaataaatcattacacaaaacttgcaaatgaggtcgatataccacaaattttatacaatgtaccatcaagaactgcatgtgatattttaccggaaacagtagaggttctatcggctcataataatatcataggtatcaaagaagccgttgataccgaagaaagaattgatgatttaattgctatttcatctaataaccaaaactttcaattattttcaggagatgacccttcatttataaagatgattcaaaaaggtggcgatggagtaatttcagtcgctgcgaatgttgtaccaagtaaaatatctgagatatgtaaacttatagaagacaaaaaatatgacgaagctattaccattaatgacacccttacaaatttatatgatctattatttattgaatcaaatccaataccagtaaaatggatgttatttaaaatgaacttaataaaaaattccattaggttaccacttgaagagcttgatgaaatacatcaagaaaatattataaatgagatgttaaaattaaaaataatatgaa

SEQ ID NO: 284908 - DNA, 820 bp, Unknown
  Bacterial polypeptide expressing nucleotide sequence isolated from the Sargasso Sea
tttgaatggatcgcttagacaaggaagcccccaatttaatggttcaatgacagcattaataacaccttttgaaaatggtgaattagatattaaatcttttgaaaaaattgtcaattttcaaatagacaatggaacaaatggtctaattcctgtgggtactacaggtgaatcaccaactctatcacattacgaacatgaaaaaatagtagaggaatgcataaaagttgcagataaaagagttcccattattgcaggtgctggatcaaactcaacacaagaggcttgtaagcttgctaagcatgctgcaaaagcaggtgcacaagctgttctggttgtaactccttattataataagcccactcaagatggtttatattctcattttatggctgttgctgattctgcaaaaatacctataattgtttatgatattccgggtagatcaattattcctgttcatgacaaaactcttgttaaactatgtgaaaataatgaattaatagctggcataaaagatgctactgcagatatttcaagacctccaagattgattagattaattggaagtggtttttctcagctttcaggtgaagatgcaaccgcattgccatatttagctgcaggtggacacggatgtatttctgtatcatccaacattgttccacatttattatcagaaatgcataatgcatggaaaaatggagacatgaatggcgctttccaaatccatcttaagttaatcaactttcatgatgctatgttttgtgaaagtagtcctggtccagtaaaatttgcagctgaaaaaataggattggtgtaa

SEQ ID NO: 284909 - DNA, 279 bp, Unknown
  Bacterial polypeptide expressing nucleotide sequence isolated from the Sargasso Sea
tatgtttaaaggatcaaatgtagcattaataacgccattcaaaaataataaagtggatgaggaaaaatacattaaattaatcaattttcatattgaaaatggtactaatggcttggttccgtgcggcacaacaggagagtcgccaactttatcgcacgacgaacatgaaaaattaattgaaatttgtataaaagaatcaaatggaaaattgccagtaatagctggaacaggttctaattctacagaagaagcggtatctttaacaaagcatgctgaaaa

SEQ ID NO: 284910 - DNA, 523 bp, Unknown
  Bacterial polypeptide expressing nucleotide sequence isolated from the Sargasso Sea
aatgtttaaaggttcgatccctgcactgattactccgtttaaaaatggagaagttgacttttctgcacttgagaatttagttgagtggcatatcagcgagggtagtactgcaatagtggccgttggaacaactggtgaatctccaacacttagtcatcaagaacataaggaagttgtggaagcgataataaacttctcagcaaagaggataccaataatagctggtgcaggctccaatagtactgccgagtctatagaacttatggaattttctgaaaaagtaggagctgatgctgctttagtagttactccatactacaacaaaccaaatcaaaaaggtcttcttaatcattacacaagactgcatgataactcaaatttgcccattataatttataatattccaggtcgatcaatcattgatatgaaccctgatactatgggtcagttatccaaattaccacgaattattggggtaaaagatgcaactggtgatgtctctagggtttcaataccagagaaa

SEQ ID NO: 284911 - DNA, 586 bp, Unknown
  Bacterial polypeptide expressing nucleotide sequence isolated from the Sargasso Sea
tcagatgcgttattggtagttacaccgtattacaataaaccaactcaagaaggtttatttcagcactacaaaaaaattaacgacagcgtaggtataccaataatcatctacaatataccatcccgctctgtaatagatatgtcagttgaaactatgtcgagattatatgagcttaaaaatatagttggagtaaaagatgctacaggagacttaaatagagtagatcaacaattaaaagctatgggcaaagaatttattcaattaactgggaatgatgataacgctcttgagtttaataaaaggggaggtgtaggatctataagcgtaaccgcaaatatagcggctagactttgttcggattttcaaaagtcatgtgcaaataaatttaaagaatcagaaaagttagataaagttttacaaccattacatacggctatgtttatagaaagcaacccctcacccgtaaaatatgctgcttcattattaggcatgtgcgaccctgaagttaggctgcctttggtacaagttaaagaagaaactaaaaatcgaatatctaaagcccttaaagatgccaaaatactttaat

SEQ ID NO: 284912 - DNA, 622 bp, Unknown
  Bacterial polypeptide expressing nucleotide sequence isolated from the Sargasso Sea
tgaactttcaaagcatgcagaaaaatctggatctgatggtttattgatagtgacgccatattacaacaaacctacacaagagggactttatcagcattataaaaaaattaatgataacgttggtataccaattataatttacaatattccacctagatctgtaattgatatgaccgttgatactatggccagactttttgaattaaaaaatatagttggtgtaaaagacgcaactgcagatcttgatagagttgatcaacaattaaaaaaattaggaccagaatttattcaattatccggagaagatggaactgctttagaatttaataaacgtggtggtgtgggatgtatttctgttagcgctaatgttgctgcaaaattatgttcagaatttcaagaagcatgtttgaataagaatcacaataaagcaaaagatattaatgaaaaattaatgcctctacataaagcattatttatagagagcaatcccagtccagtgaaatatgcagcaagtttattaaatttatcatcagacgaagttagattgccgttagtaaaagttacaaatagcaaaactaaagatgaaataaagaaagctctaaaaattgctaatctgctttaa

SEQ ID NO: 284913 - DNA, 658 bp, Unknown
  Bacterial polypeptide expressing nucleotide sequence isolated from the Sargasso Sea
tggctgcggctccaacgacacgcggatcgcgctcgatcatatgtatgccgcgcaaggggctggggcggatgccgcactggtggtcgcgccctattacaacaaacccaatcaggacggcgtctatcagcatttcgcctatctcgccgaacgctgctcgctgccgatcgtcctctacaacgtccccagccgcaccattaccgacatcggcgtgccggtgatccaccgcctgtcggaagaatttcagacgatcgtggggatcaaggacgccaccgggaatctggggcgggtcagcgcacagcgtctcgcctgccgcccggatttctgccagctttccggcaatgacgaaaccgcattgggattcaacgccatgggtggcaaggggtgcatctccgtcaccgccaatgtcgcgccgcgccttaccgccgatttccaggcggcctgcgccgcgcatgactgggatggtgccttggcgttgcaggatcgtctttaccccttgcatgatgccctgttcagcgattcttcacccgggcctgttaaatatgcccttacgcgcgtgcggcccgacatgcccggcgacgtccgcctgccaatcacctggccgtcggaatccagccgggccgcggtcgaccgcgcgctggaaattgcggggctggtatag

SEQ ID NO: 284914 - DNA, 325 bp, Unknown
  Bacterial polypeptide expressing nucleotide sequence isolated from the Sargasso Sea
tatgtttaaaggatcaaatgttgctttgattacaccatttaaagacaatgtgctagatatagatagctatattaagttgattaattttcatattgaaaatggcacaaatggattggttccagctggtaccacaggtgagtctccaacactaaaccatgatgagcacgaaaaagtaatagaaatttgtattaaagaggcaggtggtaaaattccagttatagctggtacaggatccaactcaacagaggaagcaatttctttaactaaacatgcagaaaaagcaggggctagtggtgttttggtagtgacaccttattataataaa

SEQ ID NO: 284915 - DNA, 301 bp, Unknown
  Bacterial polypeptide expressing nucleotide sequence isolated from the Sargasso Sea
tatgtttaaaggatcaaatgtagctttaattacaccttttaaggacaacaagcttgacgaagaaagttacataaaaataattaatcatcatctggaaaatggaacaaatgggttagttccagttggaacaactggtgagtcaccaacattatcacatgatgaacatcagagaacaattgaattatgcataaaagaagctaccggtaaacttcccataatagccggcactggatctaattctacagaagaagcagtatcattaactaaacacgctgaaaaagcgggtgcggatggtgcttta

SEQ ID NO: 284916 - DNA, 580 bp, Unknown
  Bacterial polypeptide expressing nucleotide sequence isolated from the Sargasso Sea
tcttttaattgttacaccatattacaacaaaccaactcaagaaggactcttccaacattttaaatcagtcaatgataatgttggaattccaataataatttataatatacctccaagatcagtggttgatatgtcagttgaaactatggctagattattcgaattaaaaaatattgttggagtaaaagatgctacagcagatttagacagagttgataaacagttaaaaaaaatgggtccagaatttatacagttatcgggagaagatggaacagctttagagtttaatatgcgaggtggcacaggatgtatctctgttacagcaaatgttgcagcaaaattatgttctgaatttcaggaggcttgtttaaaaaaaaataacagcaaagcaaaagaaattaatgaaaaattaatgcctttacacaaagcattatttattgaaagcaatcctagtcccgtcaagtatgcagcaagtttgttaaaattatcttcagaagaagttagattaccactagttaaagttactgataaaactaaaaaagaagtcgagaaagctcttaagtttgcaaaattgctttaa

SEQ ID NO: 284917 - DNA, 683 bp, Unknown
  Bacterial polypeptide expressing nucleotide sequence isolated from the Sargasso Sea
aatgactgattttggaaaattattaacagcttcaatcactccttttgacagcaatggtgtaatcaatacagatacattttggagactctgtagaaaattagttcatgacaaatcagatggacttgttcttacaggaacgacgggagaatcacctaatcttacaataaaagatagagaaattatttattcaactgcactagattctgtcggtgataaagcaagcatagttgcaggaactggaacgtactcaacttctgaaactctagaaattacaaaaatggcagattcaatcggtgttcatggaataatgattgttactccttattattcaaaaccgtcacaacgcggaattctcaaacattttgaagaggtatcaaaagttacagatcttccaattatggcatataacatcccaggtcggacaagcaccttgattgaattagaaacattagtatcacttgctgatgatattggtatacattcaattaaggatgcagtaggaaattctgatttttctaaaaaagaattagaagccctacatgataaagttgacatttattcaggtaatgacaatgaaactcttgattttatgaaaaatggtggccaaggagttgtttcagtagcttctcatgttgttggaaatgaaatatatgagatgatggagtcgggtcaaaataatgata

SEQ ID NO: 284918 - DNA, 194 bp, Unknown
  Bacterial polypeptide expressing nucleotide sequence isolated from the Sargasso Sea
tatgcttaaaggatcaattgttgcattaattaccccatttaaaaatgacagtcttgatgaagacacctatagaaaattaattgattatcacttaaaaaacggcactaacggagtagttccaggtggcaccacaggagagtcacccactttatctcatagtgaacataaaaaaattattcaaattgccgttaaag

SEQ ID NO: 284919 - DNA, 583 bp, Unknown
  Bacterial polypeptide expressing nucleotide sequence isolated from the Sargasso Sea
ttctcttttagttacgccctattataataagcctagtcaaaaaggtttaatagaacattatttaaagatagctgactcttgtgacattaaacaaattttatataatgttccttcaagaactgcttgtgatttatctcccgatacagtcaagatactctctaaacacgaaaatataattggaataaaggaatcggttaatagtattgaaagaataaataagctaatggatatttcaaatgaaaataatgactttttagttttctctggagatgatgaatcatttatagatttgttaagcttgggtggacatggagtaatatctgttgcagcaaatgtaattccgaaaggcatatctgaaatttgtatgtttcacaaagataataaagatcatgctattaaattaaataaaaagtataaaaatttgtatgagctattgtttgttgaatcaaatccaattcctgttaaatggatgatgcataagatgggattaattaaaaactcaataagacttccacttattgaattagataagaaatatcaagaaaatatcatttcagaaatgttaaaattacaattaatatga

SEQ ID NO: 284920 - DNA, 823 bp, Unknown
  Bacterial polypeptide expressing nucleotide sequence isolated from the Sargasso Sea
catgtttagcggaagtattgttgctttgatcaccccgatggatccagatggtgctgtagattacggcagcctgaagcggttggtagatttccatctaagcaatcagaccgacgctttggtgattatgggcaccacaggtgagtcggtcactttaagtttttctgaacaagtccaggtgcttgaagctgttttggcgcaagttgatgcccgtattccggtgatcgctggtaatggttcaaattcaacagctgatgcagtagaaaaaaccaaaacattatctgctttgcccgttgcaggttttttaaccgttactccttattacaacaagccaatgcaaaaaggcatgctggcgcattatcaggccgttgctgcggcaacagacaagcctgttattttatacaacgtgccaggccggaccggtgtggatttgttgcctgaaactgtagctgaattggcaaaagtaccgaatattgtcggtattaaagaagcgacaggttctatgccccgtctggctcagttgcaggctttgtgtccggcagattttttattattcagcggtgacgatgccacttgctgcgaatttatgttaaaaggtggccacggcgtcatttcggtgactaccaatatagcacctgctttaatggctcaaatgtcgaaagcggcgatagaaaaaaatacagaattggcacaacagctcgatcagcagctacaaggcttacatcaccagctgtttattgaagccaatcctattccgagtaagtgggcactgctgaagatggggttaattgctgatgatatggcaagatttacctttgaccggttg

SEQ ID NO: 284921 - DNA, 623 bp, Unknown
  Bacterial polypeptide expressing nucleotide sequence isolated from the Sargasso Sea
aaaacacgctgagaaagcaggcgctgatggagtattagttgttacaccttattataataaacctacccaagaaggtttatatcaacactacaaatctattaatgacaatacagccctaccaattataatttataatataccaagtagatgtgtaatagatatgtcagttgatactatggcaagattatttgagcttaaaaacatagctggtgttaaagatgctactggggatttaaatagattagatcaaacgataagtaagcttggaaacgaatttattcaattaaccggtgaagatggattggcatttgagtttaataaaaggggaggtgctggtataatttcagttactgcaaatatagcacctagactttgttcagatatgcaaagattatctatatcaaaaaataaagatgatataaaaaaagcagaaataattgatagaaatttacaaccattgcataaagctttatttattgaaagtaatcctgctcccgtaaagtatgctgctaaaattttaggtttgtgcaatgacgaaataagactcccattagtaaatgtgaaaaaagaaacagaacaagaaattaataaagctctttcttttgccaaattaacaaattaat

SEQ ID NO: 284922 - DNA, 385 bp, Unknown
  Bacterial polypeptide expressing nucleotide sequence isolated from the Sargasso Sea
gctgcaagtcggtagaatagaagaagtaacagaattaagaactatttgtggttctgaattatctgtatatagtggcgacgattcattgttgcttccaatgttatctgtaggagctgtaggagtagtaagcgttgcaagtcatttggttggattgcaattgaaagagatgattcattcctttcaaagtggagaggtttccaatgcgcttgttattcatgaaaaacttcagcctctttttaaagcactctttatgactactaatccaatcccaattaaggctgctttggagctatcgggatgggatgtaggtaatcctagaagtcctttgtcaccattaaccaatgacatgaaaaagcaactatcttttatcctgaaatccttataa

SEQ ID NO: 284923 - DNA, 544 bp, Unknown
  Bacterial polypeptide expressing nucleotide sequence isolated from the Sargasso Sea
cagcatggcttatattcacacttcgaggcaataagtaaagcaacaactcttcctattattatttataatattcctggaagatcaattgttgacatgcacacaaatactatgagggaattatttaaaattaaaaatattgttggcgtaaaggatgctacctcagatatacctagagtttatgaaacaaaaaccacaataggaaatgattttaatcaattaactggggatgatgcaactactttagcatttatggtttatggtggccatggatctatttcagtaacatctaatatagctccaaaattgtgttccgaatttatgaaacattgtttagatcagaattttgctaaagcttcagagataaatgataaattgatgcctttacatcacgcgttatttattgaatccagccctgctccagtgaaatatgctgcgtctaagctcggtttatgtaatgatgacataagactgccgcttactagtatttcagaggaaactaaacaattagtagataaagccatgaatcacgcttcattaatataac

SEQ ID NO: 284924 - DNA, 685 bp, Unknown
  Bacterial polypeptide expressing nucleotide sequence isolated from the Sargasso Sea
aggaaaaattccagttatagctggaaccggttctaattctactgctgaagcaattgaattatcaaagcatgctgaaaaagctggagctaacggattattaatagttacaccatattataacaaaccaactcaagaaggactttaccaacattacaaactaataaacgataatgttgggataccaattattatatacaatattccgccaagatcagtaatcgatatgtcagttgatactatggctagactttttgaattaaaaaatattgcaggagttaaagatgcaaccgcagatctaagtagggttgatcaacaattaaagaaaatgggtccggagtttattcaattgtctggagaagatggaacagctttagaatttaatatgcgtggcggtgtaggatgtatttctgttacagcaaatgtggctgcaaaactttgttcagaatttcaagatgcatcattaagtaaaaataatagcaatctacttgccaaagctaaagagattaatgaaaaattgatgccactacataaagctttgtttatagaaagtaatccaagtccagttaagtatgctgcaagtttgttaaacttgtcttccgatgaagttagattacctttagtgagagtgacagacaaaacaaaaaaagaagtacagaaagctttaaagattgcaaatctgctttaa

SEQ ID NO: 284925 - DNA, 782 bp, Unknown
  Bacterial polypeptide expressing nucleotide sequence isolated from the Sargasso Sea
aaaaaatggtactaatggcgttgtaccggctggtacaaccggtgaatctccaactttatctcatattgaacataagaaagtaattgagatagcaattaaagaatgcaagggtaaaattccgattatagctggaaccggctccaattcaacttcagaagcgattgaactttctaaacatgcagagaatgccggcgcagatggcctattaattgtaacaccttattacaataaaccaactcaagaggggttatatcaacattataaatcaataaacgatagtgtaggcattccaattatcatttacaatataccttctaggtctgttattgatatgacagtagatacaatggcaagattatatgagttaaaaaatattcaaggtgttaaagatgctacgggaaatttaaacagggtaaccttgcagcttaacaaaatgggaaaagagtttattcaattaactggagaggatgataatgcgctcgaatttaataaaagggggggcgttggctgtataagtgttactgctaacgtagcaacaaaactttgcgctgattttcagaaagcctccttatcgaatgataatgaaactgctctatcgattaataaacttttatctccgatgcacaaagcactcttcattgaaagcaatccttcaccagttaaatacgctgcatcacttttaaaactttctccggcggatgtaaggttgccattagtacaagtaactgaaaaaacaaaagaagaaataaagaaagctcttaaatttgctaatttaatttaat

SEQ ID NO: 284926 - DNA, 619 bp, Unknown
  Bacterial polypeptide expressing nucleotide sequence isolated from the Sargasso Sea
atttcgtttgtagagcacgctaaaaatgtgggagcaaacgccgctttagtggttactccttactacaacaaaccaacacaggcgggtctgatagcgcatttcactgaattggcaaagattggacttccaataatcatatataatattccaggtcgttcggtcgtggatatgtccccagaaacaatgggtgagttagcgaaattaaatgaaattgttggtgtaaaagatgcaaccggagatttagccagagtttgtgatcaacgtcttagctgtggtgatgactttatacagctttcaggagaagacgcgaccgctcacggtttcaatgcccaaggaggcgttggttgcatttctgttacagctaatgtcgcgccagggctatgttctaaaatgcaggaagcaaccctcaaaggggattactccttggctcttgagtttcaagataaattaatgcctttgcataaagctatatttacagaacccggtctagttggtgcaaaatatgctatgagtaagttagggttatgtaaagacgaggtgcgccttccgcttactcctctttctgagccaaccaaagagaaaattcattcagcacttaagcacgcagatctaatttaat

SEQ ID NO: 284927 - DNA, 331 bp, Unknown
  Bacterial polypeptide expressing nucleotide sequence isolated from the Sargasso Sea
atgtttaaaggttcaaatgttgctttagtcactccatttaaaaataataaacttgatattgactcttatattaagttgattcattttcatattgaaaatggaacaaaaggtcttgttccagctggtaccacgggtgaatctcccactttaagccatgatgagcaccaaagagtgatagatttatgtgttaaagaaagtgatggaaaacttcctgtaatagctggcacaggttcaaactcaactgaggaagccatatctttaacatgtcatgctgaaaaaatgggtgctaatggagctttaatagtaacaccttattataataagccaaccc

SEQ ID NO: 284928 - DNA, 877 bp, Unknown
  Bacterial polypeptide expressing nucleotide sequence isolated from the Sargasso Sea
aatgttatttcacagttcttacacggcacttttaacgccatttaaagataatcaactagatattaacgcatatagaaatcttgttgattttcaaatagaaaatggaactcacgggctagttcctgtcggaacaactggagagtcaccaactttatctcatgatgaacacaaaaagcttgtggaagtatgtgttgaacaagctaatggaagagttcctgtaattgctggcgcgggttcaaactctacatcagaagcagtcgattttgttaagcatgcatgcgcagcaggtgcagatggtcttttagttgtaacaccatattataacaagccaactcaatctggtttgttagctcattataatgaacttataaaaaattcaagtaaacctattataatttatgatataccgggtcgctcagtaataaaaatgtcagataatactatggcggaattagctgaaaacgatttaattgttggtgtaaaagacgctactgctgatttggctaggccaacaaggttacaaagtcttattggagatgattttattcaactttcaggtgaagacggtacagcccttgcttatttagctgcaggtggtcatggctgtatatccgttactgcaaacatagctccaaacttattatcaagaatgcataacgcttggaagcaaggtgatattaccaatgcgcaagatataaataagaaattaatgcctttacatgattcattattttgtgaaaccagtcctggtccattaaaatatgcagcttcattattaggtatttgttcttcagaagcaagacttcctatagtagaaattgaagaaataagtaagaaaaatgttgataacgctcttaaaacagcagggttaatctaa

SEQ ID NO: 284929 - DNA, 859 bp, Unknown
  Bacterial polypeptide expressing nucleotide sequence isolated from the Sargasso Sea
aatgaaaggaagtatagttgcaatagttacacccatgaaatcagattattcggttgatttccattctttaaaaaagcttttcctctttcatgaagaggctaaaactgacggtattgttttaataggaacaacaggtgaagctggaactttatccatatcagagagagaagatatttataaatttgcttgtgacaacactgcaattccattaatggctggagtaggaagttcgtctacttcggattcattaaagtttatagatttggctcttaactgcggaatagaaaaatgtttagctgttaccccatactacaataagccctcacaggaaggtttgatagcacattttaaaaagctcgcaagttctgatgccttgatatatttatacaatgttccgggcaggacgggagttgatctgcaacctgaatcagttgatgaattattaggtgaaaataatatcgtaggtattaaggaggctataaacacacatgacagaatggaaaagctttcaaagcttctagaaaaaagaaaagatttttatttgttatctggagatgacccaagttttgttgagtttggaaaatacggtgcagtaggcataatttctgttgcagctaatatagttccagaagtaataaaacaaatttctgatttaattcaagagaaaaatttcgaagaggctgctttgataagtaaaaaatatgaaaagttattcaatattttgcttgagaatagtccaggaccctctaaatatctacttgcaaaaataaaaatgctagagaataatcttagattaccacttgtgaaaatatcggaaaaactgggaaaagaaattgatgaaatttactcaaatacttaa

SEQ ID NO: 284930 - DNA, 883 bp, Unknown
  Bacterial polypeptide expressing nucleotide sequence isolated from the Sargasso Sea
atgactgagtttggtagtttattaacagcttcaattactccatttgattcacgaggtgtattaaatactgacactctttggagactttgtagaaaattggtgcatgacaaatcggaaggacttgtacttactggaacaacaggagaatcaccaaacctttcaattaaagacagagagattatttactccactgctatagattctgtgagtgataaagctaagattattgctggtactggtacatattcaacttctgaatcaattgaaattactaagatggcagattctcttggagtagatggaataatgattgttactccgtattattcaaaaccttctcaacatggaattttgcgtcattttgaagaaatatcaaaaataacagatcttccaataatggcttacaacattccagggcgtacaagtacattaattgaacttgaaactcttcagacacttgttgatgatatcggcattcactctattaaagatgcagttggtgattttgaattttctaaaaagcaacttgaattgttaaaggataaagcagatatttattctggaaacgataaccaaacatatgattttgtaataaatggtggagtaggagtagtttcagttgcatcacatgttgttggtgatgagatttctgaaatgataagttttgccaaagataatgatttagaaaaagctgaagagatcaatatgcaattatctaatttattcgaagcaatatttgaagagccaagtccaggaccaattaaaaaaatcttatctgaaagttgggaggaagttggagagcctttacttccaataacctcaattacacctgaattagccaataaaattaggggtttttacaaaaaaataaaggaaaattagg

SEQ ID NO: 284931 - DNA, 877 bp, Unknown
  Bacterial polypeptide expressing nucleotide sequence isolated from the Sargasso Sea
aatgtttaaaggctcaattgtggcattggtaactccttttaaaggaaatgaaattgatgaatctgctttaagaaagcttgtcgattggcatatatctgaaggaacagatgggatagttcctgtaggaactacaggtgagagcccgactctgaatcatgatgaacatgaacgtgtagtagagatagtcattgatcagtgtaataagagagtaccaattattgctggaacgggatcaaattctactgcagaagctattaacttattaaagcacgcagaaaatgccggtgctgatgcggcattagtagtcacaccttattataataaacctactcctgagggattgtatgctcattatgaggcattagattcagcctcttctggcattccaataattatttacaatattccatcacgctcagtaattgatattgatgttgatttgatgggaagattatcgcaacttgattctattgtgggcgttaaagatgctacaagtgatatttctcgaattaaacaacataaagagttatgtaaaaatgattttattcagctatctggtgaagatgaaacaatttatgattatatgataaatggtggacaaggatgtatttccgtaactgctaatattcttcctaaaatttgctcagatatgcataaggctttttcaaataatgatttaattgaagccaaaaagctaaatgaaaccttaatgcctttgcacaaagctctatttgttgaaactagtccatctccagtgaaatatatattatcaaaaatggatctaatagattatgaaattagacttcctcttgtcgaaattagaaatgaaacaaaagatattcttgataaaattattaatgatctagagataggataa

SEQ ID NO: 284932 - DNA, 528 bp, Unknown
  Bacterial polypeptide expressing nucleotide sequence isolated from the Sargasso Sea
attgactgcaatggttactccattcactgagaatggagatgtagattatgaactagctataaaactttcaaattatctttttgagaacggttccgatggaattgtgctgtgcggtactactggagaatctccgactctttcatgggcggaacagcatgatttatttattgcggtaaaaggatctttggatgcaagctgtaaagtaatagttggcactggtagcaattgcacaagcgaagctgtggaagctactaaaaaagcttacgactctggtgccgacggtgctttggtcgttgttccttactacaataagccgcctcaagaaggtctttataaacatttcagttctattgctaaatctgcgaaggatttgcctcttatgctatacaacattcctggcaggactggatgcaatttattacctgatactgtgaagaaacttatggatttctcaaatattctcagtattaaagctgcaagcggtagaatagaagaagtaacagaactaagagctatttgtggctccga

SEQ ID NO: 284933 - DNA, 877 bp, Unknown
  Bacterial polypeptide expressing nucleotide sequence isolated from the Sargasso Sea
atgtttaaaggatcaattgtagcgttagtaactccctttaaaggaaatgaaattgatgaatttgctctaagaaagcttgtcgattggcatatatctgaaggtacagatggaatagttcctgtgggaactacaggtgaaagcccaactctgaatcatgatgaacatgagcgtgtagtggaaattgttattgatcagagcaataagagagtaccaattattgctggaacaggatcaaattctactgcggaagctattaacttattaaaacacgcagagagtgccggtgctgatgcggcacttgtagttactccttattacaataaacctactcctgagggattatatgctcattatgaggcgctagactcagcttcttctggtattccaataattatttacaatattccatcacgctcagtcattgatattaatgttgatttaatgggaagattgtctcatcttcaatcaatcgtgggtgtcaaagatgctacaagtgatatttctcgaattaaagaacacaatgaattatgtgaggatggctttattcaactttcaggtgaagatgaaactatttatgagtacatgattaatggaggacaggggtgtatttcagtaacagcgaatattcttccaaaggtttgttcagatatgcataaagctttttccaataatgatttagaagaagcaaaaagacttaacaatatacttatgcctcttcataagtccctctttatcgagacaagcccatctccagttaagtatattttatctaaaatggatcttattgattatgagattagattgcctcttgttaaaattagacaagaaacaaaatcgatacttgatgaaattatatctaatttagagataaaataat

SEQ ID NO: 284934 - DNA, 678 bp, Unknown
  Bacterial polypeptide expressing nucleotide sequence isolated from the Sargasso Sea
gccggattccgggtgatcgcggggctcggcgcggcaactccaccacggaagccatcgaactcacgcagcaggccaaggaagtcggcgcggacgccaccttgcaggtcgtgccgtactacaacaagccgacccaggaaggcatctatcgccacttcgcgaagattgccgaaaccgtcgatctgccggtgatcctgtacaacgtgccgggccgcacggtcgcggacatgagcaacgaaacgattctgcgttgcgcgcaggtgccgggcatcatcggtgtgaaggaagcgaccggcaacatcgatcgcgccgcgcatctgatcaagtcggcgccggcccatttcggcatctatagcggtgacgatcccacggcgatcgcactgatgctgcttggcggccacggtaatatttcggtcaccgcgaacgtcgcgccgcgcgcgatgagcgagctgtgcaaagccgcgctggccgcggacgccaagactgcccgcgagattcatctgaaactcctgtcgctgcataagaacctgttcatcgaatcgaacccgattcccgcgaaatgggcattgcagcaactgggtcgtgtgcagggcggaatccgcctgccgctcacgccgctcgacgcgcaataccacgaagtggtgcgcggcgcgttgcgcgaagcgggtctgctgggctaaa

SEQ ID NO: 284935 - DNA, 595 bp, Unknown
  Bacterial polypeptide expressing nucleotide sequence isolated from the Sargasso Sea
gctggtgccgatgcttctctatctgttacaccttattacaacaagcctacacaagaaggtctattccaacactacactcagattgcagatcaagttgaattccctcaggtgctttataacgttccaggaagaactagttgtgatttactgcctgaaactatcgccaggctagcacctcatgaaaatatttcaggaatcaaagaggccacaggagatctatcaagattagacatactcaaaaaattaataagtgatgaaactttttttctatactcaggtgacgatgccacggcaacagactttattctgaatggaggtcatggaaatatttcggttactgccaatgttgtacctgatctaatgtctaaattatgtgattttgctcttgaagaatcttcagaggcaaaagttatagaaagtaaaatttctaatttgaatacaatgctatttttagaatctaatcctatacctgtaaaatgggttttaagtagaatgggattgatagacattggaattagattacctttaactaacctctcaaaagagcatcaacaaaccttgcaagaggaacttctaaaacttgagttaatttgaa

SEQ ID NO: 284936 - DNA, 786 bp, Unknown
  Bacterial polypeptide expressing nucleotide sequence isolated from the Sargasso Sea
atgatgttatttatttagttgttcaaggtacaactggggagtcagcaactctatctgaagaggaaaaaatatctattttggaatttattattgaaattaataatagtagattacctattctttttggagttggaggtaataatacttttgaaacaataaaaaaaattgattttttttcaaaatataaaattgatggatttctttctgtaagtccatactataataaacctactcaatttggaatttatgaacattttaaaaatatttccaaagcaacaaaccatcctataattctttacaatgttcctagtcgtacaagctctaatatgtcttctgagacaactcttaaattagctaatgattttaataatattgttggaattaaagaagcttctggaaatttggatttaataatgagaattattaataataaaccaaaaaattttttagttatttcaggtgatgatgctttaacattagctcatcttgctcttggaggatcgggtgttatatctgtaattgctaatgcgttccctaaaagactttcaacaatggtcaattcatgtttaaatagtaatttaactatatcaagagagaagcactatgagctcttagaaattataaattttatatttaaggatggcaatccagctggaattaaatatttgttaaaattaattaatatttgctcagatcatgtgagacttcctcttgttaatataaaaaaatctacagctgataaactttataaattagtagcagaaattgataatacattagtttagt

SEQ ID NO: 284937 - DNA, 862 bp, Unknown
  Bacterial polypeptide expressing nucleotide sequence isolated from the Sargasso Sea
ttgaaaggaagtgtcgtagcaattgttaccccaatggacaataaaggatcaattgattttgattcatttagtaagttaattaaatttcatgaagactcagaaactgatggaatagttcttgttggcacaacgggagaatcagcaacactaaataaggaagaacgcgaagaaatatttaaatttgcaaaggattcaacagatattcctttaatggcaggaataggaagctcgtctacattggaagcttgtgaacttgcaggtatagctttaaaaaacaatataaatgaatgtttagcagtaacaccttactacaataaaccttctcaaaagggattgtctcttcactaccaagagttatgtaaaacaggagctaatatagtcttatataacgttcctggaagaacaggagtagatcttttacccaaaactgttcttgaacttgctgaaatagaaaatattacaggtataaaagaagctgtaaatactaaggatagatttagggagctattagaagtaaaagcaattaggcctgaatttttattgctgtcaggagatgatccaacattcgttagttttatgagagagggggcagatggaattatttctgtggccgcaaatgtaattcctaaacaaataaaagaattgagcgatttatgtttttctaaaaaatttgaagaagcaaaaacaattaatgagaaatatttaaatttttatgaacttttatttacagaagcaagtccaagtccttgtaaattcttacttgaaaaaatgtcgttactagagaataatcttagattacctttgcacccactttcagaggaatttagggaaaaaatatatgaagcttttaataaaatttagt

SEQ ID NO: 284938 - DNA, 686 bp, Unknown
  Bacterial polypeptide expressing nucleotide sequence isolated from the Sargasso Sea
aaaatcaaaaggaagagtacctgttattgcaggggcaggttctaataatactagagaatctgtagaccttatgaagtttgcaaaaaaggtaggagcagatgcagccttaattgttacaccttattataataaacccaaccaaaaaggactacatttacactttagtaatcttaatgattgttgtgatttaccaattattatttataatattcctggaagatcaattgtggatatggatatattaaccttatcatcactttcaaaattaaaaaatataattggaattaaagatgcaactggtgatgtaagtagagtatcagataccagaaaatactgtggtgaaaattttattcaattatctggtgaagatgcatctgcgctcggttttaacgcacatggtggagttggatgtatatctgtaatagcaaatgctgcaccaaaattatcagctgaattccaaaaagctatgcttcagtgtgactataaaaaagctcttatattacaagataaattactaccacttcatagagctacttttctagaaccaagccccgcaccaataaaatacgcgctaaataaattagggaaatgcgttaatgaactgcgagcacctttggtaacagtaaacgaaaatactcaaaaaattatggataatgcattaagacatgcagaattattaaattaat

SEQ ID NO: 284939 - DNA, 583 bp, Unknown
  Bacterial polypeptide expressing nucleotide sequence isolated from the Sargasso Sea
ctcttcttgtactccttattataataagccaactcaggctggcttgataaaacactacacaaagatcgctgattcttgcaacataccacaaattttatataacgttccctccagaacttcatgtgatttacttccagaaacagtaaagcatctatccaatcataggaatattgttggaattaaagaagctgtgaatgataaacaaagaataaatgatttaataaacatttctaaagataacgataactttaaaattttatcgggcgatgatccgactttctgcgaatttcttcaattaggtggtgatggtgtgatttcagtagcagcaaatgtaatacccaatgatatttcaaaaatctgtaaagcagttcgtaataataataatgaagaagcaacagaaataaataaaaaatattttaatctatatgaactgctatttattgagtcaaatccaattcctgtaaaatggatgttatataaaatgggcctcatagacaatattctaaggctaccattaattgaattagatactaagtatcatgaaattatttcagctgagatgataaaattacagttaatatga

SEQ ID NO: 284940 - DNA, 319 bp, Unknown
  Bacterial polypeptide expressing nucleotide sequence isolated from the Sargasso Sea
atgtttaaaggttcaaatgttgctttaattactccatttaaaaataataagcttgatattgatgcttatataaaaattatacattttcacttagaaaatggtaccaatggtttagttccagctggaacaacaggggagtcaccaactttggaccatgatgaacaccagaaagttattgaattgtgtataaaagaagcaaaaggtaaaattcctgttattgcaggcacaggatcaaattcaacagatgaggcaatatctttaactaagcatgctgagaaaatgggtgcagatggagttttggttgttaccccttattaca

SEQ ID NO: 284941 - DNA, 313 bp, Unknown
  Bacterial polypeptide expressing nucleotide sequence isolated from the Sargasso Sea
atgtttaaaggatcaattgtagcgttagtaactccctttaaaggaaatgaaattgatgaatttgctctaagaaagcttgtcgattggcatatatctgaaggtacagatggaatagttcctgtgggaactacaggtgaaagcccaactctgaatcatgatgaacatgagcgtgtagtggaaattgttattgatcagagcaataagagagtaccaattattgctggaacaggatcaaattctactgcggaagctattaacttattaaaacacgcagagagtgccggtgctgatgctgcacttgtagttacacctt

SEQ ID NO: 284942 - DNA, 315 bp, Unknown
  Bacterial polypeptide expressing nucleotide sequence isolated from the Sargasso Sea
aatgaatcaagtattaaaaggaagtattgtagctttagtgacaccaatgaaaaaaaatggtgatatagattttttgtcattggataaattaattgagtggcatattggtaatggtacaaatgctattgtctctgttggcaccactggcgaatcagccactttgagtgttaaagagcacttgaaagtcattgaacatactgtaaaaaaagtagataaaagaataccggttattgcaggctctggttcaaattcaacatcacaagctattgaaactacctggaatcagaaaaaattggcgcagacttcgctctcttg

SEQ ID NO: 284943 - DNA, 193 bp, Unknown
  Bacterial polypeptide expressing nucleotide sequence isolated from the Sargasso Sea
tatgtttcaaggttctcatacagctctaatcacgccctttaaggaaggctcaatagacgaagcgtcatttaggtcacttattgattttcaagtcactgagggtatccatggtcttgttccagtaggtaccactggcgaatctccaacactcagtcatgaagaacataagtttgcagtagaggtgtgtattgat

SEQ ID NO: 284944 - DNA, 862 bp, Unknown
  Bacterial polypeptide expressing nucleotide sequence isolated from the Sargasso Sea
ttgaaaggaagcatagtagcaattgttaccccaatgaatcaagatgagacaattgattttgattcatttattaagctaattaaatttcatgaagattctcgaactgatggaatagttcttgttggcacgacaggtgaatcagctacattaagtaaaacagaacgagaagaaatatttaaatttgcgaagagtgctacaaatattcccttaattgcaggaataggaagctcatcaacatcagaagcgtgtgaacttgcagatatagccttaaaaaacgacataagagactgtttagctgtaacaccctattacaataagccctctcaaaaaggactgtctcttcactatgaagagttaagcaaaacaggagctaacgtaatcttatataacgttccaggaagaacaggagttgatcttttacctagtactgttcttaaactcacagagaatcaaaatattacaggcataaaagaagccgtaaataccgagagtaggtttaaagatttattagcagtcaaagcaatgagaccagacttcttattactatcaggagatgatccaacatttgtaagctttatgaaatcaggagcagacggcattatctctgtagcagcaaacgtaatgcctaagcaaataaagaaattgagtgatttatgtttttctaaaaaatttgaagaagcagaagcaattaataaaaaatatttgaatctttatgaacttttgtttactgaagcaagtccaagcccttgtaaattcttacttgaaaaaatgttgttactagagaataatcttagattacctttacacccactttcagaggaatttaaggaagaaatatatgaagcttttaataaaatttaac

SEQ ID NO: 284945 - DNA, 694 bp, Unknown
  Bacterial polypeptide expressing nucleotide sequence isolated from the Sargasso Sea
gctggtggtcaagctggtagcggggcgcattccggtgattgccggggccggctccaacaacccggtcgaggcgatcgaatacacccgtcatgccgagcaggcgggagccgatgccaccctgcacgtggccggttactacaaccgccccaatcaggaggggctctaccaccacttcaaggcggtgcacgacgccaccagcaagccgatcatcgtctacaacatcccgccgcgcgccatcgtcgacgtgcagccggccaccctggcccgactggccgagctgccgcgcattgccggggtgaaagacgccaccggcgatctggcccgcccctggaccgaacgccagctgatcaagaagccgtttgcctggctgtccggtgaagatgccaccgcagtggcctacaacatcggcggcggtcagggctgtatctcggtgaccgccaacgtggcgcccaagctggtggctgaagtgcagaacctcacgctggccggccagtggcaagccgcgcgtgaactgcaagacaagctgattccgctccatcaggcgatgtttgccgagccaagccccgccggtgccaagtatgcggtctccctgctgggcttttgcagcgaggagtgccgcctgccggtgatgccgctgtccgaggcgacgcgcacccgcattcgtgacgcgatgcaggcgttgaatctgttataa

SEQ ID NO: 284946 - DNA, 649 bp, Unknown
  Bacterial polypeptide expressing nucleotide sequence isolated from the Sargasso Sea
gaactctaccgaagaagctgtaagtttaacaagacactctgagaaagctggcgcagatggtgctttggttgttacaccatactacaacaaaccaacccaagaaggtttataccaacactataaatcaattaacgataatactagtcttccaattataatatataatattccaagtagatgtgtgattgatatgtctgttgatacaatgtccagattgtttgaacttaaaaacattgcaggagttaaagatgccactggagatttaaataggctcgaccaaacaataaaaaaattaggaccagaatttatacagttaacaggtgaagacggtcttgctcttaaatttaataaaagaggaggcgtaggtataatttctgttacagcaaacattgcaccaaaactgtgctcagatatgcaaagattttctaaatcaaaatcagataatgaaatcaaagaggcagagagaattgatcaattgttacaacctttgcataaatctttgtttatagaaagtaatccagcaccagcaaagtatgctgctaaacttttaggattatgtagtgacgaaatcagacttccattagttaaaataaaaaaagaaacagaggaagaagttaaaaaagctttaagttttgcaaaattaatttaa

SEQ ID NO: 284947 - DNA, 280 bp, Unknown
  Bacterial polypeptide expressing nucleotide sequence isolated from the Sargasso Sea
atgcaaccccttcaaggtagttttgtagctttagttaccccaatgttccaaaatggtgagttggactatggatcattaaaggatctaattgaatggcaaatcaaagatggtataagtggaattgtttctgttggaacaactggcgaatcagctactgttaatgttatggagcatctagaaattattgagaagacaatagaatataccaacggaagagttcctgtaattgcgggaacaggaaataattcaacacaggaagctatagaattaaccaaaacag

SEQ ID NO: 284948 - DNA, 706 bp, Unknown
  Bacterial polypeptide expressing nucleotide sequence isolated from the Sargasso Sea
gatgcaagtgttaaatggaagtattgtagctttagtgactccaatgaatgaagatggctcagttgatttcaatgctataaaaaaattagttgattggcacgtaaaagagggcaccagtggaattgttgcagttggaacttctggagaatcagctactttagaaattgatgaacatcttgaggtaattaaaagtgtagttaaatatgcagatggaagaattcctataattgctggatctggctctaattccactgcacaagctattaaaacaacttctgaatcatacaaaattggagcagattattctcttctagtaactccttattataataagcctagtcagaaaggcttaatagaacattatttaaagatagctgattcttgtgacattaaacaaattttatataacgttccctcaagaacttcttgtgacttaagacctgatactgttgaaatactttcaagacacgaaaatattattggaataaaggagtcagttaatacaaaagagagaatgaaaaaattaaaaaatatttctgacttaaataaagattttttagttttctcaggagatgatgaaacatttatagacttattatctattggtggaagtggggtaatttcagttgctgcaaatgtaattccaaaagcaatatctgaaatttgtatgtattatgctgatgataaaagtcgcgcaattgagtaa

SEQ ID NO: 284949 - DNA, 404 bp, Unknown
  Bacterial polypeptide expressing nucleotide sequence isolated from the Sargasso Sea
tggcgttaaagaagcttcggggaatttagtccaggttagcgaaattattaaatcctgcggacctacttttaaggttatttcaggcgaagacgcactcacttggccgatactagctttaggtggcaagggagtaatctcggtcactgcaaatcttgtccccgataagttcgctcgtttatgcagcgcggcacttgcaggggatatggagacggcacggtcggtacattatgaattgatgaaactcaatgacattatgtttatcgagacaaacccgattcctgtcaaaacggcacttgctattatgggtcgcattgataatgagtttcgcgcgcctctttgcgcgccatctgaaaacaatctggcagcattgcaatctgttcttaaagaatattccctggcatagc

SEQ ID NO: 284950 - DNA, 575 bp, Unknown
  Bacterial polypeptide expressing nucleotide sequence isolated from the Sargasso Sea
ggtggtgccgtattacaacaaaccccctcaggacggcctggctgctcatttccgtgccatcgccgaggcagcaccagaactgccactgatgctctacaacattcctgggcggacgggatgcagcatggcgcctgagacggtggcgcagctgatggactgtcccaacgtcgtcagtttcaaggccgccagtggcaccaccgaggaggtcacggccctgcggttggcctgcggctcgcagctggcgatctacagcggtgacgacggcctcaccctgccgatgatctccgttggagccgtgggggtggtgagtgtggccagtcatgtggtcggcccccagatccgcgccatgattaaggcctacatgcagggcgacgcagccgttgcccttgcccttcacgaacagctgcagcccttgttcaaggccctgttcgccaccaccaatccgattccggtcaaagccgcgcttcaaatcaacggctggtccgtcggcgatccacgaccacccctatcccccttatctgacgacatgagatcaactcttgctcaaaccatggctgcccttcgtcagacctgac

SEQ ID NO: 284951 - DNA, 520 bp, Unknown
  Bacterial polypeptide expressing nucleotide sequence isolated from the Sargasso Sea
acttgcaaatgaggtcgacataccacaaattttatacaatgtaccgtcaagaactgcatgtgatatattgcctgaaacagttgagattctatctaatcataataatattgtcggcattaaagaggctgttgattccaaagaaagaattgatgatttaatagccatttcatccaataaccaaaattttcaattattttcaggagatgacccttcatttataaagatgattcaaaaaggtggcgatggagtaatttcagtggctgcgaatgttgtaccaagaaaaatatctgagatatgtaaacttgttgaagaaaaaaaacatgatgaagctaatattattgataatactctttcaaatttatatgctcttttatttattgaatcaaatccaataccagtaaaatggatgttatttaaaatgaacttaataaaaaactctattaggttaccacttgaagaacttgataaaatatatcaagaagatattataaatgagatgttaaaattaaaattaatatga

SEQ ID NO: 284952 - DNA, 517 bp, Unknown
  Bacterial polypeptide expressing nucleotide sequence isolated from the Sargasso Sea
tgctgactcagtttctatacctggtctactttataatgttcctagtcgaacttccctaaatatggatacagatacgactttaaagttagcaaaaatagataatatcgttggagttaaggaagcatcttcagatcctgatcagataactaatattatttctgattctcctgaaaactttaaagtttggagtggaaatgataatgagacattttcaatcatgtccacaggtggacatggagttgttagtgtagcttcaaatataattgggaatcaagttaaaaaattgatgggatttatattggatgggcaaactgaacttgctgcaaaagagcataaaagattattattattcttcaatgctttattttgggtcaccaaccctattccaataaggcatgctttgaacagatctggatttagaatgggtcctcctagattgcctatggttgaagctccaaaagattttactgataaatttgatcctgttatggatcaatatgatatggatatttcttaa

SEQ ID NO: 284953 - DNA, 859 bp, Unknown
  Bacterial polypeptide expressing nucleotide sequence isolated from the Sargasso Sea
atgaaaggaagtatagttgcgatagttacacccatgaaatcagattattccgttgatttccattctttaaagaagctttttctttttcatgaagaggctaaaacagacggtattgttttaataggaacaacaggtgaagctggaactttatccatatcagagagagaagaaatttataaatttgcaagtgataacactacaattccattaatggctggagtaggaagttcgtctacttcagattcgttaaagtttattgatttggctcttaactgtggaatagaaaaatgtttagctgttaccccttactacaataagccttcacaggaaggtttagtagcacattttaaaaagctcgcaagttctgatgccttaatttatttatacaatgttccgggcagaacaggagttgatctacaacctgaatccgttgaagaattattagatgaaaataatgtcgtaggcattaaggaggcggtaaatacaaaaaatagaatggaaaagctttcaaagcttctgaaaaaaagaaaagattttgatttattatccggggatgacccaagttttgttgagtttggaaaatatggtgcagtaggcatcatttctgttgcagctaatatagttccggaagtaataaaacaaatttctgatttaattcaagagaaaaattttgaaaaagcagcctcaataagtgaaaaatatgaaaagttattcaatattttgcttgagaatagtcctggaccctctaaatatctacttgcaaaaataaaaatgctagagaataatcttaggttaccacttgtgagaataccggaaaaactggagaaaaaaattgatgaaatttactcaaatacttaat

SEQ ID NO: 284954 - DNA, 895 bp, Unknown
  Bacterial polypeptide expressing nucleotide sequence isolated from the Sargasso Sea
aatgataactgaagatagattaataacagctatgattactccatttcaaaaaaatggagatgtggactatgatgtagcaaaaaatctcgcagtagcactatcaaaatctggaagtgatggaattttaataggaggaaccaccggagaatccccgacgctttctgatgaagaaaagttaaaattatttaaagtcgttaaagaggcagtaggagataatgctagagtaattgccggaactacagacaacaacaattcaaaatccattgagttgtcggtagaagctcaaaaattaggtgttgatgccttacttttaacagttcctgcatataataagccaactcagcaggggttaatagatcattttagtaaaattgctgattcagttgaaataccagggatcttatataacgttccaggaagaacatccttaaatatgaccgcagaaacaacactcgctttatcttctcatcaaaatatagttggaattaaggaagcatcaagcgaccttggtcaaataacaagcattataagtgagtcatcgggtaccgatttcagagtatggagcggaaatgatgatgagacattttcgattatggctctgggaggttttggagttgtaagtgtagcttccaatatagttggagttcagattaagagaatgattggttccatcctagaaggaagcatagaatctgcagctgatcaacacaaagaattacttccgctttttcaaggattattttggataacaaatccaatattaataaagagagctttaaatttatcaggatttgaagttggcggattaagattgcctatgaaagatagtgatgagttgaatagagatttttctgaattattatctagatacgatattgatgttaccaacgtatag

SEQ ID NO: 284955 - DNA, 907 bp, Unknown
  Bacterial polypeptide expressing nucleotide sequence isolated from the Sargasso Sea
catggctaacggcacccaagacggcattcaaatccgcggaagcatccccgcgatcgtcaccccgatgctcgaagacggcagtctcgacctgccggcgtttcgcaaactgatcgactggcacatcgcggaaggcaccgatgcgctcgtcgtggtcggtacgagcggcgagtcggcaaccctcaacgtcgaagagcacatcctgatgatccgcacggcggtcgagcatgcggcgaaacgcatcccgatcatcgcgggcgcgggcggcaactcgaccgccgaggcgatcgagctgacgaagcacgcgaaggctgtcggcgcggacgcgacgctgcaggtcgtgccgtactacaacaagccgacgcaggaaggcatctaccgtcacttcaagacgatcgccgaagcggtcgacctgccggtgatcctgtacaacgtgccgggccgcacggtcgccgacatggcgcacgagacgacgctgcgcctcgcggaagtcccgggcatcatcggtgtgaaggaagcgaccggcaacatcgatcgcgccgcgcacctgatcaaggccgccccgaagcatttcgcgatctacagcggcgacgatccgaccgcgatcgcactgatgctgctcggcggccacggcaacatctcggtgacggcgaacgtcgcaccgcgcgcaatgagcgacctgtgccgcgcggcgctggccggtgacgtacagacggctcgcgcgctgcacatgaagctgctgtcgctgcacaagaacctgttcatcgaagcgaacccgattccggtgaagtgggcgctgcaggcgatgggcaagatgcagggcggcatccggctgccgctcacggcgctcgacgagcgctgccacgaagccgtgcgttcggccctcgtcgaggccggcgtcctcgcctga

SEQ ID NO: 284956 - DNA, 412 bp, Unknown
  Bacterial polypeptide expressing nucleotide sequence isolated from the Sargasso Sea
atgttcaaaggatcaaatgttgctttaataacaccatttaaagataatatactcgatgaagaagcgtatattaaattaatccattttcacattaacaatggaacaaatggtcttgtaccggcaggaacaacaggagaatcccccacattaagtcatgatgaacatcaaagagttatcgatttgtgcattaaagaaagtagtggaaaaatacctgttattgctggaaccggatcaaattcaactgaagaggcaatttcattaacaactcatgctgaaaaagcaggtgcagatggtgctttaatagttacaccttattataataaacctacacaagaaggtttatatcaacattataaggcaataaatgacaaaagcagtattccgattataatttataatattcccaggtaga

SEQ ID NO: 284957 - DNA, 642 bp, Unknown
  Bacterial polypeptide expressing nucleotide sequence isolated from the Sargasso Sea
tggtagcaattgtacaagcgaagctgtgggaagctacaaaaaaagcttacgactctggtgccgacggtgctttggtcgttgttccttattacaataagccgcctcaagaaggtctttataaacatttcagttctattgctaaatctgcaaaggatttgcctcttatgctatacaacattcctggcaggactggatgcaatttattacctgatactgtgaagaaacttatggatttctcaaatattctcagtattaaagctgcaagcggtagaatagaagaagtaacagaactaagagctatttgtggctccgaactctctgtatatagtggcgacgattcattgttgcttccaatgttatctgtaggtgctgtaggagtagtaagtgttgcaagtcatttagttggattgcaattgaaagagatgattcattcttttcaaagtggaaaggtttccaatgctcttgctattcatgaaaaacttcagcctcttttcaaagcactctttatgactactaatccaatcccaattaaggctgctttggagctatcgggatgggatgtaggtaatcctagaagtcctttgtcacctttaaccaatgatatgaaaaagcaactatcttttatcctgaattccttataat

SEQ ID NO: 284958 - DNA, 403 bp, Unknown
  Bacterial polypeptide expressing nucleotide sequence isolated from the Sargasso Sea
gatgcaagctttaaaaggtagtttagtagcgttagttacaccgatggaagagagcggagaagttgactatgagtcattggaaaaacttatagattggcatattaatcatggcactaatggcatagtatctgttggcactactggagagtcagctacactagatgttgatgaacatctggaagttattaaacatacagtagagcatgttaattccagagtccctgtaatagctggaactggtgctaactccacttcagaggcaatagagttaactcaagagtcaaaacaaaacggtgcagattttgccttaattgttacaccatattacaacaaaccaactcaaaaaggactcataagtcattacacaaaacttgcaaatgaggtcgatataccacaaatttta

SEQ ID NO: 284959 - DNA, 796 bp, Unknown
  Bacterial polypeptide expressing nucleotide sequence isolated from the Sargasso Sea
atgttcaaaggttcaattgtagctttaataacaccttttaaaaacaacatgatggatgaagaaagatatagatccctcatacattatcatatatctaacggaaccaaagcggtagtgccagcagggactaccggagaatcaccaaccctaaatcatgacgagcacaaaaaagtcatcgaaatagcagtaaaagaatgtaaggacaaaattcctgtaatagctggaactggatcgaattcaaccgcagaagcaattgaactatccaagcacgctgaaaaagcaggagcagatggccttttagttgtaacaccgtattacaacaaaccagtgcaagaaggtctatttcaacattacaaattaattaatgataatgttggtatacctataattatttataatattccaccaagatctgtagttgatatgtccgttgatactatggcgagactctttgaattaaaaaatattgttggagttaaagatgcaacagctgatttgaatagagttaaccagcaattagaaaaaatgggttctgaatttattcagttgtcaggtgaagatggcacagcattagaatttaatatgcgaggtggtgttggatgtatatctgttacagcaaatatcgccgctaaattatgtgctgatttccaagatgcttgcttaaataaaaattataaacttgcaaaagaaattaatgataaattaatgccattacacaaagcgttattcttggaaagcaatccaagcccagttaaatatgcagcaagtttactcaaattatcccctgaggatgtta

SEQ ID NO: 284960 - DNA, 742 bp, Unknown
  Bacterial polypeptide expressing nucleotide sequence isolated from the Sargasso Sea
ggcgagtcgccaactttaagccatgaagaacacaagttagcagttgagatatgcgttgaagaaacagcaaaacgtgtaccagtaatagcaggaacagggtcaaacaatactgacgaagcaatcgatctcacaatgcacgctgaaaaagcaggtgctgatggagctttagtggttacaccatattataataaacctacacaacatggtttatactcacactttgaggcaattagtaaggcaactacacttccaattattatttataatattcctggcagatcaattgttgatatgaatacaaaaacaatgagggatttgtttaaaattaaaaacattgttggagtaaaggatgctacttcagatataccaagagtttatgaaacgaaaacaacaataggagaagattttaatcagttaacaggagatgatgcaactacgttagcttttatgatttacggtggtcacggatctatctcagtgacgtctaacatcgccccaaaattatgttctgaatttatgaaatattgtttagatcaaaattttgctaaagcttctgagataaatgataaactgatgccgttgcatcatgctttatttgttgagtccagtcctgccccagtaaaatatgcagcttctaagcttggtttatgtaaagatgacataagactgccgcttacaagtatatcagatgaaactaagcaattagttgataaagctatgaagcacgcatcattaatttagc

SEQ ID NO: 284961 - DNA, 469 bp, Unknown
  Bacterial polypeptide expressing nucleotide sequence isolated from the Sargasso Sea
tatgttcaaaggatcaatcgttgctttaatcacaccgtttaaagatgacaaactagatgaggaaaaatacgctcaattaataaaccatcatattaaaaacggtacaaatggaatagttcccgctggaactacaggtgagtcgccaacactatctcataatgaacaccgtaaagttatagaaatttctgttaatgagtgtaagggtaaaattcctgttattgctgggactggttcaaattcaactgacgaggctattgaattgtctaaacatgcggaaaaagttggtgcaaatggattgttaattgttactccatattataacaaaccaactcaagaaggattgtatcagcactataaaaaaattaatgacaatgttggaataccaataattatatacaacattccatctagatctgtaattgacatgaaagttgaaactatggctagattatttgaattaaaaatattt

SEQ ID NO: 284962 - DNA, 610 bp, Unknown
  Bacterial polypeptide expressing nucleotide sequence isolated from the Sargasso Sea
gaaaaggcaggagcatttggtgccttagttgtaacgccatattataataagcctacacaagaagggctgtaccaacattacaaagcgattaatgataaatgcgggatccctattataatttataatattccaggcagatcagtaattgatatgtcggttgataccatggcaagattatatgaactaaaaaatattgttggtgtaaaagatgctactggcgacctagatagagttaatcaacaattaaataaaatgggtaaagactttattcaattaactggaaatgatgataatgcgtttgaatttaacaaaagaggtggagtaggcactattagtgtgactgcaaatattgcaccaaaactttgttcagaattccaaaaaaattcaatatctagaaaagacgaggatcttgcaaaagcaaaagagttagataatattttacaaccagttcatactgcaatgtttgttgaaagcaatcctagtccagttaaatatgcagctaaattgatgaatttgtgtgatgatgaggtgagattaccattagttaaagtaactgaagagactaaaataattgtaaaaaaagccatagagactgcaaaacttatttaat

SEQ ID NO: 284963 - DNA, 341 bp, Unknown
  Bacterial polypeptide expressing nucleotide sequence isolated from the Sargasso Sea
tatgttcaaaggatcaaatgttgctttaattacaccatttaaaaataatggtctagatgaggaagcatatataaaattaatccatttccacatcgataatggtaccaatggacttgtgccggctggtacaactggtgaatcccctacgttaagtcatgatgagcatcaaagagtaatagatttatgcataaaagaaagtaatggaaaaattccagttattgctggtacgggttccaactcaactgaggaggctatttctttaactacacatgcagagaaagcaggagctaatggagctttgatagttacaccttattacaataaaccaactcaagaaggct

SEQ ID NO: 284964 - DNA, 880 bp, Unknown
  Bacterial polypeptide expressing nucleotide sequence isolated from the Sargasso Sea
aatgattacagacaaaactgagtgtaataagccactatttggaaaaatattgactgcaatggttactccattcactgaaaatggagatgtagattatgaactagctataaaattatcaaattatctttttgagaacggttccgatggaattgtgctatgtggtactactggagaatctcctactctttcatgggcggaacagcatgatttatttgttgcggtaagaggatctttggatgcaacctgtaaagtaatagttggcactggtagtaactgtacaagcgaggctgtggaagctacaaaaaaagcctatgactctggtgcagatggtgctttggtcgttgttccttattacaacaagccacctcaagaaggtctttataaacatttcagttctatttctaattctgcaaaggatttgcctcttatgctttataacattcctggaaggacaggatgcaatttattacctgatactgtgaagaaacttatggatttctcaaatattctcagtattaaagctgcaagcggtagaatagaggaagtgacagaattaagagctatttgtggctctgaactctctgtatatagtggcgacgattcattgttgcttccaatgttatctgtaggtgctgtaggagtagtaagcgttgcaagtcatttggttggattgcaattgaaagagatgattcattcctttcaaagtggagaggtttccaatgcgcttgctattcatgaaaaacttcaacctctttttaaagcactctttatgactactaatccaatcccaattaaggctgctttggagctttcgggatgggatgtaggtaatcctagaagtcctttgtcaccattaaccaatgacatgaaaaagcaacta

SEQ ID NO: 284965 - DNA, 758 bp, Unknown
  Bacterial polypeptide expressing nucleotide sequence isolated from the Sargasso Sea
aatgttcaatttaaaaggttcaatagttgctttagtgactccgatgaattcggatgggactattgactggcaggccttgaaagatcttattgaatggcatattaattcaggaagcgcaggaatagtaatcgttggtacaacgggagagtcagctactttagacgttgctgagcatgttcaagtcattgagaaatctgtaaagatcgcagatggcagaattatggttatagctggtacaggagcgaattcaacaaaagaagcaatttatttaaccgcatcagcaaaatctgctggagtagatgcagcccttctagtaactccttattataataaaccttctcaagagggcttatatagacattattctaatatagcagatgaagtcgatttacctcaaattctctataatgtaccctctagaacaggatgtgatttactctctgatacggtcattaaattagttcctcatgacagtattgttggattaaaagatgcaacaggtgatttaaatagattggatgagattttaatcttacttcaagacttgaaagataatgaatttaagctttattctggagatgatcctactgcaactcaatttatgttaaatggtggttcaggcactatatcggttacagcaaatgttgtgcctagcagtattgcagaaataagtaaaaaagctttatctggagaaactaagatggcaattaagctggatgaggagttaaaagaacttaatgaaattttattcattgaat

SEQ ID NO: 284966 - DNA, 523 bp, Unknown
  Bacterial polypeptide expressing nucleotide sequence isolated from the Sargasso Sea
tatgttcaaaggatcaaatgttgctttaattaccccatttaaaaataatgagttagatatagataattatattaagcttatccattttcatatagaaaatggcacgaatggtttagttcctgccggaaccacaggtgagtcaccaactctaagccatactgagcatcaaaaagttattgaattgtgtattaaagaaagcaatggaaaaataccagttattgcaggtacaggatccaattcaacagaagaagctatttctttaacaaagcatgcagaaaaagtaggagcaaatggtgcgttagtagtaactccttattataacaaaccaacccaagaaggtttgtatcaacattacaaagcaataaacgataactgtagtattccaataattatttataatataccatcaagatcagttattgacatgactgtagatacaatggctagattatttgaattaaaaaatatttttggagtaaaagatgcaacaggagatttgagtagagttgtaagcaaaaagaaa

SEQ ID NO: 284967 - DNA, 583 bp, Unknown
  Bacterial polypeptide expressing nucleotide sequence isolated from the Sargasso Sea
tatgtttaaaggatcaaatgttgctttagtcactccgtttaaaaatgataaacttgatgatgagacatatattaatttaattcattttcatatccaaaatgggacaaacggattagttccagcaggaacaactggtgagtcaccaactttaagtcatgatgaacatgaaagagtgattgagttatgtgtaaaagaaagtaatggaaaattaccagtttttgcaggtacaggatcgaactctacagaggaggccatttcacttacaactcatgcagaaaaaattggagccacaggcgctcttattgtaacaccttattataacaagccaacacaagaaggcttataccaacattataaggcaataaatgacaaatgtggaatacctataataatttataatattcctggtagatcagttattgatatgtcagttgatactatggctagattatttgaattgaaaaatattattggtgttaaggatgcaactggagacctaaatagggttgaacaaactttaaaaaagattggaaatgaattcattcaattaactggtaatgacgataatgctttggaatttaat

SEQ ID NO: 284968 - DNA, 679 bp, Unknown
  Bacterial polypeptide expressing nucleotide sequence isolated from the Sargasso Sea
atgttcacgggaagtattgtagcgcttgtcacgccgatggatgaaaacggtaatgtctgccggtcaagcctgaaaaaactgattgattaccatgtcgccagcggaacctcggcgattgtttcggtagggactaccggagaatccgcgaccctcagccatgaagagcatggcgatgtcgtgatgatgacgcttgaacttgctgacgggcgtatcccggtcatcgcaggtaccggtgcaaatgcaaccgcagaggcgattagcctgaccaaacgttttaacaatagcggtgttgtcggttgcctgacggtcactccttattacaatcgtccgacccaggaagggctgttccaacactttaaagccatcgcagaacacaccgacctgccgcaaattctgtataatgtgccgtcccgtaccggttgcgacatgctgccggaaaccgtcggtcgcctggcggaagtaaaaaatattattggtattaaggaagcgacggggaacttaagtcgtgttcatcagatcaaagagctggtttcagatgactttattctgttgagcggcgatgatgccaccggaatggactttatgcagctcggcggtcagggcgtgatttccgtaacggcgaacgttgcggctcgcgaaatggcggatatgtgccgactggctgcagaaggccagtttg

SEQ ID NO: 284969 - DNA, 684 bp, Unknown
  Bacterial polypeptide expressing nucleotide sequence isolated from the Sargasso Sea
ctgctaaaaaaagagttccagttatagcaggtacaggatcaaattctactgacgaagctatacaattaactaaatttgctgaaaaaattggcgctgacgctgctttagtggtcacgccttattataacaaaccaacacaagacggaatgtattctcattttaaagcgattaacgataattgtaagataccaataatcatctacaacatacctggtagatgtattgttgatatgaatattaatacaatgttaaaattatcaaaattaaagaatattgtaggtgttaaagatgcttcaaatgatctatccagaccactattgacctcacttaatataggtaaaaagttttgccaattatctggagaagacgcaaccttattgccatttcttgtacaaggagggcatggttgtatatcagttaccgcaaatatagtgccacgcctttgttctgatttacatgagtccttcttttcaaataactttaaaaaagcttataaaattaacgaaagtttatttcctttaaatcaagcgcttttcaatgaaacaagcccaggtcctgtcaaattcgcggcttctttgatgaatttttgtactgatgaatgtagacttccattagttaaagtttcacaaaatacaaaaattcttataaaaaaagtaatgaaacaactcaaaataaaaaaataaa

SEQ ID NO: 284970 - DNA, 712 bp, Unknown
  Bacterial polypeptide expressing nucleotide sequence isolated from the Sargasso Sea
gaagaacagcatgatttgtttattgcagtaaaaggatctttggattcaagctgtaaagtaatcgttggtactggtagtaattctacaagtgaggctgtagaagcaacaaaaaaagccttcgaatctggggcagacggtgctttggttgttgttccatattacaataaaccacctcaagaaggtctttatcaacattttagttccgttgctaattctgcaaaagatttgcctttaatgctttacaacatacccggaaggacagggtgtaatttattgcctgatactgtgaagaaacttatgaatttctcaaatattctcagtattaaagctgcaagcggtagaatagaagaagtaacagaactaagagctatttgtggctctgaactttctgtatatagtggcgatgattcattgttgcttccaatgttatcagtaggtgcagttggagtagttagtgttgcaagtcatttggtgggcttgcaattgagagagatgattgaatcctttcaaaggggaaaaatttccaatgcgcttgctattcatgaaaaacttcagcctcttttcaaagcactttttatgactactaatccaatcccaattaaagctgctttggagctatcgggatggaatgtaggtaatcccagaagtcctttgtcaccattaaccactgacatgaaagagcaactatcttttatcctgaaatccttataat

SEQ ID NO: 284971 - DNA, 334 bp, Unknown
  Bacterial polypeptide expressing nucleotide sequence isolated from the Sargasso Sea
atgttcaaaggatcaaatgttgctttaattacgccgtttaaaaacaatttattagacgaggaagcctatgttaaattaatacattttcatattgaaaatggaactagtggtcttgtgccagcaggtactacaggagaatctccaacattaagtcatgatgaacatcaaaaagtaattgatctttgtataaaagaaagtaatggaaaaattccagtcatagctggaacaggttcaaattcaactgaggaagctatttcgttgacctcacacgctgaaaaagcaggtgcaaatggtgctcttattgtgacaccttattacaataaacctacacaag

SEQ ID NO: 284972 - DNA, 664 bp, Unknown
  Bacterial polypeptide expressing nucleotide sequence isolated from the Sargasso Sea
cacaggatctaattctacagaagaagctgtatcattaactaaacatgctgaaaaagctggtgcggatggtgctttagttgttacaccatattataataaacctactcaagaaggattatatcaacattataaatcaattaacgataactgtggaattccaattataatttataatatacctagccgttcggtcattgatatgagcgttgaaacaatggctagattgtatgaactaaaaaatatagttggagttaaagatgcaacaggagatctaaatcgagttgatcaacaaaaagaaaaaatgggtaatgatttcattcaacttactggaaacgatgataatgcttttgaatttaataaacgtggaggcgttggaacaattagtgttacagcaaacgtagctcctaaattatgttctgaatttcaaaaattatcaaaatcttcaaatgaggatgatttaaaaaaagctcaacaacttgatgatatgttgcaaccgttgcataaaaatttatttatagaaagcaatccttcaccagttaagtatgctgctaaattactaggactatgcgatgatgctgtgagattacctttagtaaaaataactgaaaatacaaaaaaggaagtcgagaaagcattgaaagtagcaaaacttattgatgagtga

SEQ ID NO: 284973 - DNA, 559 bp, Unknown
  Bacterial polypeptide expressing nucleotide sequence isolated from the Sargasso Sea
atgttcaaaggatcaatcgtagctttaataaccccatttaaaaataataagatagatgaggatagatatgcttctttaattcattatcatatttctaatggcacaaatggccttgtaccagcaggtaccactggtgagtcaccaacattggatcatgatgaacacaaaaaggttattgagattgccgttagagagtcaaatggaaaaattcctgttattgcaggaacggggtccaattctacttctgaagcaatcgagttatcacagcatgctgaaaaagcaggagcaaacgcacttttaattgtaacaccatattacaacaaaccaacacaagaaggtctttatcaacattataaaactattaacgataaagttggtataccaattataatttataatataccgcctagatcggttgtcgacatgagcgtagacacaatggcccgactttttgaattaaaaaatattgctggagtaaaagatgctacagctgatctagacagagttgatcaacaacttaaaaaaatgggacctagaatttattcagttatctggtgaa

SEQ ID NO: 284974 - DNA, 613 bp, Unknown
  Bacterial polypeptide expressing nucleotide sequence isolated from the Sargasso Sea
aaagctggtgcggatggtgctttagttgttacaccatattataataaacccactcaagaaggattatatcaacattataaatcaatcaatgataactgtggaattccaattataatttataatattccaagccgttcagtaatcgatatgagcgttgaaacaatggctagattatatgaactaaaaaatatagttggagttaaagatgcaacaggtgatttaaatcgtgttgatcaacaaaaagaaaaaatgggtaatgatttcattcaacttactggaaacgatgataatgcttttgaatttaataaacgtggaggcgttggaacaattagtgttacagcaaacgtagctcctaaattatgttctgaatttcaaaaattatcaaaatcttcaaatgaggatgatttaaaaaaggctcaacaacttgatgatatgttgcaaccgttgcataaaaatttatttatagaaagcaatccttcaccagttaagtatgctgctaaattacttggtctatgcgatgatactgtaagattacctttggtaaaaataactgaaaatacaaaaaaggaagtcgagaaagcattgaaagtagcaaaacttattgatgagtgat

SEQ ID NO: 284975 - DNA, 823 bp, Unknown
  Bacterial polypeptide expressing nucleotide sequence isolated from the Sargasso Sea
ttatataaaaattattaattttcatttagaaaatggaacaaatggacttgtgccagcaggaacaactggtgagtctccaactctttcacataaagaacatgagaaagttatagagctctgtataaaagaagctaaaggaaaaattcctgtaattgcaggcaccggatcaaattctactacagaagctatatcactcacagagcacgctgaaaaagctggagcagacggggccttgatagtgacaccttattataacaaacccactcaggagggcttatatcagcactacaaggctataaacgataaatgtggcataccaatcataatttataatattcctggcagatcagttattgatatgacagtagatactatggcaagattatttgagcttaagaacattgttggagttaaagatgcaactggtgatttgaatagagtagatgagactttcaaaaaaattggaaatgaatttatccagcttacaggagaggacggtcttgcttatgaatataataaaagaggtggcgtagggtgtatttctgttacagccaacatagctcctaaaatgtgttctgatatgcaaaagttttcaaaatcacagaataatgatgagcaaaaaaaggctggcgagatagacaaaaaacttcaacctgttcataaatctttgtttattgaaagtaatccatcaccagttaaatacgcagctaaattgataggtctatgtgatgataatgtgagattacctttagtaacagttttagatgaaacaaaagctgaggtgaaaaaagctcttatatctgccaaattaattaatgaataa

SEQ ID NO: 284976 - DNA, 799 bp, Unknown
  Bacterial polypeptide expressing nucleotide sequence isolated from the Sargasso Sea
tttcacattgaaaacggtaccagcggtttagttcctgctggtactacaggtgaatcaccaactttaagtcatagcgaacatgaaagagtaatcgagctttgtgttaaggagagcaaaggaaaattaccagtattcgctggaacaggttcaaattcaactgaggaagctatttctctaacttctcacgcagaaaaaataggagcgaatggtgctctaatagttactccttattataacaagccgactcaagaaggattatatcagcattataaatcaataaacgacaaatgtggaattccaattataatttataatattcccggaagatcagtcattgatatgactgtagacacgatggcaaaattatatgaattaaaaaatataattggcgttaaagatgctactggagatttaaatagggtagaccaaacaataaaaaagatgggtaaagattttttacaattaacaggaaacgatgataatgcattcgaatttaataaacgaggtggtcaaggggctataagtgtaacagccaatattgctcctaaactatgctcggaattccaaaaattttcaaaattaaaaagtgatgataacattaaggaagctgaaaaattaaataaaattttacaacctttacatcatgcaatgtttgttgaaagtaatcctagcccagttaaatatgctgctaaattacttaacctttgtgatgatagtgtaagattacccttagttaaagttactgaaaaaaccaaagaaattgttgaaaaagcacttctgtctgcaaatttgatttaat

SEQ ID NO: 284977 - DNA, 481 bp, Unknown
  Bacterial polypeptide expressing nucleotide sequence isolated from the Sargasso Sea
gatgttcacaggcagtatggtggcgatggtcaccccgatgcacgatgatggcagtgttgactggaccgcattggaggggttggtcaatcaccacgttgcggaaggtactgatgccattgtctccgtaggaaccacaggcgagtctgctaccctgaaccatgatgaacatggcgaggtgatcgcgcggacagtaaaggcggcagctggacgaattcccgtgattggtgggacgggggccaattcgacagccgaagccatctcattgactcgccatgccgctgaagtgggtgtcgatgcctgccttcttgtggtgccgtactacaacaagcctccccaggaagggctttatcaacatttcaaggcgattgccgatgccgtttcgattccgcagattctgtataacgtgccggggcgtaccggtgtggatatgcacaacgacacgacgttgcgtcttgccgagattgacaatattgtcgcaatc

SEQ ID NO: 284978 - DNA, 279 bp, Unknown
  Bacterial polypeptide expressing nucleotide sequence isolated from the Sargasso Sea
aatgtttaaaggatctcatacagcattaattacgccttttgacggcaaatctattgatgaaaaatcatttaggtctctgatagattttcaaatatcagaaggtattcatggactggttcctgtgggcacaacaggcgagtctccaactttaagccatgaagaacacaaattagcagttgagatatgtgttgaagaaacagcaaaacgtgtgccagtaatagcaggaacaggatcaaataacaccgacgaagcaatcgatctcaccatgcatgctgaaaa

SEQ ID NO: 284979 - DNA, 921 bp, Unknown
  Bacterial polypeptide expressing nucleotide sequence isolated from the Sargasso Sea
tatgtttaaaggttcaatcgtagctttaattacaccatttaaaaacaatgttttagaccaagataaatacgggtctttaatacatcatcatattaaaaatggaacaaatggagttgttccggcaggcacaactggcgagtcgcctacactagatcatgatgaacataaaaaagttatcgaaatagcagttaaagaaaccaatggtaaaattcctgttattgcaggaactggatctaactcaacaactgaagcaatagaactttctatacacgctgagaaaacaggagcaaacgctcttttaattgtaacaccatattataacaaaccaacacaagaaggtttatatcaacactataaggctattaatgacaaagttggaattccaatcattatttataatattcctccaagatcagttgtagatatgtcagttgatacaatggcaagactctttgaactaaaaaatatagctggtgttaaagatgcaacagctgatttaaatagagttgataaacaattaaaaaaaatgggacccgaatttattcagctttctggagaagatggaacagctttagaatttaatttaagaggaggtgttggatgtataagtgtgacagcaaatgttgcgcctaaactttgttcagattttcaaaatgcttctttgagtaaaaataatagtaacttgattgcaaaggcaaaagaaataaatgaaaaactaatgccactacacaaatctttatttattgaaagcaaccctagtcctgtaaagtacgcagcgagcttattaaatttatcttcagaggaagttagattacctttagtaaaagtaacagaaaaaactaagaaaggaagtacaaaaggcactcaaaatcgcagaacttctttaaatgaagttaagaaaaatactggaaataaaattgt

SEQ ID NO: 284980 - DNA, 400 bp, Unknown
  Bacterial polypeptide expressing nucleotide sequence isolated from the Sargasso Sea
atgttcaaaggatcaaatgttgctttaattacaccatttaaaaataatggtttagatgaggaagcatatataaatttaatccatttccacattgataatggcaccaatggacttgttccagcgggcacaacaggtgagtctcctacattaagtcatgatgagcaccaaagagtaatagatttatgtataaaagagagtaatggaaaaattccagtaattgcaggaacggggtcaaactcaactgaagaagcgatttctttaaccacccatgcagaaaaagcaggagctaacggtgctttgatagttacaccttattataacaaaccaacacaggagggtttgtatcaacattataaagcaattaataataagtgtggcattccaaattataatttataac

SEQ ID NO: 284981 - DNA, 769 bp, Unknown
  Bacterial polypeptide expressing nucleotide sequence isolated from the Sargasso Sea
tatgcttaaaggttcaatcgtagctttaattactccatttgaagataacatcctaaaagaagatgtttatcgtaaattaattcaatatcacataaaaaacggaacaaatggtatagttccaggaggcaccacaggcgagtccccgacacttagtcatgatgagcataaattgataattgatatagctgttagtgaatgcaaaggtaaaattcctgtaattgcaggcactggatcaaattcaacagcagaggctgttgaactttcaaagtacgctgaaaaagctggatcagacgctttactggtagtaacaccgtactacaataaaccaactcaagaaggattatatcaacactataaaaaaataaatgacaatgttggtataccaattattatttataatattccatctagatcagtcatagacatgtctgtagaaactatgactagattgtatgaacttaaaaatatagcaggagttaaagacgccacaggagatttaaatagagtaagtctgcaactaaaatctatgggtaaagaatttatacaattaacaggaaatgatgacaactccttcgaatttaataagaggggaggagtaggatcaataagtgttacagctaatatagctgctaaattatgttcagattttcaaaaatcttgtgagaatgacttaaagaaagcagatgaattaaataaaactttgcttccgttacatcattcaatgtttatagaaagcaatccttcgccagtgaaatatgctgcttctata

SEQ ID NO: 284982 - DNA, 745 bp, Unknown
  Bacterial polypeptide expressing nucleotide sequence isolated from the Sargasso Sea
ctccacattaaaccatagagaacatgaacaagttattgaactttgcatcaaagaatcaaaaggtaaaattcctgtaattgctggcactggatcaaactctactgaagaagcaatatcgttatcaaagcacgcagaaaaagcaggtgctgacggtgtattagttgttactccatattataataaacccacacaagaaggcttatatcagcactataaagctataaatgacaatataagcattcctattataatttataatattccaagcagatgtgtaattgacatgtcggttgatactatggctagattatttgaacttaaaaacatttctggtgtaaaagatgcaacaggtgatttaaacagactcgatgaaacaataaaaaagttaggacctgaatttattcagcttacaggagaggatggacttgcatttaaatttaataaaagaggaggagtgggaattatttctgttaccgcaaacattgcacctaaattgtgttcagatatgcaaaaatactcaaaatcgaaatcagataatgaaacaaaagaggcagaaagaatagatcaaattttacagcctttacataaatctttgtttattgaaagcaatccttcaccagttaaatatgcagcaaaacttttaggattatgtgatgatgaaattagacttcctttagttaaagttaaaaaagaaacacaggaagaagttaaaaaagctttatcatcagccaaacttattagttaa

SEQ ID NO: 284983 - DNA, 709 bp, Unknown
  Bacterial polypeptide expressing nucleotide sequence isolated from the Sargasso Sea
tatgtttaaaggttcaaatgtagctttagttactccatttaaaaataataaattagatgaagaaaactatattaaattaataaattttcatattgaaaatggaacaaatggtctagtaccagccggcacaacaggcgagtcacccacattaagtcataatgagcatgaaaaagttatagaattgtgtataaaagaagctaaaggcaaaataccagtaattgcaggaacaggttcaaactctactgatgaagcaatttctttaactaaacatgcggaaaaagctggagcagatgctgctttagtagttactccttattataataaacctacacaagaaggactttttcaacattataaagctttaaatgataactcaggaataccaataataatttataatattccaggaagatcagttatagacatgtcagttgaaactatggcaagactttttgaattgaaaaatatagttggtgtcaaagatgccactggggatttgaatagagttgatcaacaaaaagaaaaaatgggtaatgattttatccaattaacaggtgaagatggaaatgcatttgaatttaataaaagaggtggcgtaggatgtatttcagtaacagcaaatatagctcctaaattatgctccaatatgcaaaaattttcaaaatcaacttctgataatgaaataaaagaagcagaaagaatagatcaa

SEQ ID NO: 284984 - DNA, 787 bp, Unknown
  Bacterial polypeptide expressing nucleotide sequence isolated from the Sargasso Sea
tatgtttaaaggatcaaatgttgctctaataacaccatttaaagatgataaattagacaccgaaaactatattaaattaattaattttcatattgaaaatggaactaatggattagtacctgcaggaacaactggtgaatctccaacattaagtcatgatgaacatcaaaaagtaatagaactatgtataaaagaggcgaaaggtaaaatcccggtcattgcaggaacaggatctaattcaacaactgaggctgtagaattaaccaaacatgcagaaaaagctggtgctgacggagctttggtcgttacaccttattataacaaacctactcaagaaggtttatatcagcattataaaacgattaatgataacacaagtcttccaattataatttataatattcctagcagatgtgtaattgatatgtcggttgatactatggcgagattatttgaactaaaaaatattgctggggtaaaagatgcaacaggtgatttaaaaagattagatcaaacaattgaaaaattaggtcatgaatttattcagcttacaggtgaggatggtcttgcgtttgagtttaataaaagaggtggtgttggaattatatctgttacagccaacattgctccaaaattatgttctgatatgcaaagatgctctaaatctaaatctgataatgaaatgaaggaagctgaaagaatagatcaattgctacagccgttacataaatctttatttcttgaaagcaatcctgctccagttaagtatgctgcaaaactttgggat

SEQ ID NO: 284985 - DNA, 567 bp, Unknown
  Bacterial polypeptide expressing nucleotide sequence isolated from the Sargasso Sea
aatgttttttggaagcatacctgcggtaattacaccttttaaaaataacgaagtagactattcatcattaaataaaatattagaatttttaattcaaaatggatctaatggattagttccttgtggcactactggtgagtccccaactttatctcacgaagaacataaaaaaattgttgaagaaacaataaaaattactgacaaaagaatacctgtaattgcgggaactggctcaaataatacattagaagcaatagaatatacatctcatgcagaagaagcaggtgctgatgccgctcttatagtaacaccttattataacaaaccaacgcaagcgggcctttatcatcactataagtcaattgctgataatacgaatttaccaataattatttataatatacctggtcgatctattgtggacatgtcaattgaaactatgattgaattatctaaaattaaaaacataattggagtcaaggatgccacaaatgatttatttagaccattattaactagaaaacttatgagtgaagatttctgttacctatcaggtgaagatggaac

SEQ ID NO: 284986 - DNA, 334 bp, Unknown
  Bacterial polypeptide expressing nucleotide sequence isolated from the Sargasso Sea
atgtttaaaggttcaatcgtagctttaattacaccattcaaaaacaatgttttagaccaagataaatatgcgtctttaatacatcatcatattaaaaatggaacaaatggagttgttccagccggtacaactggcgagtcgcccacactagatcataatgagcataaaaaagttatcgaaatagcagttaaagaaaccaatggtaaaattcctgttattgcaggaactggatccaactcaacaactgaagcaatagaactttctatacacgctgagaaaacaggagcaaacgctcttttaattgtaacaccatattataacaaaccaacacaag

SEQ ID NO: 284987 - DNA, 704 bp, Unknown
  Bacterial polypeptide expressing nucleotide sequence isolated from the Sargasso Sea
catgacaacagattttggaaaactaattacggcgatggtaactccgtttacacaacaaggggaggtaaactatacagaggcagtaaacgtagcagggtatttagtagaaacaggaagcgataccattttacttgcaggaacaacaggagaaagtcctaccttaacacatgcagaagaatttgaattatttaaaacagttaagcaagcattgggatcaacacgtcatgtaatggcaggcgcaggttcaaattgtacacaaacggcaattgatgctacccataaagcagcacaagctggtgtagacagtgtgttgcatgttgtgccttattacaataaaccgtcacaagaaggcattgttgagcattttaaagccattgaggcacagacagaactgcctataatgctctacaatattcctggccgaacaggaacaaatatggaaattgataccatagaacgttgtgcaacattttcaggtattcacgccattaaagaggcaggtggatcggttgaagtggtaaaacagttatgtgaacggttaccaaaagagtttgctgtctattctggagatgatggtattacgtttccgtgtttagaagtgggtgcaaaaggggtggtatcagttgcagcgcattgtgtaggagacgcaattaaacaaatgataaacacattttatgcaggaaatatagctcaagccaaagaga

SEQ ID NO: 284988 - DNA, 504 bp, Unknown
  Bacterial polypeptide expressing nucleotide sequence isolated from the Sargasso Sea
tatgtttaaaggaagcatggtcgcaatagttacaccaatgaatgaagacagtagtttagatcacacttcattggaaaatcttattgaattccatattgaaaataaaaccgatgtgattatatctgtgggtacaactggtgagtcagcaactcttgattttgatgaacattcagaagttatcaaatctactctagatattgtcaacaagagggtacctgtgattgctggttctggagcaaactctacgagtgaagcccttcacctaactcaaaggtcaaaagaacttggtgccgatgcatgtctgctggtaactccatattataacaagccaactcagagaggattatatgaacattataagaaaatagctgatgaggtaagcatcccacagatactatataatgtcccggggcgaacttcagttgacatgcttccagatactgtaaagaatttgtctacacatccaaatattattggcataaaagaagcatctggtaacctaga

SEQ ID NO: 284989 - DNA, 701 bp, Unknown
  Bacterial polypeptide expressing nucleotide sequence isolated from the Sargasso Sea
atgtataaaagaaagtaatggaaaaattccagttattgctggtacgggttccaactcaactgaggaggctatttctttaacctcacacgcagaaaaagcaggagctaacggcgctttgatagttactccttattataacaaaccaactcaagaaggcttgtatcaacattataaagcaattaatgacaagtgtggaattccaattataatttataatattccaggtagatctgtgattgatatgtcagtggacacaatggctagactatatgaattaaaaaatatagttggtgttaaagatgcaacgggtgatttagatagagttgatcagacacttgaaaaaatgggtaaagattttattcaattaacaggtaatgatgataatgcttttgaatttaataaacgtggcggggtaggtactatcagtgtaacggctaacattgcacctaaactttgttcagattttcaaaaattctccaaatcagacaccgataatgaatttaaagaagcagaaagattagataaaatattacaaccagttcatcactcaatgtttgttgagagcaatcctagtcctgtaaaatatgctgcaaaacttttaggactttgtgatgacaatgtaagactaccacttgtaaaagtaacagacacaacaaaagaaattgtaaaaaaagctcttcagtctgctaagttaatttaat

SEQ ID NO: 284990 - DNA, 700 bp, Unknown
  Bacterial polypeptide expressing nucleotide sequence isolated from the Sargasso Sea
catggttgcaatagccactccaatgaatacagatggatctctagattttaattcacttgagagattagtagaattcaacattgaaaataaaactgatgtgataatagccgtaggtacgactggagaatcagctacattaagtatgagagaacattcggaggttattcagaaaactataagcatagtcaataaaagagtaccggtaattgcaggaactggagctaactctaccagtgaagcattggagttaacccatcaatcaaaagccctcggagctgacgcatgcttattagttactccttactataataaaccaactcaaaatggtttataccagcactactcaaaaattgctaatgaagtcaatattcctcagatcttgtataatgttccgggaagaacttctgttgatatgtatcctgatacggttttaaaattgtgtgagcatgacaatataataggcatcaaagaagcatctggtgatatagatagatcaaaagaactattagacaaatgctcagataagatatctattttttcgggggatgataaaacagctatgagagatattcttcagggtttcaagggaaatatatcggttactgcgaatatatgtccgcgtgagatgcacgatgtgtgccgattagcttccgcaggctctaaagatgaagcagagattattaataaaaaaatagagaaa

SEQ ID NO: 284991 - DNA, 730 bp, Unknown
  Bacterial polypeptide expressing nucleotide sequence isolated from the Sargasso Sea
atgttcaaaggttcaaatgtagctttaattacaccgtttaaaaacaataaactagatattgatgcttatatcaaacttattcattttcatcttaaaaatgggacaaatggacttgtgcctgctggtacaaccggggagtcacccacacttgaccattctgagcacgaaaaggtaattgagttatgtgttcaagaagctaagggaaaaatcccaattattgcagggacaggatctaattcaactcaagaagcaatttcattaacaaagcatgcggaaaaagttggtgctgacggcgttttaattgtaacaccctattacaataaaccaactcaagaaggtctttaccagcattataaagctataaatgacaatacttctttaccaataattatttacaatattcctagtagatgtgtaatagatatgtcagtagacacaatggctaaattgtttgagttaaaaaacatagcaggtgtaaaagatgccactggtgatcttaatagattagaccaacaattaaagaaaatgggaccagaatttattttattaacaggcgaagatggtttggcttttgatttcaataaaagaggtggggtaggatgtatttcagtaacagccaatgttgcaccaaaactttgctctgaaatgcaaaaactttctaagtccaatagtgaaaatgatttaaatcaagcaaaaaaaatagataaatttttacaaccattacataaat

SEQ ID NO: 284992 - DNA, 547 bp, Unknown
  Bacterial polypeptide expressing nucleotide sequence isolated from the Sargasso Sea
tatgtttaaaggatcaaatgttgctttaattactccatttaagaataataagcttgatgtagatgcttatatcaaattagttcattttcatttaaataatggaacaaatgggcttgtaccagcaggcacgacaggagaatctccgactttaagtcatgacgaacatcaacaagttattgaaatttgcataaaagaaagcaatggcaaagtcccagtgatagctggcactggatctaattctactgaagaagcaatatcgttaacaaagcatgcagaaaaagcaggtgctaatggagcattagttgttacaccatattacaataaacctacacaagaaggtctgtaccaacattataaagctattaatgacaacacaaaccttccaatcataatttataacattccaagcagatgtgtaatcgatatgtcagtcgatactatggcaagattgtttgaacttaaaaatattgttggagttaaagatgctacaggtgatttaaatagacttgatcaaacaataaaaaaattaggacctgaatttatacag

SEQ ID NO: 284993 - DNA, 597 bp, Unknown
  Bacterial polypeptide expressing nucleotide sequence isolated from the Sargasso Sea
tatgctcgagggaagtttagtggcaattgtaactcctatgaaagtggatggaagcttagatcttcctaagctgaaagggttagtagaatggcatataagggaaggtactaatgggatcgttgctgtaggtaccactggagagtctcccacggtagacttcaatgagcattgttctgttataaccgctgtagttgatcaagtcgctggcagaataccggtgattgctggtactggagcaaactctacaaaggaagctatcgaattaaccaggtttgcagaaaaagtgggtgcaaatcttagcctttcagtcgttccttattacaacaagcctactcaaaaagggctttatgatcacttcaatgccatagccgaatcagctgatatcggtcatattgtttacaatgttcctgggagaactgtggctgatttagcagatgaaactactctttcgttatcggaaattcctaatatcgtcggaatcaaggatgctaccgcagatatgggtaggggcgtaaaattaataaagcatgcgcctgaaaactttgctatatacagcggtgacgatgcaactgctatatcgttaatgatgctgggtgg

SEQ ID NO: 284994 - DNA, 728 bp, Unknown
  Bacterial polypeptide expressing nucleotide sequence isolated from the Sargasso Sea
tttatcacatgatgagcataaaaaaataattgaagaaacaatcagaattgccgataaaagagttccagttattgctggaactggatcaaataatactatcgaggctatagaatttacaaatcatgctgaaaaatcaggagctgatggtgcattagttgtaacaccatattataataagcctactcaatcaggattatattaccactttaaaactattgctgaaaaaacgaatattccaataatcatttataacataccaggaaggtctattgttgatatgactattgaaactatgattgagttatcaaagattaaaaatattattggggttaaagatgcaacaaacgatttatttcgaccattacttactagaaaaaaaatgcaaaatgatttttgttatctttctggtgaagatggaactgctttggcttttttagcacaaggtgggcatggctgtatatctgtaacagcaaatgtagctccaaaattatgctcacaaatgcataatgaatggcaaaaaggtaatattactgaatctcaggaaattaatcttaaattatcatcactgcataatgcattatttttagaatctagcccgggtccagtaaaatatgctgcctcattattaggtctatgtaatgaaagtacaagacttcctctatctgagattaatgaggatacaaaacaagaagtcaaaagttgtttaattgagttacaacttttataaa

SEQ ID NO: 284995 - DNA, 781 bp, Unknown
  Bacterial polypeptide expressing nucleotide sequence isolated from the Sargasso Sea
tctttatgagaatggttctgatggaattgtgctatgcggtactactggagaatctccgacactttcatgggaggaacagcatgatttatttattgcagtcaaaggatctttggattcaagatgtaaagtaatagttggtactggtagtaattgtacaagcgaggctgtggaagctacaaaaaaagcctatgactcaggggcagatggtgctttggttgttgttccttattataataaaccacctcaagaaggtctttataaacattttagttccattgctaattctgcaaaggatttgcctttaatgctttataacatacctggaaggacagggtgcaatttattacccgctactgtgaacaaacttatggatttctcaaatattctcagtattaaagcggcaagcggtagaatagaagaagtaacagaactcagggctgtttgtggctccgaattctctgtatatagtggcgacgattcattgttacttccaatgttatctgtgggtgctgtaggagtagtaagtgttgcaagtcatttggttggcttgcaattgaaagagatgattgaatccttccaaagtggaaaagtttccaatgcgcttgctattcatgaaaaacttcagcctcttttcaaggcactttttatgactactaatccaattccaataaaggctgctttagagctgactggatggaatgtaggtaatccaagaagtcctttgtcaccattaacttcggagatgaaaaatcaactatcttttatcctgaaatccttataa

SEQ ID NO: 284996 - DNA, 345 bp, Unknown
  Bacterial polypeptide expressing nucleotide sequence isolated from the Sargasso Sea
tatgttttttggaagtataccagctattataacaccatttagtaacaataaagtggattataattctttaaataaaatagtaaattttttaatagagaatcactcaaatggattagtaccttgtggtacgactggggagtcaccaactttatcgcatgaagaacataaaaaaataattgaagaagtaattgcagttaatgatggaagagtccctgtaattgctggaactggatcaaataatactttagaagcaattgattttactaagcatgcccaaagtgttggagctagtgcagccttagtagttacaccatattataacaaacctactcaatcaggtcttta

SEQ ID NO: 284997 - DNA, 739 bp, Unknown
  Bacterial polypeptide expressing nucleotide sequence isolated from the Sargasso Sea
tttggtacccgctggcacaacaggcgaatctccaacgttatctcataaagaacaccagaaagttatagaattatgtattaaagaatccggaggaaaaatacctgttatagctggaacaggttctaactctacagaagaggcaatttctttaactaagcatgcagataaagtaggtgcaaatggagctttggttgtaacaccttactataataagccaacacaagaaggtttgtaccaacattataaagcaataaatgacagctgtggtattcccataattatttacaacattccatctcgatcagtaattgatatgacagttgatacaatggcaagactttttgaattaaaaaatatagttggcgtgaaagatgcaacaggagatttagatagagttacacaacaaaaagaaaaaatgggcagtgattttattcaattaactggtgaggatggcaatgttttagaatttaataaaagaggaggtgtcggatgtataagtgtaacagcaaatatagctcctaaacaatgttcagattttcaaaatttttctttatcaaataatagcaatgaaatcaaagaagctgaaagaattaatgaacttttacaaccagttcataaagcgctttttatagaaagcaatccaagtccagttaagtatgcagctaaattattaaatttatgtagtgatgatgttagactgcctctgggtaaagtatggataccactaaagaaagcgtaa

SEQ ID NO: 284998 - DNA, 808 bp, Unknown
  Bacterial polypeptide expressing nucleotide sequence isolated from the Sargasso Sea
atgtttaaaggttcaaatgttgctttggtcactccgtttaaagataataaattagacgaagaaacttatataaagcttattaattttcatttagaaaatggcacaaatgggcttgtgccagcgggcactacaggagaatcgccaacattaacacactcagaacatgaaaaagtaattgaattgtgcattaaagaagctaaaggtaaaattcctgttattgcaggaacggggtcaaattctactgaagaagcaatctcacttactaagcacgctgaaaaagttggtgctgatggagctttggttgtaacgccttattataacaaaccaacacaggaaggtttatatcaacattacaaatctataagtgataactctgatattccaataataatctataacatcccgggaagatcagtagttgatatgagtgttgacacgatgtctagacttttcgaattaaaaaatatagttggagttaaagatgctactggagatctagatagagttgatcaacaaaaaaataaaatgggaaacgaatttattcagttaactggtgaagatggaaatgcattagaatttaacaaaagaggtggagttggatgtatttctgtaacagcaaatattgcacctaaactttgctctgatatgcaaaaattctctaaatcaaattccgataatgaaattaaagaagctgagcgtatagatattttgcttcaacctcttcataaatctttatttattgaaagcaatccatctcctgtaaaatatgcagcaaaacttcttggattgtgtgatgatgcagttagat

SEQ ID NO: 284999 - DNA, 637 bp, Unknown
  Bacterial polypeptide expressing nucleotide sequence isolated from the Sargasso Sea
atgtttaaaggatctcatacagcattaattacgccttttgacggtaaatctattgatgaaaaatcatttaggtctctgatagattttcaaatatcagaaggtatacatggactggttcctgtaggcacaacaggcgagtctccaactttaagccatgaagaacataagttagcagttgagatatgtgttgaagaaacagcaaaacgtgtgccagtaatagcaggaacaggatcaaacaacaccgacgaagcaatcgatctgaccatgcatgctgaaaaagcaggtgctgacggtgctttagtggttacaccatattataataaacctacacaacatggtttatactcacacttcgaggcaattagtaaggcaactacacttccaattattatttataatattcctggcagatcaattgttgatatgaatacaaaaacgatgagggatttgtttaaaattaaaaacattgttggagtaaaggatgctacttcagatataccaagagtttatgaaacgaaaacaacaataggagaagattttaatcaattgacaggagatgatgcaactacgttagcttttatggtttacggtggtcacggatctatctcagtgacgtctaatattgccccaaaattat

SEQ ID NO: 285000 - DNA, 744 bp, Unknown
  Bacterial polypeptide expressing nucleotide sequence isolated from the Sargasso Sea
tgcattaattaccccatttaaagataataatcttgatgaggatatctatagaaaattaataaattatcaccttaataacggtacaaatggagttgttcccggcggaaccacaggtgagtcaccaactttatctcatgctgaacataaaaaaattattgaaatagctgtaagcgagtgtaaaaacaaaattccagttatcgctggcacaggctctaattcaacagaagaagcagtagacttatctaaatttgctgaacaagcaggttctgatgctttattagttgttacaccttactataataaaccaactcaagaaggtttataccagcattataaaaaaattaatgacaatgtaggtataccaattataatttataacattccatcaaggtcagtaatagatatgtcaatcgatactatgtctaaattgtatgatttaaaaaatatagttggtgtgaaagatgccactggagatttaaatagagtagatcaacaattaaagattatgggtaaggaatttattcaacttaccggtaatgatgataacgctctagaatttaacaagcggggtggtgttggttccattagcgttactgcaaatattgctgcaaaactttcagcagattttcaaagtgcttgcaacaatgatattaagagggcaaaagaattagataatttattgcaaccattgcattcagcactttttattgaaagcaatccttcgccagttaaatatgcagcctc

SEQ ID NO: 285001 - DNA, 739 bp, Unknown
  Bacterial polypeptide expressing nucleotide sequence isolated from the Sargasso Sea
tatgttcaaaggatcaaatgttgctttaattacaccatttaaaaataatggtctagatgatgaagcatatataaaattaatccatttccacattgataatggcaccaatggtcttgttccagctggtacaacaggtgaatctcctacgttaagtcatgatgaacatcaaagagtaatagatttatgcataaaagaaagtaatggaaaaattccagttattgcaggtacaggttccaactcaacagaggaggcgatttctttaaccacacatgcagaaaaagcaggagctaacgctgctttgatagttacaccttattacaacaaaccaacccaagaaggcttgtatcaacattataaagcaattaatgataagtgtggcattccaattataatttataatattcctggtagatctgtgattgatatgtcagtggacacaatggctagactgtatgaattaaaaaatatcataggtgttaaagatgcaacaggtgatttagatagggttaatcagacacttgaaaaaatgggtaaagattttattcaattaacaggtaatgatgataatgcttttgaatttaataaacgtggaggggtaggcactatcagtgtaacagctaatattgcacctaaactttgttcagattttcaaaaattctctaaatcagactcagataacgaaatgaaagaagcagaaagattagataaaatattacaacccagttcatcactcaatgtt

SEQ ID NO: 285002 - DNA, 433 bp, Unknown
  Bacterial polypeptide expressing nucleotide sequence isolated from the Sargasso Sea
tatgtttaaaggatcaaatgtagctttagtcactccatttaaaaataatacattagacgaagaaagctatattaaattaatagattttcatttaaaaaatggaacaaatggtttagttcctgccggaacgacaggagagtcgcccactttaagtcatgacgaacatgaaaaagttatagaaatttgcattaaagaaagtaagggaaaaattccagttattgcgggtactggatcaaattcaactactgaagcaatttctttaactaaacatgctgaaaaggctggagctaatgcagctttagtagttactccttattataacaaacctacacaagaaggtttatatcaacattataaatcaattaatgacacatgcggaataccaataatcatatataatattccttctagatcggttatagatatgaccgtg

SEQ ID NO: 285003 - DNA, 764 bp, Unknown
  Bacterial polypeptide expressing nucleotide sequence isolated from the Sargasso Sea
aatgatagaggtaggaagacttgtgaccgcaatggtgacccctttcgatgaaagcggtgcagtagattataaacaagccaagagtcttgcaaatgctctaataaattccggtagtgatggcctggtcgtttctggtaccaccggagaatcaccgacacttacatcagaagaaaaactcagactttttgccgaaatcaaagaaagtatcggagatcgcggatcagttgtagccggtactggaaattacaatactgctgaaagtatcgaaatgagccaagaagcagaaagcgcgggagcagattgtctactactcaccgtgccatactacaacaaaccccctcaggagggtttgtatcagcattttaaagccatcgctgaaagcgtaacaatcccatgtatgctctacaacgtccccggtaggactagtttgaacatgactgctgaaaccactattagactcagccatgtcgataacattattggtgtgaaggaggccagcggagatatggatcagatagctagtataatatctggcgctcctgatggtttcaaagtgtggagtggtaatgacaatgaaactttctacattatgtcaatgggcgggtacggagtagtaagcgtattatcacatctggttggtaatcaaataaaacagatgatgggtctcatacttgaaggtgacatagaacaagccgctgctgaacatcatcgtatgctgcccatatttaaaataatgttcacaataactagtcccataccagtca

SEQ ID NO: 285004 - DNA, 745 bp, Unknown
  Bacterial polypeptide expressing nucleotide sequence isolated from the Sargasso Sea
ggtgaaagcgcgacattaaatgtagatgagcactgtcaaaccatcgctagagtagtttcttactcttcaggaagaattcctgttattgctggcactggagcaaatgcgacctccgaagcaatcgagcttactcgggcggcaagtcaagctggtgcagccgcatgtttactagttactccgtactacaatcgacctacccaaagaggcctttatgcacactttgagtcaattgcaaaggcggtggattgcccacaaattctctataatgtgccttcaaggactgccgttgatatgagtaacgacattgttttggagttggcttcaatagataatattattggcataaaggatgctactggtgatgtcgatcgagggtctgctttgttggcaaagactcccgaagatttcgcagtttattcgggtgacgatgccacagctagtgatttaattttagctgggggacacggaaatatttcagttacggcgaacgtgattcccaaagagatggccagacttgtggattctgctttagctggagatgtcgaatattgcaacagactaaatcaggaaatttcagggttgaataaggccctatttcaagaagccaatccaatccctatcaaatgggttttggcagagatgggaattattccgcctggaataaggttgcctttaaccattcttgatgtggaatttcggcagccacttcggaatgaacttaaaaaattcgagatatttatatgat

SEQ ID NO: 285005 - DNA, 877 bp, Unknown
  Bacterial polypeptide expressing nucleotide sequence isolated from the Sargasso Sea
tatgtttaaaggttcaaatgtagctttagtaacaccatttaaaggcgatagtcttgatgaggaaacttatgtaaaaattattaattttcatttagaaaatggaacaaacgggcttgtgccagctggtacaacgggagagtctccaactctttcacataaagagcatgaaaaagttatagagttatgcatacaagaagctaaaggaaaaattcctgtaattgcaggcactggatcaaattctactgcagaagctatatcgcttacagaacacgctgaaaaagctggagctgacggtgccttgatagtgacaccttattataacaaacccactcaggagggcttatatcagcattataaggcaataaatgacaaatgtggcatacccatcataatttataatattcctggaagatcagttattgatatgacagtagatactatggcaagattatttgagctggagaatattgttggtgttaaagatgcaactggtgatttgaatagagtagatgagactttcaaaaaaattggcaatgaatttatccaactaactggtgaggacggtcttgcttatgaatataacaaaagaggtggagtagggtgtatttctgttacagcaaacatagctcctaaaatgtgttctgatatgcaaaaattttcaaaatcacaggataacgatgagcaaaaaaaagctaaagagatagataaaaaactccaacctgttcataaatctttatttatagagagcaatccgtcaccagttaaatatgcagctaaattgatcggtctttgtgatgataaagtgagattacctttagtaacagttttagatgaaacaaaagccgaggtaaaaaaagctcttacatctgccgaataa

SEQ ID NO: 285006 - DNA, 724 bp, Unknown
  Bacterial polypeptide expressing nucleotide sequence isolated from the Sargasso Sea
gactctttctgggcggaacagcatgatttatttattgcagtaaaaggatctttggattcaagttgtaaagtaattgtcggtactggtagtaattgcaccagtgaagctgtagaagctacaaaaaaagcatacgaatttggggcagacggtgctttggttgttgttccttattacaataagcctcctcaagaaggtctgtataaacattttagttccattgctaattctgcgaaggatttgcctttaatgctttacaacatacctggaaggacaggatgtaatttattacctgatactgtgaagaaacttatggatttttcaaatattctcagtattaaagctgcaagcggtagaatagaggaagtaacagaactaagagctatttgtggctccgaattatctgtatatagtggcgacgattcattgttgcttccaatgttatctgtaggtgctgtaggagtagtaagtgttgcaagccatttggttggattgcaattgaaagagatgattcactcttttcaaagtggaaacatttccaatgcgcttgccattcatgaaaaacttcaacctcttttcaaagcactttttatgactactaatcctatcccaattaaggctgctctggagctttccggatggaatgtgggtaatcctagaagtcccttatcaccattaccaactgaaatgaaaaagcaactatcttttatcctgaaatcactataat

SEQ ID NO: 285007 - DNA, 793 bp, Unknown
  Bacterial polypeptide expressing nucleotide sequence isolated from the Sargasso Sea
catggtcgaaagtcaaaccaaagctatagtagtggtcggcacaactggcgaatcagccactctgacgtctgaagagcattgtaatatgatttcgaaagttgtcgctgaagctgatggtagaataccggtaattgcaggtacgggttcaaactcaacccacgaggccttatttctaaccaaagaagctaaagcgagaggagctgacgctgctctgattgtgacaccttactataacaggccaacccaaaaagggttatttgagcaccataaaattatagctaatgaggttaatttgccgcaaatactttataatgtgccttctaggacggcatgtgatatggaagttgaaacagtaatcaaattatctaagttagataatattgttggagtgaaggaggcgtcaggacagttgaatagggtaaaagccattagggagagttgtaaaaagaactttttaatttatagtggcgaggattcaaacgccaaagactttattctccaaggaggagatggtgtcatttctgtaacagcaaacgtagcacctgctaaaatgagtaaaatgtgtgaggctgctattgaaaaagatttggagttggcaacgcaattgaataatgagctaatgcttcttcatgaaaatttatttatagaagcaaaccccattccagtgaaatgggcggtagagcagattggtcttataaaaaaggggatacggttacctttgaccgagttatcttccgataaccatgaaaatgtcaaaattgctatggatagggctaacttgttgaatcaataa

SEQ ID NO: 285008 - DNA, 720 bp, Unknown
  Bacterial polypeptide expressing nucleotide sequence isolated from the Sargasso Sea
tatgtttaaaggatcaaatgttgctattgttaccccatttaagaataataagctagatgaagaagcttatttaaaactaattaattttcatttagaaaatggaacaaatggtttagttccagctgggacaactggtgagtctccaactttaagtcatgatgaacacgagaaagtcattgaaatttgtattaaagagtcaaatggaaaaattcctgtaattgctggtacaggctcaaattcaaccgaagaagccgttgccttaactaaacacgctgaaaaagcaggtgctgacggagtgcttgtagtaacgccatattacaataagcctactcaggaaggtttatatcaacattataaaaaaattaatgataataccaatctaccaatcataatttataatatacctagccgatgtgtaatagatatgtccgttgacactatggcaagattatttgaattaaaaaatattgctggagttaaagatgctacaggtgatttggatagattagatcaaacaataaaaaaattaggaaatgaatttattcagctaactggcgaggatggtttagctttagaattcaataaaagaggtggtgttggtgttatttctgttaccgcaaatattgcaccaaagttatgttctgatatgcaaaaattttctaaatcaaatttagataacgagttaaaagaagctcaaaaaattgataaaattttacaacc

SEQ ID NO: 285009 - DNA, 601 bp, Unknown
  Bacterial polypeptide expressing nucleotide sequence isolated from the Sargasso Sea
aaaagcctatgactctggtgcagatggtgctttggtcgttgttccttattacaacaagccacctcaagaaggtctttataaacatttcagttctattgctaattctgcaaaggatttgcctcttatgctttataacattcctggaaggacaggatgcaatttattacctgatactgtgaagaaacttatggatttctcaaatattctcagtattaaagctgcaagcggtagaatagaggaagtgacagaattaagagctatttgtggctctgaactctctgtatatagtggcgacgattcattgttgcttccaatgttatctgtaggtgctgtaggagtagtaagcgttgcaagtcatttggttggattgcaattgaaagagatgattcattcctttcaaagtggagaggtttctaatgcgcttgctattcatgaaaaacttcaacctttttttaaagcactctttatgactactaatccaatcccaattaaggctgctttggagctttcgggatgggatgtaggtaatcctagaagtcctttgtcaccattaaccaatgacatgaaaaagcaactatcttttatcctgaaatccctataa

SEQ ID NO: 285010 - DNA, 561 bp, Unknown
  Bacterial polypeptide expressing nucleotide sequence isolated from the Sargasso Sea
tatgtttaaaggatcaaatgtagcattaattactccattcactaataataaagtggatgaggaaaaatatataaaaattatcaattttcatcttgaaaatggcactaatgggctagttccagtaggcaccacaggagagtcgccaactttgtcccatgttgaacaccaaaagttaattgaattatgtataaaagagtcaaatggtaaaattccagttatagcagggacaggatcaaattctactgaagaagcaatttctttaacaaaacatgcagaaaaagcaggatcagatgcagcattagtggtaaccccatattataataaaccaactcaagaaggtttatatcaacactataaagctattaacgatagttgtgggattccaattattatttacaacataccgtcaagatcagtaatcgacatgtcagttgaaactatggctaggttatttgagttaaaaaatatagttggtgtaaaggatgcaactggtgatcttgatagagtaaataaacaaaaaacaaagatgggtaatgaatttattcaattaacaggaaacga

SEQ ID NO: 285011 - DNA, 706 bp, Unknown
  Bacterial polypeptide expressing nucleotide sequence isolated from the Sargasso Sea
atggttgcaatagccactccaatgaatacagatggatctctagattttaattcacttgagagattagtagaattcaacattgaaaataaaactgatgtgataatagccgtaggtacgactggagaatcagctacattaagtatgagagaacattcggaggttattcagaaaactataagcatagtcaataaaagagtaccggtaattgcaggaactggagctaactctaccagtgaagcattggagttaacccatcaatcaaaagccctcggagctgacgcatgcttattagttactccttactataataaaccaactcaaaatggtttataccagcactactcaaaaattgctaatgaagtcaatattcctcagatcttgtataatgttccgggaagaacttctgttgatatgtatcctgatacggttttaaaattgtgtgagcatgacaatataataggcatcaaagaagcatctggtgatatagatagatcaaaagaactattagacaaatgctcagataagatatctattttttcgggggatgataaaacagctatgagagatattcttcagggtttcaagggaaatatatcggttactgcgaatatatgtccgcgtgagatgcacgatgtgtgccgattagcttccgcaggctctaaagatgaagcagagattattaataaaaaaatagagaaacttcatg

SEQ ID NO: 285012 - DNA, 526 bp, Unknown
  Bacterial polypeptide expressing nucleotide sequence isolated from the Sargasso Sea
atgtttaaaggaagtataccagctcttataacaccttttaaaaatggatctgtagattattcatcttttgctaaaattattgaatggtctattgaaaatggttctcatggctttgttccttgtggaaccacaggtgaatctcctactcttagtcatcaagaacataagcaagtaattcaagagtgtataaaaatcgttgataaaagggttcctgttattgctggaacaggatcaaacaatacaattgaagctatcgaatttaccaaacatgcagaagaaataggagctgatggagctttagtagtcactccttattataataaaccaactcaagaaggtttatatcaacattttaagaaaattgccgactcctcaactttaccaattataatatataatattccaggtcgttcaattgtagacatgtcaatagatacaatgactagattatctaatattgataatattgttggagttaaagatgcaacaaacgatttatttagacctttgttaaccctaaactaaa

SEQ ID NO: 285013 - DNA, 721 bp, Unknown
  Bacterial polypeptide expressing nucleotide sequence isolated from the Sargasso Sea
aagcttttagattggcatattgatcatggtactaatggcatagtatctgttgggactactggagagtcagctacactggatgttgatgaacatgtgaaagttattaaacatacagtagattatgttaaatccagggtgccagtaattgccggcaccggggctaactctacttcagaggcattagagttaactcaagaatcaaaacaaaacggtgcagattttgccttaattgtttcaccatattacaacaaaccaactcaaaaaggacttataagtcattacacaaaacttgcaaatgaggtcgacataccacaaattttatataatgtaccatcaaggaccgcatgtgatattttacctgaaacagttgaggttctatcgactcacaataacattataggtattaaagaagctgttgataccaaagaaagaattgatgatttaatagctatttcatccaataaccaaaattttcaattattttcaggagatgatccttcatttataaagatgattcaaaaaggtggtgatggagtaatttcagtcgctgctaatgttgtaccaagtaaaatatctgagatatgtaaacttatagaatataaaaaatatgatgaagctattattattaataatgctctttcaaatctatatgatctattatttattgaatcaaatccaataccagtaaaatggatgttatttaaaatgaacttaataaaaa

SEQ ID NO: 285014 - DNA, 712 bp, Unknown
  Bacterial polypeptide expressing nucleotide sequence isolated from the Sargasso Sea
tatgttttttggaagtatacctgctgttattacaccctttaaaaatggtgatgttgattataaatctttagaaaaagtagtaaccttcctaattgataatggatcaaatggtttagtcccttgtggcacaacaggagaatcaccaacactttcacataccgaacataaaaaaataattgaagaaacaattaaaatagctgataaaagagttccagtaatagcaggaactggatcaaacaatacacttgaagctattgaatataccaaacatgctgaaaatgctggagcgtcagcagcattaattgtaactccatattataataagccaacacaatctggactttacgaacactttaaatctatttcagataaaacatcacttccaataataatttataatattcctggcagatcaattgtagatatgacgattgaaacaatgattgaattatcaaaaatagaaaatattattggagttaaagatgctacaaatgatttatttagacctctactaactagaaaaaaaatgaataaggatttttgttttttatcaggtgaagatggcacagcattagcatttttggcacaaggtggtgctggatgtatttcagtgactgctaatatcgctcctaaattatgctctgatatgcataaagcatggagagaggggaaagtaaaggaagctcaaaaaataaattgcaactatcaggat

SEQ ID NO: 285015 - DNA, 706 bp, Unknown
  Bacterial polypeptide expressing nucleotide sequence isolated from the Sargasso Sea
atgtttaaaggttcaaatgttgcgttaattactccatttaaaaataataaacttgatgaagagtcatatataaaattaattcattttcatatggaaaatggcaccaatggacttgtaccagctggcacaacaggagagtctccaaccttaaatcacgatgaacatcaaagagttattgatctatgtattagagaatgtaaaggaaaaatacctgtaattgcaggtacaggatctaattccactgaagaggctatttcactaacatctcatgcagaaaaagcaggtgcaaatggagctttaattgttacaccttattataacaaacctactcaagaaggactatatcaacattataaagctataaatgatagcgttggaattccaattataatttacaatattccaagcagatgtgtaattgatatgtcggtagatactatggcaagattatttgaattaaaaaatatagctggtgttaaagacgctacaggtgatttaaaccgactcgatgaaacaattaaaaaattaggacctgaatttattcagcttacaggtgaagatggacttgcttataaatttaataaaaagggaggagtaggaattatttctgttactgcaaatattgcacccaaactatgttcagatatgcaaaaatactcaaaatctgattctgataatgaattaaaggaagctgaaagaatagatc

SEQ ID NO: 285016 - DNA, 724 bp, Unknown
  Bacterial polypeptide expressing nucleotide sequence isolated from the Sargasso Sea
ttatcacatgaagaacataaaaaaataattgaagaaactatcaaaattactgacaaaagaattcctgttatagcgggtactggttcaaataatactttagaagcaatagaatatactaatcatgctgaagaatcaggggctgatgcttctttaattgtaacaccatactataataaaccaactcaatcaggattgtatgaacattttaaaatgattgctgataaaactaatattccaataatcatatataatattccaggtagatcaattgttgatatgactattgaaactatgattgagttatcaaaaataaagaacattatcggtgttaaagatgcgactaatgatttgtttagaccattacttactagaaaaaaaatgcaaaatgatttttgttatctctctggagaagatggaactgctttagcatatttagcacaaggtgggcatggttgtatatctgttacagctaacgtggctccaaaattatgttcagagatgcattcagcatggcaagaaaaaaatatttcaaaagctcaagaaataaatttaaaattatcatctttacataatgcattgtttaaagaatcaagtccaggaccagttaaatatgctgcatcgttattaggattgtgtaatgaggatacaagattaccattatctggaattaaagaggatacaaaaaaattagttaaaagttgtcttcaagaattacaacttttat

SEQ ID NO: 285017 - DNA, 790 bp, Unknown
  Bacterial polypeptide expressing nucleotide sequence isolated from the Sargasso Sea
tatgtttaaaggttcaattgtagctttagtaacaccattcaaaaataatgttctggatcaggacaaatatgcatcacttatccagcatcacattgcaaacggaacaaaaggggtggttccagctggtactaccggtgaatcgccgactttaaatcatgatgagcataagaaagtaattgaaatagcagttaaggagtgtaagggaaaaattcctgttattgctggtgctggctcaaattctactgccgaagctgtcgatctatcaagacatgctgaaaaatcaggagctgatggattattaatagtcacaccttattataataaaccgacccaagagggattgtatcaacattataaattaattaatgataacgttgggataccaattattatttacaatatacctccaagatcagttattgatatgtcagtcgaaactatggctagactttttgaattaaagaatattgttggagtaaaagatgcaacagcagatctgaatagagtagatcaacaattaaaaaaaatgggtccagaatttatacaattatctggagaggatggaacggctttagaatttaatgtgagaggtggtgttggatgcatttctgtgagtgcaaatgttgcagcaaaattgtgttctgaatttcaagatgcttgtctaaataaaaataacaacaaagcaaaagaaattaatgaaaaattaatgcctttacataaatctttatttatagaaagtaatccgagtcctgttaaatatgcggcaagcttattaaatctgtgttcagac

SEQ ID NO: 285018 - DNA, 730 bp, Unknown
  Bacterial polypeptide expressing nucleotide sequence isolated from the Sargasso Sea
tccactctatctcatgacgaacataaaaaaattattgaaattgcagttaaagaatgtaagggaaaaattcctgtaatagcagggacaggatcgaattctactaccgaagcagttgagctatcgaaatatgcagagaaaataggatcagatgctctattagttgttacaccttattataacaaaccaactcaggaaggtctctatcagcattataaaaagattaatgacagtgtaggcgtgcctataattatttacaatattccttctcgatctgtgattgatatgtctattgaaacaatgaaaaaattatatgaattaaaaaatatagccggcgtaaaagatgctactggcgatcttaacagagttgatcaacaattaaaagcaatgggaaaagaatttatacaattaacaggaaacgatgataatgctcttgaatttaataaaagaggtggaaaaggatctattagtgttacggctaatattgcagctaaactttgttcaaactttcaaaattcttgtgctaatggatttaaagactcagaaaaattagataaaattctacaaccattacattcatctatgtttatagagagcaatccttcgccagtaaaatatgctgcttcgttgttagggatgtgtgatcctgatgtaagattacctttagttcaagttaaagaagaatcaaaaaagaaaatatctcaagctcttaaagatgctaaattactttaat

SEQ ID NO: 285019 - DNA, 724 bp, Unknown
  Bacterial polypeptide expressing nucleotide sequence isolated from the Sargasso Sea
ggagcatcaaaaagttattgaaatatgtatagaagaagcaaaaggcaaaatcccaattattgcaggaacaggatcaaactccaccgaagaagctgtaagtttaacaaggcacgctgagaaagccggagcagatggtgcattggttgttacaccatactacaataaaccaactcaagaaggtttgtaccaacactataaatcaattaatgacaatactagtcttccaattataatatataacattccaagtagatgtgtaattgatatgtcagttgacacaatgtccagattgtttgaacttaaaaatattacaggagtcaaagatgcgactggagatttaaacaggcttgaccaaacaataaaaaaattgggaccagaatttatacagctaacaggtgaagatggtcttgctcttaaatttaataagagaggtggcgtgggtataatttctgttacagcaaacgttgctccaaaactttgctcagacatgcaaaaattttctaaatcaaaatcagataatgaaatcaaagaagcagaaagaatcgatcaattgttgcagccattgcataaatctttgtttatagaaagcaatccagcaccggcaaagtatgctgctaaacttttaggattatgtagtgacgaaattagacttccactagttaaaataaaaaaagaaacagaagaagaagttaaaaaagctttaagttttgcaaaattaatttaa

SEQ ID NO: 285020 - DNA, 361 bp, Unknown
  Bacterial polypeptide expressing nucleotide sequence isolated from the Sargasso Sea
atgttcaaaggatcaaatgttgctttaattacaccatttaaaaatgatagcttagatgaagaagcgtatataaaattaattcattttcatattgataatgagaccaatggtcttgttcctgctggtaccacaggtgaatcacctacattaaatcatgatgagcatcaaaaagtaatagatttatgtataaaagaaagtaatggaaaaattccagttattgctggtacaggttccaactcaacagaggaggcgatttctttaaccacacatgcagaaaaagcaggagctaacggtgcattaatagttacaccttattacaataaaacaacccaagaaggcttgtatcaacattataaagcaa

SEQ ID NO: 285021 - DNA, 868 bp, Unknown
  Bacterial polypeptide expressing nucleotide sequence isolated from the Sargasso Sea
aaacgtagctttagtcactccatttaaagataataaacttgatgaagaaacatatatcaagttaatacattttcatatcgaaaatggtacaaatggtcttgttccagctggtaccaccggtgagtcaccaacccttagtcatcaagaacatgaaaaagttattgaattatgtgtaaatgaaagcaatcaaaaacttccagtttttgctggcacaggttctaattctacagaagaagcgatatcactaacaagacacgctgaaaaaataggagccaatggagctttaattgtaacgccatattataacaaaccaactcaggaaggtttatatcagcactataaagcgattaatgataaatgtggtataccaattataatctataatattcctggaagatcagtaattgatatgtcagttgatacgatggctaaactttttgaattaaaaaatattataggtgtaaaagatgctactggagatcttaaaagagtagaacaaactttaaaaaaaatgggaaaggattttttacaattaacaggaaatgatgataatgcgctagaattcaacaaaagaggtggggaaggagccattagcgttacagcaaatattgcaccaaaactttgttcagattttcaaaaattttctaagtcaaaaattgatgacgaaaaaaaagaggcagaaaaattaaataagattttacaaccagttcatcattctatgtttgttgaaagcaatccaagtccagttaaatatgctgcaaaattattaaatctctgtgatgatagtgtaagactgccattagtaaaagtaacagaacctacaaaaaaagtaattaaagaagctcttctttctgctaaattgatttaa

SEQ ID NO: 285022 - DNA, 760 bp, Unknown
  Bacterial polypeptide expressing nucleotide sequence isolated from the Sargasso Sea
aatgttttttggaagtatacctgctgtcattacaccgtttaaaaatcaacaagttgattatgaatctcttaataaaataataaattatcttattgaaaacggttcagatggtcttgttccatgtggtactaccggagaatctcccacattatcacatgaagaacataaaaaaattatagaagaaacaataaaatttgcagataaaagggttccaattatagctggaactggttcaaacaatacagctgaagcaattgagtatactaaacatgcgaaaataagtggagcagatgcagctttagttgtcactccatattataataaacctacgcaaaaaggattatatgctcattttgaatcaattgcaaaatcagtaaatataccaattattatatacaacataccaggtagatcagtagttgatatgactatagagacaatgattgagttatcaaaacttgacaatattattggagtaaaagatgccacaaatgatttgtttagacctcttctcacagaggcaaatttggaaaataatttttgttttttatcgggagaggatggaactgctcttgcatttttagcacaaggtggacatggatgtatttcagttacagcaaatgtagctccaaaactttgttcagatttgcaaaaattttggagagaaaataatattcaaaaagctcaagaattaaatttaaaattagctaaattacatcactcactttttcttgagtctagtccggggccagtaaaattg

SEQ ID NO: 285023 - DNA, 892 bp, Unknown
  Bacterial polypeptide expressing nucleotide sequence isolated from the Sargasso Sea
aatgaatattaaaggcgccatcacagctttagctactcctatgaaaatggacgggtctctagatttttcatctttagagaaattaattgagtttcagatatccgaaggcattaatggattggtagcagtaggaacgactggagaatctgcaacagttgatgtggaagaacatttagaaataattagttttttcataaaaatttctaacaatagagtgcccataatcgctggtactggagcaaattcaactaaggaagctattgaactaactagagaagctaaagaccttggtgcagatgctgctcttttagtttcgccttattataataagccaactcaagaaggcttgtttaggcattttacagaaatagcaaatcaagttgatatacctcaaattatttacaatgtaccctcaaggacagcaagcaatatagatgtcaatacgatcaagagactttgtacaaatccgaacattattggagtaaaggatgctactggagatttaaaagtctttgatgagataaaaaataaatgcatcgaagaaatagaatcagataatttttctttattttcaggagacgatgaaacttcatttgaatttatttctagaggagggcatggaacaatttctgtaacttccaacattctgcctaatatgattgccaaaatgtgtaaagctgccagcaataattcagatgatttacaagaaatgaaaatacgattagagaaaataaataaacttttatttgttgaatctaatccaattccagtaaaatttgcccttaaaaacatggggttaattgatgaaggaataagacttccgttaacttggcttgatcataaatttcaccatgaaataacagaggaactaaataaacttgatttaatctga

SEQ ID NO: 285024 - DNA, 584 bp, Unknown
  Bacterial polypeptide expressing nucleotide sequence isolated from the Sargasso Sea
agcattagtagtaactccatattataacaagccatcacaagaaggtctacttcagcatttcactaaaatagctaattcagtaaatattccgatcgttatatacaatataccaggaagatcagtcatagatatgaccaacgagacaatggctaaactttacaagttaaaaaatattgttggtgtaaaggatgctactggagatataccaagagtttattttacaaaaaatgatgttggaaaagattatattttattaactggggatgactcaacaactttagcatttatgacatatggtgggcacggagctatctctgtaacttcaaatattgctcctcaattatgctcagaatttcaaaatctatgcatggataaaaaattttatgaggcatcaataatcaatgatcaactaatgccattgcatagagcactatttttagaatctagtcctggacccgtcaagtatgccgcttctgttctaggcttgtgttcagaggaagtaaggttgccagtaaccactatcagtaaagaaaccaaagaatctattgatagtgctttgagacatgcctcacttattgactaaa

SEQ ID NO: 285025 - DNA, 772 bp, Unknown
  Bacterial polypeptide expressing nucleotide sequence isolated from the Sargasso Sea
ttctgctggtacaacaggtgaatctccaaccttaagccacaaagagcatgaaaaggttatagaactttgtataaatgaagctaaaggtaaaatacctgtaattgcaggtactggatctaattcaactgaagaagcaataaatctcacaaagcatgcagaaaaagccggtgctgacggtgttttagttgttacaccttattacaacaagcctactcaagaaggtttatatcaacattataaagccataaatgataactgcggtatacccataatcgtttataatattcctggaagatctgtaattgatgtttcagttgatacaatggctagaatgtttgaacttaaaaatattgcaggagtaaaagatgcaaccggaattcttgaaagagtagatcaacacaaaaataaaatgggatcagaatttattcagctaacaggcgaagatggcttagcttttgaatacaataaaaggggaggtgttggatgtatttctgtcacggcaaatgttgcccctaaactttgttctgaaatgcaatctttatctacctcaggtgataaagataaaattagtggagcagagaaaattgacaacttattacaacctcttcacaagtcactttttattgaaagcaatccgtcacctgtaaagtacgctgctaaactacttaatttatgtgatgatactgtaagattgccattagttaaaataacagatactactaaaatagaagtaaagaaagcacttaaaatcgctaaattgattaatgaataa

SEQ ID NO: 285026 - DNA, 529 bp, Unknown
  Bacterial polypeptide expressing nucleotide sequence isolated from the Sargasso Sea
tatgtttaaaggatcaaatgtagcattaattacaccgtttaaagacaacaaacttgacgaagaaagttacataaaaataataaatcatcatctggaaaatggaacaaatgggttagttccagttggaacaactggcgagtcaccaacactatcacatgatgaacatgagagaacaattgaattatgtataaaagaagctactggtaaactccccataatagctggcacaggatcaaattctacagaagaagcagtatcattaactaaacacgctgagaaagctggggctgatggtgctttagttgttacaccatattataataaacctactcaagaaggattatatcaacattataaatcaatcaatgataactgtggaattcccattattatttataatatacctagccgttcagtaattgatatgagcgttgaaacaatggcaagactatatgaactaaaaaatatagttggagttaaagatgcaactggtgatctaaatcgtgttgatcaacaaaaagaaaaaatg

SEQ ID NO: 285027 - DNA, 751 bp, Unknown
  Bacterial polypeptide expressing nucleotide sequence isolated from the Sargasso Sea
tatgctcaagatagaaggctgtataacagcattaattacaccattcacaaaggctggtaatttagatcaagttactctaagaaaattgataaaaaggcaaattgactttggagttcatggaatagtcccttgcggtacaacaggtgaatccccaaccctgagtcatgacgaacacgataaagtaattgaaattgcagtctctacatcaaatggaagagtcccagtgattgcaggaaccggatcaaactcaacaaaagaagctattaggctaactaaagcagctgaaaaagctggtgcggatgcaagtttgcaagttgttccgtattataataaaccaaatcaagaaggtttatttaaccatttcagaaatattgcaaaagcaactaaattaccaataattttatataatattcctggaagatcttcagtgaatcttgaaacagatacaattgttaaacttgagaaggtctgtaaaaacattgtaggtattaaagaagcatctggaaaaattactaaagtaaaagaaataatcaaaagatgttcaaaaaaatttatagttttatctggtgaagatagtctaaatcttaagatattaaaaagtggaggtaaaggtttcatttctgtgacttctaatttgatgccaaaggaatgctctgagctatatgaaaactatattgccaacaatactaaggaattaaataaaattgatagaatactaatgaatataaataagctgttatttgttgatact

SEQ ID NO: 285028 - DNA, 413 bp, Unknown
  Bacterial polypeptide expressing nucleotide sequence isolated from the Sargasso Sea
catgtttaaaggttcaaatgtagcacttataacaccattcaaagataataatctagatgaagaaaattatataaaattaattaattttcatttagaaaataatactaatggcctagttcctgcgggtacaacaggtgaatctcccactttaagccataaagagcacgaaaaagtaattgaattatgcattaaagaagcaaagggtaaggttcctgtaattgctggcacaggatctaactctactgaagaggccgttgcattaacgaagcacgcagaaaaagcaggggctgatggagctttagttgttacaccatattataacaaacctactcaagaaggtttatttcaacactataaatcaataaatgataacacaagccttcctattataatttacaatataccaagtagat

SEQ ID NO: 285029 - DNA, 808 bp, Unknown
  Bacterial polypeptide expressing nucleotide sequence isolated from the Sargasso Sea
cgaaagttattgggagtggcatttagaaaagggaactcatggtattgttccaatggggactactggagagtcagcgacccttgatacagatgaacatttaaaggtcatcaagcgaacgatagaggttataggcggaagagtccctgtcattgcaggcacaggaagtaactcgaccgccgaggccattcatcaaacacaggaagcagaaagagctggtgctgatgcctgtttgttggtgacgccttattacaataagcctactcaggaaggtctttatgcgcattatcgtgaaatagcatcggctacatcggtacccatcgttttatataatgtacctccaagaacagcttgcgatatgagcgcggagacagtagctcggttgtctgagttggatggtatcgtaggcattaaggaggcttgcggtgatgttgaaagagttaaagcgattcatgatcttgtaggtgagggttttgttatcttgtctggagaagatgcccaaactcgtcaaatgttcgattatggtgctaagggagcgatttcggtgactgcaaatattcttcctaaggaaatgtctgaattttgtcggagtttcttggatggggatttgagaaggtgcgaggagttggatagcactttgcagccagttcatgatgtgctgtttattgaggtttcgccttcaccgacaaaatgggtgctgaatcgaatgggaatgattgaagaaggtatcaggttacctctacttcccctttcagaacaaaatcgaattccggtttcaaaatgtcttgctaagttaggcctaatcaattga

SEQ ID NO: 285030 - DNA, 743 bp, Unknown
  Bacterial polypeptide expressing nucleotide sequence isolated from the Sargasso Sea
tccaaccctcagtcatactgaacatgaacgtgtaattgatttatgtattaaagagagtaatggaaaaatacctgttatcgctggaacaggatctaattctacagaggaggcaatatccttaacctctcatgctgaaaaggcaggagcaaatggtgccttagttgtaacgccatattataataagcctacacaagaagggctgtaccaacattacaaagcgattaatgataaatgtgggatccctattataatttataatattccaggcagatcagtaattgatatgtcggttgataccatggcaagattatatgaactaaaaaatattgttggtgtaaaagatgctactggcgacctagatagagttaatcaacaattaaataaaatgggtaaagactttattcaattaactggaaatgatgataatgcgtttgaatttaacaaaagaggtggagtgggcactattagtgtgactgcaaatattgcaccaaaactttgttcagaattccaaaaaaattcaatatctagaaaagacgaggatcttgcaaaagcaaaagagttagataatattttacaaccagttcatactgcaatgtttgttgaaagcaatcctagtccagttaaatatgcagctaaattgatgaatttgtgtgatgatgaggtgagattaccattagttaaagtaactgaagagactaaaataattgtaaaaaaagccatagagactgcaaaacttatttaat

SEQ ID NO: 285031 - DNA, 730 bp, Unknown
  Bacterial polypeptide expressing nucleotide sequence isolated from the Sargasso Sea
atgtttaaaggatcaaatgtagcattaataacgccattcacgaacaataaagtggatgaggaaaaatacattaaaattatcaattttcatcttgaaaatgggacaaacggtttagtaccagttggcacaaccggagagtctccgactttatcccatgatgagcaccaaaaattaatagaaatatgcataaaggagtcaaatagcaaaattcctgttatagctggtacaggatcaaactctactgaagaagcaattgcacttacaaaacatgctgagaaagcaggtgccgatggagctcttgtggtaactccatactataataaaccaactcaagagggtttatatcaacattataaatcaatcaatgataactgtggcattcctataataatctacaatatcccatcaagatcagtaattgatatgtccgttgatactatggcaagactatttgaactaaaaaatatagttggtgtgaaagatgcaacgggagatttaaatagagtagatcaacaaaaattaaaaatgggtgatgagtttattcaattaacaggaaacgatgataatgcttttgaatttaataaaagaggtggcgttggcaccatcagtgttacagctaatatagcacctaaaatgtgctcagatttccaaaaattttctaaatcaaaaaatcaagatgaaatcgacaaagctgaaaaattagataaaatattacaacccattacataaa

SEQ ID NO: 285032 - DNA, 442 bp, Unknown
  Bacterial polypeptide expressing nucleotide sequence isolated from the Sargasso Sea
tatgtttaaaggatcaaatgttgccttaatcaccccatttaaaaataacggtttagatgaagaagcatatatcaagctaattcatttccatattgaaaatggtacttctggattggtcccagctggtactacaggtgagtctcccacacttagtcactctgagcatgaacgtgttattgatttgtgcattaaggagagtaatggaaaaataccagttattgctggaacaggatctaattctacagaggaagctatttcccttacctcccacgctgaaaaggctggcgcaaatggagcattagttgtaacaccatactataataagcctacacaagaaggattataccaacattataaagctattaatgatcactgtggaatacctattataatttataacataccaagtagatcagtaatcgatatgtcagtggatacaatg

SEQ ID NO: 285033 - DNA, 426 bp, Unknown
  Bacterial polypeptide expressing nucleotide sequence isolated from the Sargasso Sea
tatgcttaaaggatcaatcgtagccttaattactccatttgaaaacaacgctctaaatgaggatgtttatcgtaaattaattcattatcaccttaaaaatggaacaaatggcattgttcctggtggtacaacaggcgagtcaccaactttatcacatgatgaacataaaagaataatcgaaatcgctgttaaagaatgtagtagaaaaattccagttgtagctggcaccggctcaaattctacctcagaagcagttgaattatctaaatttgctgaaaaagcaggcgccgatgctttgcttgtagtcacaccatactacaacaaaccaactcaggaaggtttatatcaacactataaaaaaattaatgacaatgtaggtattcctataattatttacaatataccttcgagatctgtcattgatat

SEQ ID NO: 285034 - DNA, 790 bp, Unknown
  Bacterial polypeptide expressing nucleotide sequence isolated from the Sargasso Sea
tgatgcattaaataaaattattgattggcatattcaacaaggcaccaatggaattgtttcagtcggaacaacaggcgagtcagcaacagtaaattttgaagaacatttagaagttataaggcataccattaattatgttgacgggaaattgcctgtaattgctggcactggtgccaactcaacctcagaagcattagatttaactaaagaagcaaaaattattggcgcaaattatgctttaatagttactccatactataacaagcccagccaaaaagggttaatagaacattacacaaaaatagcagattctgtagatatacctcagattttatataatgttccatcaagaacagcatgtgacttgcttccaagtacatcagaaattctatctgagcatagaaatattgttggtatcaaggaagcagtctctgataaagataggataaaagatctaatcaaaatttcattatcaaatgataactttaagatttattcaggagatgacccttcgtttcttaacatgctaaatgttgggggtcatggagtgatatcagttgctgcaaatgtagtgccaaaatatatttcagacatatgctcttttttccaaaataatgaagttgagaaagctgaagaaattaatgataaattaaagaatttatatgatttattgtttatacaatctaatccaataccagttaaatggatgatgtataaaatggggttagttcaaaacgctctcagacttcctttagttgaacttgatagaaaatatcaagaaattattatt

SEQ ID NO: 285035 - DNA, 733 bp, Unknown
  Bacterial polypeptide expressing nucleotide sequence isolated from the Sargasso Sea
ttccatttttattgatgcttttaaagatcgtattcctttaatactgggtataagttctaatgacacaaactatttaattcaacaaatttcaaaaactgatttaacaggatttgaagcaataatgtcagtttgtccttattataacaaaccttctcaagagggtttatatcaacattttaaaagtgtatgcgatgtttcaccaattcctttgttgttatacaatgttcctggaagaacttcttgtgatatttcaaatgaaacaattgtaagattaagtgagtattctgataaaataataggcataaaagaggcatctggagatgttaaaagaataatagagctacgtaaaaagatcaaaagaaaatttcttattatttctggtgatgacttcaccatgattgatgcggttagaaatggtgctgacggtataatttctgttgcagccaatgcctttccctcaataatgaatagtacttatatatctttaatttgggagaatgataagcaagtgcctaataatattaaagaattggggactgtagattcatctacttttcttttaaatgatttttttgatttaatttttgaggaaggtaacccatcaggtataaaatttgctttgcaatgtttaaatttgtgtaatgacaaagttagattacctttgactggaatttcggaagatttaaaaagtaaaatttcaaattttatacataaaaacagttctgatgaataa

SEQ ID NO: 285036 - DNA, 370 bp, Unknown
  Bacterial polypeptide expressing nucleotide sequence isolated from the Sargasso Sea
tatgtttaaaggatcaattgtagctttaattaccccatttaaagataataaattagatgaagattcctatatttctttaatacattatcatcttaaaaatggaacctcaggtttagttcccgctgggactaccggcgaatcgccaactttagatcataatgaacatcaaagggtcatagagctatgcgttaaggaggcaaagggtaaaattccagtcatagctggcaccggatcaaactctactgacgaagcagtatcgctaactaagtatgcagagaaagtaggtgcaaatgcagctctggttgttactccatattataataaaccaactcaagaaggtttatatcaacattttaaaatctataaatga

SEQ ID NO: 285037 - DNA, 733 bp, Unknown
  Bacterial polypeptide expressing nucleotide sequence isolated from the Sargasso Sea
tctccaacgttatctcatagtgaacacagaaaaattatagagatagcagtaaaggaatgtaaaggcaaaatacctgtgattgcaggaactggatcaaattcaacagatgaagcgatagaactatcaaagtttgctgaaaaagctggctcggattctttacttgttgtcacaccatactacaacaaaccaacacaagagggtttatatcaacactataaaaaaattaatgacaatgtgggtataccaataattatttataatattccatcgaggtctgtaatagatatgtctgtagaaactatgaccaaattatatgagttaaaaaatattgtaggagttaaagatgcaacaggtgacttaaatagagttaatcaacagcttaaatcaatgggaaaagaatttattcaattaactggaaatgatgataatgctcttgagtttaataaacgcggaggtgtaggtgctattagtgtaacggcaaatatagcagcaaaaatttgttcagaatttcaaaaatcttgttcaaatgattttaaagaatctgaaaaatttgataaaatattacaaccaattcattcagctatgtttatcgaaagcaacccctctcctgtaaaatacgcagcttcattattaaagatgtgcaattcagaagtcagacttcctttagtacaagtaaaagatgaaacaaaaaaaaaagttttagaagtacttaaagtagctaaattactttaat

SEQ ID NO: 285038 - DNA, 754 bp, Unknown
  Bacterial polypeptide expressing nucleotide sequence isolated from the Sargasso Sea
tctatgtggtactactgggagaatctcctactcctttcatggggcggaacagcatgatttatttattgcggtaaaaggatctttggatgcaacctgtaaagtaatagttggcactggtagtaactgtacaagcgaggctgtggaagccacaaaaaaagcctacgactctggtgccgacggtgctttagtcgttgttccttattacaacaagccacctcaggaaggtctttataaacatttcagttctattgctaattctgcaaaggatttgcctcttatgctttataacattcctggaaggacaggttgcaatttattacctgatactgtgaagaaacttatgtatttctcaaatattctcagtattaaagctgcaagcggtagaatagaggaagtaacagaattaagagccatttgtggctctgaactctctgtatatagtggcgacgattcattgttgcttccaatgttatctgtaggtgctgtaggagtagtaagcgttgcaagtcatttggttggattgcaattgaaagagatgattcattcctttcaaagtggaaaggtctccaatgcgcttgctattcatgaaaaacttcagcccctttttaaagcactctttatgactactaatccaatcccaattaaggctgctttggagctttcgggatgggatgtaggtaaacctagaagtcctttgtcaccattaaccaatgacatgagaaagaaactatctattatcctgaaatccctataa

SEQ ID NO: 285039 - DNA, 593 bp, Unknown
  Bacterial polypeptide expressing nucleotide sequence isolated from the Sargasso Sea
tatgttcaaaggttcaatcgtagcgttaataacaccgtttaaaaataacaaattggacgaagccaattatagtaaaatattacaccaccatcttaaaaatggcactaatggcgttgtaccggctggtacaactggcgagtctccaactttatctcatattgaacataaaaaagtaattgagatagcaattaaagaatgtaaaggtaaaattccagttatagctggtactggctccaattctacttcagaagcaatagaactttcgaaacacgcagaaaatgctggtgcagacggtctactcattgtaacgccatattataacaaaccaactcaggaaggattataccaacattataaatcaattaatgacagcgtaggtattccaatcatcatttacaatataccttctagatctgttatcgatatgacagtagatacaatggcaagattatatgagttagaaaatattaaaggtgtaaaagatgctacaggtgatttaaatagggtatctatgcagcttaacaaaatgggaaaagagtttatccaattaaccggagaggatgataatgcgctagaatttaataaaaggggag

SEQ ID NO: 285040 - DNA, 586 bp, Unknown
  Bacterial polypeptide expressing nucleotide sequence isolated from the Sargasso Sea
atgttttttggaagcatacctgcggtaattacaccatttaaaaataatcaagttgattacaactctcttgataaaattgtgaatcatttaattttaaatggatcaaatggattggtaccatgtggcactacaggtgagtctcctactttatcacatgaagaacataaacagataattgaacaaacaataaaaattagtgataaaagagtaccagtaattgctgggactggatctaataatactaaagaggctgtcgattatactaaacatgcagagagtgttggagcagatgcggctttagttgtaactccatattacaataaaccaacacaaaatggtttatatgctcactttaaaatgattgcagattcagtaaaattaccaattataatatataatattccaggaagatctgtcatagatatgtctattgagacaatgattgagttgtccaaaattgaaaatatcattggcgttaaagatgcaacaaatgatttatttagacctttgcttacagctgcttatatgaaaaatgaattttgttatttatctggagaagatggaacagctctagctttcttatctc

SEQ ID NO: 285041 - DNA, 556 bp, Unknown
  Bacterial polypeptide expressing nucleotide sequence isolated from the Sargasso Sea
atgttcaaaggatcaaatgttgctttaattactccatttagaaataatggtcttgatgaggaagcttatataaaattaatccattttcatattgataatggaactagtggattggtacctgccggaacgacaggggagtcgccaacacttagtcatgatgagcatcaaagagttattgatttatgtataagagaaagtaacggcaaaattcctgtaatagctggaacaggttctaattcaacagaagaagcaatttctcttacttctcatgctgaaaaagctggtgcagatggagcattaattgtaacaccttattataataagccaacccaggaaggtttataccaacattataaagccataaatgataaatgtggaataccaattatcatttataacataccgagtagatctgtaattgatatgtctgtcgatacaatggcgagactttttgaattaaagaacattgttggtgtaaaggatgcaactggaaatttagatagagtagatcaacaattatcaaagatgggtaaagagtttattcaaatgactggaa

SEQ ID NO: 285042 - DNA, 754 bp, Unknown
  Bacterial polypeptide expressing nucleotide sequence isolated from the Sargasso Sea
ttgtgcagtggtacctccggtgagtccgctaccctggacatggctgagcataaggaagccattcgccgcactgtacagcaggtcgctggccgtattccggtgattgccggtaccggcgccaactccacgcgcgaagccgttgagctgactgaagccgcccgcagcgttggcgcagacgccgccttgctggttactccttactacaacaagccgactcaggaaggcttgtatctgcaccacaagcatatcgctgaagccgttgccattccgcagattctctataacgtccccggccgcaccgcctgcgacatgctgccggaaacggttgaacgcctggctgctatcgacaatatcgtcggcatcaaggaagcaaccggcgacctgcagcgcgcccgtgaagtgatcgagcgggtgggtgatcgcatggccgtgtattcgggtgacgatgccactgccgttgagcttatcctgctgggcggcaagggtaatatttctgttaccgccaacgtcgcccccctgcaaatgcatgaaatgtgcgcggccgccctgcgtggcgatgaagctaccgcgcgccgtctgaatgaggcgctgatgccgctgcacaaggcgctgtttatcgaagccaatccgatccccgtcaagtgggccctgctggaaatgggcctgattgctgacggcattcgcctgccgctgaccccgctcagtgcccgttgccatgacaccgttcatggtgcattgcgtcagtgcggcctgc

SEQ ID NO: 285043 - DNA, 421 bp, Unknown
  Bacterial polypeptide expressing nucleotide sequence isolated from the Sargasso Sea
aatgctcacaggatctataccagcaataataactcccttttcaaacggtgaagttgactatgatagttttgaaaaactattatattggcaaatcaaaagtggaatatctggggtaacagtttgcggaaccacaggggagtccccaactttatcacatgatgagcatatgaagttagttgagttcgcaatcaaagttgcttcaaaaaaaatacctgttattgctggcacaggatctaattccactaaagaggcaattgaatttaccaaacacgcctataaagcaggagcaaagtatggattagttgttacaccatattataataaacctaatcaattgggtttgattaaccatttcaaaaaaattgcaaaagtatcacctttaaaacaactaatttacaatataccaggaagatcaattgta

SEQ ID NO: 285044 - DNA, 385 bp, Unknown
  Bacterial polypeptide expressing nucleotide sequence isolated from the Sargasso Sea
tatgtttaaaggttcaaatgttgcattagttacgcctttcaaggataacaagcttgatgaagaatcttatataaaacttataaatttgcacctcgaaaatggcacaaatggtcttgtgccagctggaacaactggtgaatccccaacactaactcatacagagcacaataaggtaattgagctatgtattaatgaatcaaaaggtaaaatacctgttatagctggaacaggttccaattcaacagaagaagccgtatctttaactaaacatgctgaaaaagttggtgctgacgcagccttaatagtgacaccttactataacaaaccaacacaagaaggtttgtaccaacattataaaactataaatgataacacgagccttcct

SEQ ID NO: 285045 - DNA, 346 bp, Unknown
  Bacterial polypeptide expressing nucleotide sequence isolated from the Sargasso Sea
tatgtttaaaggatcaattgtagctttaattacgccatttaagaataataggcttgatgaagattgttatatttcattaattcatcatcatttaaagaatggcacctcaggcttagtacctgcgggcacaacaggagaatctcccacattaaaccatgaggagcacgaaagagtaattgagctgtgtgttaaagaatcaaaaggtaaaattcctgtgattgcaggtactggatctaattctactgctgaagctatttcattaacaaaacatgctgaaaaagttggagccaacgcagcattagtcgtaacaccttattataacaaaccaacacaagaaggacttatc

SEQ ID NO: 285046 - DNA, 757 bp, Unknown
  Bacterial polypeptide expressing nucleotide sequence isolated from the Sargasso Sea
atgattgcaaacacaactaagtttactaatccattatttggaagaatattaactgcaatggtcactccatttactgaaaatggagatgtagattatgaactagctataaaactttcaaattatctttttgagaatggttctgatggcattgtgctatgtggcactactggagaatctcccactctttcatgggcggaacagaatgatttatttattgcagtaaaaggatctttggattcaagatgtaaagtaatagttggtactggtagtaattgtacaagcgaggctgtagaagctacaaaaaaagcctacgactctggagctgacggtgctctggttgtagttccttattacaataaaccacctcaagaaggtctttataaacatttcagttccattgctaattctgctaaggatttgcctttaatgctttacaacatacctggaagaacagggtgtaatttattacctgatactgtgaacaaacttatggatttctcaaatattctcagtattaaagcagcaagcggtagaatagaagaagtaacagaactaagagctatttgtggctcccaactctctgtatatagtggcgacgattcattgttgctcccgatgttatctgtgggtgctgtaggagtagtaagtgttgccagtcatttagttggcttgcaattgaaagagatgattgaatcctttcaaagtggaaacgtttccaacgcgcttacaattcatgaaaaacttcagtctctttcaa

SEQ ID NO: 285047 - DNA, 783 bp, Unknown
  Bacterial polypeptide expressing nucleotide sequence isolated from the Sargasso Sea
ccaacggacttgtcccagcaggtacaacgggtgaatctccaacattaaatcataatgagcacgaaaaagtcatagaaatttgtgttaacgaggctaagggtaaaattccagtaatcgctggaacaggttctaattcaactgaggaagcagtttctttaactaaacatgcagaaaaagctggtgctgatggagctttagtagtcactccttattataacaaaccaacccaagaaggcctatatcaacattataaaaaaataaatgataatactaatatacctataataatttataatattccaagcagatgtgttatcgatatgtcagttgatactatggctagattatttgaattaaagaatattgttggtgttaaggacgcaacaggagatttaaatcgacttgatcaaacaataaaaaaattaggttctgaatttattcagttaacaggtgaggatggattggcatttaaatttaatctaaggggtggagtaggtataatttcagtaacagcaaatattgctccaaaattgtgttcggatatgcaaaaatattccaaatctgattctgaaaatgaaattaaagaagcagaaaaaattgatcaaatgttacaaccattacataaatctttgtttatagaaagtaatccagcaccaacaaagtatgccgcaaaactcttaggtttatgtagtgacgaaattagacttccattagtaaatattaaaaaagaaactgaagaagaggttgaaaaggcattatcaaccattaaacttctaaaatgag

SEQ ID NO: 285048 - DNA, 774 bp, Unknown
  Bacterial polypeptide expressing nucleotide sequence isolated from the Sargasso Sea
gatctaatggacttgttccatgtggaactactggagagtcaccaactttatcacatgatgaacataaaagagtaattgaagaaacaattagaattaatgacaaaagggtacctgttatcgctggaacgggttctaataatacttctgaggctatcgattttactaaacacgctgaaagtagtggggcagatgctgctttagtagttaccccatattataataagccaacacaagaaggtttatttgctcatttcaagtcaattgctaaatcagttaagattccaataataatttataatatacctggaagatctattgttgatatgtctattaagacaatgatcgaattatctaagattgaaaatattgtaggtgttaaagatgcaacaaatgatttgtttagaccattacttactgcagcaaatatgaataatgatttttgtttattgtccggtgaagatggtactgcacttgcatttttagctcagggaggtcatggatgtatttccgttacggcaaatgttgcaccaaaattatgttcagaactacatcaggcttggagagaaaaaaatttgaacaaagctcaagatatcaatttaaaattagctaaacttcatcatgcactttttttagaatcaagtccaggtccagtaaaatatgccgcttctttaattggcctttgtagtaaagaaacaagactacctctttttgaaatttctgaagttacaaagaaatctgtatctaattgcttaaaagatctttcattaatttaaa

SEQ ID NO: 285049 - DNA, 573 bp, Unknown
  Bacterial polypeptide expressing nucleotide sequence isolated from the Sargasso Sea
gttattggtggtaatggcgccaatgcgacagcggaagccatcgaactcactaaatctttatctaaagtgggtgtcgcaggtatgttaggtgtaacaccttactacaacaaaccaacgccaaagggcttgattgcccactacaaagccgtagctgcgagcactgatattcctcaaattctgtataacgtaccaggacgcactgcagttgatatgcagccagaaacggtcgcagaactcgtcggtgtgagcaatattattggtgtaaaagaagccacaggtgatatcgctagggtaaaacgtctgcgggaattatgtggtaatgatttcaagctctacagcggtgatgacgcaacagccagagagtttttgctactcggcggtaatggcgtgatttctgtggccaataacatagtccccaaagcctttaaagctatgtgcgacgcagctcttgcaggtaatgctgaattggccttgagcctagatacgccactgcgaggcttatatagtacgcttttctgtgaggcgaacccgatccctgttaaatgggctgcccatcgtatgggattgattaaa

SEQ ID NO: 285050 - DNA, 364 bp, Unknown
  Bacterial polypeptide expressing nucleotide sequence isolated from the Sargasso Sea
tatgttcaaaggatcaatcgttgctttaatcacaccgtttaaagatgataaactagatgaggaaaaatacgctcaattagtaaaccatcatattaaaagtggtacagacggaatagttcctgctggaaccacaggtgagtcgccaacactttctcataatgaacaccgtaaagttatagaaatttctgttaacgagtgtaagggcaaaattcctgttattgcggggaccggttcaaattcaacagatgaagcaattgaattatctaaacatgcagaaaaagttggcgccaatggattgctaattgttactccatattataaacaaccaaactcagaaggattatatccacattacaaaaaaatt

SEQ ID NO: 285051 - DNA, 682 bp, Unknown
  Bacterial polypeptide expressing nucleotide sequence isolated from the Sargasso Sea
atgtttaaaggatcaattgtagctttaattaccccgtttaagaataatgaattagacgaagattgttacatctctctaatccaccatcatattaaaaatggtacttctggacttgtgccggcaggaaccacaggcgaatcgccgactttaaatcataaagaacataatagagttattgagttgtgtgttaaagagtcaaaagggaaaattcctgtaattgcaggtaccggatcaaactctacagaagaagcaatatcattaacaaaacacgcagaaaaagttggtgctgatgcagctttagttgtaacaccatattacaacaaacctactcaagaaggactttatcaacattttaaatcaattaatgacaactgttcaataccaataataatttataatatacctccacgatctgttgttgatatgagtgtcgatacaatggcaagactctttgaattaaaaaatattattggggttaaagatgctacaggtgatttgaatagagtcgatcaacaaaaaaataaattaggtccagattttattcagttatcaggtgaagatggaacagctttagaatttaatatgagaggagggttgggttgtatctcagtcacagcaaatgttgcatcaaaactttgtgctgaatttcaagaagcttcattaagtaaaaacaatagcaacc

SEQ ID NO: 285052 - DNA, 663 bp, Unknown
  Bacterial polypeptide expressing nucleotide sequence isolated from the Sargasso Sea
aatggggagagttcctgttattgcaggtactggatcaaattcaaccgaagaagctgttgcgcttacaaagcatgcagaaaaatccaaagttgatgctgtgttagtggtgacaccatattataataagccaacccaagaaggtctttatcaacattataaaaaaataaacgataactgcggaataccaattataatttacaatataccaggaagatctgttgtagatatgagcgtagatacaatggcaaggtgttttgaattaaaaaatataatcggtgttaaagatgctacaggtgatttagatcgtgttactcaacaaaaatcaaagatgggtgacgaatttttaatgttgtctggaaacgatgaaaatacttatgaatttaataaaagaggtggctctggatgcatttctgtttcagcaaatgtagtaccagacatgtgttcagaatttcatagcttgtgtaatgataaaaattttgaaaaagctaaattgttatttgataaattactacctttacatgatatactatttattgaaagcaatcccgttccaacaaaatactctcttaacttattggggaaaatgaaggaagatgtccgcttgccactagtagtagcaaattctaaatctaaagaaaaaattagaaatgttttaaaacaact

SEQ ID NO: 285053 - DNA, 343 bp, Unknown
  Bacterial polypeptide expressing nucleotide sequence isolated from the Sargasso Sea
atgttcaaaggatcaaatgttgctttaattactccatttaaaaataatggtcttgatgaggaagcttatataaaattaatccattttcatatggataatggaactagtggattagtgcctgctggaacaacaggggagtctccaacactaagtcatgatgaacatcaaagagttattgatttatgtatcaaagaaagcaaaggtaaaattcctgtaatagctggaacagggtctaattcaacggaggaagcaatttctttaacttctcatgctgaaaaagctggtgcagacggagcattaattgtaactccctattataacaaacctactcaagagggtttat

SEQ ID NO: 285054 - DNA, 793 bp, Unknown
  Bacterial polypeptide expressing nucleotide sequence isolated from the Sargasso Sea
atcaataatggtaccaatggacttgttccagcgggcacaacaggtgagtctcccacgttaagtcatgatgagcaccaaagagtaatagatttatgtataaaagaaagtaatggaaaaattccagtaattgctggaacggggtcaaactcaactgaagaagcaatttctttaactactcatgctgaaaaagcaggagccaatggagctttgatagttacaccttattataataaaccaactcaggagggtttgtatcaacattataaagcaattaatgataagtgtggcattccacttataatttataatattcctggcagatctgtgattgatatgtcagtggacaccatggctaggctttttgaattaaaaaatatagttggtgtaaaagatgcaacaggtgatttagatagagttaatcagacacttgagaaaatgggtaaagattttattcaattaaccggtaatgatgataatgcttttgaatttaataaacgtggtggggtaggagctattagcgtaacagctaatattgcacctaaactttgttcagattttcaaaaattatcaaaatcagaaaccgataacgaaatgaaagaagcagaaagattagataaaatattgcaaccagttcatcactcaatgtttgttgagagcaatcctagtcctgtaaaatacgctgcaaaacttttagaactttgtgatgacaacgtaagactaccacttgtaaaagtaacagacacaacaaaagaaattgtaaaaaaagctcttcagtctgctaagttaatttaat

SEQ ID NO: 285055 - DNA, 709 bp, Unknown
  Bacterial polypeptide expressing nucleotide sequence isolated from the Sargasso Sea
tatgtttaaaggttcaatcgtagctttaattacaccatttaaaaacaatgttttagatcaagataaatacgcgtctttaatacatcatcatattaagaatgggacaaatggagttgtcccagccggcacaactggtgagtcgcctacactcaatcacgaagagcataaaaaggttatcgaaatagcagttaaagaaactaatggtaaaattcccgtaattgcaggcacaggatcaaactcaacatctgaagcaatcgaactttccatacacgctgagaaaacaggagcaaacgctcttttaattgtaacaccatattataacaaaccaacacaagaaggtttatatcaacactacaaagctattaatgacaaagttggaattccaataattatttataatatccctccaagatcagtagtagatatgtcagtagatacaatggcaagactttttgaactaaaaaatatagcaggcgttaaagatgcaactgcggatttaaatagagttgataaacaattaaaaaaaatgggacctgaattcattcagctttctggagaagatggaacggctctagaatttaatttaagagggggagttggatgtataagtgtgacagcaaatgttgcgccaaaactttgttcagattttcaaaatgcttctttgagtaaaaataatagcaatttgatttcaaaggcaaaagaaatcaat

SEQ ID NO: 285056 - DNA, 652 bp, Unknown
  Bacterial polypeptide expressing nucleotide sequence isolated from the Sargasso Sea
atgtttaaaggttcaaatgttgctttagtcaccccatttaaaaataataaacttgatgatgaaacttatatcaagttaattcattttcacattaaaaatggcacaaatggtttagtcccagcaggaacaacaggagaatctccaacattaagccacgatgaacatgaaagagtaattgaattatgtgttaaagaaagtaatggtaaattacctgtatttgctggtactggttcaaattcaactgaagaagctatttccttaactacacatgcagaaaaaattggagcaaatggtgcgcttatcgttacaccttattataacaaacctactcaagaaggtttatatcaacactataaagctataaatgacaaatgtggaattccaattatcatttataatattcctggaagatcagtaattgatatgtcagttgatacaatggcaaaattatttgaattaaaaaacattattggtgtaaaggatgctactggagatttaaatagagttgatcaaacattattaaaaatgggtaaagattttattcaattaacaggaaacgatgataatgcattagaatttaataaacgaggaggggtaggcgctataagtgttactgcaaatattgcgccaaagatttgttcagaattccaaa

SEQ ID NO: 285057 - DNA, 577 bp, Unknown
  Bacterial polypeptide expressing nucleotide sequence isolated from the Sargasso Sea
atgtttaaaggttcaatcgttgcattaattacgccatttaaaaataatgagctagatgaggataagtacgtgtctttaattcatcatcatatcaagaatggtacaaaaggcgtagttccagctggtactacaggagaatctcctacacttaataataatgagcacaaaaaagtaatagagattgctgtaagagaaagtaagggaaaaattcctgtgattgcaggtacaggttctaattctacagaggaagctgttgagttatctaaacatgcagaaaaaagtggttcagatgctttattaattgtaacaccatactataacaaaccgacacaggaaggactgtatcaacattataaaacaattaatgacagtgtaggtatacccattataatttataacattccacctagatcagttgttgacatgtccgttgatacaatggccagactttttgagttgaaaaatattgcgggtgttaaagatgctacagctgatttagatagagttgataaacagctaaaaaaaatgggtcctgactttatacagttgtcaggtgaggatggtacagctttagaat

SEQ ID NO: 285058 - DNA, 466 bp, Unknown
  Bacterial polypeptide expressing nucleotide sequence isolated from the Sargasso Sea
atgttcaaaggatcaaatgttgctttaattacaccatttaaaaataatggtctagatgaggaggcatatataaaattaatccatttccacatcgataatggcactaatggacttgtgccagctggtacaacaggtgaatctcccacgttaagtcatgacgagcatcaaagggtaatagatttgtgtataaaagaaagtaatggaaaaattccagttattgctggaactgggtcaaactcaacagaagaggcgatttcattaaccacacatgcagaaaaagcaggtgctaatggagctttgatagttacaccttattataataaaccaacccaagagggcctgtatcaacattataaagcaattaatgacaagtgtggcattccaattataatttataatatccctggtagatctgtgattgatatgtcagttgatacaatggctagattgtatgaattaaaaaaca

SEQ ID NO: 285059 - DNA, 337 bp, Unknown
  Bacterial polypeptide expressing nucleotide sequence isolated from the Sargasso Sea
atgtttaaaggatcaaatgttgctttaattacaccatttaaaaataatggtctagatgaggaagcatatataaaattaatccatttccacattgataatggcaccaatggtcttgttccagctggtacaacaggtgaatctcctactttaagtcatgatgagcatcaaagagtaatagatttatgtataaaagaaagtaatggaaaaattccagttattgctggtacaggttccaactcaacagaggaggcgatttctttaacaacacatgcagaaaaagcaggagctaacggtgctttgatagttacaccttattacaataaaccaacccaagaag

SEQ ID NO: 285060 - DNA, 824 bp, Unknown
  Bacterial polypeptide expressing nucleotide sequence isolated from the Sargasso Sea
ttatataaaacttattaattttcatttagaaaatggcactaatggacttgttcccgcaggaactacaggagaatcgccaactttatcccatgtcgagcataataaggtgatcgaattatgtgtgaatgaggctaaaggaaaaataccagtcatcgctggtacaggttctaattcaactgaagaggcagttgcattaacaaaacacgccgaaaccgctggagctgatggtgcacttgttgtaacaccttattataacaagcctactcaagaaggtttgtttcatcattacaaaactataaatgacaatactagccttccaataataatttataatattccaggcagatgtgtaatcgacatgacagtcgacactatggctagattatttgaacttaaaaatattgcaggagttaaagatgcaactggtgatttgaatagactcgatcaaacaataaaaaaattaggaaatgaatttatccaacttaccggagaggatggtcttgcgtttgaatttaataaaagaggtggtgcaggaataatttcagtaactgcaaatattgcacctaaactatgctcagacatgcaaaaattctctaagtccgacagtgacaatgaaaaaaaggaagctgaaagaattgactctttacttcaacctgtccataaagctttatttattgaaagcaatccagcgccagttaagtacgcagcaaaattaatgggtttatgtgatgatgctgtgaggcttccattagttaaaataatggatgagacaaaattgaaagttaaaaactctcttgtttctgcaaaattattaaatgattaaa

SEQ ID NO: 285061 - DNA, 763 bp, Unknown
  Bacterial polypeptide expressing nucleotide sequence isolated from the Sargasso Sea
gttttaatgtttaaaggtagtataccagcacttataaccccttttaagaatgaaaaagtcgattattcatcatttgataagattattgaatggtctttgggtgaaggttcgcatggatttgttccttgtggaacaactggtgaatcacctactcttagccaccaagaacataaacaagtcattgaagaatgtattagaattgtagatagaagggccccagttattgctggtacaggatctaataatactgttgaagcaatagaatttactaaacatgctgaaaatgcaggtgctgatggagctttagtagttacgccatattataataaaccaacacaagacgggttgttccaacattttaaaaaaattgctgagtctacttctttgccaattataatttataatatacccggccgctcaatagtagatatgacaattgatactatgatcaaattatcaaatattaaaaatattgtaggagtaaaggatgcaactaacgacttattccgccctcttttgacacaagttaatatgaaaaaaaatttttgctatttatcgggagaagatggtactgctttagcatttttggctcaaggaggtaatggatgtatatctgtaactgccaacgtagttcctaaattatgttctgaacttcataatagttggatgaataaagatattgataaagctacttcaataaatttaaaattggctaaattacataatgctctatttattgaatcaagtccaggaccagttaaat

SEQ ID NO: 285062 - DNA, 730 bp, Unknown
  Bacterial polypeptide expressing nucleotide sequence isolated from the Sargasso Sea
catgatgaacaccaaaagttaattgaactttgtattaaagagtcaaatggtaaaattcctgtaattgctggaactggatcaaattctactgaagaagctatttcacttacaaggcatgcagagaatgctggagctaatggtgcattagtagtaaccccatattataacaaaccaactcaagaaggattataccaacattacaaagcaatcaatgataactgcgggattccgattataatttataatattccatcaagatcagtaatagacatgtctgttgatacaatgtctaaattatttgaattaaaaaatatagttggtgtaaaagatgcaacaggtgaccttgatagagttgaacaacaaaaatcaaaaatgggtacagaatttattcaattaaccggaaatgacgacaatgcatttgaatttaacaaaagaggaggtgttggaactataagtgttactgcaaatatagcaccaaagatgtgttcagatttccaaaaattttctaaatcaaagaatcctaacgaatacaaagaggcagaaagattagactcaatacttcaacctttacataaaaatttatttattgaaagcaacccatcacctgtaaaatatgttgcaaaattaataggtctttgtgatgatgctgttaggttaccactagttaaatgtactgataaaacaaaaaaaatcttagaggaaacttccaaaaaagcaaaaattatttaat

SEQ ID NO: 285063 - DNA, 751 bp, Unknown
  Bacterial polypeptide expressing nucleotide sequence isolated from the Sargasso Sea
gatctccaccttatcgcatagtgaacatgaaaaagtaattgagctttgcataaaagaagcaaaaggaaaaatacctgtaatagccggcacaggatcaaattcaaccgctgaagcaatttcattaacaaaacatgccgaaaaagctggagccaatggtgcattgatagttacaccatattacaataaacctactcaggagggcttatatgcccattataaggctattaatgacaactgtggtatacctatcattatttacaatattcctggaagatctgttatcgatatgacggtcgacacaatggctagattatttgaactaaaaaatattgttggagttaaggatgcaactggagatctcaatagagtagatgagacttttaaaaagattgggaacgaatttattcaactaactggggaggatggactcgcttttgaatataacaaaagaggaggtgtaggatgtatttcagtaactgctaatattgccccaaaaatgtgttcagacatgcaaaaattttctaaatcaagcgatgagaatgaattaaaaaaagcagaagaaattgacaaaaaactgcaacctgttcataaatcattatttattgaaagcaatccgtctcctgtaaaatatgctgcaaaactcattggactctgcgaagataaagttaggttacctttagtaacagttttagataaaactaaaaatgaagttaaaaaagctcttttatcggccgaattaattaatgaataa

SEQ ID NO: 285064 - DNA, 499 bp, Unknown
  Bacterial polypeptide expressing nucleotide sequence isolated from the Sargasso Sea
atgtttaaaggaagtatacctgctgttattacaccattcattggtgatgaagttgattataactctctagctaaagtcttaaactttttaattgataacggatctcatggacttgttccttgtggtacaactggcgagtccccaaccttatctcatgaagaacataaaaaaataattgaagaaacaattagaattgctgacaaaagagttcctgttatagctggtaccggttcaaataataccttagaggctgttgaatatacagagcatgctgaaaagtctggagctgatgcagcactaattgttacaccttattataataaaccaactcagtcagggttatatgaacactttaaaacaattgcagatagaactaatattccaataattatttacaatatacctggtagatcaattgttgatatgacaattgaaactatgattgaattatcaaaaataaaaaaaattattggtgttaaagatgctactaacgatttat

SEQ ID NO: 285065 - DNA, 871 bp, Unknown
  Bacterial polypeptide expressing nucleotide sequence isolated from the Sargasso Sea
tatgttttttggaagtatacctgcagtattaacaccttttaataatcaaaaagttgattatgaatctttgtcaaaaattctaaatcatctcattgaaaatggatcaaatggattagttccatgtggaacaacaggtgagtcaccaaccttgtcacatgatgagcataaaaaaattattgaagagacaataaaaataaatgataaaagagtacctattattgctggaactggatcaaataatacagctgaggcaatagattatacaaaacatgccgaaagtagtggagcagatgctgctttagtagttactccttattacaataagcctactcaaaaaggtttatacgctcatttttattcaatagctaaatcggtaaaaataccaattataatttataatattcctggtagatcagttgtagacatgtctatagatacaatgattgagttatctaaaattgaaaatattattggtgttaaagatgcaactaatgatttatttagacctcttcttactgctgcaaatatgtccaatgatttctgtttcttatctggtgaggatggtactgcaatggcatttcttgcacagggaggacatgggtgtatatctgttacagcaaatgttgcacctaaattatgcgcagaaatgcatcatgcatggagaagcaataatataaataaagctctagaaataaatttaaaacttgcaaaactccataattctcttttccttgaatctagtccaggtccagtaaaatatgccgcatctcttattggtttatgttcaagtgaaacaagattaccattagtagatattaatgataataccaaaaaaattgtaactgattgcttaaaagaactttctttaatt

SEQ ID NO: 285066 - DNA, 785 bp, Unknown
  Bacterial polypeptide expressing nucleotide sequence isolated from the Sargasso Sea
cggcacgaatggtttggtgcccgctggaacaactggtgaatctccaactttaagtcacaaagagcatgaaagagttattgaattatgcgtgaaggaaagtgctggtaaattaccagtatttgcaggaaccggttcgaactctacagaggaagctatttcattaacttcacatgctgaaaaaattggagcagatggagcactgatagtaacaccgtactataacaaaccaactcaagaaggattatatcagcattacaaagcaataaatgacaaatgtggtatcccaataataatttataatataccaggtagatcagtaatagatatgtccgttgacactatggcaaaactgtatgagttaaaaaatatagttggagttaaagacgctactggagatttaaatagagtaaatcaaactttaaataagatgggtaaagattttatacagctaacaggaaatgatgataatgcatttgagtttaatcaaagaggtggagtaggagcaataagtgttacagctaatatagcgccaaagatttgttcagattttcaaaaattatcaatgtctaacgacaaaggtcaaattaaagaggctgaaaaattagataaaatcttgcaaccattacatcattcaatgtttgttgaaagtaatccaagtccagttaaatatgctgcaaaattactaaacttatgtgaagatgatgtaagattacctttggtaaaggtaactgaaactactaaagaaattgtaaaaaaagcattagtttcagctcaacttatttaat

SEQ ID NO: 285067 - DNA, 401 bp, Unknown
  Bacterial polypeptide expressing nucleotide sequence isolated from the Sargasso Sea
tatgttcaaaggatcaaatgttgcgttaataaccccatttatggataataagctagatgttgacgcttatataaaaataatacattttcatttaaaaagtggaacaaatggcttagtccctgcgggcaccacaggagaatcgccgacattaaatcacgaagagcatcaacaagttattgaaatatgcattaaagaaagcaatggcacgataccagttattgctggaaccggatccaactcaacaagtgaagcagtttctctcaccaaacatgctgagaaggtaggtgcaaatgcagcattagtagtaacaccttattataataagccaacacaagaaggtctttatcaacattacaaagcaattaatgactcgtgtggaataccaataatttatttacaac

SEQ ID NO: 285068 - DNA, 544 bp, Unknown
  Bacterial polypeptide expressing nucleotide sequence isolated from the Sargasso Sea
atgcttaaaggatctataccagcaataatcactcctttttcaaatggagaagttgactatgattgtttcgaaaagcttttaaattggcaaattaaaagtggaatttctggagttacagtttgcggaactactggtgagtctccaacactctctcacgatgaacatatgcaattggttgaatttgcaattaaagtagcttcaaaaaaaatacctgtaattgctgggacaggatctaactccactaaagaggcaattgaatttactaaacacgcatataaggctggggcaaactacggattagtagttacaccatattacaataagccaaatcagacaggcctcataaatcattttaaaaaaatagcaaaagtatctcctttaaaacaacttatttacaatatccctggaagatcaatagtagatctgtcttttgatagtttcaaacaacttaataaaatatcaaacatcgttggtataaaggatgcttctaatgacatgtccagacctttgataatgagaacttttatgaaaaaaagattttaat

SEQ ID NO: 285069 - DNA, 336 bp, Unknown
  Bacterial polypeptide expressing nucleotide sequence isolated from the Sargasso Sea
catgtttaaagggtctaatgtagcacttataacaccattcaaagataataatctagatgaagaaaattatattaaactaatcaattttcatctagaaaatggtacaaatggtcttgttccggctggaactactggtgagtcaccgactttaagtcataaggagcatgaaaaagttattgaactttgtgtcaaagaagcaaatggaaaaataccagttatagcaggcacaggttctaattcaacagtcgaggcagttgctctaacaaagcatgcagaaaaagctggagcaaatggtgtattagtagttaccccatattataacaaacctactcaaga

SEQ ID NO: 285070 - DNA, 716 bp, Unknown
  Bacterial polypeptide expressing nucleotide sequence isolated from the Sargasso Sea
agtaattgaaatagctataaaagagtctaaaggaaaaatcccagtcattgctggaacaggatctaactccaccgaggaagctgtagaattatcaaaacatgcagaaaaatcaggagcaaatggattattaatagttactccatattataacaaaccaactcaagaaggactttatcaacattataaactaattaatgataaagttggtattccgataataatatataatattccaccaagatctgtcgtcgatatgtctgttgatactatggctagactttttgaattaaaaaatattgttggagtcaaagacgctacagctgatttaaaccgagtagatgaacaactaaaaaaaatgggacctgaatttatacaattatctggtgaagatggaacagcattagagtttaatattagaggtgggacaggatgtatttcggtctcagcaaatgttgctgctaaattgtgtgcagagtttcaagaagcatcgttagcgaaaaataatagcaatcttttatcaaaagcaaaagagattaataataaacttatgccattacacaaagcattatttattgaaagcaatccaagtcctgttaagtacgccgcaagtttattaaacctatcatctgaggaagtacggttaccacttgtaaaaattacagaaaaaacaaagcaagaagttaggaaagcattaaaatttgctgatttgatttaat

SEQ ID NO: 285071 - DNA, 768 bp, Unknown
  Bacterial polypeptide expressing nucleotide sequence isolated from the Sargasso Sea
tatgtttaaaggaagtataccagcattaatcactccatttaaaaatgaaaaagttgatttttcatcctatgaaaaaataatagagtggtcaatatctgaaggttcacatggatttgttccttgtgggactactggagagtcacccacccttagtcatgaagaacataaaaaaatagttgaagaatgcattaatactgtaaataagagagtacctgtgatagctggaacgggttcaaataatactatcgaggcaattgagtatactcaacacgcagaaaagatgggagctgatggagcactaattgttactccttattacaacaaacctactcaaaaaggtttatatcagcattttaaaaaaattgcagagtcaacctctttaccaattattatttataatattcctggaagatctattgtagatatgagcatagacactatgagtgaattatctgagattgataatattgctggagtaaaagatgctactaatgatttgtttagacctttattgacacaaactaaaataaaaaaagatttttgttatttatcaggagaagatggtacagctttagcctatctttctcaaggaggagtaggatgtatttcagttacagctaacgttgcacctcgtttttgttcagatcttcacaatgcttggatggatcacgatataataaaatctcaagaaataaacttaaaactagcaaaattacataatgctctttttattgaatcaagtcctggacctgttaaatatgcagcaga

SEQ ID NO: 285072 - DNA, 829 bp, Unknown
  Bacterial polypeptide expressing nucleotide sequence isolated from the Sargasso Sea
atagaaggttcagttgattattcttcatataataaaattattgaatggtcattagaacaagggtcacacggatttgtaccttgtggcactactggagaatcaccgacacttactcataatgagcataaggcagtaattgaagaatgtataaggatagttgataaaagagtgccggtaatagctggaaccggttcaaataatacaattgaagcagttgaatttaccaaacatgcagaaaaagcaggggctgatggcgcccttgtagtgacaccttactacaataaaccaactcaagaagggttatacatgcattttaaaaaaattgctgaatcttcttcattgcctattattatttacaatatacctggcaggtctgttgttgatatgagtatagaaactatggtaaaattgtctgaaatcaaaaatatagttggcgttaaagatgcaaccaatgatttatttagacctttgttaactcaaactaaaataaaaaaagaattttgttatttatcaggtgaagatggcactgcttttgcttatttagctcagggaggaaatggttgtatttcagtgactgcaaatgtagttcctaaattatgttctgaccttcataataattggaataataaagatatagttaaagctatggaaattaatcttaaattagcaaaattacatcatgcactatttatagagtctagccctggaccagtaaagtatgcagcagaattactaaacttatgtagttctgaaacaagaatgcctttaattaaaattaaagaaagtacaaaaaaaatagtaaaagagtgtcttatagaattaaattagt

SEQ ID NO: 285073 - DNA, 328 bp, Unknown
  Bacterial polypeptide expressing nucleotide sequence isolated from the Sargasso Sea
tatgtttaaaggatcaaatgtagcattaattacaccgtttaaagacaacaagcttgacgaagaaagttacataaaaattataaatcatcatctggaaaatggaacaaatgggttagtcccagttggaacaactggagagtcaccaactttatcacataatgaacatgagagaactattgaattatgcataaaagaagctactggcaaacttcctattatagccggcacaggatctaattctacagaagaagcggtatcattaactaaacatgctgaaaaagctggtgcagatggtgccttggttgttacaccatattataataaacct

SEQ ID NO: 285074 - DNA, 499 bp, Unknown
  Bacterial polypeptide expressing nucleotide sequence isolated from the Sargasso Sea
atgtttaaaggttcaaatgtagctttagtcaccccatttaaagacaataaactagatgaagaaaactatatcaaattaattaattttcatcttgaaaatgggactaatggacttgttccagctggaaccaccggagagtcacctaccttgagtcacggagaacatgaaaaggttattgaactttgtataaatgaagcgaaaggaaagattcctgttatagctggaactggatctaattctaccgaagaagctatatcgttaacaaaacatgcagagaaggctggagctgatggtgttttagtagtaacaccttactataataaacctactcaagaaggactttatcagcactacaaagctataaatgataattgcggagtaccgatcataatatacaacattcctggaagatcagttgtagatatgtccgttgaaacaatggcaagactttttgagttgaaaaacattacaggtgttaaagatgccacaggagattgaa

SEQ ID NO: 285075 - DNA, 433 bp, Unknown
  Bacterial polypeptide expressing nucleotide sequence isolated from the Sargasso Sea
tatgcttaaaggatcaattgttgcattaataaccccgttcaaagatgacaatcttgacgaaagtacttacagggctttaataaattatcacttaaaaaatgggactaatggggttgttcctggaggaacaactggagagtctccaactttgtctcatagtgaacataaaaaaattatcgaaattgcagtaaaagaatgtaaagggaaaattccagtcattgcggggactggctcgaattctacagatgaagcagttgacttgtcaaaatttgctgagaaagctggttctgatgcattactagtagttactccatattacaacaagcccacacaggaaggtttatatcagcattataaaaaaattaatgacaacgttggaatacctattgttatttataatataccatcaagatcagttattgatatgtcagtc

SEQ ID NO: 285076 - DNA, 820 bp, Unknown
  Bacterial polypeptide expressing nucleotide sequence isolated from the Sargasso Sea
tatgtttaaaggttcaaatgttgcgttagttactccatttaaaaataatgagctagatgttgaaacttacattaagctaatacattttcatatagaaaatggaactcacgggcttgtccctgccggtactacaggagaatcgccgactttaagtcatgaagaacatcaaaaagttattgaattatgcattaaagaaagtaacggaaaattacctgttatagctggcacaggatctaattcaacaaaggaagctatatcattaactaaacatgctgaaaaagtaggcgctgatggagcgctaattgttactccatattataataaacctacccaggaaggtttgtaccatcattataagtcaataaatgataactgcgaaattccaataattatatacaatattccatcaagatctgtaattgatatgacagttgatacaatggcaagactttttgaattaaaaaatattgtaggagttaaagatgcaactggggatttagcaagagccaaactacaaaaagaaaaaatgggtaatgattttattatgttaactggcgaagatggaaatgttttagagtttaataaaagaggaggcgttggttgtataagtgttacagctaatatagctccaaaactttgctctgattttcaaaatttttctcaatctacaaataataaggaattagaagaagccgaacgtataaatgatttattgcaacctgtacataaagcattatttatagaaagcaatccaagcccgggtaaatatgctgcaaaactattaaatttatgtagtgatgatgttagattaccattttag

SEQ ID NO: 285077 - DNA, 781 bp, Unknown
  Bacterial polypeptide expressing nucleotide sequence isolated from the Sargasso Sea
gatgaagggattcatgggggtagttccagttggaacaacaggcgagtctccaactttatcccatgaagagcataagcaagctgtagaaatttgcataaatcagactaataagagagttccagttattgcaggcacaggatcaaataatactgaggaagcaatcgatcttactcgccatgctgagaaatctggtgctgatgcagcattaatagtgactccatattacaataagccgactcaaagagggatgtacgaacattataagtcaatttctactaactccaatataccaataattatttacaatatacctggcaggtctgtagtaaatatgactaatgatacaatgaaagaattatttaaactgaaaaatattgtaggtgttaaggatgcaactgcagatattccaagagtttacaattcaaaaatagatataggtgaagattttaatttattaactggtgatgatgctacatgtttagcatttatgctatatggcggtcatggagcaatttctgtaactgcaaacatcgctccaaaactatgctctgattttatgaacttatgtttggagggtaaatttcaagaagcagctaaaatcaatgccttgctcatgcctttgcatacagctttatttattgaatccagtcctggcccagtaaaatatgcagccaataagttgggtctatgttctagtgaagtaaggcttccgcttacagaaacttccaatgagtcaaaaaaaacagtagaacaagcattaaaacatgcttcacttatttaa

SEQ ID NO: 285078 - DNA, 856 bp, Unknown
  Bacterial polypeptide expressing nucleotide sequence isolated from the Sargasso Sea
tatgtttaaaggatcaaatgtagcattaataactccattcacgaacaataaagtggatgaggaaaaatacattaaaattatcaattttcatctcgaaaatggcacaaatggacttgtgcctgttggtactactggtgagtccccgacattatcccatgatgaacaccaaaaattaattgaattatgcataaaagaatcaaatggaaaaattccagtaattgctggtacaggatctaattctacagaagaagcaatttcgcttacaaagcatgcagagaaagctggcgcagatggcgcattagttgttacgccctattataacaagcctactcaagaaggattgtatcaacattataaagcaattaacgataattgcagtttgcctattataatttataatattccatcaagatcagtaatcgatatgtctgtagaaaccatggctagactttatgaattaaaaaatattgttggtgtaaaagatgccacaggtgatttagacagagtagaccagcaaaaaaataaaatgggaagtgattttattcagttaaccggcaatgacgataatgctcttgaatttaataaaagaggtggagttggcacgattagtgttactgcaaatatagctcctaaattttgttcagattttcaaaaattttcaaaatcaaaaaatcctgatgaatttaaagaagccgaaagattagataagatattacaaccattgcataaaaatttgttcattgaaagtaatccatcgccggttaaatatgttgcaaaattaatgggtctttgtgatgatgcagttagattgcctttagtatcttgcacaagtaaaacaaaaaaaatcctagaaaga

SEQ ID NO: 285079 - DNA, 400 bp, Unknown
  Bacterial polypeptide expressing nucleotide sequence isolated from the Sargasso Sea
atgttcaaaggatcaaatgttgctttaattaccccatttaaagataatgaacttgataaagatgcatatattaagctaattcactatcatttaaacaatggaacaaatggacttgtaccagcaggcactaccggggagtcgccaacgcttaatcataaagaacatcaagaaattattgaaatttgcataaaagaagcaaaaaataaaataccagtgatagcaggaactggttcgaattctaccgaagaagctgtatctctcactaagcatgctgaaaaggctggcgctgatggtgtattggttgttacaccatactacaataaaccaactcaagaaggtttatatcaacattacaaaaaaattaatgataatactagtcttcccaataataatttataat

SEQ ID NO: 285080 - DNA, 448 bp, Unknown
  Bacterial polypeptide expressing nucleotide sequence isolated from the Sargasso Sea
tatgtttaaaggatcaaatgttgctttaataactcccttcaaggataatatattagatgaagaaaactatataaaactaattaattttcatattgaaaatggtaccaatgggttagttcctgcaggaactacaggtgaatctcctacgttaaatcatagtgaacacgaaaaagtaattgaaatctgcataaaggaatccagaggcaaggttccagtaattgctggaacaggatcaaattcaactgaagaagctgtgtcattaacgaagcatgctgaaagggctggagctgacggagtgctggtagtaacaccttattataacaaacccactcaagaaggtttatatcgtcattataaagctattaatgataacactagcttgccgataataatttataatataccaagcagatgtgtaattgatatgtcagtagatacaatggataaa

SEQ ID NO: 285081 - DNA, 748 bp, Unknown
  Bacterial polypeptide expressing nucleotide sequence isolated from the Sargasso Sea
gagtcaccaacattgtctcacgatgaacaccaaaagctaatagaattatgcattaaagagtctaatgggaaaattcctgtgattgcagggaccggatctaattctacagaggaggcaatttcattaactaagcatgcagaaaaggctggtgcagatggtgcacttgttgttactccgtattacaacaaaccaacgcaagaaggtctatatcaacattacaaagcgataaacgacagcagtggaattcctataattatttacaatatcccttcaagatcagtaattgatatgtcggttgatactatggcaagactctttgaattgaaaaatataattggagttaaagatgcaacaggagatctaaatagagtggatcaacaaaaatcaaaaatgggagaggagtttattcaattaactggtaacgatgataacgcatttgaatttaataaaagaggtggagttggaactataagcgttacagctaatatagcgcccaaaatgtgttctgattttcaaaaattctctaaatcaaaaaatccaaacgagtttaaagaggcagaaagattagatagtgtgcttcaaccacttcataaaaatttatttatcgaaagcaacccttcacctgttaagtatgttgctaaattaatgggcttatgtgatgatgctgttcgattacctttggtaaaatgtacagagaatacaaaaaaaattttagaggaaatttcaaaaactgctaaattaatttaat

SEQ ID NO: 285082 - DNA, 730 bp, Unknown
  Bacterial polypeptide expressing nucleotide sequence isolated from the Sargasso Sea
atgtttaaaggttcaaatgttgctttagttactccatttaaaaataataaacttgatgaggaaacttatgtcaagttaatccattttcatataaaaaatggtacaaatggtttagtaccagctggaacaacaggtgaatctccaactttaagccattatgaacatgaaagagttatagaactatgtgttaaagaaagtgctggaaaattacctgtttttgcaggcacaggttcaaattcaacagaagaagctatttcattaacaacccatgcagaaaaaatgggagctaatggcgccctcatagttacaccttattataataagccaacacaagaaggtttatatcaacattataaatctattaatgataaatgtggtatccctattatcatatataatataccaggaagatcagtaattgatatgtcagtcgacactatggctagattatttgaattaaaaaatattattggtgttaaggatgcaacaggagatttaacaagagtagataaaacattaaaaaaattaggcaaagattttatacagttaacaggaaacgatgataacgctttagagtttaatagaaaaggtggagtaggtgctataagtgtaacagccaacattgctccaaaactttgttctgattttcaaagattttcaaaggctaataatgataatgaaattaaagaggctgagagactaaatgaaatattacagcctgtccatcacg

SEQ ID NO: 285083 - DNA, 802 bp, Unknown
  Bacterial polypeptide expressing nucleotide sequence isolated from the Sargasso Sea
gaaaaagtagatttttcatcatatgaaaagattattgaatggtcaatatctgaaggttcacatggatttgttccttgtggtactacaggagagtcgcctactctcagtcatgaagagcataaaaaaatagttgaggaatgtattaatactgtaaataaaagagtgccagtgatcgctggaacaggatctaataatactactgaagcaatagaatatactcaacatgctgaaaagatgggagctgatggtgctctagtagtgactccttactataataaacctactcaaaaaggtttgtatcaacattttaaaaaaatagcagagtcaacttcattacctattataatttataatatacctggaagatctattgtggatatgaatatagatacaatgaatgaattatctgaaattaaaaatattgctggagtaaaagatgctacaaatgatttgtttagacctttattgactcaaactaaaataaagaaagatttttgttatttatctggagaagatggtacagctttagcttatctttctcaaggaggagttggatgcatttctgttacagctaatgttgtacctcgtttttgtgcagatctccacaacgcttggattgatcatgatataaaaaaatctcaagaaataaatttaaaactagcaaagttacatgatgctctttttattgaatcaagcccaggtcctgtaaaatatgcagcagaattattaaatttatgtagctcagagacaagaatgccactagtggaaattcaagactcaactaaaaaaattgtaaaagatt

SEQ ID NO: 285084 - DNA, 521 bp, Unknown
  Bacterial polypeptide expressing nucleotide sequence isolated from the Sargasso Sea
tatgcttaaaggatcaattgtagctttaattaccccatttgataacaataacctgagtgaggaaggttacataaaattaatcaattatcatttagataatggtacaaatggacttgtaccaggggggactacaggtgagtccccaacattatctcataaggaacatagaaggataattgaaatagctgtaaaggagtgtaaaggaaaaattcctgtaatagctggcactggctcaaattcaactgaagaagcggtagaattatctaaatttgcagaaaatgcaggatcagatgctttgctagttgtaacaccttactataataagccaacccaagaaggcttgtatcaacattataaaaaaattaatgataatgttggtattcctattattatttataatattccatcaaggtcagttattgatatgagtgtagacaccatggctaaattatacgagcttaaaaatattaaaggtgtaaaagatgcaactggagatctcaatagagttaatcttcaattaa

SEQ ID NO: 285085 - DNA, 628 bp, Unknown
  Bacterial polypeptide expressing nucleotide sequence isolated from the Sargasso Sea
gatgcaagctttaaaaggaagtctagtggcgttagtcacaccaatgatggaaaatgatgacattgactataaatcgttagaaagtctaatagactggcatattgaacagggaactaacggaatagtatctgtaggcacgactggagagtctgcaacacttgatgtaaaagatcatctagatgtaattaaacatactgttgattatgcaaattcaagaatccccattattgctggcacaggtgctaactccacaactgaagctattgaattgactgaagaatcaaagaagcatggggcagattatgctttaatagttaccccttattataataaacctaatcaaaatggcttaataaaacattatttaaaacttgctgatagtgttgatatccctcaaattttatacaatgttccctcacgaactgcatgtgatttattaccatcgtcagtaaaagtactttcggagcataaaaatattattggcattaaagaggcagtaaacactgataaaagagtaaatgatttgttagatatttctaaagataattatgactttatgttgttttcaggagatgacccaacatttctttcaatgatgcaaaaaggcggaaatggtgttatttctgtt

SEQ ID NO: 285086 - DNA, 706 bp, Unknown
  Bacterial polypeptide expressing nucleotide sequence isolated from the Sargasso Sea
atgtttaaaggttcaaatgttgctttagtcaccccatttaaaaacaataaacttgatgaggaaacttatatcaagttaattcattttcatatcgaaaatggtacaaatggtctagtaccagctggtacgacaggtgaatcaccaactttaagtcacgatgagcatgaaaaagtaattgaattatgcgttaaagagagtaatggcaaactgccagtttttgctggcacagggtcaaattcaacagaagaagctatatctttaactaagcatgctgaaaaaataggagctgacggtgcattaattgtaacaccatattacaacaagccaacacaagagggcttgtaccaacactataaagctataaatgataaatgtggaattccaattataatttataacattccaggaagatcggttatagacatgagtgtagagactatggctagattatatgaattaaaaaatattattggagtaaaagatgcaactggagatttaagcagagtcaataaaactttagaaaaattaggtaaagaattcattcaattaactggtaatgatgataatgctcttgaatttaataaaagaggaggaacaggggcaataagtgttacagcaaacattgcaccaaaattatgctcaaattttcaaaaattttccattattaatgatgataaatcaaaaagtgaaacggaaatattggata

SEQ ID NO: 285087 - DNA, 505 bp, Unknown
  Bacterial polypeptide expressing nucleotide sequence isolated from the Sargasso Sea
atgtttagaggaagtataccagctttaataacaccttttaaaaatggtgaagtagactacttatctttttgtaaaattgttgaatggtctattaataatggatctcatggatttgtaccttgtggcacaactggagaatcgccaactctatctcatgatgaacataaaaaagttattgaagagtgtgtaagggttgtagataagcgtgtaccagttattgctggaacagggtctaacaatacatctgaagcaatagattttacaaatcacgcagaaaaaattggcgctgatgcagctttagttgttaccccttactataataaaccaactcaagatggtctctatagtcattataaaaaaatatctgagtcaactaaacttccaataataatttataacattcctggacgatcaatagttgatatgtctatagaaacaatgcaacaattatctaaattagataatatagttggagttaaagatgcaactaatgatttatttagac

SEQ ID NO: 285088 - DNA, 604 bp, Unknown
  Bacterial polypeptide expressing nucleotide sequence isolated from the Sargasso Sea
atgtttaaaggttcaaatgttgcattagttacaccttttaaggataataagcttgatgaagaagcttatataaaacttataaattttcatctagaaaatggtactaatggtcttgttccagcaggaacgactggtgaatcaccaacattaactcatacagagcacaataaggtaattgagctgtgtattaatgaatcaaaaggtaaaatacctgttatagccggaacaggttcgaactcaacagaagaagccgtagctttaaccaagcatgctgaaaaagctggtgctgatggagctctagtagtaacaccttactataataaaccaactcaagaaggtttgtatcaacattataaaacaataaatgacaacacgagtcttcctataataatttataatattccaggaaggtgtgtgatagatatgtcagtcgacacaatggcaagactatttgaacttaaaaatatagtaggtgttaaagatgctacaggcgatttaaatagactagataatactataaaaaaattaggttcagaatttatacagctcaccggtgaggatggattagcatttgaatttaataagaggggtggggtaggaatta

SEQ ID NO: 285089 - DNA, 859 bp, Unknown
  Bacterial polypeptide expressing nucleotide sequence isolated from the Sargasso Sea
tatgcttaaaggatcaattgtagctttaattacaccttttgatggtgaaaacctaagtgaggataattatataaaactgattaattaccatttagaaaatggcacaaatggtgttgtgccaggaggcacgactggtgagtctcctactttatctcataatgagcacaaaaaaataattgaaatagcagtaaaggaatgtaaaggtaagatcccggtcgttgcaggcaccggttctaactctacagatgaagccatagagttatctaaatttgctgaaaaggttggatctgatgcattgttagtagtgaccccatattataataaaccaacccaagaaggtctttatcaacattataaaatgattaatgacaacgttggtattccaataattatttacaatattccttcgagatctgtcatagacatgaatgtagacacaatggcaaaattatacgaacttaaaaatattaaaggagttaaagatgctacaggcgatttaaaccgagtggatcaacaattaaaagctatgggaaaagagtttatacaattaacgggtaatgatgataatgcttttgaatttaataaacgaggtggggttggagctataggagtaactgctaatgtagcagctaaacttgcatctgattttcaaaaggcttgtgtcaatgatattaagaaagcatcagagttagataaactccttcaacctttgcacacatcattatttatcgagagcaatccttcgcctgttaaatatgcagcttctctcttaggaatgtgtaaaccaactgtaagattgccgttagatgaaataagagaagaaacaaaaaataaagtatcagatgctcttaaagtagct

SEQ ID NO: 285090 - DNA, 364 bp, Unknown
  Bacterial polypeptide expressing nucleotide sequence isolated from the Sargasso Sea
aatgttttttggaagcatccctgcggtaattacaccttttaaaaataataaagttgattataactctcttgataaaattgttaatcatttaattttaaatggatcaaatggattggtaccatgtggaactacaggtgaatctcctactttatctcatgaagaacataaacagataattgaacaaacaataaaaattagcgataaaagagttccagtaattgctgggactggatcgaataatactaaagaggctgtggattatactaaacatgctgagagtgttggagcagatgcagctttagttgtaactccatattacaataaacctacacaaaaaggtttatatgctcactttaaaataatt

SEQ ID NO: 285091 - DNA, 468 bp, Unknown
  Bacterial polypeptide expressing nucleotide sequence isolated from the Sargasso Sea
tatgtttaaaggttcaaatgtagctttagtaacaccatttaaaggcaatagtcttgatgaggaaacgtacataaaaattattaattttcatttagaaaatggaacaaatggacttgtaccagcaggtacaacaggcgagtcaccaactctttcacataaagaacatgaaaaagttatagagttatgcattaaagaagctaatgggaaaattccagtaattgcaggtacagggtcaaactctactacagaggccatatctctcacagagcacgctgaaaaggcaggggcagatggtgctttaatagtaacaccatattacaacaaacccactcaggagggcttatatcagcattacaaggctataaatgacaaatgtggtataccaatcataatttataatattcctggcagatcggttattgatatgacggtagatactatggcaagattatttgagctaaagaacat

SEQ ID NO: 285092 - DNA, 781 bp, Unknown
  Bacterial polypeptide expressing nucleotide sequence isolated from the Sargasso Sea
aatgtttaaaggactcaatacagctctaataaccccgtttcataacaatcaaattgatgaagacgctttaaagaagcttatcgattttcaagttgctggaggggttgactctatagtggtttgcggcaccacaggagaatctcccaccctttctaatgaagagcatagaaagctaataacccttgcagttgaatatgccaataaaagaaccaaggttgttgctggtaccggctcaaactgcaccaaagaggctgtagacatgacacagtttgctcgcgatgccggtgcagatggctgtttaatagtagctccctactataacaagcctactgccaatggcatattaaagcattttcaaaaactaaatgagtgcaaaatacctcttataatttataacattcctggtcgcagcattattgatatcagcgacgatacaattgcgcaattagctctattggataatgttgtagcagtcaaggatgcaactggagacctttccagaatcgcctctttgaaatcaaaaataacaaaagatttctgctacttatcgggcgaagatgagactactgttggctttaacgctatgggtggtgatggcattatctcagttacctctaatattttaccaaaaatgtgtaaagaactgcaaaattattgcgataatgataattatattgaggcaagaaaatgtcaagatcagttacttgaagttaacaaatctatgttttgtgaaaccaatcctattccggttaaatacgcagcttaccttttaggactttgc

SEQ ID NO: 285093 - DNA, 874 bp, Unknown
  Bacterial polypeptide expressing nucleotide sequence isolated from the Sargasso Sea
aatgtttaaaggaagtatacctgcggttataacaccatttcaaggcaataaagttgattatgcttctttagtagatgtattaaattatttaattgataatggatctcacggactcgttccttgcgggacaactggtgagtctccaactttatcacacgatgaacataaaaaaataatcgaagaaaccattagagttgctgacaaaagagttcctgttatcgctggcactggttcaaataacactttagaagctattgaatatacagagcatgcaaaaaaatcgggtgctgatgctgctttagttgttactccatattataacaaaccaactcaatcaggattatatgagcattttaaaacgatcgctgaaaagaccaaaattccaataattatttataatataccaggaagatctattgttgatatgtctattgaaactatgattaagttatcaaacattgaaaatattattggagttaaagatgcaacaaatgatttatttagacctttgttaacaagaaaaaatatgcaaaatgatttttgttatctatctggtgaagatggaactgcattagcatatttagctcaaggcggacatggctgtatatcagttacagctaatgtagcacctaaattatgttcagaaatgcattcgtattggcaagatggcaatattttaaaagctcaagaaattaatttaaaattagcatcattacataacgcgttatttatagagtctagtccaggaccagcaaaatatgctgcctcattgttaggattatgtaaagaaaatacaagactaccattaacttctataaaagatcatactaaagaattagttaaaagctgccttgaagagttgcagcttttataa

SEQ ID NO: 285094 - DNA, 597 bp, Unknown
  Bacterial polypeptide expressing nucleotide sequence isolated from the Sargasso Sea
catgttgcgcggtagtattgttgccctcgttacccccatgctggcttcaggcgaagtcgattgggccagtctggccactctggtcgactatcatgtcagcgccgggaccagcgccatcgtggcggtcgggaccacgggggagtcggtgaccctgagcgagcaggagcacatcgccgtcgtggagaaaaccgtggagctggccgccggacgcattccggtcatcgccggttgcggctccaacaataccgcccatgccatcgacctggccaagcgcttcgccgaaaccggcgtggtggcgggtctctcggtcaccccctattacaacaaacccacccaggaaggcctctatcgtcactattgtgcgatcgccgaggctagtggtctgccccaaattctttataatgtgcccggtcgtaccggttgcgatctcaaaccggagacggtagcccgactggccaaggtgcccggcatcataggcctgaaagaggcgaccggggatctgagccgtacgccgctgctgcgcgagctgtgcggcgcacaattcgcgctttatagtggcgatgatgccagtggatgtgatttcatgctgcaaggcgg

SEQ ID NO: 285095 - DNA, 515 bp, Unknown
  Bacterial polypeptide expressing nucleotide sequence isolated from the Sargasso Sea
tatgttcaaaggatcaaatgttgctttaattacgccatttaaaaataatggtctagatgaggaagcatatataaaattaatccatttccacattgacaatggtaccaatggacttgttccagctggtacaacaggtgaatctcctacactaagccatgatgaacatcaaagagtaatagatttatgcataaaagaaagtagtggaaaaattccagtaattgctggaacaggctccaactcaacagaagaagcgatttctttaaccactcatgcagaaaaagcaggagctaatggagcattgatagttactccctattataataagccaacgcaagagggcttgtatcaacattataaagcaattaatgacaagtgtgggataccaattataatttataatattcctggtagatctgtgattgacatgtcagttgacacaatggctaggctgtatgaattagaaaatatagttggtgttaaagatgcaacaggtgacttagatagagtaaatcaaa

SEQ ID NO: 285096 - DNA, 238 bp, Unknown
  Bacterial polypeptide expressing nucleotide sequence isolated from the Sargasso Sea
atgttcaaaggttcaatcgttgctttaataaccccatttaaaaataacattatggatgaggataagtatataaaacttattcatcaccacataaaaaatggtactaacggtttggtaccagccggtacaactggagagtcacttacgcttaataatgaagagcataaaaaggtaattgaaattgctgttaaggaaagtaatggtaaaattccagttatagctggaaccggatctaatt

SEQ ID NO: 285097 - DNA, 697 bp, Unknown
  Bacterial polypeptide expressing nucleotide sequence isolated from the Sargasso Sea
taatgaagctaaaggcaagataccaattattgctggtacaggatcaaactctactgaagaagcaatatctttatcaaaacatgctgagaatgcaggagctgacggagttttagttgttactccatattataataaaccgacacaagaaggtttatatcagcactataaagctataaatgacaatataggtattccaatcataatttataacatacctagcagatgtgtaatagatatgtctgttgatactatggcaaagttatttgaacttaataatattgcaggtgttaaagatgcgacaggcgatttaaatcggcttgatcaaacgataaaaaaattaggatctgactttattcagttaaccggtgaagatggacttgcatttgaatttaataaaagaggaggggtaggaattatttctgttacagctaatgtagcacccaagctatgctctgacatgcaaaaattttcaaaatcaaaatctgataatgagataaaagaagcagaaaaaattgatttaatgctacagccattacataaatctttgtttattgaaagtaatccagcgccagtaaagtatgcagcaaaacttttaggtctatgtgatgatgaaattagacttccattagttaaaattaaaaaagaaacgcaagaaaaagttaaaaaagccttatcatcagctaacctaattagttaa

SEQ ID NO: 285098 - DNA, 679 bp, Unknown
  Bacterial polypeptide expressing nucleotide sequence isolated from the Sargasso Sea
atgtttaaaggaagtataccagctttaataaccccattcaaaaacaataaagttgattatgactcattgtttaaaatcattaattttttgattgataatggttcagacggaatagttccttgtggaacaactggagagtcacctacactctctcatgatgagcataaaaaaataattgaagaaacaataagaatagcagataaaagagtaccaatcatagcaggtacaggatctaataataccgcagaagctattgaatatacacaacatgcccaaaaatctggtgctaatgcagcattaatagtaacaccatattataataaacctacacaaacgggactttacgaacattataaattaatttctgaagaaacaaatataccaattataatttataatattcctggcagatctgttgtggatatgaatatttctacaatgattgaacttgcaaaattaaataacattattggagtaaaagatgctacgaatgatctatttcgacctcttttaactcagaaacagatgacaaatgatttttgttatttatctggtgaagatggtacggcacttgcatatttggcccaagggggtcatggttgcatttcagtaacagcaaatgttgcaccaaaaatttgttctgaaatgcataaagcttggagagatggaaatatttaaa

SEQ ID NO: 285099 - DNA, 688 bp, Unknown
  Bacterial polypeptide expressing nucleotide sequence isolated from the Sargasso Sea
catgttgagtggtagtattgttgctcttgttaccccgatgacaatagacggtaaggtggattggcgggctatggatgacctgttggaatggcatatcgagatgggaacagcaggtattgttccagtggggacaacaggagaatcggcaacagtctctatggccgaacattgcgagattgtcgagtatgtagtgaatagcgttcgaaaaagggttcccgttatagcagggactggtgcgaatgctacgtgggaggctattgagttaaccaaagcggcgaaggaagtaggtgcggacgcctgcctcttggtaacgccttactacaataagcccactcaggaaggcttatatcagcattataaagcaattgccgatgctgttgacctgcctcaagtgctctataatgtgccatctcgaactgcatgtgacatgctgcctcaaacgatagctcggctatcgaagcttgatagcgtagtcgcggtcaaggaggccaccggcgatatcgatagaacgaagcagattttggatctctgtgacttggttgtatattctggcgatgatctttcagccagggaactcatgcttaatggtgcaaaaggaacgattagcgtaactgcgaatgtagccccagaaaaaatggcggcgatgtgcaatgctgccatagcgggacaagctgaaggatgcggctga

SEQ ID NO: 285100 - DNA, 883 bp, Unknown
  Bacterial polypeptide expressing nucleotide sequence isolated from the Sargasso Sea
atgtttagaggaagcatggttgccatagtgactcctatgaatgaagatggttctattgatttcatttctcttaaaaatttaattgaatttcatatcgaaaatcaaacagatgtaattatatcagtagggactactggagaatctgccacattagattttgatgagcactcacaggtaataaagaaaactattgagtttgtaaatggcagaattcctgtgatagcaggtacaggtgctaactcgacatctgaagctatagagttaacaaaaagtgcaaaaaataatggggccgatggctgcttgcttgtgaccccatattataataaacccacacaagagggactttatcagcattataaaaaaattgctgacctagttgatattccccaaatcttatataatgtgccagggagaacatcggtggatatgcaacctgaaaccgtgttgagactgtcaactcacaaaaatattgtcggtataaaagaagcatcgggtaataaagatagatcattatctcttatgaaattatgctccaaggatattaagattttcactggtgatgataaaacatctatgtccgacatatcagatgggttttcagggaatatatctgtcactgctaatgtggcgcctttagagatgcatcaaatgtgccagagtgcccttgagggtgatattgagaacgcatcaaaattgaattcaaatttagatatcctccatgatttattattctgtgaatctaatcccataccagtgaaatggtgtttacataagatggggcttatcaaaaaaggtattagacttcctttaacatggatggatcaaaaatttgatagaccgttgactgagggcttgataaaatcaggaatcatagatgaataag

SEQ ID NO: 285101 - DNA, 683 bp, Unknown
  Bacterial polypeptide expressing nucleotide sequence isolated from the Sargasso Sea
tatttcaaatggcagaataaaagttatagccggaactggagctaattctacaaaagaagctatatatcttacttcttcagccaaatctgccggtgctgatgctgcacttttagttacaccttattataacaagccgacacaagaaggcttatatttacattatcaattaattgcagatgaagttgacttccctcaaattctttataatgtgccttcaaggacaggatgtgatcttttgaatgacactgttatgaggttagtggatcatcaaaatatcgttggtctgaaggatgctactggcgatcttggtcgcttagaagattttgtgaccaatttagattcagaacaaaaagataattttgctttatattccggagacgatccaactgctactgaatttatgataaatggtggaacgggaacaatttctgtaacttccaacattgttcccaaaataatatctaatatatgtgatcatgctctgagcggagaagccaaggcagctagagacttagatacaacgctggtcaggcttaatcaaattctatttatagaatctaacccaattcccgtaaaatggatgcttaatcgaataggaagaataactgacggcataagattacctttgtctcatttagacgcaaagttccatgataaagccgaggaagttttgtccgaataaa

SEQ ID NO: 285102 - DNA, 673 bp, Unknown
  Bacterial polypeptide expressing nucleotide sequence isolated from the Sargasso Sea
aatgattatagacaaaactaagtttactaatccattatttggaagaatattgactgcaatggttactccatttactgaaaatggaaatgtagattatgaactagctataaaacttgcaaattatctttttgagaacggttctgatggcattgtgctatgtggtactactggagaatctccgactctttcatgggaggaacagcatgatttatttattgcagtaaaaggatctttggattcaaactgtaaagtaatagttggtactggtagtaattgtacgagcgaggctgtagaggctacaaaaaaagcctacgattctggagccgacggtgctttagttgttgttccttattacaataaaccacctcaagaaggtctttataaacatttcagttccattgctaattctgcaaaggatttgcctttaatgctttacaacattcctggaaggactgggtgcaatttattacctgatactgtgaagaaacttatggatttctcaaatattctcagtattaaagctgcaagcggtagaatagaagaagtaacagaactaagagctatttgtggctccaaactctctgtatatagtggcgacgattcattgttgcttccaatgttatctgtgggtgctgtaggagtagtaagtgttgcaagtcatttggttggcttg

SEQ ID NO: 285103 - DNA, 871 bp, Unknown
  Bacterial polypeptide expressing nucleotide sequence isolated from the Sargasso Sea
atgcttaaaggatcaattgttgcattaataaccccatttaaagatgataatcttgatgaaaacacatatagagatttaattgattatcacttaaataacggaactaatggtatagttcccggaggcacaactggtgaatctcccactttatctcatagtgaacacaaaaaaattattgagatagcagttaaagaatgtaatggaaaaatacctgtaatagctggcacaggatcaaattcaacggatgaagctgtcgaactatctcgatacgcagaaaaagctggttcagatgcattattagttgttacaccatattataacaagccaactcaagagggcttataccaacattataaaaaaataaatgatagtgttggaataccaattataatttataacataccgtcaagatcagtaatagatatgtcagttgaaaccatgagtaaactgtatgaactaaaaaatataactggtgtaaaagatgcaactggtgacttgaatagagtagatcagcaattaaaagcaatgggaaaagattttattcagcttactggaaatgacgataatgctcttgagtttaataaaagaggcggagttggagctatcggagttacagcaaatatagctgcaaaaatttcttctgattttcaaaaagcttgtgagcaaaaaaatgaagaagcagcatcgttagataaactcttacagcctttacattcagcgttatttattgaaagcaatccatcaccggtgaaatatgcagcatcattattgggtatgtgcgatccatcagtaagattaccattagtcgaaattagagaagaaacaaaaaagaaagtttcagatgcgcttaaagtagctaaattactttaat

SEQ ID NO: 285104 - DNA, 883 bp, Unknown
  Bacterial polypeptide expressing nucleotide sequence isolated from the Sargasso Sea
atgtttaaaggttcaaatgttgcattaattactccatttaaaaataataagttagatgaagagaattatatcaaattaatagattttcatctaaaaaatggaacaaatggactagtgccagcaggaaccactggtgagtcgccaactttaaatcatagagaacatgaaaaggtaattgaaatttgtataaaagaatccaatggaaaattacctattatcgctggcacaggctctaactcaaccgctgaagcaatatcattaacacaacatgctgaaactgcaggagctgatgccgcgcttgttgtaactccatattataataaaccaactcaggaaggattgtatcaacactataaagctataaatgataatacaattcttccaattataatttacaatataccaggtagatgtgtaattgatatgtctgtagatacaatggcaagattatttgaacttaaaaatatagttggtgtcaaagatgcaacaggagatccaaatagaattgatcaaacaattaaaaaattaggaccagaatttatccaacttactggagaagatggatttgcatttgaatttaataaaagaggaggtgtaggaattatttctgtgaccgccaatgttgcacctaaattatgttctgattttcaaaaatattcaaaatcaaaatctgatagcgaattaaaagaagcagaaaaattaaataatatgctacaacctttgcacaagtcattatttatagagagtaatcccgcaccagttaaatatgctgcaaaacttttaggtttatgtgatgatgaaataagactaccattagttaaaattaaaaaagaaacacaagaagaagttaagaaagctttaagtcacgcaaaattaatttaat

SEQ ID NO: 285105 - DNA, 480 bp, Unknown
  Bacterial polypeptide expressing nucleotide sequence isolated from the Sargasso Sea
tatgtttaaaggatcaaatgttgcattaatcacacctttcaaaaatgataagcttgatgacgaaacatatattaaattaattcattttcacataagcaatggtacaaatggactagtgccagcaggaacaaccggtgaatctcctactttgagccatatagaacatgaaagagtaatagaattatgtgtaaaagaaagtaatggaaagctgcctgtatttgcgggtaccggatctaactcaacagaggaagcaatttcattaactaggcatgctgaaaaaataggagctaacggagctttaattgttactccatattacaataaacctactcaagaaggtttgtaccaacactacaaagcaatcaatgacaaatgtggaatttccattataatttataatattcctgggagatcagttatagatatgtcagttgaaacaatggctagattatatgagttaaaaaatattattggtgtaaa

SEQ ID NO: 285106 - DNA, 886 bp, Unknown
  Bacterial polypeptide expressing nucleotide sequence isolated from the Sargasso Sea
catgtttaaaggttcaaatgtagcacttataacaccattcaaagataataatctagatgaagaaaattatattaaattaataaattttcatcttgaaaataatactaatggtttagttccagcaggaacaacgggcgaatctcccactttaagccacagagagcatgaaaaggtaatagaactttgtataaatgaagtaaaaggaaagattccagtaattgctggtacagggtctaattcaactgaagaagctgttgcactaacaaagcatgcagaaaaagctggagctgatggagcattagttgttacaccttattataacaaaccgacacaagaaggactttatcaacattataaagctataaatgataatacaaatctacctattataatttataatattccaagtagatgtgtaatagatatgtcagttgatacaatggcaagattatttgagcttaaaaatattgccggtgtgaaagatgcgacaggagatttaaatagacttgatcaaacaataaaaaaattgggaccagaatttattcagcttacaggggaagacggtcttgcatttgaatttaacaaaagaggtggagttggcattatctctgttactgccaatattgcaccaaaattatgttctgatatgcaaaaatattctaaatcaaaatctgataatgaacttaaggaagcggagagaatagaccagttgttacaaccattacataaatcattatttattgagagcaaccctgcaccagtaaaatatgctgcaaaacttttaggattatgtgatgatgaaataagactcccgctagtaaaaattaaacaagaaacccaagaagaagttaagaaagcgttatcatcagctaaactaattagttaa

SEQ ID NO: 285107 - DNA, 750 bp, Unknown
  Bacterial polypeptide expressing nucleotide sequence isolated from the Sargasso Sea
agtcgccaactctttctcacaatgaacaccgtaaagttatagaattttctgttaatgagtgtaagggtaaaattcctgttattgctggaactggttcaaattcaacagatgaagcaattgagttgtctaaatatgcagaaaaagttggtgctaatggattgctaattgttactccatattacaacaaaccaactcaagaaggattgtatcagcactataaaaaaattaataacaatgttggaataccaataattatatataacattccatctagatctgtaattgatatgaaagttgaaactatggctcgattatttgaattgaaaaatattttaggcgtcaaagatgctaccggagatttaaatagagttgatcaacaattaaaaactatgggcaatgattttttacagttaaccggcgaagatgataatgcactggaatttaacagaagaggcggcaaaggctgtattagtgtaactgctaatgtagcagcaaaattatgctcagattttcagtctgcctctcttaaaactggagataagaatatgcaaactaaagctgaagaaataaacaatattttaaaacctttgcataaagctttgtttattgaaagcaatccatcaccagttaagtatgccgcttcattattaaaacttgcacctgatgacgtgcgtttacctctagtgaaagtaatggatgaaactaaaacagtggtaaaagatgcacttaaatttgctaagttactttaat

SEQ ID NO: 285108 - DNA, 904 bp, Unknown
  Bacterial polypeptide expressing nucleotide sequence isolated from the Sargasso Sea
aatgattacagacaaaaccaagtgtactaaaccattatttggaagaatattgactgcaatggttactccatttactgaaaatggaaatgtagattatgaactagccataaaactttcaaattatctttgtgagaacggttctgatggcattgttctttgtggtactactggagaatctcccactctttcatgggaggaacaacatgatttatttatagcagtcaaaggatctttggattcaagctgtaaggtaatagtaggtactggtagtaattgtacaagcgaggctgtagaagctacaaaaaaagcctatgactctggggcagacggtgctttggttgttgttccttattacaataaaccacctcaagaaggtctttataaacatttcagttctattgctaatgctgcaaaggatttgcctttaatgctttacaacataccaggaaggacagggtgcaatttattacctgatactgtgaagaaacttatggatttctcaaatattctcagtatcaaagcggcaagcggtagaatagaagaagtaacagaactaagagctatttgtggcgatcaactctctgtatatagtggagacgattcattgttgcttccaatgttatctgtgggtgctgtaggagtagtaagtgttgcaagccatttggttggcttgcaattgaaagagatgattgaatcctttcaaagtggaaaagtttccaatgcgcttgctattcatgaaagacttcagcctcttttcaaggcactttttatgactactaatcccattccaataaaggctgctttagatctttctggatggaatgtaggtaatccaagaagtcctttgtcaccattaaatgggaacatgaaaaagcaattatcttttattctgaaatccttataa

SEQ ID NO: 285109 - DNA, 889 bp, Unknown
  Bacterial polypeptide expressing nucleotide sequence isolated from the Sargasso Sea
atgtttaaaggttcaaatgttgctttagtaacaccatttaagaatgacaaattagatgaggaaacatatataaaactcatcaattttcatttagaaaatggcactaatggattggtcccagccggtacaactggagagtcaccaacattatctcatgctgaacatgaaagagttatagaattatgtataaaagagtccaaaggaaaaatacctgtaatagctggaactggatctaattctactgaagaagcaatatccctaactaagcacgccgaaaaagccggagctgatggagttttgatagtaactccttattacaacaaaccaactcaagaaggtctttatcaacattataaagcaataaatgataatacaaatcttcctattataatttataatatccccggcaggtgtgttattgatatgtcagtcgacactatggctagattgtttgagcttaaaaatattgctggagttaaagatgccactggtgatttaaatagacttgatcaaacaataaaaaaattgggacctgaatttatacagcttaccggagaagacggccttgcttttgaatttaataaaagaggaggtgtgggaattatttcagttacagctaatattgcacctaaattgtgttcagatatgcaaaaattttctaaatcagatagtgacaatgaaatgaaagaagcagaaagaatagatacattgcttcaacctgtccataaagctctctttattgaaagcaacccatccccagtcaagtatgcagcaaaactactgggcctctgcgatgattctgtgaggttgccattggtaaaagtgatggaagaaacaaaaataaatgtaaaaaattctcttatttctgcaaaattattaaatgaataaa

SEQ ID NO: 285110 - DNA, 691 bp, Unknown
  Bacterial polypeptide expressing nucleotide sequence isolated from the Sargasso Sea
tcaaagggaaagatcccagtaattgctggcacaggttccaactctacagaggaagccgttgcattaacaaaacatgctgagaaagcaggcgcggatggcgtattagttgtaacaccttattataataaacctactcaagaaggtttatatcagcactacaaagctattaatgataatacgagtttaccaattataatttataatataccgagcagatgtgtaatcgatatgtcggtagatactatggcaaaattatttgagcttaaaaatatatctggggtaaaagatgccactggagatttaaatagactcgatcaaaccataaaaaaacttggaaatgaatttattcaattaacaggtgaggatggtctagcatttgaatttaataaaagaggtggcgttggaattatttcagttacagcaaatatagctccaaaactttgttctgaaatgcaaatgctctctaaatcaaaaaaagatgaagatttaaaaaaagcagagattatagacaaaaatcttcaaccattacataaagctttgtttatagaaagcaatccagctccagttaaatatgcagctaaagttttaggattatgtacagacgaaataagacttccattagtaaaaattcaaaaaaaaactgaggaacaaattgacaaagcattatctattgcaaaattaataaattgat

SEQ ID NO: 285111 - DNA, 871 bp, Unknown
  Bacterial polypeptide expressing nucleotide sequence isolated from the Sargasso Sea
atgcttaaaggatcaattgttgcattaataaccccatttaaagatgataatcttgatgaaaacacatatagaagtttaattgattatcacttaaataacggcactaatggtatagtccccggaggcaccactggagaatctcccactttatctcatagtgaacacaaaaaaattatagagatagcggttgaagaatgtagaggaaaaatacctgtaatagctggcacaggatctaattcaacggatgaagccgttgaattatctcaatacgcagagaaagcaggttcagatgctttattagttgttacaccatattacaacaaaccaactcaagaaggcttgtaccaacattataaaaagataaacgatagtgttggaataccaattataatttataacattccgtcaagatcagtaatagatatgtcagttgaaaccatgagcaaactatatgagctaaaaaatataaccggtgtaaaagatgcaacaggtgacttaaatagagtagatcagcaattaaaagcaatgggaaaagattttattcagcttactggaaatgacgataatgctcttgagtttaataaaagaggtggagttggagctatcggagtcactgcaaatatagctgcaaaaatttcttctaattttcaaaaagcttgtgaacaaaaaaatgaagaagcagagttgttagataagctcttacagcctttacattcagtgttattcattgaaagcaatccatcgccggtgaaatatgcagcatcattattaggtatgtgcaatccatctgtaagattaccactagttgaaattagagaagaaacaaaaaagaaagttttagaagcacttaaagtagctaaattactttaat

SEQ ID NO: 285112 - DNA, 535 bp, Unknown
  Bacterial polypeptide expressing nucleotide sequence isolated from the Sargasso Sea
tatgtttaaaggatcaaatgttgctttagtcaccccgtttaaaaatgataaacttgatgatgagacatatattaatttaattcattttcatatccaaaatggtacaaatggattagttccagcaggaacaactggtgagtcaccaactttaagccatgatgaacatgaaagagtaattgagttatgtgtaaaagaaagtaatggaaaattaccggtttttgcaggtacaggatcaaactctacagaggaggccatttcacttacaactcatgcagagaaaattggagccacaggtgctcttattgtaacaccttattataacaagccaacacaagaaggcttataccaacattataaagcaataaatgacaaatgtggaatacctataataatttataatattcctggtagatcggttattgatatgtcagttgatactatggctagattatttgaattgaaaaatattattggtgttaaggatgcaactggagacctaaatagagttgaacaaactttaaaaaagatggaaaga

SEQ ID NO: 285113 - DNA, 871 bp, Unknown
  Bacterial polypeptide expressing nucleotide sequence isolated from the Sargasso Sea
tatgcttaaaggatcaattgttgcgttaattaccccatttaaaaatgacagtcttgatgaagacacctatagaagattaattgattatcacttaaaaaacggcactaacggagtagttcctggtggcaccacaggagagtcacccactttatctcatagtgaacataaaaaaattattcaaattgccgttgaagagtgtaaaggtaaaatacccataattgctggaacaggctcaaattcaacagatgaagctattgagttgtctagatatgctgaaaaggctggatctgatgctctattagttgttacgccatattataataaaccaacgcaagaaggattataccaacattacaaaaaaattaatgataatgttgggataccaattataatttataatataccctcaagatcagtaatagacatgtctgttgagacaatgtcaaaattatatgaattaaaaaatatagttggcgttaaagatgcgactggagatttaaaaagggtagactcacaattaaagtcaatggggaaagaatttatacaattaactggtaatgatgataatgcactcgaatttaataaacggggcggggtaggtgcaatcggtgttactgcaaatattgcagccaaactatcttctgattttcaaaaagcgtgtaaaaatgatatggccgaagcagttaaattagataaaattcttcagcctttgcattcgtctctttttattgaaagcaatccttcgcctgttaaatatgcagcatcattactcaaaatgtgcagtccaagtgtgcgattgcccttagtagaaataagagacgaaacaaagaaaaaagtttccgacgctcttaaatcagctaagttattttaa

SEQ ID NO: 285114 - DNA, 722 bp, Unknown
  Bacterial polypeptide expressing nucleotide sequence isolated from the Sargasso Sea
tataaaaattgctattgatgtaactaaaaataaagtccctgttattgccggtacggggtcaaattcaacttatgaagcaataaaaatgactgaaaatgccgaaaaagcgggagctgatgcaactttgcaagtggttccatattacaataaaccaaatcagtctggactatttaatcacttttctgaaattgccgggaatacatctctacctttaattctttacaatattcctgggagatccgttgtaaatttaacagttgaaactatagctaatcttgaaagagaaaataaaaatattattggaattaaagaagcctctggtgatatagaaatggttaaaaaaataaaatcatcatgtagtgataagtttatggtgctttcaggagaagattcattaaatctatctattctagagcttgggggggcgggttatatatctgtcacatcaaacttactgcctaataaatgctcctcaatgttcaatacttatattgatggaaacactaaaaatgcagaaaaaatcaatttagagttgtcagagattaataaacttctttttattgatacaaatcccattccgattaaatatgcaatgagtaagttgggattgtgtcacaactcgctgagactcccactatgttccttggatgaagagaaatccttaattctttccactgagctagagaaacatattctcaaagaaaacaagcttgataaatgag

SEQ ID NO: 285115 - DNA, 874 bp, Unknown
  Bacterial polypeptide expressing nucleotide sequence isolated from the Sargasso Sea
aatgtttaaaggatctcatacagcattaattacgccttttgatggtaaatctattgatgaaaaatcatttaggtctctgatagattttcaaatatcagaaggtatacatggactggttcctgtaggtacaacaggcgagtcaccaactttaagccatgaagaacacaagttagcagttgagatatgtgttgaagaaacagcaaaacgtgtaccagtaatagcaggaacaggatcaaacaataccgatgaagcaatcgatctcacagtgcacgctgaaaaagcaggtgctgacggagctttagtggttacaccatattataataaacctacgcaacatggtttatactcacacttcgaggcaattagtaaggcaactacacttccaattattatttataatattcctggcagatcaattgttgatatgaatacagaaacaatgagggatttgtttaaaattaaaaacattgttggggtaaaggatgctacttcagatataccaagagtttatgaaacgaaaacaacaataggagaagattttaaccaattaacaggagatgatgcaactacgttagcttttatgacttacggtggtcacggatctatctcagtgacgtctaatatcgccccaaaattatgttctgaatttatgaaatattgtttagatcaaaattttgctaaagcttctgagattaatgataaactgatgccgttgcatcatgctttatttgttgagtccagtcctgccccagtaaaatatgcagcttctaagcttggtttatgtaaagatgacataagactgccgctcacaagtatatcagatgaaactaagcaattagttgataaagctatgaagcacgcatcattaatatag

SEQ ID NO: 285116 - DNA, 883 bp, Unknown
  Bacterial polypeptide expressing nucleotide sequence isolated from the Sargasso Sea
atgtttaaaggatcaaatgttgctttagtcaccccgtttaaaaatgataaacttgatgatgagacatatattaatttaattcattttcatatccaaaatgggacaaatggattagtaccagcaggaacaactggtgagtcaccaactttaagtcatgatgaacatgaaagagtgattgagttatgtgtaaaagaaagtaatggaaaattaccagttttcgcgggcacaggatctaactctacagaggaggccatttcacttacaactcatgcagaaaaaattggagccacaggcgcacttattgtaacaccttattataacaagccaacacaagagggcttataccaacattataaagcaataaatgacaaatgtggaatacctataataatttataatattcctggtagatcggttattgatatgtcagttgatactatggctagattatttgaattgaaaaatattattggtgttaaggatgcaactggagacttaaatagggttgaacaaactttaaaaaaaatgggaaatgaattcattcaattaactggtaatgacgataatgctttagaatttaataaaagaggtggagtgggagctataagtgttactgcaaatattgctccaaaactttgttctgattttcaaaaattatcaaaatctgaaaataacgatgaaattaaagaggctgaaaaaattgataaaatattacaacctcttcatcatgcaatgttcgtcgaaagtaatccaagtcccgtaaaatatgcagcaaaattattaaatctttgtgatgataatgtaagactacctcttgtaaaagtaacagctgaaactaaggatatcgttaaaaaagcacttcattctgcaaaactagtttaat

SEQ ID NO: 285117 - DNA, 757 bp, Unknown
  Bacterial polypeptide expressing nucleotide sequence isolated from the Sargasso Sea
tatgtttaaaggatcaaatgttgccttaatcactccattcaaaaataatggtttagatgaagatgcatatataaagctaattcattttcatattgacaatggtacgtctggactagtccctgctggtactacaggagaatctccaaccctcagccacactgaacatgagcgtgtgattgatctatgcattaaagagagtaatggaaaaataccagttatcgctggtacgggctctaactctactgaggaggctatttctctaacttctcatgctgaaaaggcaggtgcaaacggtgcattaattgtaacaccatattacaacaagcccactcaagagggactatatcaacattataaagctattaatgataaatgtggaattcctattataatttataatataccaggtaggtcagtaattgatatgtcagttgatacaatggcaagactatatgaattaaagaatattgttggtgtaaaagatgccactggtgatttagacagagttgatcaacagttaaagaaaatgggtaatgaatttatacaattaacaggaaacgatgataacgcatttgaatttaataaaagaggaggtgttgggactataagtgtaactgcaaatatagcaccaaagctttgctcagaatttcaaaaaaattcaacatctaaaaatgacgaaaatcttgctaaagcaaaagaattagatgacattttgcaacccagtacatactgcaatgtttgtagagagcaaccctag

SEQ ID NO: 285118 - DNA, 757 bp, Unknown
  Bacterial polypeptide expressing nucleotide sequence isolated from the Sargasso Sea
tatgtttaaaggttcaaatgttgctttaattaccccatttaaggataataagttagatatagatgcatatattgagttaatacattttcatataaaaaatgggactaatggattggttcctgcaggaacgacaggcgagtcaccaacattaaaccatgatgaacaccaaaaagttatagaactgtgcattaatgagtcaaaaggtaaaatcccagttatagctggaactggttccaattcaactgctgaagctatatctttaacaaagcatgcagaaaaagtgggagcaaatggagcattggtagtaacaccttattataataaacctacacaagaaggactttaccaacactataaatctattaatgataattgtggcattcccataatcatatacaatattccatcaagatctgtaattgacatgactgtcgatactatggcgagactatttgaattaaaaaatattgttggtgtaaaagatgcaactggagttttgaacagagttgaccaacaaaaagaaaaaatgggaaatgaatttattcagcttactggcgaggatgccaatgtactggaatttaataaaaaaggtggtgttggatgtataagtgttactgctaatgttgcaccaaaactatgctctgattttcaaaaattttcattatcaaaagacaaaagtaatctcaaagaagcagaacgaataaatgacaatcttcaacctttacataaatcattatttttagaaagtaatccaagt

SEQ ID NO: 285119 - DNA, 892 bp, Unknown
  Bacterial polypeptide expressing nucleotide sequence isolated from the Sargasso Sea
atgcaagcattacatggtagtttagtagctttagtaactccaatgaattcaaaaggggatatcgattttaattctcttgaaaaattaattgagtggcacatagctaatgatactaatggtattgtatcagtaggaacaactggtgaatcggctacattaacagttgatgaacatttaaaggttattgaacatactgttaaatgcgttaatggaaggattcctgttattgccggatcaggttcaaattcaactgctcaggcaatcgaaacaacaactgagtctcacagaattggagcagatttttcattacttgtaactccttattacaacagaccaaatcaaaaaggtcttatagaacactatataaaaattgctgatgagtgcaatataaatcaaattctttacaatgttccttccagaacaggatgtgatattttgccagaaacagtagaagtactatctaaacaccaaaatataataggaataaaagaggctgtaaataatcaaaagagaatcaatgagctagttaaaatctctaagcaatctcaagaggattttctaattttctctggagatgatgaatctttttttaatttgattacttcaggtggtcatggagtaatatcagttgcggcaaatgttataccaaaatctatatctgatatatgcaaattaataatcgaagaaaaaatcgaagaagctaatgagataaataaaaaatatcaaaatctttacgatttattatttattgaatcaaaccccattcctgtaaagtggatcttatttaagatgggatttatacaaaattcacttagattacctcttgttaatcttgataagaaatttgaagaaaatataatgtcagaaatgataaaattaaaattattatgaa

SEQ ID NO: 285120 - DNA, 670 bp, Unknown
  Bacterial polypeptide expressing nucleotide sequence isolated from the Sargasso Sea
atgtttaaaggttcaaatgttgcattaataactccattcataaataataaagtggatgaagaaaaatacattaaaataatcaattttcatcttgaaaatggtactaacggtcttgtgcctgtaggtacaacaggtgagtctccaaccttgtcccacgatgaacaccaaaagttaatagaattatgtattaaagagtcaaatggcagaatacctgtaattgcaggtactggatctaactctacagaagaggcaatttcattaactaggcacgctgaaaaggcaggagcagatggtgccctagtggtaactccttattataacaagccaactcaagaaggtctttatcaacactacaaagcgataaacgatagttgcggtattccgattattatttacaatattccctctagatcagtaattgatatgtcagttgatactatggcaagactttttgagttgaaaaatatagttggagttaaagatgcaactggagatctaaatagagtagatcaacaaaaaataaaaatgggagaagagtttattcaattaactggtaacgatgataacgcatttgaatttaataaaagaggtggagttggaaactatagtgtcactgctaatatagcaccaaaaatgtgttctgattttcaaaaattttctaaatcaaaaa

SEQ ID NO: 285121 - DNA, 886 bp, Unknown
  Bacterial polypeptide expressing nucleotide sequence isolated from the Sargasso Sea
atgttcaaaggttcaatcgttgcattaattacgccattcaagaacaatatgttggatgaggataagtatgtatcacttatacatcaccacattacaaatggtacaaaaggagtcgtacccgctggaaccacaggcgaatccccaacactcagcaatgatgaacataaaagggttattgaaatagctgttaaagaatgtaaaggaaaaattcctgtaatagcaggaacaggttcaaattcgacagatgaagctgttaacttatccagatatgcagagaaagcaggagcagatgctattcttgtagttacaccatattataataaaccaacacaagagggattgtatcaacattataaattaataaatgacaatgttgggataccgataataatttataatattccaccaagatcagtcatagatatgtcagtagacactatggcaagactttttgaattaaaaaatattgttggtgttaaagacgcaacagcagatttagatagagttaacaagcaaatgaagaaaatgggtcctgagtttattcaattatctggagaagatgctacagcattggattttaatatgagaggtggtactggctgtatttcagttacagcaaatgtagcagcaaaactttgttcagattttcaagaggcatctttagcaaaaaacaataacaatctattatctaaagcaaaagaaattaataaaaaattaatgccgttacacaaagctttatttatagaaagcaatccaagtccagttaaatacgcagctagtctactaaacttatcctcagaagatgttagattaccgcttgttaaaataactgaaaatacaaaaaaggaagtacaaaaagctttaaagtttgcaaatctgctttaat

SEQ ID NO: 285122 - DNA, 898 bp, Unknown
  Bacterial polypeptide expressing nucleotide sequence isolated from the Sargasso Sea
atgcaaccccttcaaggaagttttgtagctttagtgaccccgatgtttcctggcggtagtttggattatgcatctttacaggatcttattgagtggcaaatcaaagatggaattagtggcattgtttcagtcggaacaaccggtgaatcagctactcttaatgtaaaagagcacttagaaattattgagaagacaatagaatataccaatggaagagtgcctgttattgcaggaacaggtgcaaattcaactcaggaggccattgagttaactcaaacagctaacagtctcggagcagattatgccttgattgtgactccttattataataaacctaatcaagatggactattaaagcattatctaaaaatagctaatgaagttgatattccccaaattttatataatgtcccatctaggacagcatgtgatcttcagcctgaaacagtattgcgcttatccgatcatccaaatattatcggaatcaaagaggcagtagatgatcaacaaaggatggacgcgctacttacgatatcaaaaaaattaaaaaataaaaaaaacttttcaatattatctggagatgatccaacttttaattcttttatgtcaaagggtgcagatggagtgatttcagttgcagcaaatattatccctggggctatttctaaaatttgtacttttaatttgaataaagaatttaatgaggcaattgaattaaaccaaaaatattcaaatttatatgatcttttattcgtcgaatccaatccaatacctgtaaaatgggccttagaaaaaatgaataaaattgaatcaggaatcagactcccgctcgtttcgttagatggagcatttaacgaagaaatctccaaagaaatgtcaaaattagaattaatatgaa

SEQ ID NO: 285123 - DNA, 889 bp, Unknown
  Bacterial polypeptide expressing nucleotide sequence isolated from the Sargasso Sea
aatgtttactggaagtatagtagcgattgtcacgccaatgcaggccggagtagctcctgataccgagcttgatttcaagggcctagagcagttgattgaattccatattgaaaatggcactaaaggaattgtagctgtaggtacgacgggtgaatccgcgactttaactgaacaggaacactgtgacgtgatcgaagcagtggttaaaatcactaaaaatcgtgttccagtaattgcaggtacgggagcaaattcgacgatcgaagctatctcgttgacaaaatgcgcaaaaaaagtgggtgcggatgcctgtttattagttaccccatactataataaaccaactcagcaagggttgtatgagcattataagattattgcagaatctgttgatattccgcaaattctttacaatgttcctggaagaactgcttgtgatatgttgccggaaacggtaattgagttgtcagctattagcaatatcattggggttaaagaggcaacagctgatttaaaaagagtaaagcaaatacgtgagggagcaacaaagggtttccttttattaagtggggacgatgaaacaacaaaggattttattttgagtggtggcgatggtgtaatatctgtgactgcaaatgttgccccaaagaaaatgagcgaaatgtgtgcatttgcatcacaaggaaaaattgatgaagcaaatgatattgatgaaagtattgcagggcttcataaagaactatttgttgaatcaaatccaataccagtaaaatgggtattacataaaatgggtttaataaaatcagggataagattaccaatgacttggttggctaaggagtcggaatctaaattactttcagcaatgaaacaggcaaatatcgtataa

SEQ ID NO: 285124 - DNA, 877 bp, Unknown
  Bacterial polypeptide expressing nucleotide sequence isolated from the Sargasso Sea
tatggttgcaatagccactccaatgaatacagatggatctctagattttaattcacttgagagattagtagaattccacattgaaaataaaactgatgtgataatagccgtcggtacgactggagaatcagctacattaagtatgagagaacattcggaggttattcagaaaactattagcatagttaataaaagaataccagtaattgcaggaactggagctaactctaccagtgaagcattggagttaactcatcaatcaaaaacccttggagctgacgcatgcttattagttactccttactataataaaccaactcagaatggtttataccagcactactcaaaaattgctaatgaagttaatattcctcagatcttgtataatgttccaggaagaacttctgttgatatgcagcctgatacggttttaaaattgtgtgagcatgacaatataataggcatcaaagaagcatctggtgatatagatagatcaaaagaactattagacaaatgctcagataagatatctattttttcgggagatgataaaacagctatgagagatattcttcagggtttcaagggaaatatatcggttactgcgaatatatgtccgcgtgagatgcatgatgtgtgccgattagcttcagcaggctctaaagatgaagcagagattattaataaaaaaatagagatacttcatgatgatttatttatagaatctaatccgatacccgttaaatgggctcttaataaaatgaatctcattgataaaggtataagattaccgctaacttggttagatgaaaaatatcaaaaaattttaggtaagtctcttatatctgctggtataattacagataatgatttatga

SEQ ID NO: 285125 - DNA, 661 bp, Unknown
  Bacterial polypeptide expressing nucleotide sequence isolated from the Sargasso Sea
atgtttaaaggatcattaccagcaatggtcacaccgtttaacaacggcgaaatagatgtgaaagggctgcggaaccttgtaaattggcatatagagcaaggaagtcacggacttgtgcccgttggcacaaccggcgaaagccctacattaacacatgctgagcatgagcaagtggttagcgaagttattaatgaagcagcaggtagggtacccgttatagctggtgccggctcaaataatactgccgaggcaactagatttgtagaacatgccaaaaatgtaggagcaaacgctgctctggttgttaccccttattataataagccaactcaggcaggcttgatagcgcacttcactgagttatcaaagattggccttccaatagttatctataatattccaggccgatctgtcgtggatatgtcacctgaaactatgggtgaattagcaaaattgaatgagattataggtgtaaaagacgccacaggcgacttagctagagtttgcgatcaacggttaacctgtggtgatgactttatacaactgtctggagaagatgcgacagcacatgggtttaatgcgcaaggaggtgttggttgtatttctgttactgcaaatgttgctccagagctttgttcaagatgcaggaagcaactctagc

SEQ ID NO: 285126 - DNA, 886 bp, Unknown
  Bacterial polypeptide expressing nucleotide sequence isolated from the Sargasso Sea
atgtttaaaggatcaaatgttgctttaataacaccatttaaaaataatcaactagatgttgatagttatatcaaattaattcattttcatttgaaaaatggtactaatggcctagttccagcgggcacaactggagaatccccaactttaaaccataaggagcatgaacaggtaattgaattgtgtatccaagaagcaaaaggtaaaattccagttatcgcaggcactgggtctaattcaactgaagaggcaatatctttaacaaggcatgctgaaaaagcaggagcagacggcgtattagttgttacgccatactacaataaacctacacaagaaggcttgtaccaacattacaaagcaataaatgataacacaagtcttccaattataatttataatattcctagtagatgcgttattgacatgtccgtagacacaatgtcaaaattatttgaacttaagaatatcgctggtgttaaagatgccactggagatttaaatagacttgatcaaacaataaaaaaattaggaccagaatttattcagcttacaggtgaagatggtttagcatttgaatttaataaaaggggaggcgtaggaattatttcggttactgcgaatattgcaccaaaactttgttcagatatgcaaaaatactctaaatcaaaatctgataatgaaattaaagaggctgaaagaatagatcaaatattgcaacctttgcataaatcattatttattgaaagtaatcctgccccagttaaatatgctgcaaaacttttaggaatgtgtgatgatgaaattagattaccacttgttaaaattaaaaaagagacacaagagcaggttaaaaaagctttatcatcagcaaaacttattagttaat

SEQ ID NO: 285127 - DNA, 898 bp, Unknown
  Bacterial polypeptide expressing nucleotide sequence isolated from the Sargasso Sea
atggataataaatataaagggtcgtttgttgcacttattacaccttttgttaatggaaaaatagatgaagcttcctttcaaaagtttattgaatggcaaattagtcaaggtaccaatggtcttgttccatgtggaactactggtgagtctcctacattaagtcattctgaacatgaaagattaattgatctaactgttgaagtctcaaatggacgggttccagtaatggcaggaacgggatctaattctacagaagaggcaataaatttaacaaaatatgcaaagaaagctggtgcagattctgctttagtagtaatgccttattataataaacctacacaagaaggaatgtacgcacattttgaagctattaataatgcagtagatctacctttatttatatataatatacctggaaggtctgtaatagatatgtctgtagaaaccatggtaaagttagcaaagctaactaatatagttggtgttaaagatgcaagcaatgatccaattagaccaactttattaagaaatgcactaaatagtaataactttattcagttttctggtgaagacccttctcaacttccttttatggcttcaggtggagatggtattatatctgtaacaggtaatgttgctccaaatttaatgtctgaatttcatcaattatggagctctaataaattatctgaagcaagaaatcttcaagaaaaacttatgcctttgcatatgtctttatttgttgaaacaagtccggctccagttaagtatgcagcctctataagaggaataagtagtgccgagttaagacttccattggtagaacctaactataatacaaaaaaaattgttgaattagctttaaaagatttaaagctttctaaaatagaaatttaat

SEQ ID NO: 285128 - DNA, 889 bp, Unknown
  Bacterial polypeptide expressing nucleotide sequence isolated from the Sargasso Sea
atgcaagttttaaatggaagtttagttgctttagtaacgccgatgatgccagatggcgagatcgattttgacacattaaataaaattattgattggcatattcaagaaggcaccaatggaattgtttcagttggaacgacaggcgagtcagcaacattaaattttgaagaacatatagaagttattaggtacactattaattatgttgacggaaggttgcctgtaattgccggaactggtgcaaattcaacttcagaagcattagatttaaccaaagaagcagaaatcattggtgcaaattatgctttaatagttactccatactataacaagccaagtcagaaagggttaatagagcattatacaaagatagcagattctgtagatataccacagattttatacaatgttccttcaagaacagcatgtgacttgcttccaactacagcagaaattttatctaagcataaaaatattgttgggatcaaagaagcggtctgtgatgaagaaaggataaaagagctaatcaaaatctcattatcaaataatagttttaaggtttattcaggagatgatccttcgtttcttaacatgttaagcgttggaggtcatggagtgatatcagttgcagcaaatatagtgccgaaatatatttcaggcatatgttccttttatcaaaataatgaagttgagaaagcagaagaaattaataataaattaaagaatttatatgatttattgtttatacaatctaacccaataccagtaaaatggatgatgtataaaatggggctagttcaaaatgctctcaggcttccattggttgaacttgataaaaaatatcaagaaattatcatttcagaaatgttaaaattagaattattatgat

SEQ ID NO: 285129 - DNA, 871 bp, Unknown
  Bacterial polypeptide expressing nucleotide sequence isolated from the Sargasso Sea
tatgcttaaaggatcaattgtagctttaattacaccttttaaagatgagagtctcagtgagggcgaatatgtaaaattaattaattatcatttagaaaatggcactaatggagtagttccaggtggtaccacgggtgagtccccgacattatctcataatgagcatagaaaaattatcgaaatagcagttaaagaatgcaaaggaaaaattccagttatagcaggcactggctcaaactctacagatgaagcgattgaattatcaaaatttgcagaaaaagctggatctgactcattattagttgttacaccttattacaacaaaccaacacaagaaggtttgtatcaacattataagaaaattaatgataatgttggcatcccaattatcatttacaacattccttcgagatcagtaattaatatggaagtcgatactatggctaaactttatgaattaaaaaacatcaaaggagttaaggatgcaacaggagatcttaatagagtcgatcttcaattaaaagctatggggaaagagtttattcagttaactggtaatgatgataatgctttagaatttaataaacgtggaggcgttggtgccattggagttacggctaacgttgcagctaagcttgcttctgattttcaaaaagcatgtgtggatgaccctaagaaagctgttgagttagataaactacttcaacctcttcacacctccttgtttattgaaagtaacccctcaccagtaaaatatgctgcgtctttacttagaatgtgcaaaccaactgttagattgccattagttgaaattagagaagaaaccaaaaaaaaagtctcagaggcacttaaagtagctaagttactttaa

SEQ ID NO: 285130 - DNA, 871 bp, Unknown
  Bacterial polypeptide expressing nucleotide sequence isolated from the Sargasso Sea
atgcttaaaggatcaattgttgcattaataaccccgtttaaagatgataatcttgatgaaaacacatacagaagattaattgattatcacttaaataacggcaccaatggcatagtccccggaggtaccactggagagtctcccactttatctcatagtgaacacaaaaaaattatagagatagcggtcaaagaatgtagtggaaaaatacctgttatagcaggcacaggatctaattcaacggatgaagcagttgaactttctcaatacgcagagaaagctggttcagacgcattattagttgttacaccatattataacaaaccaactcaagagggtttgtatcaacattataaaaagataaacgacagtgttggtataccaattattatttataacattccgtctagatcagtaatagacatgtcagttgaaaccatgagcaaactatatgaactcaaaaatataactggtgtaaaagatgcaactggtgacttaaatagagtaaatcagcaattaaaagcaatgggaaaagattttattcagctcactggaaatgatgataatgctctagagtttaacaaaagaggtggagtaggtgctatcggagttacagcaaatatagctgcaaaaatttcttctgattttcaaaaagcttgtgagcaaaaaaatggagaagcagagtcattagataaactcttacagcctttacattcagctttatttattgaaagcaatccatcaccagtgaaatatgcagcatcattgcttggcatgtgcaacccatctgttagattaccactagtcgaaattagagaggaaacaaaaaagaaagtttctgcagcacttaaagtagctaaattgctttaat

SEQ ID NO: 285131 - DNA, 856 bp, Unknown
  Bacterial polypeptide expressing nucleotide sequence isolated from the Sargasso Sea
gatggaagaggacggcgcaattgattggcaagctcttaaagaattaactgaatggcatgttagttctggtactgcgggtcttgtaattgttggtactacaggagagtcagctactttagatgtggcagagcatgttcaagtcatagaaaattctgtcaagaatgcagatggaagaataaagattattgcaggcacaggagcaaattcaacaaaagaagctgtttatctaacaaattcagccaaatctgctggtgcggatgctgcgctcttagttacgccttattacaataagccttctcaagagggtttatataggcactatattcatattgccgatgaggttaacttcccccagattctttataatgttccttcaaggactggatgtgatttacttactgatactgttatcaaactagttccacacgaaaatatagttggattgaaagatgcaacgggtgacctcaatagattaaatgaaattttatccaagctagaagaaatgaaagaccacgagtttcatctttactctggtgatgatccaacctcaacccaatttatgttaagcggaggatcaggaacaatatcagtaacagctaatgttgtaccatcactcatagcagatatatgcaataaggctttatcgaatgaaagtaagaccgcaatcgaactagatataaaattgaaagacctaaatgaaattttattcgttgaatctaatcctattcctgtaaaatggatacttaataggttgggtagaatccctaaaggtttaaggttaccactagttgaattggataaaaaatttcatagtaaagctgaactaatattaaaagaattgagtctattgaattaa

SEQ ID NO: 285132 - DNA, 889 bp, Unknown
  Bacterial polypeptide expressing nucleotide sequence isolated from the Sargasso Sea
atgcaagcattaaaaggtagtttagtagctttagttacaccgatggaagagagcggcgaagttgactatgagtcattggaaaaacttatagattggcatattaatcatggcactaatggcatagtatctgttggcactactggagagtcagctacgctagatgttgatgaacatctggaagttattaaacatacagtagagcatgttaattctagagtccctgtaatagctggaactggtgctaactcgacttcagaggcaatagagttaactcaagagtcaaaacaaaacggtgcagattttgccttaattgttacaccatattacaacaaaccaactcaaaaaggacttataagtcattacacaaaacttgcaaacgaggtcgatataccacaaattttatacaatgtaccttcaagaactgcatgtgatattttacctgaaacagttgagattctatcgactcataataatattgtcggcattaaagaggctgttgattctaaagaaagaattgatgatttaataaccatttcatccaataaccaaaattttcaattattttcaggagatgatccttcatttataaagatgattcaaaaaggtggtgatggagtaatttcagtggctgcgaatgttgtaccaagtaaaatatcagagatatgtaaacttgttgaagaaaaaaaacatgatgaagctacttttattgataatactctttcaaatttatatgatcttttgtttattgaatcaaatccaataccagtaaaatggatgttatttaaaatgaacttaataaaaaactctattaggttaccacttgaagaacttgatgaaatatatcaagaagatattataaatgagatgttaaaattggaattaatatgaa

SEQ ID NO: 285133 - DNA, 874 bp, Unknown
  Bacterial polypeptide expressing nucleotide sequence isolated from the Sargasso Sea
atgttcaaaggtgcccatactgcattaattactccttttaaaggaggtcaaatagacgaagagtcatttagatcatttattgactttcaaatttctgagggaatacatggacttgttcctgttggtacgacgggtgaatcgcctacgctcagtcatgaagagcataaactcgctgttgagctgtgtgtgcaacaagcagataaaagagttccaataattgctggaacaggatcaaataatacagaagaagcaattgatttaacgcgacatgcagaaagcgcgggagcggatgccgctctcgttgtaacaccttattacaataagccgactcaaaaaggcttatacagtcattttgaggctattagcaaaagcacaaagttacctattataatttataatattccaggtagatcaattgttgatatgtctactgaaacaatgaagagtttatttaagattgaaaatatagttggagttaaagatgctacttctaatatacctagagtgtatgaatctaaaactgttataggtgaaaacttcaatcaacttactggagatgatgccacaacgcttgcttttatgacttatggtggacatggatcaatatcggtcacatcaaatattgcacctaaattatgttcccaatttatgcaactttgtctgagtaaagactttgcagaagcggcaaagataaatgataaattgatgcctcttcatcatgctctttttgttgagtcgagccctggaccagtaaaatatgcggcatctaaattaggtctttgtggtgaagagatacgactgccccttactttaatttctgatgagacaaaagtcttagttgataaagcattaaaacacgcttcgttgatataat

SEQ ID NO: 285134 - DNA, 766 bp, Unknown
  Bacterial polypeptide expressing nucleotide sequence isolated from the Sargasso Sea
attgtagttgtaggcacaactggtgaatctgcaacgctgagtatggaggagcattgcgaccttgtctctcattgcgttggggcggcaaacaaacgtatcccgataattgctggtacgggctcaaattcaacagaggaggctctatattttacaaattccgctaaagaatgcggagccgatgcttgtctgctagtagcaccatattacaacaagcctactcaagaaggtctttttaagcattttaaattaatcgctgaatcagtagatattccacaaatactctataacgtaccaagtaggacggggtgtgatatggaatttgagttagttaaccggctagcggacattgacaacattattgccttaaaagatgcttcgggagatgtcagtcggggtaaagttttgattgataggtgtggtgaccgtattgatatatacagtggggaagacgcattgacgctcgagctaatgaagcatggtgcttcgggtactatttcggttacggctaatattgttccaaatttgatggctcaaatgtgtaattttgctctcgaaagaaactttgaatcggctgcgatgctcgatgagaagttgcagggcttgcatagggctttattcctcgaatcaaatccgattcctgtcaagtgggcgttaaataaaatgaataagatcggagaaaccttaaggctgccactaacggaacttaatggcaaatttcacgtcgaactgattgaagctttaaatttggttaacgttaatatttgaa

SEQ ID NO: 285135 - DNA, 889 bp, Unknown
  Bacterial polypeptide expressing nucleotide sequence isolated from the Sargasso Sea
atgagtatttttaaaggcagtatggttgcaatagcgacaccgatgaatcttgatggttctctagattttgattcactacatcaactaatagaattccacgtagacaataaaacagatgtaataatttctgtagggacaactggggaatctgcaactcttgattttaaagaacattccagtgtaattaagaccactattgaattagtcaaaggaaggatacctgtaattgccggtactggagcaaattctacatcagaagctattgagcttactgagagcgcaaaaaaaaatggcgctgatggttgtttgttggtaactccttattataataagccaactcaagaaggactttttcagcattataaaaaaattgctgacaccgttgccattcctcaaatattatacaatgtacctggaagaacatctgtagacatgcttccagaaactgttcagagattatctacacataataatataataggaattaaagaggcatctgggaacaaagacagatctatgaagcttatgaaactatgctcagaaaatattcaaattttcactggagatgacaagacttcaatgtcagatattattgatggattttctgggaatatttcggtaacagcgaatgttgcaccacttgaaatgcatatgatgtgcaagtacgcaattgagggtgataaagaaaaagctgaggaaattaattcaaaaataggaattctccatgatatattattttgtgaatctaatccgatacctgtgaagtggtgtttaaacagaatgggtttgatcaaaaaaggtatcagactacctttaacatggatggatgataagtatgatgaatcattaaatgatgctctcattaacactggtataatgaatgaataaa

SEQ ID NO: 285136 - DNA, 783 bp, Unknown
  Bacterial polypeptide expressing nucleotide sequence isolated from the Sargasso Sea
tggacttgtgcccgcaggaacaactgggtgaatcaccaacattatcacatgctgaacatgaaaaagtaatagaactttgtataaaagaggcaaatggaaaggtacctgtaattgcaggaactggttctaactctactgaagaagctatttcattaaccaaacatgcggaaaatgctggggccgacgctgctttaattgttactccatattataataaacctacacaagaaggtttatatcatcattataaagctataaatgataatacaaatcttccaataataatttataatattccaggcagatgtgtaattgatatgtcggttgatacaatggccagattgtttgagcttagaaatattactggtgttaaagatgcaacaggagatttgaatagacttgatcaaacaataaaaaaattaggaccagaattcattcagcttacaggtgaagatgggcttgcttttaaatttaataaaagaggcggagtaggaataatttcagttactgcaaatattgctcccaagttatgttccgatatgcaaaaattttctaaatcaaaaatagataatgaaataatggaagccgaaagaatagatggtatacttcaacctgttcataaagcattatttattgaaagtaatccagcgccagttaaatacgcagcaaaactacttggattatgtgatgatgcggtgagattaccattagtaagtataatggaagaaactaaattaaaagttaaaaattctcttatttctgcgaaattattaaatgaataaa

SEQ ID NO: 285137 - DNA, 904 bp, Unknown
  Bacterial polypeptide expressing nucleotide sequence isolated from the Sargasso Sea
atgattacagacaaaactgagtgtaataatccactatttggaagaattttgactgcaatggttactccattcactgagaatggagatgtagattatgaactagctataaaactttcaaattatctttttgagaacggttccgatggaattgtgttgtgcggtactactggagaatctccgactctttcatgggcggaacagcatgatttatttattgcggtaaaaggatctttggatgcaagctgtaaagtaatagttggcactggtagcaattgtacaagcgaagctgtggaagctacaaaaaaagcttacgactctggtgccgacggtgctttggtcgttgttccttattacaataagccgcctcaagaaggtctttataaacatttcagttctattgctaaatctgcaaaggatttgcctcttatgctctacaacattcctggcaggactggatgcaatttattacctgatactgtgaagaaacttatggatttctcaaatattctcagtattaaagctgcaagcggtagaatagaagaagtaacagaactaagagctatttgtggctccgaactctctgtatatagtggcgacgattcattgttgcttccaatgttatctgtaggtgctgtaggagtagtaagtgttgcaagtcatttagttggattgcaattgaaagagatgattcattcctttcaaagtggaaaggtttccaatgcgcttgctattcatgaaaaacttcagcctcttttcaaagcactctttatgactactaatccaatcccaattaaggctgctttggagctatcgggatgggatgtaggtaatcctagaagtcctttgtcaccattaaccaatgacatgaaaaagcaactatcttttatcctgaaatccctataat

SEQ ID NO: 285138 - DNA, 820 bp, Unknown
  Bacterial polypeptide expressing nucleotide sequence isolated from the Sargasso Sea
tatgtttaaaggatcaaatgttgccttaatcactccatttaaaaataatggtttagatgaagctgcatatataaagctcattcattttcacattgataatggcacgtctgggctagttccagcaggcactactggagaatctccaaccctcagtcatactgaacatgaacgtgtaattgatttatgtattaaagagagtaatggaaaaatacctgttatcgctggaacaggatctaattctacagaggaggcaatatccttaacctctcatgctgaaaaggcaggagcaaatggtgccttagttgtaacgccatattataacaagcctacacaagaagggctataccaacactacaaagcgattaatgataaatgcgggatccctattataatttataatattccaggcagatcagtaattgatatgtcggttgataccatggcaagattatatgaactaaaaaatattgttggtgtaaaagatgctactggcgacctagatagagttaatcaacaattaaataaaatgggtaaagactttattcaattaactggaaatgatgataatgcgtttgaatttaacaaaagaggtggagtaggcactattagtgtgactgcaaatatcgcaccaaaactttgttcagaattccaaaaaaattcaatatctaaacacgaccaggatcttgcaaaagcaaaagagttagataatattttacaaccagttcatactgcaatgtttgttgaaagcaatcctagtccagttaaatatgcagctaaattaatgaatttgtgtgatgatgaggtgagattaccattagta

SEQ ID NO: 285139 - DNA, 820 bp, Unknown
  Bacterial polypeptide expressing nucleotide sequence isolated from the Sargasso Sea
gcatatataaaattaatccatttccagattgataatggtactaatggacttgtgccggcgggtacaacaggtgaatctcctacgttaagtcatgatgagcatcaaagagtaatagatttatgtataaaagaaagtgatggaaaaattccagttattgctggtacgggttccaactcaactgaggaggctatttctttaaccacacatgcagaaaaaacaggagctaacggcgctttgatagttacaccttattataataaaccaactcaagaaggcttgtatcaacattataaagcaattaatgacaagtgtggtattccaattataatttataatattcctggcagatctgtgattgacatgtcagtggatacaatggccagactctatgaattaaaaaatatagttggtgttaaagatgcgacaggtgatttagatagagttaatcagacacttgaaaaaatgggtaaagaatttattcaattaacaggtaatgatgataatgcatttgaatttaataaacgtggtggggtaggtactattagtgtaacagctaatattgcacctaaactttgttcagattttcaaaaattctccaaatcagataccgataacgaaatgaaagaagcagaaagattagataaaatattacaaccagttcatcactcaatgtttgttgagagtaatcctagtcctgtaaaatatgctgcaaaacttttaggactttgtgatgacaatgtaagactaccacttgtaaaagtaacagacacaacaaaagaaattataaaaaaagctcttcagtctgctaagttaatttaat

SEQ ID NO: 285140 - DNA, 621 bp, Unknown
  Bacterial polypeptide expressing nucleotide sequence isolated from the Sargasso Sea
tatgttcaaaggttcaatcgtagcgttaataacaccgtttaaaaataataaattggacgaggctaattatagtcaaatattacaacatcatcttaaaaacggcactaatggcgttgtaccggctggtacaactggtgagtctccaactttatctcatattgaacataaaaaagtaattgagatagcaattaaagaatgtaaaggtaaaattccagttatagctggaactggctccaattctacttcagaagcaattgagctttcgaaacacgcagaaaatgttggcgcagacggtctacttattgtaacgccatattataataaaccaactcaagaaggactatatcaacattataaatcaattaatgacagcgtaggtattccaattatcatttataatataccctctagatctgttattgatatgacagttgatacaatggcaagattatatgagttaaaaaatattaaaggtgtaaaagatgctacaggtgatttaaatagggtatctatgcaacttaacaaaatgggaaaagagtttattcaattaactggagaggatgataatgcgcttgaattcaataaaaggggaggcgttggttgtattagtgttaccgctaa

SEQ ID NO: 285141 - DNA, 634 bp, Unknown
  Bacterial polypeptide expressing nucleotide sequence isolated from the Sargasso Sea
atgtttaaaggatcaaatgttgctttaattacaccatttaaaaataatggtctagatgaagatgcatatattaaattaattcattttcacattgataatggtaccaatggactcgttccagcaggtacaacaggtgaatcgccaacattaagtcatcatgagcatcaaagagtaatagatttatgtatcaaagagagtaatggaaaaattcctattattgctggaacaggttccaattcaacagaagaagcaatttctttaactactcatgcagaaaaagcaggcgctaacgcagctttaattgttactccttattacaacaaaccaacacaggaaggcctgtatcaacattacaaagccataaatgacaaatgtggaattccaattataatttataatattcctggtagatctgttattgatatgtcagttaacaccatggcaagactttatgaattaaaaaacattgttggcgttaaagatgctactggtgatttagatagagttaaccaaacactcaaaaaaatgggtaaagactttattcaattaactggtaatgatgacaatgcttttgaatttaataaaacgcggaggtgttggcactataagtgtaacagcaaatattgcccctaaa

SEQ ID NO: 285142 - DNA, 886 bp, Unknown
  Bacterial polypeptide expressing nucleotide sequence isolated from the Sargasso Sea
ttgaaaggagactataaaatcaacccatttataattgaaaaaaatgaatctccatttgctggtataggtgtagctgttgttactccatttgatcaaaataataaaattgataagcaagccatctacagaattagtgactatttatttcgtaatggtgtctcttatgtagttgttcaaggcacaacaggtgaatcctcagttctaaatcctgatgaaaaaaatgaagtcaattccatttttattgatgcttttaaagatcgccttcctttaatactaggtataagttctaatgatacaaactatttaactcaacaaatttcaaaaactgatttaacaggatttgaagcaataatgtcagtttgtccttattataacaaaccttctcaagagggtttatatcaacattttaaaagtgtatgcgatgtttctccaattcctttgttgttatacaatgttcctggaagaacttcttgtgatatttcaaatgaaacaattttaagattaagtgagtattctgataaaataataggcataaaagaggcatctggagatgttaaaagaataatagagctacgtaaaaagatcaaaagaaaatttcttattatttctggtgatgacttcaccatgattgatgcggttagaaatggtgctgatggtataatttctgttgcagccaatgcctttccctcaataatgaatagtacttatatatctttaatttgggagaatgataagcaagtgcctaataatattaaagaattggggactgtagattcatctacttttcttttaaatgatttttttgatttaatttttgaggaaggtaacccatcaggcataaaatttgctttgcaatgtttaaatttgtgtaagacaaagttagata

SEQ ID NO: 285143 - DNA, 889 bp, Unknown
  Bacterial polypeptide expressing nucleotide sequence isolated from the Sargasso Sea
atgtttaaaggttcaaatgtagctttagtaacaccatttaaaggcaatagccttgatgaggaaacgtatataaaaattattaattttcatttagaaaatggaacaaatggacttgtgccagctggtacaacgggtgagtcaccaactctttcgcatagagaacatgaaaaagttatagagttatgtattcaagaagctaaaggaaaaattccagtgatcgcaggcacaggatcaaattctactacagaagccatatcactcacagagcacgctgaaaaggctggggcagatggtgccttgatagtgacaccttattataacaaacctactcaggagggcttatatcagcattacaaggctataaatgacaaatgcggcataccaattataatttataatattcctggtagatcagttattgatatgacagtagatactatggcaagattatttgagcttaagaacatagttggtgtaaaagatgcaactggtgatttgaatagggtagatgagactttcaaaaaaattggcaatgaatttatccaactaacaggtgaggacggtcttgcttatgaatataataaaagaggtggcgtagggtgtatttctgttacagccaacatagctcctaaaatgtgttctgatatgcaaaaattttcaaaatcacagaataatgatgagcaaaaaaaggctgaagagatagataaaaaacttcaacctgttcataaatctttgtttattgagagcaatccatcaccagttaaatatgcagctaaattgataggtctatgtgatgataatgtgagattacctttggtaacagttttagatgaaacaaaagctgaggttaaaaaagccctcatatctgccgaattaattaatgaataaa

SEQ ID NO: 285144 - DNA, 313 bp, Unknown
  Bacterial polypeptide expressing nucleotide sequence isolated from the Sargasso Sea
aatgttttttggaagtatacctgcacttataactccatttaataattataatgtagattatgattctctaaacaatattattaatcactccataagtagcggttctaatggtttggttccctgcggaaccacaggagaatctccaactttatctcatgatgaacatcaaaaaattatcgaagaaacaattagaattactgataaaagagttccagtaattgctggaactggctcaaacaacacagctgaagcaatagattacacaaaacatgcagaaaaaagtggggccaatgctgccctagtagttacacct

SEQ ID NO: 285145 - DNA, 452 bp, Unknown
  Bacterial polypeptide expressing nucleotide sequence isolated from the Sargasso Sea
tatgtttaaaggatcaaatgtagcattaattacaccgtttaaagacaacaagcttgacgaagaaagttacataaaaataataaatcatcatctggaaaatggaacaaatgggttagttccagttggaacaacaggtgagtcaccaacattatcacatgatgaacatgagagaacaattgaattgtgtataaaagaagcaaccggcaaacttcccataatagccggcacaggatctaattctacagaagaagccgtatcattaactaaacacgctgaaaaagctggtgcggatggtgctttagttgttacaccatattataataaacccactcaagaaggattatatcaacattataaatcaatcaatgataactgtggaattccaattataatttataatattccaagccgttcagtaatcgatatgagtgttgaaacaatggctagattat

SEQ ID NO: 285146 - DNA, 886 bp, Unknown
  Bacterial polypeptide expressing nucleotide sequence isolated from the Sargasso Sea
atgataaacggaagcatcgtagccttaatcacgccaatgaacagtgatggctcagtagattttgcaagtcttgaaaggttagtcgaattccatattgaccaaggcacagacgccatcgtcgccgtgggcactaccggcgagtcagcgactctgccaatgaatgagcacgttactgtggtcgcgcaaacggttaagtttgccgcaggccgtattcctgtgattggtggcaatggcgcgaatgcgacatctgaagctatcgaactcaccaagtctttatctaaagtaggggttgccgccatgttaggcgtgacaccttactacaataaacccacgccaaagggcttagtcgcgcactataaagcggtcgcggcgagcacagatattccgcaaattctctataacgtaccaggacgcaccgccgtcgacatgaagcccgaaaccgtggctgaattggtcgctgtgagcaatattattggcgttaaagaagccacgggtgatgtctcacgcgtacagcgtttacgtgagctttgcggtaatgactttatgttgtacagcggcgatgacgcaacggcgagggagtttttactccttggcggtaatggcgtgatttcggttgctaacaacatagtgccaaaagcattcaaagccatgtgtgatgcagctctggcgggcaacgcagaattagcggcgagcatcgatgagccgctgcgtggtctgtatagcacactgttctgtgaagcgaacccaattcctgtgaagtgggctgctcaccgtatgggactgattgagtgtggccatattcgtttacctttgactgaactttctgagcaatgtcatggtctgttgttagatgcaatgactcgcgcccagatagaggttaaataat

SEQ ID NO: 285147 - DNA, 889 bp, Unknown
  Bacterial polypeptide expressing nucleotide sequence isolated from the Sargasso Sea
atgtttaaaggttcaaatgtggctttagtaacaccttttaaaggcgatagtcttgatgaggaaacttatattaaaattattaattttcatttagaaaatggtacaaatggacttgttccggctggcacaacaggcgaatccccaactttatcacatggagaacatgaaaaagtaattgagctttgtataaaagaagcaaaaggaaaaatacctgttatagctggtacagggtcaaactcaactgttgaagcaatttcactaacaaagcatgctgaaaaagcaggagctgatggcgcattgatagttaccccatattacaacaaacctactcaggagggcttatatgctcattataaagctataaatgacagctgtggtatacccataattatttataatattcctggaagatcagtgatcgacatgtcagtagatacaatggcaagattatttgagcttaagaacattgttggggttaaagatgctactggagatctaaatagagttgatgagacttttaaaaaaattggaaatgaatttatacaattaactggtgaggatggactcgcttttgaatataacaaaagaggtggagtaggatgtatttcagtcacagcaaatattgctccaaagatgtgctcagatatgcaaaaattttctaaatctaatgataaagatgaacttgaaatagcagaagaaattgataaaaaacttcaacctgttcataagtcattatttattgaaagtaacccatcgccggtaaaatatgcagctaaactaataggtctttgtgatgataaagtcagattaccattagtaactgtcttagatgaaacaaaaaatgaagttaaaaaagctcttttatctgctgaattaataaatgagtaac

SEQ ID NO: 285148 - DNA, 859 bp, Unknown
  Bacterial polypeptide expressing nucleotide sequence isolated from the Sargasso Sea
tttagtcactccgtttaaaaatgataaacttgatgatgaaacttatattaagttaattcattttcatattaaaaatggcacaaatggtttagttccagcaggaactacgggagaatcgccgactttaagtcataaagaacatgaacgagtgattgaattatgtgttaaggaaagtaatggacggttaccagtatttgcagggacaggatcaaattctactgaagaggctatttctttaacaacacatgctgaaaaaataggtgccaacggagcattaattgttactccatattataataaacctacacaagaaggtctataccaacattataaggctataaatgataaatgtggaattccaattattatttataatatacctggtagatcagtcatagatatgtctgttgatacaatggctaaattatatgaattaaaaaatataattggagtgaaagatgctactggagatttaaatagagtagatcaaactttaaaaaaaatgggtaaagattttatacagctaacaggtaatgatgataatgccttagaatttaatatgaaaggtggagtaggcgctataagcgttactgcaaatattgctccgaaactttgttctgattttcaaaaattttcgaaatcagaaagtgataacgaaattaaagaagcggaaagattaaataaaattcttcaaccagttcatcatgcaatgtttgttgaaagcaatcctagtcccgtaaagtatgcagctaagttattaaatctatgtgatgacaatgtaagactaccattagttaaagtaactgaaccaacaaaagaaatcgttaaaaaagcattgcattctgctaaactgatttaa

SEQ ID NO: 285149 - DNA, 877 bp, Unknown
  Bacterial polypeptide expressing nucleotide sequence isolated from the Sargasso Sea
tatgtttaaaggttcaaatgttgctttagtcactccatttaaaaataataaacttgatgatgatacttatatcaagttaattcattttcacattaaaaatggtactaatggtttagttccagcaggaactacaggtgaatcgccaactttaagtcacgaggagcacgagagggtgattgacttatgtgtaaaagaaagtaatggaaaattaccagtatttgctggcactggttcaaattcaactgaagaagctatatctttaactaaacatgcagaaaaaataggtgctaatgcagcgttaatcgtaactccttattataacaaaccaactcaagaagggctttatcagcattataaagcaatcaacgataaatgcggtatcccaatcataatttataatattccaggacggtcagtaatagatatgaaagtagatactatggcaagattgtatgaattaaaaaatatagttggtgtgaaagatgctactggagatttaaatagagtagatcaaactttaaaaaaaatgggaaaagaatttattcaattgactggaaatgatgacaatgcactagaatttaataaaagaggaggtgttggggctataagcgtaactgcaaatattgcaccaaaactttgttcagaatttcaaaaattttctattttgaaagatcaaaaatctattgatgaagctgaaaaactcaataaaattttacaaccaattcatcattctatgtttgttgaaagtaatcctagtccagtaaaatatgcggctaaactattaagcctatgtgatgatgatgtaagacttcctttagtaaaagttacagagacaactaaagaaatagtaaaaaaagcacttcagtctgcaaatttg

SEQ ID NO: 285150 - DNA, 886 bp, Unknown
  Bacterial polypeptide expressing nucleotide sequence isolated from the Sargasso Sea
tatgttcaaaggatcaaatgttgctttagtcactccgtttaaaaatgataaacttgatgatgaaacttacattaagttaatccattttcatattgaaaatgggactaatggtttggttccagcaggaaccactggtgagtccccaactctgagccataatgagcatgaaagggtaattgatttatgtgtcaaggaaagtaatggaaaattacctgtatttgctggtactgggtcaaactctactgaggaagcgatttcattgactactcacgctgaaaaaatgggagcagatggagctttaattgtaactccatattacaataagcctacccaagagggactttatcaacattataaagctatcaatgataaatgtggaattccaattctaatttataacattcctggaagatcagtgattgatatgtcagttgaaacaatggcaagattatttgaattaaaaaatattattggtgttaaggatgcaacgggagatttaacaagagtagataaaacattagaaaaattaggtaaagattttatacaattaacaggaaatgatgataacgctttagagtttaataaaaaaggtggagtaggtgctataagtgtaacagctaacattgctccaaaactttgttctgatttccaaagattttcaaagtctaacaatgataatgaaattaaagaggctgagagattaaatgaaatattgcagcctgttcatcacgctatgtttgttgaaagcaatcctagcccagttaagtacgctgcaaaattattagatttatgtgatgacgatgtaagattaccattagtaaaagtaacagacactactaaagatattgttaaaaaggctcttcatacagctaaattaattcaatga

SEQ ID NO: 285151 - DNA, 871 bp, Unknown
  Bacterial polypeptide expressing nucleotide sequence isolated from the Sargasso Sea
tatgcttaaaggatcaattgttgcattaataaccccatttaaagataataatcttgacgaaaatacatataggaaactaatagattatcacttaaataatggtactaacggtattgtccctggcggcactacaggggagtctcctactttatctcatagtgaacataaaaaaattatcgaaatagccgtaaaagaatgtaaaggaaagataccggtagtagccggcacaggatctaattcaacagatgaagcagttgaactttctaaatttgctgagaaagcaggttcaaacgcgctgttagttgttacaccatattataataaaccaactcaagagggtttgtttcaacactataaaaaaattaatgatagtgttggtataccaatcataatttacaacataccatccaggtctgtaatagatatgtccgtggaaactatgagtaaattatatgaactaaaaaatataacaggtgtaaaagatgcaactggtgatctaaatagagtagatcagcaattaaaagctatgggaaaagaatttattcaacttactggaaacgatgataatgctttagagtttaacaaaagaggtggagtaggtgctattggagttactgcaaatatagctgcaaaaatgtcctctgattttcaaaaagcttgccaggaaaaaaatgggatggcagaaacacttgataaacttttacaaccgttacactttgctttatttattgagagcaatccatcgccagtaaaatatgcagcatcattactaggtatgtgtaattcctcagttagattgccactagttgaaattagagaagaaacaaaaaagaaagttttagaagcgcttaaagtagctaaattactttaa

SEQ ID NO: 285152 - DNA, 886 bp, Unknown
  Bacterial polypeptide expressing nucleotide sequence isolated from the Sargasso Sea
atgataaacggaagcatcgtagccttaatcacgccaatgaacagtgatggctcagtagattttgcaagtcttgaaaggttagtcgaattccatattgaccaaggcacagacgccatcgttgccgtgggtactaccggtgagtcagcgactctgccaatgaatgagcacgttgccgtggtcgctcaaaccgttaagtttgtcgcaggtcgtatccctgtgattggtggcaatggtgcgaatgcgacagcagaagctatcgaactcaccaaatccttatctaaagtcggggttgacgccatgttaggcgtaacaccttactacaataaaccgacgccaaagggcttagtggcccactataaagccgtggcggccagcactgatattccccaaattctctataacgttcctgggcgcaccgcggttgatatgaagcctgaaaccgtggccgagttagtgagcgtgagcaatattattggtgtaaaagaagccacgggtgatgtatcacgggttaaacgactacgtgaactttgcggcaatgactttatgctgtacagcggtgatgatgcgacagcgagagagtttttgctccttggtggtaacggggtgatttcggttgccaacaacatagtgccaaaagcctttaaagctatgtgcgacgccgcattggcgggcaacgccgaattagccgcaagtatcgacgagccactacgtggtttatatagcacactgttttgcgaagcaaatcctatcccagtgaaatgggcagcccatcgtatggggttgattcagtgtggccatattcgtttacctttgactgaactttctgagcaatgtcatggtctgttgttagatgcaatgactcgtgcccagatagaggttaaataat

SEQ ID NO: 285153 - DNA, 889 bp, Unknown
  Bacterial polypeptide expressing nucleotide sequence isolated from the Sargasso Sea
atgcaagttttaaatggaagtttagttgccttagtgacgccaatgatgccaaatggtgatatagattttaatgctcttgataaaattattgattggcatattaaagaaggaactaatggaatcgtatcagttggcacgacgggagagtcagctacagttaattttgatgaacatataaaaataattaagcataccattaattatgttgatggaagggtaccagtaattgctggaacaggagcaaattcaacctctgaggcattagatttaacaatggaagcaaaaagtataggtgctaattatgctttgattgttaccccatactataacaaaccaagccagctaggactgatagagcattatacaaagattgcagactcgatagatattccacaaattttatataatgttccctctagaacggcctgtgatttacttccatcctctgtagaggttttatctgatcataaaaatattataggtataaaagaggctgttgatattgaggaaagaatgaaagatttaataaagatatcaagcaccaatgagaattttaagatttactcaggtgatgacccttctttcctaaaaatgttaatgcttggagggcatggagtaatatcagtagcagcaaatattgttccaaaatatatttcagagatttgctctctttgtttagataataaaataaataatgcaaaaatggttaatgaaaaattaacaaaaatttatgatttattatttattcaatctaatccaataccggttaaatggatgatgtataaaatgggattgattcaaaattttttaagattgccactaacagaactagatgaaaaatataaagaacttattatttctgaaatgctaaaattagagttattatgat

SEQ ID NO: 285154 - DNA, 886 bp, Unknown
  Bacterial polypeptide expressing nucleotide sequence isolated from the Sargasso Sea
atgtttaaaggttcaaatgtagcacttataacaccattcaaagataataatctagatgaggaaaattatattaaattaatcaattttcatttggaaaataataccaatggcttagttccagcgggaacaactggagaatctcccactttaagccatgatgaacataaaaaagtaattgaattgtgcatcagagaggccaaaggcaaaattcctataattgctggaacagggtccaattcaacagaagaggctgttgagttaactaaacatgctgaaaaggctggggctgatggtgcattagttgttacgccatattataataaacccacccaagaaggtttgtatcaacattacaaatctataaatgataattcaagccttccgattataatttacaatattcctagcagatgtgtaatagacatgtcagtagatactatggcgagattatttgaacttaaaaatattgctggtgtcaaagatgcaacaggcgatttaaacagacttgaccaaacaataaaaaaattaggccctgaatttattcagcttacaggagaagacggtcttgcttttgaatttaataaaagaggtggagtaggtattatttcagttacagcaaatattgctcctaagctatgctctgatatgcaaaaatattctaaatcaaaaactgacaatgaaataaaagaagctgaaagaatagatcaaatattacagccactacacaaatctttatttctagaaagtaatccagcgccagtaaaatatgctgcaaaactattaggattatgcagtgatgaaataagacttcctttggttaaaattaaaaaagaaacacaagaggaagttaaaaaagcattatcatcagctaaattaattagttaat

SEQ ID NO: 285155 - DNA, 826 bp, Unknown
  Bacterial polypeptide expressing nucleotide sequence isolated from the Sargasso Sea
tgattgttacatcaaattaattcattttcatttaaaaaatggtactaacggcctagtaccagcgggaacaactggcgaatctcccactttgagccataaagaacatgagcaagtcatcgaactttgtatcaaggaagctaaaggtaaaattccagttatagctggtactggttcaaattctacagctgaagcaatatctttaactaagcatgcagagaaggccggagctgatggagcgttagttgtcactccttactataacaagccgacacaagagggtctgtatcaacattataaagctataaatgataacacaagtcttcccattataatttataatattcctagcagatgtgtgattgatatgtctgtagatacaatggcaagattatttgaattaaaaaatatagctggggtaaaagatgcaactggtgatttgaatagacttgatcaaacgataaaaaagttaggacctgatttcatccaacttactggagaagatggtcttgcatttgaatttaataaaagaggtggagtaggaattatttctgttacagcaaatattgcacctaagatgtgctctgatatgcaaaaattttctaaatcagaatctgacaatgaaattaaagaggctgaacgaatagatcagctgttacaacctttacacaaatctttgtttatagaaagtaaccctgcaccagttaaatatgcagcaaaacttttaggtctatgtgacgatgaaattagacttccattggttaaaattaaaaaagaaacacaagaaaaagttaaacaagctttatcatcagctaaacttattagttaa

SEQ ID NO: 285156 - DNA, 476 bp, Unknown
  Bacterial polypeptide expressing nucleotide sequence isolated from the Sargasso Sea
gatgcaagccttaaaaggaagtttagttgctttagttactccaatggaagagggtggagatgttgattataactcgctagaaaaattagttgattggcatattcaagaaggtactaatggtattgtatcagtcggaactactggcgaatcagcaacgctcgatgttgaagagcatttaaatgtaatcaaacatactgtggaatatgttaattcaagaatacctgtaatagcagggacaggtgcaaactcaacctcagaagcaattgaattaacagaagaatcaaaaaagcttggagctaactatgctttgctagtaacaccttattacaataaacctaatcaaaatggtcttataaatcactatacaaaaattgctgatgaggtcgatatcccacaaattttatacaatgtcccatcaaggactgcatgtgatttattaccatcttcagttaaaattctatcagaacataacaata

SEQ ID NO: 285157 - DNA, 799 bp, Unknown
  Bacterial polypeptide expressing nucleotide sequence isolated from the Sargasso Sea
atgtttaaaggatcaaatgttgcgttattaactccgtttaagaataataaattagacgaagattgttatatcaaactaataaattttcatattgaaaatggcacaaatggtttagttcctgcaggaacaactggtgaatcgcccacattgagccatgaagagcatgaaaaagtcattgagctttgtattaaagaagcaaaaggcaaaattccggtaattgcaggcactggatcaaattctacaactgaagctgtagctctaacaaagcatgcagaaaaggcaggagcagatggcgtacttgtagttacaccatattacaacaaaccaacacaagaaggtttatatcaacactataaatcaattaatgataatacaagcttgccaattattatttataatattccaagtcgttgcgttattgatatgtcagttgatacaatggcaagactttatgaacttaagaatatcgcaggtgtaaaagatgcgacaggagacctaaatagacttgatcaaaccttaaaaaaattgggccctgattttattcagctgactggtgaagatggtcttgcttttgaatttaacaaaagaggaggggttggtataatttcagttacagcaaatatagcacccaagttatgttccgattttcaaaaattttcaaaatcaaattctgataatgaaattaaagaggctgaaagaattgatgctttgcttcaaccacttcataaagctctatttattgaaagcaatcctgcacctgcaaaatatgcggcaaaacttttaggtctatgcagtgatg

SEQ ID NO: 285158 - DNA, 475 bp, Unknown
  Bacterial polypeptide expressing nucleotide sequence isolated from the Sargasso Sea
aatgttttttggaagcatacctgcggttattacaccatttaaaaataatcaagttgattacaactctcttgataaaattgttaatcatttaattttaaatggatcaaatggattggtaccatgcggaactacaggtgagtctcctactttatcacatgaagaacacaaaaagataattgaacaaacaataaaaattagcgataaaagagttccagtcattgcggggactggatctaataatactaaagaggctgtggattacactaaacatgcagagagtgttggagcagatgcagctttagttgtaacgccatattacaataaacctacacaaaatggtttgtatgctcactttaaaatgattgcagattcagtaaaattacctattataatttacaacatcccaggaagatctgtcatagatatgtctattgagacaaaaaatgagttgtccaaaattgaaaatatcattggc

SEQ ID NO: 285159 - DNA, 646 bp, Unknown
  Bacterial polypeptide expressing nucleotide sequence isolated from the Sargasso Sea
tttacagaggaggcaatatccttaacctctcatgctgaaaaagcaggagcaaatggtgccttagttgtaactccatattataacaaacctacacaagaggggctataccaacattacaaagctattaatgataaatgtggtatccctattataatttataatattccaggcagatcagtaattgatatgtcggttgataccatggcaagattatatgaactaaaaaatattgtaggtgtaaaagatgctactggtgacctagatagagttaatcaacaattaaataaaatgggtaaagactttattcaattaactggaaatgatgataatgcgtttgaatttaacaaaagaggaggagtaggcactattagtgtgactgcaaatatcgcaccaaaactttgttcagaattccaaaaaaattcaatatctaaacacgacgaggatcttgcaaaagcaaaagagttagataatattttacaaccagttcatactgcaatgtttgttgaaagcaatcctagtccagttaaatatgcagctaaactaatgaatttgtgtgatgatgaggtgagattaccattagttaaagttactgaggagactaaaataattgtaaaaaaagccatagagactgcaaaacttatttaat

SEQ ID NO: 285160 - DNA, 489 bp, Unknown
  Bacterial polypeptide expressing nucleotide sequence isolated from the Sargasso Sea
aatgtttaatcctaaaagctcatataacaaagaagaactaattgcatgttcaaatggagaattatttacaaaaaaaggtgatggtcgattgccttcagacttaatgttaatgttcgacgaaatagttaatattgatgatttttcaggaaattataataaaggctcaattgaagctgtgctaaacgtaaaccctgatttgtggttttttaagtatcattttaaggaagatcctgtcatgccaggatgtctaggtctagacgctatgtggcaacttctaggattttacttgttgtggactggcttaccaggaattggacgagctcttggagctgaaaatgtaaagttctttggacaagttcttccaaaagcaaaaaaagttgtatataaattagatattaaaaggattatcaatagaggtgcaatagttggtttagcagatggtgaaatgtttgttgataataaaaaaatctatagcgctgaaaagttaaa

SEQ ID NO: 285161 - DNA, 478 bp, Unknown
  Bacterial polypeptide expressing nucleotide sequence isolated from the Sargasso Sea
aatgagtttcagggagcgcagtaatttcacatatgatgacctgatagattgcgggcatggacggctttttggtgatgggaacgcccagttaccgctgccgccgatgttgatgttcgatcgcattataaacatttccgaagacggtggtgaattcggcaaaggtgaggttatagccgagttcgatattagcccggaactttggttcttcccatgccatttcgaaagtgatccagtgatgccggggtgtcttggcttagatgcattatggcagcttgtagggtttcatcttggctggctgggggcgcctgggcgcggccgcgcgctggggttaggcagtctaaagtttaatggccaggttacaccagacgctaaactggtgacctacaggatagatattaaacgcacggtgcgtaggggttttgccataagtatcgccaacggcacattagacgtcgatggtcagatggtttacgaagcg

SEQ ID NO: 285162 - DNA, 268 bp, Unknown
  Bacterial polypeptide expressing nucleotide sequence isolated from the Sargasso Sea
tatgaaaaaaaactcatactcctatgatgatctaataacttgtgggaatggtgatctttttggtcctggtaatgcaaaattaccactcccgccaatgcttatgtttgacagaataactgaaatcaatgaaaataatggtacatttaataagggctctttaaaagctgaattagatattaaagatgatctttggttttttgattgtcattttaaaaaagatccggttatgccaggatgcttaggtttagatgcaatgtggcaactggta

SEQ ID NO: 285163 - DNA, 151 bp, Unknown
  Bacterial polypeptide expressing nucleotide sequence isolated from the Sargasso Sea
gttggactggcaaaaatcttgttatgaactaaccgaccttctgagatgtgcccgcggcgagcttttcggtccaggcaacgcgcggttgcccttgccgccgatgctcatgtttgatcgcatttccaatatagcagatgagggaggggctcat

SEQ ID NO: 285164 - DNA, 547 bp, Unknown
  Bacterial polypeptide expressing nucleotide sequence isolated from the Sargasso Sea
aaaaagaatagttacgaaaaagatgaactattaaaaagtggtcaaggcctgctaatgggaccaaacactggtaaactaccaattgaacccatgctcatggttgatcgaattagtgatatatatcaagatggtggtaaatatgataaaggcagaataaaggcagaattggacattgatgagagtctttggttttttcattgtcactttaaaaatgacccagtaatgccagggtgtttgggactggatggaatgtggcagcttgttggtttttttctaacatgggttgggggcaaaggcagaggaagagccttaggcgttggtgatgtgaaattcaaggggcagataaggccttaccacacaagagttacatataacatagatattaaaagacttttagaccgcgatggccaattaatggtttgggcagatgggaccgtaacaacaaatgaagaaaagactatttattttgcaaaaaacttacaagtaggcctatttaataacttaacctatgattttggtggagacccttcacaagattcattttaat

SEQ ID NO: 285165 - DNA, 516 bp, Unknown
  Bacterial polypeptide expressing nucleotide sequence isolated from the Sargasso Sea
tctctaataaaacaaaattttcatttgaagatcttatagcttgtggtaatcggaatttatttgataaaaatggccctcctcttccttctccaccaatgttaatgtttgatagaataactaaaattactaaagatagtggcgaatttaataaaggcgaggttaatgctgagcttgatctgaatcctaacctttggttttttaattgtcatttcaaaggggatccggtaatgccagggtgtttaggtctagatgcattatggcagttactaggcttttatttaggttggttgggtggaaagggctctggtagagctctttcagtaggaagtgttaagttttcaggacaaattttacctaaaaatagttctgtgacatattctttgaatatcaaaagagttttaatgaggaaattggtattaggaatagctgatgggaaagtaatttgtgatggaaatgaggtataccaagcaaatgaaattcgagtgggtctatttgaaaacaaggatgtcaaatgaa

SEQ ID NO: 285166 - DNA, 199 bp, Unknown
  Bacterial polypeptide expressing nucleotide sequence isolated from the Sargasso Sea
ttgcacttttcggagagaaacagctttggctatgatgatttaatcacttgtgctaacggcggtttgttcgggcctggcaatgcccaactgccggccccgccgatgcttatgtttgaccggatcatcaaaattaacgcgaccgggggtcgccacggtaagggcgagctggacgcagaattggatatcaagtcagaccttt

SEQ ID NO: 285167 - DNA, 211 bp, Unknown
  Bacterial polypeptide expressing nucleotide sequence isolated from the Sargasso Sea
aacccaggaagaggaagagctttaggagtaagcacagtaaaatttactggagaagttttaaagaatgtcaaaatggcaacatatgtaattgatatgaaaagaatattaattaaaggcgagacgactgttggtttagcaaacggaattcttatggcggatgataaaaaaatttactcggctgacggtctaaaagtaggattatttaaataat

SEQ ID NO: 285168 - DNA, 298 bp, Unknown
  Bacterial polypeptide expressing nucleotide sequence isolated from the Sargasso Sea
aatgaagcaaaaaaatagttacaattatcaggatttaattgactgtggaaacggtattctttttggagaaggtaatgcaaaattgcctctacctcctatgctcatgtttgatagaattacaaaaattgaaaataacactggatctttcaaacgagggtatctagaagcagaattagacattaaagatgatctttggttttttaaatgtcattttaataatgatccggtgatgcctggatgtcttgggctagatgctatgtggcaattggttggtttttaccttggtggactggagagc

SEQ ID NO: 285169 - DNA, 202 bp, Unknown
  Bacterial polypeptide expressing nucleotide sequence isolated from the Sargasso Sea
aagaggcagggcattaggtgtaagctctgtaaaatttacaggagaagttctaaagaatataaaaattgcttcatatgaaattgatatgaaaagaatacttattaaagaaggtgctactgtaggtttagctaatggtgttttaaaagcagatggaaaaaaaatatattctgcagaaaatttaaaagtaggattatttaaatga

SEQ ID NO: 285170 - DNA, 166 bp, Unknown
  Bacterial polypeptide expressing nucleotide sequence isolated from the Sargasso Sea
gatgaaccgtctcaatgcgttctcgcgcgaacagctgctggccagtgcccgcggcgagctgttcgggcccaacaagggccgcctccccaacgacccgatgctgatgttcgaccgcatcaaagatatccgcgacgacgggggtccacatggcaagggcctggtgcgc

SEQ ID NO: 285171 - DNA, 229 bp, Unknown
  Bacterial polypeptide expressing nucleotide sequence isolated from the Sargasso Sea
tatttaggttggttgggcaatcctggaaaaggaagagctttaggagttggcactgtaaagtttactggtgaagttttaaaaagtgtaaaaaaagcaaaatatgtaattgatatgaaaaaaattatatctcctggtggaacaactgttggtttagcaaacggtattttattagcggatgataaaaaaatttatagcgctgaaaatttaaaagtaggattatttaaataat

SEQ ID NO: 285172 - DNA, 274 bp, Unknown
  Bacterial polypeptide expressing nucleotide sequence isolated from the Sargasso Sea
atgcaaaaaaaatcatcatatagctttgaagagctaattaattgtggaaatggcaagctttttggtcctggaaatgccaaattacctcttcctccaatgctcatgtttgatagaataacagaagttagagaagataatggtgctttcaaaaaaggctctattactgctgaactggatataaaagatgacctttggttttttaattgtcattttaaagaagacccagttatgcccggatgtcttggtttagacgccaatgtggcaaattggtagg

SEQ ID NO: 285173 - DNA, 258 bp, Unknown
  Bacterial polypeptide expressing nucleotide sequence isolated from the Sargasso Sea
tatgaaaaaaaactcctatagctacgacgacctaattacttgtggaaatggtgaactttttggacctggtaatgctaaattaccccttcctccaatgttaatgtttgatagaataactgagattaacgacaataatggaacttttaataagggatccttaaaagctgaattagatattaaagacaatctttggttctttgattgtcactttaaatcagatcctgttatgcctggttgtttggggttagacgccatgtg

SEQ ID NO: 285174 - DNA, 308 bp, Unknown
  Bacterial polypeptide expressing nucleotide sequence isolated from the Sargasso Sea
aatgacgtttataccgcaaaatagttactctaaagatgatttgatagcgtgtgcagatggagagttattcactaagcctggagacggaagattaccatcagatcatatgttaatgtttgatgaaatatcaaatattgatgattacagcggaacttacaaaaaaggttcaataagtgcgcatttgaatattaatcctgatttatggtttttcaaatgccactttaaaactgatcctgtaatgcctggttgtttagggctagatgcaatgtggcagcttttaggattttatttgttatggtctgggcttc

SEQ ID NO: 285175 - DNA, 204 bp, Unknown
  Bacterial polypeptide expressing nucleotide sequence isolated from the Sargasso Sea
gaaaaggtagggcactaggagtaaatactgtaaaatttaccggtgaagtattaaaatcagctaaaatggcttcatacgaaatagatatgaaaagaattttaattaaagaaggaactaccgttgggttagctgatggaattttatcagctgatggaaaaaaaatatattccgctgaaaacttaaaagtaggattatttaaataat

SEQ ID NO: 285176 - DNA, 523 bp, Unknown
  Bacterial polypeptide expressing nucleotide sequence isolated from the Sargasso Sea
aatgacatttactccccaaaatcagtattccaaaaaagatctcatcgcatgtggtgatggtgagttatttggaattggaaatgggcgacttccctcagatcaaatgcttatgtttgatgaaatcgaaagtatattcgatagtggcggtgtttatgataagggtcatataaaagcaagcttaaatataaatcctgaattatggttttttgactgccactttaaagaagatccagtcatgcccggatgtcttggcttagatgctatgtggcaattggtgggtttttatttatgctggctaaagttacctggctacggaagagctttaggtgtcgaaaaagtcaaattttttggtcaagtaactcctaaggcaaaattagttgagtacaagattgacatgaaaagagttgttaatcgaggagcggttgttggctttggtgatggtgatatgtttgtcgatgggaaacatgtttacagcgcaaaaggtttaagagttggattatttaaagatacaagtgaattctag

SEQ ID NO: 285177 - DNA, 478 bp, Unknown
  Bacterial polypeptide expressing nucleotide sequence isolated from the Sargasso Sea
gctttgttcagaaggcagtctatttggtgatgataatgggaagcttcctaatagcgaaatgcttatgataaacagaattttgaagataaattctaatgaaggagattatgagaatgggcttttgattggggagttagatatcaaccctgatttatggttttttaagtgccattttaaaggagacccagtgatgcctgggtgcttaggtttagacgcaatgtggcaactcttaggattttacttgctttgggatggaaatcctggaattggtagagcccttggagcgggcgaggtaaaatttttcggtcaagtgctgccgaaagcacaattagtaagatatgaaatcagtattaaaagaattagaaagcaaaaattagttgttggctttgctgatgggaaaatgtttgttgataacaaagaaatttacacagcaaaaaatctaagggttggattatttaaagatccttcaaatttttaa

SEQ ID NO: 285178 - DNA, 297 bp, Unknown
  Bacterial polypeptide expressing nucleotide sequence isolated from the Sargasso Sea
gtcattttgaaatggatcctgtgatgccaggatgtctaggcttggatgcaatgtggcaattagttggattctatttgggatggattggtgaacctggacgtggaagggcactaggctcaggaaacgtaaagtttggtggtgaaattttaaaggactcaaaattggttgaatataaaattgaaatgaaaaaaataataaaaagaggtgttattgtaggagtaggcgatggagtggtagaagtagatggtaagcaaatatattctgccgaaggattaaaggtaggactgattaaataat

SEQ ID NO: 285179 - DNA, 371 bp, Unknown
  Bacterial polypeptide expressing nucleotide sequence isolated from the Sargasso Sea
aatgtttaatcctaaaagctcctataacaaagaagaactaattgcatgttcaaatggagaattatttacaaaagaaggtgatggtcgattgccttcagacctgatgttaatgttcgatgaaatagttaatattgatgatttttcaggaaattataacaaaggctcaattgaagctgtgctaaacgtaaaccctgatttgtggttttttaagtatcattttaaggaagatcctgtcatgccaggatgtctaggtcttgacgctatgtggcaacttctaggattttacttgttatggactggcttaccaggaattggaagagctcttggagctgaaaatgtaaaattctttggggcagttcttccaaaagcaa

SEQ ID NO: 285180 - DNA, 202 bp, Unknown
  Bacterial polypeptide expressing nucleotide sequence isolated from the Sargasso Sea
aaaaggaagagctttaggtgtgggtactgtaaaatttacaggtgaagttttacagagtgtgaaaaatgttagatatgaaatagatatgaagaaaattatgtctcctggaggaactactgttggtcttgcgaatgggattgttcttgcagataataaaaaaatatattcagcagaaagtttaaaagtaggattatttaaataa

SEQ ID NO: 285181 - DNA, 379 bp, Unknown
  Bacterial polypeptide expressing nucleotide sequence isolated from the Sargasso Sea
tatggaaccaaaaaatacttataataaaaatgaactactatctatggccaatggaaatatgtttgggcaagaaaatgcaaaactaccactagagccaatgttgatgattgatagaatattaaatatagaaaattctggcggtaaatatggtaaaggttctatcaacgcagaattggatataacggatgagtcttggtttttccactgccactttaaaggagacccagttatgccaggatgtttaggccttgatggtatgtggcaactagtgggttttttccttacctggagtggtgcaaaaggaaaaggacgagcgcttggcgtaggagatttaaaatttcgcgggcaagtaagaccgtatcatgataaagttgtttat

SEQ ID NO: 285182 - DNA, 281 bp, Unknown
  Bacterial polypeptide expressing nucleotide sequence isolated from the Sargasso Sea
tatgaaaaaaaattcatattcatatgatgatctaataagttgcggaaatggtcaactttttggtcctggaaatgccaaattacctcttccaccaatgcttatgtttgatagaataactgaaattaatgatgataatggggcttttaaaaaaggttctttaaaggctgaattagatattaaaaaaagtctttggttttttgattgtcactttaaagaagatccggttatgccaggatgtttaggtcttgatgctatgtggcaattagtgggtttttatttag

SEQ ID NO: 285183 - DNA, 211 bp, Unknown
  Bacterial polypeptide expressing nucleotide sequence isolated from the Sargasso Sea
aagggaagagctcttggcgtaggcgaagtaaaatttacaggacaagttcttaaaacagttaaaaaggtttcatatcatatttctttaaaaagacttatattaagaaaacttatacttggggtgggggatggtattcttaaagcagatggtgaaacaatttatgaggctaaagatatgaaagtcggattattttcaccagacaaaaagtaaa

SEQ ID NO: 285184 - DNA, 247 bp, Unknown
  Bacterial polypeptide expressing nucleotide sequence isolated from the Sargasso Sea
attaggtttctatcttggttggcttgggcaaccaggtaagggtagggcccttggggttggtgaggttaaattcactggtcaagttcttaaaacagtaaaaaaagttacttatcacatatcattaaaaagactcatattgagaaagttaatcctaggggtaggagatggaattcttcaagctgacggagaaacaatttatgaagctaaagatatgaaagttggtctattttcacctaataaaaaataa

SEQ ID NO: 285185 - DNA, 333 bp, Unknown
  Bacterial polypeptide expressing nucleotide sequence isolated from the Sargasso Sea
aatggctttttcaccgaaaaatagttactcaaaagaagaattattaggttgcgctaatggaaatctatttggagaagataatgggagactacctactccaaacatgcttatgtttgacaggatcactaaaatttcagattctgaaggaaaatataacaaaggaaagataatagctgagttagatgtgaacccagatttatggttttttgattgccatttcaaaggtgatccagtcatgccaggttgtttaggtttagacgctatgtggcaattagtaggattttatttatgttggttaggtaatcctgggagaggaagagctttgggggcttc

SEQ ID NO: 285186 - DNA, 233 bp, Unknown
  Bacterial polypeptide expressing nucleotide sequence isolated from the Sargasso Sea
ttacttaggttggctcggaaacccaggacggggaagagctttaggagtaagtaccgtaaaatttactggagaagttttaaagaatgtcaaaatggcaacatatataattgatataaaaagaatattaattaaaggtgaaacaactgttggcttagcaaatggaattcttttagcggatgataaaaaaatttactcagctgacggactaaaagtaggattatttaaaaaatgag

SEQ ID NO: 285187 - DNA, 235 bp, Unknown
  Bacterial polypeptide expressing nucleotide sequence isolated from the Sargasso Sea
aggattctatttaggttggattggaaatccaggaaaaggaagggcattaggagttggagctgtaaaatttactggtgaagttttacaaagtgtaaaaaatgtcagatatgagattgatatgaaaaaaattatgtctccaggaggtacaactgtaggtcttgctaatggggtggtattagcagataataaaaagatatattcagcagatagtttaaaagtgggtttatttaaataa

SEQ ID NO: 285188 - DNA, 253 bp, Unknown
  Bacterial polypeptide expressing nucleotide sequence isolated from the Sargasso Sea
atggaaaaaaaatcatcatatagctacaaagaattgattaattgtggaaatggcgagctttttggcccaggtaacgccaaattaccccttcctccaatgcttatgtttgatagaataacagaagttaaagaagataatggtgcatttagaaaaggctctattactgctgagctagatataaaagatgatctttggttttttgattgtcattttaaggaagatccagtgatgcctggatgtcttggtttagacg

SEQ ID NO: 285189 - DNA, 265 bp, Unknown
  Bacterial polypeptide expressing nucleotide sequence isolated from the Sargasso Sea
atgaaaaaaaactcatactcctataatgatcttataacctgtggaaatggtgaactttttggtcctggtaatgctaagttacctcttcctccaatgcttatgtttgatagaataactgaaatcaatgaaaataatggatcctataacaaaggttcgttaaaggctgaattagatattaaagatgatctatggttttttgattgtcattttaaaaaagatccagttatgccaggatgtttaggtttggacgccaatgtggcaaact

SEQ ID NO: 285190 - DNA, 337 bp, Unknown
  Bacterial polypeptide expressing nucleotide sequence isolated from the Sargasso Sea
aatgaccctgttatgcctggctgccttgggctagatggcatgtggcaaatagttggattttatttaacctggattggaggcaagggacgtggccgagccctgggagttggggatgttaagttcaaagggcaaatacgtccgtatcataaaaaaataatttatagtattgatattaagcgtattgtaaataaaaacaataaatatatgatttgggcagatggaacagtcactactgataaacaaaaaacaatttatttcgccaaaaatttgcaagtaggcctttttggcaatctcacttatgattttggtgaagatccttctctagattctttttaaa

SEQ ID NO: 285191 - DNA, 202 bp, Unknown
  Bacterial polypeptide expressing nucleotide sequence isolated from the Sargasso Sea
aaagggagagcattaggagtaggaactgtaaaatttactggagaagttttacaaaatgttaaattagttagatatgagattgatatgaaaaaaattatgtcacctggaggaacaaccgtaggtcttgcaaacggagttgttttagcagatgataaaaagatctattcagctgatagtttaaaagtaggattgtttaaataat

SEQ ID NO: 285192 - DNA, 463 bp, Unknown
  Bacterial polypeptide expressing nucleotide sequence isolated from the Sargasso Sea
ccaaaacctcccatgcttatgatggacaaaataatccatatatctgatcaaggaggtgcgtatggaaagggtgaaatcaaagctgagctcaatataaataaatctctttggttttttgattgccacttcaaaaatgatccagttatgccaggatgtttaggtctcgatggtttttggcaattgcttggtttttttctaacctgggctggtggaaaaggtaagggtagagcactcggggtaaaggacttaaagtttaaaggtcaggtccgaccatatcatgaaaagattacctataaaatagatataaagaaatttatcacaaagccaacacacatggtttggggtgatgctgttttggaggttaaaaataaagctatttattttgccaaagaccttcaggtgggtctctttgaaagtcttacttgggaccatggtaaagacccagcggtagatcctttttaat

SEQ ID NO: 285193 - DNA, 547 bp, Unknown
  Bacterial polypeptide expressing nucleotide sequence isolated from the Sargasso Sea
aatgaccaaaaaaaagcgcttctcaaaacaagatttattaagtagtggaatgggtaaactttttgaaacccttgatggtaaacttccaaaaccccccatgctaatgatggacaaaataatccatatatcagatgagggcggcgcttatgggaagggtgaaatcaaagctgagctcaatatagataaatctctttggttttttgattgtcactttaaaaatgaccctgttatgccaggatgtttaggtcttgatggattttggcaactgcttggtttttttctaacgtgggctggcggaaaaggaaaaggtagagctcttggggtaaaggacttaaagtttaaaggtcaggtccgaccatatcatgaaaagattacttataaaatagatattaaaaaatttatcacaaagcccacacacatggtttggggtgatgctgttttagaggttaaaaataaagctatttattttgccaaggatcttcaggtaggtctctttgaaagtcttacatgggaccatggcaaagatccagcggtagatcctttttaa

SEQ ID NO: 285194 - DNA, 547 bp, Unknown
  Bacterial polypeptide expressing nucleotide sequence isolated from the Sargasso Sea
tatgagtcgtaagtcgtcatttagcaaaaaagatctgttagaaattgcaaagggtcaattcagagataaaagtataggtaagctgcccctgcctccaatgttgatgatagatcgtataatagaaatttcagaagtaggtggtgattatgaaaaaggctatataaaagctgaaatggatatatctgataataattggttttttgaatgtcacttcaaaaatgaccctgtaatgcctggatgtcttggtttagatggattttggcagctgattggattttttctatcttgggcagggggaaaaggcaagggaagagctcttggggtaaaagatctgaagtttaaaggccaagtccggccatatcatgatatcattacctatacaattcatattagaaagtttattaaaaaaccaacttatatggcatggggcaatgctacgctatctgtaaataataaagaaatatattttgctaaagatctacaggtcgggttattcgaaaaactagtttgggatactgggatggacccatctgtagatcccttttaa

SEQ ID NO: 285195 - DNA, 553 bp, Unknown
  Bacterial polypeptide expressing nucleotide sequence isolated from the Sargasso Sea
tatgaaccagaagagtagctatactaatgaagacctcataaaaagtgggaatggcctattatttgggcctaccactggaaagcttcctaccccccccatgcttatggttgataggattttagaaatcaatgatagcgggggaaagtttaaaaagggaaagattctggctgagttggatattaatgatgagatgtggttttttaactgccattttaaaaatgaccccgttatgccaggctgtcttggacttgatggactttggcaactggttggtttctttctaacctggagtggtggaaagggaagaggcagagcattaggcgttggagatgtgaagttcaaaggacaaattcgtccttatcataccaaaataacttatagtatagatgttaaaaaattattgaatcggaatgatcaattaatgatttgggcagatgggactgtcaccactaatgataatcgaactatatattttaccaaaaacctacaggttgggttatttaataacctcacttatgattttggtggggacccttcccaagattcattctaa

SEQ ID NO: 285196 - DNA, 553 bp, Unknown
  Bacterial polypeptide expressing nucleotide sequence isolated from the Sargasso Sea
atgaatcagaaaaacagttatacaaataaagagttattaaaaagtagcaatggcctgttaatggggcccaatactggaaagttgccattgcctcccatgttaatggtagaccgtatcttagaaatcaaagattctggtggaaaatttaacaagggtaaaattattgcagagttagatattaatgaggatttatggttttttcattgccattttaaaaatgaccccgtaatgcctggatgccttgggcttgatggattgtggcaactggtcggtttctatttaacttggaatggtggaaagggaagaggacgtgcgctaggagttggagatgtaaaattcaaagggcagattcgaccttatcatactaagataacatataacattgatattaaaaaattattaattagaaatgaacaggtaatgatctgggcagatggcaatgttaccaccagtgatgataaaactatatattttgcaaaaaatctacaggttggactatttaataatctcacatatgattttggtggggacccatcccaagactctttctaat

SEQ ID NO: 285197 - DNA, 547 bp, Unknown
  Bacterial polypeptide expressing nucleotide sequence isolated from the Sargasso Sea
atgagtagaaagtcttcatataataaaaaagatctattagaaattgctaacggtcaattcattgatagcagtattgggaaactacctttacctccaatgttaatgattgatcgtattatagaaatttcagaagatggtggtaaatatggaaaaggttttataaaagcggaattagatatatcagataatgattggttttttaaatgccattttaaaaatgatcctgttatgcctggatgtttaggcttagatggattttggcaattaataggattctttctatcatggtgtggcggagaaggcaagggtagagctttaggcgtgaaagatttgaagtttaaaggtcaagtaaggccataccatacaattattacatatacgattcatattagaaaatttattaaaagacctacatatatggcttggggagatgctagtctttcagtgaaaaataaagaaatatattttgctaaagatctgcaggttggattattcgaaaaattagtctgggatactggcatggatccatctttagaccctttttaat

SEQ ID NO: 285198 - DNA, 226 bp, Unknown
  Bacterial polypeptide expressing nucleotide sequence isolated from the Sargasso Sea
ggataaacccggtagaggtagagcactaggcgcttctgaagtcaaattttttgggcaagttctaccctcagctaaacttgttacccttaaaattgatatgaaaagaattcttaatcttgatttaacagtagggattggtgaagggtctatgcttgtagatggtagagaaatttatagtgccaagggcctaaaagttggtcttttccaagatacatcaagtttttaa

SEQ ID NO: 285199 - DNA, 257 bp, Unknown
  Bacterial polypeptide expressing nucleotide sequence isolated from the Sargasso Sea
tatgaaacaaaattcttttacatatgagcagttaattgattgtgcaaaaggtgtgctttttggaaaaggtaatgcacaacttccaatgccacccatgttaatgtttgatagaattacttccataaatgaaagtggaggattattttctaaaggagaagttatagcagaattagatattaagaaagatctatggttttttgaatgtcattttaaaggtgatccggtaatgccaggttgtttaggtttggatgcaatgt

SEQ ID NO: 285200 - DNA, 226 bp, Unknown
  Bacterial polypeptide expressing nucleotide sequence isolated from the Sargasso Sea
tctgggctggttaggaaatcctggcaaaggaagagctctaggagttggtactgtaaaatttactggtgaagttttacaaaatgttaaaaatgtaagatacgaaatagatatgaagaaaattatgtctcctagtggaactacggtaggtcttgccaatggaattgtacttgctgacgacaaaaaaatatattcagcagagagtttgaaagtagggttatttaaataa

SEQ ID NO: 285201 - DNA, 253 bp, Unknown
  Bacterial polypeptide expressing nucleotide sequence isolated from the Sargasso Sea
atgaaaaaaagttcctttaattatgatgaattaatgagctgcgcaaatggcgagctttttggccctggaaacgcaaagttaccttctccaccaatgctaatgtttgatagaattactgaaattagtgaaaaaaatggagcttttaacaagggactaatgaaggctgaacttgatataaaagatgatttgtggttttttgattgtcactttaaagaagatccagtaatgccaggatgtttaggtttagatgcga

SEQ ID NO: 285202 - DNA, 502 bp, Unknown
  Bacterial polypeptide expressing nucleotide sequence isolated from the Sargasso Sea
ttatttaaagaatcatttaattatcaagaattgattgattgtgcaaagggaacactagcaggagtagattttcctaaattgcctttaccacctatgcttatgtttgacgaagtgacaagtataaaagaaactggaggagcctataataaaggtactgcacacgcacaatttaaaatcacacctgataaatggtttttcccttgtcactttaaaaatgacccagtcatgcccgggtgtttgggaatggatgctctatggcaactattaggcttttctcttggaaatatgggtggaagaggtaaaggaagagctatatcagtaggtgaagtaaaatttactggacaggtattaccaatagctaaaaaggtagaatatttgcttgattttaaacgtattattatgaggaaactaattcttggaattgctgatgggaaagttatatgtgatgacaaaatagtttttgaagcatctgatattagagttgggctttttaaagattagt

SEQ ID NO: 285203 - DNA, 346 bp, Unknown
  Bacterial polypeptide expressing nucleotide sequence isolated from the Sargasso Sea
tatgagtcgtaagtcgtcatttagcaaaaaagatctgttagaaattgcaaagggtcaattcagagataaaagtataggtaagctgcccctacctccaatgttgatgatagatcgtataatagaaatttcagaagtcggtggcaattatgacaaaggctatataaaagctgaaatggatatatctgataataattggttttttgaatgtcacttcaaaaatgaccctgtaatgcctggatgtcttggtttagatgggttttggcagctgattggattttttctatcttgggcaggaggaaaaggtaagggaagagctcttggggtaaaagatctgaagttaaaggcc

SEQ ID NO: 285204 - DNA, 523 bp, Unknown
  Bacterial polypeptide expressing nucleotide sequence isolated from the Sargasso Sea
gatgaaatttacagaaaagaattcttttaccaaagaagaacttcaactttgctcaaacggaaagctatttcatgaaaatgatggaaagcttccaagtagcaatatgctgatgttagatagaattacttcaatatcaggagatcagggtaattactcaaatggactaatagaggcagaacttgatatcaatgagaatctttggttttttgattgtcattttaaagatgatccagttatgcccggatgcttaggtttggacgcaatgtggcaaattttagggttttatttactttggtctgggaatcatggaataggaagagctcttggtgccgggcaggtaaaattttatggtcaagtgcttcctcatgctaaaacggttaaatatgagattcatgtaaaaagaatgctctcaacaaaaactgttcttggagttgcagacggattaatgtacgttgatgggaaggaaatttattcagcgaagaacttaaaagttgggctttttgagaaccctggtaatttttga

SEQ ID NO: 285205 - DNA, 268 bp, Unknown
  Bacterial polypeptide expressing nucleotide sequence isolated from the Sargasso Sea
atgaagcaaaaaaatagttataattatcaagatttaattgactgtggaaatggtattctttttggagaaggaaatgcaaaattacctcttcctccgatgctcatgtttgatagaattacaaaaattgaaaataatactggatctttccaacgaggatatttagaagcggaattagacattaaagatgatctttggttttttaaatgtcattttcaaaatgatcctgtaatgcctggatgtcttggattagacgctatgtggcaattag

SEQ ID NO: 285206 - DNA, 241 bp, Unknown
  Bacterial polypeptide expressing nucleotide sequence isolated from the Sargasso Sea
atgaataaagtatttaaacctaaagacagctattcaaaagaagatcttgttgattgcggatttggtcaactatttggtgaaggcaatggcaggcttccagttgatccaatgcttatgtttgatcgaatcactaagataaataatactggtggtaaatattcaaaaggcgaggtttatgcagagcttgatgtaaatcctgatctctggttctttgattgccatttcaaagaagatcctgtta

SEQ ID NO: 285207 - DNA, 414 bp, Unknown
  Bacterial polypeptide expressing nucleotide sequence isolated from the Sargasso Sea
tatggataaaaaatcatcatataattatgaagagctaatagattgtggaaatggtaagctttttgggtcaggaaacgcaaaattgcctcttccacctatgttgatgtttgacagaatatcagaaattagtgaaaataaaggtgaatttaaaaagggtttaattaaagctgagctagacataaaagataatttgtggttttttgaatgtcactttaaagatgactctgttatgccaggttgcttaggattagatgcaatgtggcaactagtaggtttttatttaggttggcttggtaatcctggaaaaggaagggcattaggagttaatacggtaaaatttacaggtgaagtattaaaaaatgtaaagatggcaagttatgaaattgatatgaaaagaatactaataaaagaagg

SEQ ID NO: 285208 - DNA, 358 bp, Unknown
  Bacterial polypeptide expressing nucleotide sequence isolated from the Sargasso Sea
tgacaaaggattaatgaaggctgaacttgatattaaagatgatttatggttttttgattgtcactttaaagaagatccagttatgccaggatgtttaggtctagatgcaatgtggcagttggttggattttacttgggttggcttggaaatccaggaagaggaagagctttaggggtaagcacagtgaaatttactggagaagttttaaagaatgtcaaaatggcaacatatataattgatataaaaagaatattaattaaaggagaaacaactgttggcttggcaaatggaattcttctggcggataataaaaagatttactcagctgatggtctaaaagtaggattatttaaataa

SEQ ID NO: 285209 - DNA, 248 bp, Unknown
  Bacterial polypeptide expressing nucleotide sequence isolated from the Sargasso Sea
gtggcagttggtaggattttttctgggatggcttggaaatcctggaaaaggacgagctttgggggtaggtacagtgaaatttactggcgaagttttacaaagtgtcaaaaatgtaagatatgaaatagatatgaaaaaaattatgtcacccggaggaacaactgttggccttgccaatggtatcgttctcgcagataataaaaaaatatattcagctgaaagtttaaaagtcggattatttaaataat

SEQ ID NO: 285210 - DNA, 282 bp, Unknown
  Bacterial polypeptide expressing nucleotide sequence isolated from the Sargasso Sea
ttatgccaggatgtctaggtttagatgctatgtggcaattagtaggattttatcttggctggctgggtaaacctggcaaaggtagagctttaggagtgaatgctgtaaaatttacaggagaagtactaaaaaatattaaaatggctagttacgaaatagatatgaaaagaattcttataaaggaaggtactacagtaggactagcaaatggtatactcaaagcagatggtaaaaaaatatattcagctgaaaacttaaaagtaggattatttaaaaaatgaa

SEQ ID NO: 285211 - DNA, 377 bp, Unknown
  Bacterial polypeptide expressing nucleotide sequence isolated from the Sargasso Sea
aatgaagcaaaagaatagttataattatcaagatttaatagattgcggaaatggtattctttttggagagggtaatgccaagttaccgcttcctcctatgcttatgtttaatagaattacaaaaattgaaaataatactggatctttcaaacgaggttatttagaagcggaattagacatcaaagatgatctttggttttttaaatgtcattttcaaaatgatccagtaatgcccgggtgtcttggattagatgctatgtggcaattggttggtttttttcttggttggactggagaacctggaaaagggagagctttaggagtaagtactgttaaatttacaggtgaagtattaaaaaaagtaaagatagctacct

SEQ ID NO: 285212 - DNA, 523 bp, Unknown
  Bacterial polypeptide expressing nucleotide sequence isolated from the Sargasso Sea
atgtttaatcctaaaagctcctataacaaagaagaactaattgcatgttcaaatggagaattatttacaaaagaaggtgatggtcgattgccatcagatctaatgttaatgttcgatgaaatagttaacattgatgatttttcaggaaattataataaaggctcaattgaagctgtgctaaacgtaaaccctgatttgtggttttttaagtatcattttaaggaagatcctgtcatgccaggatgtctaggtcttgatgctatgtggcaacttcttggattttacttgttgtggactggtttaccaggaattggaagagctcttggagctgaacatgtaaagttctttggacaagttcttccaaaagcaaaaaaagttgtatataaattagatattaaaagggttatcaatagaggtgcaatagttggtttagcagatggtgaaatgtttgtcgataataaaaaaatctatagcgctgaaaaattaaaagttggtttatttaaggatcctagtaatttctgat

SEQ ID NO: 285213 - DNA, 523 bp, Unknown
  Bacterial polypeptide expressing nucleotide sequence isolated from the Sargasso Sea
atgtttaatcctaaaagctcctataacaaagaagaactaattgcatgttcaaatggagaattatttacaaaagaaggtgatggtcgattaccctcagacctaatgttaatgttcgatgaaatagttaatattgatgatttttcaggaaattataacaaaggttcaattgaagctgtgctaaacgtaaaccctgatttgtggttttttaagtatcattttaaggaagatcctgtcatgccaggatgtctaggtcttgacgctatgtggcaacttctaggattttacttgttgtggactggcttaccaggaattggaagagctctcggagctgaaaatgtaaagttctttggacaagttcttccaaaagcaaaaaaagttgtatataaattagatattaaaagggttatcaatagaggtgcaatagttggtttagcagatggtgaaatgtttgttgataataaaaaaatctatagcgctgaaaagttaaaagttggtttatttaaggatccaagtaatttctgat

SEQ ID NO: 285214 - DNA, 310 bp, Unknown
  Bacterial polypeptide expressing nucleotide sequence isolated from the Sargasso Sea
aatgaaacaaaaaaacaattacaactataacgaattaattgactgtgcaaatggtgacctttttggtgaagggaatgcacgtttaccatcaccaccgatgttgatgtttgacagaattacccaaatccaatcagatgaaggaaagtttaaaaaaggtataataaaagctgagttggatattaaaaataatatgtggttctttgattgtcattttaagagtgatcctgtgatgcctggatgtcttggattagacgcaatgtggcaattagttgggttttacttaggatggataggtgaaccaggtaaagga

SEQ ID NO: 285215 - DNA, 396 bp, Unknown
  Bacterial polypeptide expressing nucleotide sequence isolated from the Sargasso Sea
atagaattactgaaattagtgaaaaaaatggagcttttgacaaaggattaatgaaggctgaacttgatataaaagatgatatgtggttttttgattgtcactttaaagaagatccagtaatgccaggatgtttaggtttagatgcgatgtggcaactagttggtttttacttaggttggctgggaaatcctggaagaggaagagctctgggagtaagcacggtaaagtttacaggcgaggttttaaaaaatgtcaaaatggcgacatatattattgatatgaaaagaatattgattaaaggtgaaacaacagttggactagcaaatggtattcttcttgctgatggcaaaaagatatactctgcagacagtctaaaagtaggattatttaaataat

SEQ ID NO: 285216 - DNA, 263 bp, Unknown
  Bacterial polypeptide expressing nucleotide sequence isolated from the Sargasso Sea
tggtttagatgctatgtggcagctagttggcttttttcttggttggctgggaaatccaggaagaggtagagcgttaggtgtaagcactgtaaaatttactggtgaagttcttaaaaatgtcaaaatggctacatatgaaatagatatgaaaagaattcttattaaaggtgaaacaactgtaggtcttgcaaatggaatattgcttgctgatggaaaaaagatttatagtgcagaaaatcttaaagtaggattatttaaataat

SEQ ID NO: 285217 - DNA, 280 bp, Unknown
  Bacterial polypeptide expressing nucleotide sequence isolated from the Sargasso Sea
tatgccaggttgcttaggcttagatgctatgtggcaattagttggtttttatttgggttggttaaaaaatccagggaaaggaagagctttaggagttggagcagtaaaatttacaggagaagttttaaaaaatattaaaatcgcttcatatgaaatagatatgaaaagaattcttataaaggagggtacaactgtgggattggcaaatggtatacttaaggcagatggaaaaaaaatatattcagcagaaaatttaaaagtggggttgtttaaacaatga

SEQ ID NO: 285218 - DNA, 350 bp, Unknown
  Bacterial polypeptide expressing nucleotide sequence isolated from the Sargasso Sea
attggaagcagaattagatatcaaagatgatttgtggttttttaaatgtcattttcaaaaagaccctgtaatgcctgggtgtcttggattagacgctatgtggcaactggttggattttatcttggttggacaggagaaccaggtaaaggaagggctttaggagtaagtacagttaaatttactggtgaagtgttaaaaaaaattaagatggctacttataaaataaatataaaaagaattttaaaaaaagagggtgctgtagtaggattagcaaatggtactttggacgctgatggaaaagtgatctatgtagcagaaaatttgaaagtaggtttgtttaaatcatgag

SEQ ID NO: 285219 - DNA, 523 bp, Unknown
  Bacterial polypeptide expressing nucleotide sequence isolated from the Sargasso Sea
atgtttaatcctaaaagctcatataacaaagaagaactaattgcatgttcaaatggagaattatttacaaaaaaaggtgatggtcgattgccttcagacttaatgttaatgttcgacgaaatagttaatattgatgatttttcaggaaattataataaaggctcaattgaagctgtgctaaacgtaaaccctgatttgtggttttttaagtatcattttaaggaagatcctgtcatgccaggatgtctaggtctagacgctatgtggcaacttctaggattttacttgttgtggactggcttaccaggaattggacgagctcttggagctgaaaatgtaaagttctttggacaagttcttccaaaagcaaaaaaagttgtatataaattagatattaaaaggattatcaatagaggtgcaatagttggtttagcagatggtgaaatgtttgttgataataaaaaaatctatagcgctgaaaagttaaaagttggtttatttaaggatccaagtaatttctgat

SEQ ID NO: 285220 - DNA, 298 bp, Unknown
  Bacterial polypeptide expressing nucleotide sequence isolated from the Sargasso Sea
ccactttaaagaggatccagtaatgccagggtgcttagggctagatgcaatgtggcagttagttggattttatcttggttggcttggcaacccaggaaagggaagagctttaggtgttggtacggtgaagttcacaggtgaagttttaaaaaatgtcaaaattgctgagtatataattgatatgaaaagaattttaattaaagaagggactacagttgggttagctaacggagttttattagcagatggtaaaaaaatttactctacagaaaacttaaaagttggattatttaaataa

SEQ ID NO: 285221 - DNA, 526 bp, Unknown
  Bacterial polypeptide expressing nucleotide sequence isolated from the Sargasso Sea
aatgaagtttaatcctaagaatacttacaataaagaagaacttattgcatgttcaaatggtaacttatttactaaggagggagatggtagattaccctcagacctaatgctgatgttcgatgaaataattaatattgatgatttttcaggatattataaaaaaggttcaattgaagctgttcttaatataaatccagacctgtggttttttaaatatcactttaaagaagatcctgttatgccagggtgtcttggtcttgatgcaatgtggcaattacttggattttatcttttgtggactgggttacctggtattggaagagccttgggtgcagataatgttaagttttttggtcaagtacttccaaaagcaaaaaaagttgtatacaagttagatattaaaagagtaattaatagaggtgctatagttggcttggcagatggtgaaatgtttgtagatgaaaagaaaatctacagtgctgaaaagttaaaagttgggttgtttaaagatccaagcaatttctaa

SEQ ID NO: 285222 - DNA, 405 bp, Unknown
  Bacterial polypeptide expressing nucleotide sequence isolated from the Sargasso Sea
aatggctttttcacctaaaaatagttattcaaaagaagaattgttagattgcgcagatggaaatctatttggagaagataatggaaaattacctactccaaatatgcttatgtttgacagaatcacaaaaatttcagattcagaaggaaaatataagaaaggtaaaataattgcagagttggatgtaaaccaggatctatggttttttgattgccattttaaaggagatccagtaatgccaggttgtttgggtttagacgcaatgtggcaattagtaggattttatttatgttggttaggtaatcctggaagaggaagagcattaggagcatcagaggttaaattctttgggcaagttttgcctactgctaagaaagtaactttaacaattgatatgaaaaggat

SEQ ID NO: 285223 - DNA, 273 bp, Unknown
  Bacterial polypeptide expressing nucleotide sequence isolated from the Sargasso Sea
ctggatgtttaggacttgatgcaatgtggcaattagttggtttttatttaggctggcttggaaaccctggtagaggaagggcactaggagttagtacagttaagtttactggtgaggttttaaaaaatgttaaacttgcaacttatgaaattgatatgaaaagaatattaattaaagagggtacaactgtaggattagctaatggtatactaaaagctgatgacaaaaaaatatactctgcagaaaacttaaaagtaggattatttaaataat

SEQ ID NO: 285224 - DNA, 351 bp, Unknown
  Bacterial polypeptide expressing nucleotide sequence isolated from the Sargasso Sea
taattaaagcagagctggatgttaaagacaatctttggttttttgattgtcactttaaggaagatccagtaatgccaggatgtttgggtttagatgccatgtggcaactagtaggattttatcttggttggcttggaaacccaggaaaaggaagagcattgggtgttggatcagtaaaatttacaggtgaagtattaaaaaatgttaaaatagctgaatatataattgatatgaaaagagttttaataaaagaaggtactacagtaggtttagctaatggagttttgttagctgatggaaaaaaaatttatactactgaaaacttaaaagtaggattatttaaatcatgaa

SEQ ID NO: 285225 - DNA, 421 bp, Unknown
  Bacterial polypeptide expressing nucleotide sequence isolated from the Sargasso Sea
tatgaaaaaaagttcctttaattacaacgaactaattgattgcgctaatggtaaattatttggtccaggtaatgcaaaattaccttctccaccaatgctaatgtttgatagaattacagaaataactgagagtaagggtttttataaaaaaggatctatgaaagccgaacttgatattaaagataatttatggttctttgattgtcattttagagaagatccagtaatgccaggttgtcttggtttagatgctatgtggcagctagttggcttttttcttggatggcttggaaatccaggaagaggtagagcattaggtgtaagcactgtaaaattcactggggaagttcttaaaaatgtcaaaatggcaacatatgaaatagatatgaaaagaatttctgttaaagggagaacactgtag

SEQ ID NO: 285226 - DNA, 361 bp, Unknown
  Bacterial polypeptide expressing nucleotide sequence isolated from the Sargasso Sea
gatgaatacatttacacctcaatctagctatagttatgaagaaatcattgagtgtgggaaaggaaatttatttggaaagggaaatgcccaactaccagcacctcctatgcttatgtttgatcgcatcactaatgtcaataaagatggtggggtacatgggaaaggagaaataactgctgaactggatataaatgcagatttatggttctttaaatgtcatttcttgggtgatcctataatgccaggatgtttgggtctggacgctttatggcaaatgttaggtttttatctaggttggcttggatatccaggaaaaggccgtgctttgggtgttggagaaataaaatttgtcgaagaataa

SEQ ID NO: 285227 - DNA, 403 bp, Unknown
  Bacterial polypeptide expressing nucleotide sequence isolated from the Sargasso Sea
tatgtttgatagaattacagaaattaatgacgacaaaggagcttttaaaaaaggtttattaaaagctgagttagatattaaaaatgatctttggttttttgattgtcactttaaagaagatcctgttatgccaggatgtttaggattagatgctatgtggcaattagttgggttttatctaggctggataggaaatcctggaaaaggaagggcattaggagttggaacggtaaagttcacaggtgaagtattacaaaacgttaaactggtaacgtatgaaattgatatgaaaaaaattatgtctccaggtggaacaactgttggtctggctaatggagtggtattggctgatggaaaaaaaatttattcagcagatagtttaaaagtaggattatttaaataa

SEQ ID NO: 285228 - DNA, 311 bp, Unknown
  Bacterial polypeptide expressing nucleotide sequence isolated from the Sargasso Sea
ttttgattgtcattttcaaaatgatcctgttatgccaggatgtttaggtttagatgctatgtggcaattagttggttttttcttgggttgggtgggagagccaggaaaaggtagagctttaggagtaaattctgtaaaatttacaggagaagtactcaaaaaagtcaaaatggctacttatgaaattaatatgaaaagaattttaaaaaaagaaggtgcagtagttggtttagctaatggtatacttacagctgatggaaaaaaaatttatacagctgaaaacttgaaagtgggattatttaaatcatgaa

SEQ ID NO: 285229 - DNA, 319 bp, Unknown
  Bacterial polypeptide expressing nucleotide sequence isolated from the Sargasso Sea
atgaaacaaaattcatttacctatgatcaattaattgattgtgcaaaaggtgttctttttggaaaagggaatgcacaacttccaatgccacctatgttaatgtttgacagaattacttcaataaatgagaatggaggagtatttgctaaaggtgaggttattgcggaattagatattaaagaagacttatggttttttgaatgtcattttaaagatgatccagtaatgccaggttgtttaggtttggatgctatgtggcaattactcggtttttacttaggatggcttggtcaaccaggaaagggtagagctttaggag

SEQ ID NO: 285230 - DNA, 410 bp, Unknown
  Bacterial polypeptide expressing nucleotide sequence isolated from the Sargasso Sea
gatgaaaaaaaattcctacacttatgatgaactaattaattgtggagaaggaggtttatttgggccagaaaatgcaaaacttccacttcctccaatgctgatgtttgatagaataacagaaattagcgaaaaaaatgggacttataaaaaaggtataattaaagctgagttagacattaaagataatttatggttttttaattgccattttaaagaagatccagttatgcctggatgtttaggtttagatgcaatgtggcaattagttggtttttatctcggctggttaggaaagccaggaaaaggcagggcattgggagtaaatactgtaaaatttactggtgaagtattaaaatcggtaaaaatagctacatatgaaataaatatgaaaagaattttgattaaagaag

SEQ ID NO: 285231 - DNA, 523 bp, Unknown
  Bacterial polypeptide expressing nucleotide sequence isolated from the Sargasso Sea
atgtttaatcctaaaagctcctataacaaagaagaactaattgcatgttcaaatggagaattatttacaaaagaaggtgatggtcgattaccctcagacctaatgttaatgttcgatgaaatagttaatattgatgatttttccggaaattataacaaaggttcaattgaagctgtgctaaacgtaaaccctgatttgtggttttttaagtatcattttaaggaagatcctgtaatgccaggatgtctaggtcttgacgctatgtggcaacttctaggattttacttgttgtggactggtttaccaggaattggaagagctcttggagctgaaaatgtaaagttctttggacaagttcttccaaaagcaaaaaaagttgtatataaattagatattaaaagggttatcaatagaggtgcaatagttggtttagcagatggtgaaatgtttgttgataataaaaaaatctatagcgctgaaaagttaaaagttggtttatttaaggatccaagtaatttctgat

SEQ ID NO: 285232 - DNA, 421 bp, Unknown
  Bacterial polypeptide expressing nucleotide sequence isolated from the Sargasso Sea
atgaaaaaaaattcatattcctatgatgaccttataacatgcggaaatggtgatctttttggtcctggcaacgcaaaactaccacttccaccaatgcttatgtttgacagaataacagaaataaatgaaaataatggtgcatttaaaaaaggttccttgaaagctgaattagatattaaaaatgatctttggttttttgattgtcattttaagaaagatccagttatgccaggatgtttaggtttagatgcaatgtggcaactggtaggattttttctaggttggcttggaaatcccgggaaaggaagagctttaggtgtaggtactgtaaaatttacaggtgaagttttacagaatgtaaaaaatgtaagatacgaaatagatatgaagaaaattatgtcacctggagggacaaccgtag

SEQ ID NO: 285233 - DNA, 355 bp, Unknown
  Bacterial polypeptide expressing nucleotide sequence isolated from the Sargasso Sea
aagggctctattactgctgagttagatattaaagatgacctttggttttttaattgtcattttaaagaagatccagttatgcctggatgtcttggtttagatgcaatgtggcagctagtaggtttttatttaggatggcttggcaatcctggtaaaggaagagccttaggggttggcactgtaaagtttactggtgaagttataaaaagtgtaaaaaaagcgaaatatataattgatatgaaaaaaattatgtctccaaatggaacaacagttggtttagcaaatggtgttttattagcagacgaaaaaaaaatttactcagcagaaaatttaaaagtaggattatttaaataat

SEQ ID NO: 285234 - DNA, 371 bp, Unknown
  Bacterial polypeptide expressing nucleotide sequence isolated from the Sargasso Sea
tatgaaaaaaagttcctttaattacaacgaactaattgattgtgctaatggtaagttatttggtccaggtaatgcaaaattaccgtctccgccaatgctaatgtttgatagaattacagaaataactgagagtgagggtttttataaaaagggctctatgaaagctgaacttgatattaaggacaatttatggttttttgattgtcattttaaagaagatccagttatgccaggttgtcttggtttagatgctatgtggcagctagttggcttttttcttggttggctgggaaatccaggaagaggtagagcgttaggtgtaagcactgtaaaatttactggtgaagttcttaaaaatgtcaaaatggcta

SEQ ID NO: 285235 - DNA, 302 bp, Unknown
  Bacterial polypeptide expressing nucleotide sequence isolated from the Sargasso Sea
ttgtcattttaaatctgaccccgttatgccaggttgcttaggtttagatgcaatgtggcagctagtaggtttttatcttggatggctaggaaatcctggcaagggtagagcacttggtgttgggacagtaaaatttacaggagaagttttacaaagtgtaaaaaatgtaaggtatgaaatagatatgaaaaaaattatgtcaccaggaggcacaactgtgggacttgcaaatggtgttgtttttgcagataataaaaaaatatattcagcagatagtttaaaggtgggattgtttaaataat

SEQ ID NO: 285236 - DNA, 517 bp, Unknown
  Bacterial polypeptide expressing nucleotide sequence isolated from the Sargasso Sea
atgggcaaaaaacacgtatttagcacagacgatcttataaagcatggtgagcaggcaatgtttggcgcaggcaatgcacgtttacctatcgatcaaatgcgcatgatggatcgtatctccaagatgactgaagatggtggtaagtatggccgtggtgaggtgattgcagagttagatattgatcctggtcagtggtttttcaaatgccactttgtggatgatccggtgatgcctgggtgtctgggtctcgatgcattgtggcaacttctggggttttttctggcttggagtggtggcaaaggcagagggcgtgctttgggttgtggtgaggtgaaattcacaggtcaggtattgccaacctctggcatggtgtcttaccagctggatattaaacgtgtgatcaatgcttcgttgactttaggtattgctgatggtgtggttttgctggaagaccgtgttatctatactgctaaaaaccttcgcgtaggcttgttcacttccacagatgatttgtagg

SEQ ID NO: 285237 - DNA, 364 bp, Unknown
  Bacterial polypeptide expressing nucleotide sequence isolated from the Sargasso Sea
tttaagaagggttttataaaagctgaacttgatatcaaagataacttgtggttctttgattgtcattttagaaaagatccggttatgccaggttgtttagggttagacgctatgtggcaattagttggtttttatttaggatggataggagagcctggaaaaggaagagctttgggtgtaaattcagttaaatttactggagaggtgttaaaaaatataaaattagcaacctatgaaattaatatgaaaagaattttaaagaaagaagggacagttgtaggattagcaaatggaattttaagtgctgatggaaaaataatttatagagcagagaatttaaaagtaggtttatttaagtcatgaa

SEQ ID NO: 285238 - DNA, 349 bp, Unknown
  Bacterial polypeptide expressing nucleotide sequence isolated from the Sargasso Sea
atgaaacaaaattcctttgcatatgaagaactaattgattgtggtaaaggagttctttttggaaaagataatgcgcaactgccactacctccaatgttaatgtttgatagaattacttctattaatgaaactggtggctttttttcaaaaggagaagttattgctgaattagatataaaagaggatttatggttttttgaatgtcactttaaaaatgatccagttatgccaggttgtttaggtttagatgctatgtggcaattattaggtttttatcttggctggcttggacaaccaggtaaaggtagagctctaggtgttggtgaagttaagtttacaggacaagttc

SEQ ID NO: 285239 - DNA, 499 bp, Unknown
  Bacterial polypeptide expressing nucleotide sequence isolated from the Sargasso Sea
tatgcaaaaaaacagttttaattacgatgaattaattgcttgtggtaaaggtgatcttttcggcgaaggtaacgcaaaacttcccctgccaccaatgttaatgtttgacagaatcacagaaattaaaaaagatataggtgaatttaagaaaggtttaatcaaagcagaattagatataaaagataacttatggttttttgactgtcattttcagaatgatcctgtgatgccagggtgcttaggattagatgcaatgtggcaattagtaggattttatttaggatggattggagaaccaggtaaagggagagctttaggtgttaattcagtaaaatttactggagaagttcttaaaaaagtcaaaatggcaacttatgaaattaatatgaaaagaattttaaaaaaagagggtgctgtagttggtcttgctgatggaatattaactgctgatggaaagataatttacaaagctgaaaacttaaaagttggatttatttag

SEQ ID NO: 285240 - DNA, 408 bp, Unknown
  Bacterial polypeptide expressing nucleotide sequence isolated from the Sargasso Sea
aatgactgatcgaccatcgaagatagactatgatggcttaataagttgtgcgaaaggagagatgtttgggccaggaaatccacagttgccaatgcctcctatgcttatgtttgataggataatagaaatttcagataatgctggaaaagcttcaaaagggcatgttgtcgctgaatttcaaatacaaccctcacattggttttttgagtgtcattttcaaggtgatccagtaatgccaggatgtcttggtttagacgctttgtggcagttgacaggttttaacctaggttggcgtggaatggtaggtaaaggaagggctcttggagtcggagaggtaaagttctcaggcatggtcactccaaaaacgtcccttgtgactttatctgtagaatttacacgagtaattga

SEQ ID NO: 285241 - DNA, 508 bp, Unknown
  Bacterial polypeptide expressing nucleotide sequence isolated from the Sargasso Sea
aatgaaacaaaaaaacagttacaactataacgaattaattgactgtggaaacggcaacctttttggtgaaggaaatgcacgtctgccgttaccaccgatgctaatgtttgatagaataacagaaataaaatctggtctaggtaaatttaaaaaaggtatagttagagctgaactcgatataaaagataagatgtggttttttgactgtcattttaaagaagaccctgtaatgccaggatgtttgggtttggatgcgatgtggcagctagttggtttctaccttggttggatgggtgaaccaggcaaaggacgtgctttaggtgttaattctgttagatttacaggagaggttcttaaaaaggtcaaaatcgcaacctatgaagttgatatgaaaaaaattttaaaaactgagggtggaacggttggttttgctgatggaattttaaaggcagatggaaaacaaatatattctgctgaaaatttaaaagtaggagtttataagaaatga

SEQ ID NO: 285242 - DNA, 355 bp, Unknown
  Bacterial polypeptide expressing nucleotide sequence isolated from the Sargasso Sea
tatgaggcaaaattctttcagttatgaacagcttattgattgtgctaaaggtttactttttggaaaaggtaacgctcaacttcctatgcctccaatgcttatgattgatagaataactaaaattaatgaaactggtggcaatttttctaaaggtgaagtaattgctgaacttgatataagctcagatttatggttttttaaatgtcattttaaggatgatcctgtaatgcctggatgtcttgggttagatgctatgtggcaacttgttggtttttatttaggttggctgggtcaacctggtaagggtagggctttaggagttggagaggtaaagtttactgggtcaagtttttag

SEQ ID NO: 285243 - DNA, 526 bp, Unknown
  Bacterial polypeptide expressing nucleotide sequence isolated from the Sargasso Sea
atgaatttccttccacaaaaaaaatatacaaaagatgaacttataaattgttcagatggaaaattattcacaaaagatggtgatggtagattgccttctgatcaaatgttaatgtttgatgaaatatctgagataaattcttcatcaggaaattacgaaaaaggaaaaataatagcatctttaaatattgatcctgagttatggttttttaaatgccactttaaagaagatcctgttatgccaggttgtcttggcttagatgctatgtggcaattacttggtttttatttgttatggtctggattacctggaataggcagggcccttggtgctgaaaaagtaaagttctttggtcaagttcttccaacctcaaaacttgtaaaatatgagctagatataaaaagagtattttcaagaggtgcaattgtcggacttgctgatggtaagatgtttgtagatggaaaagaagtttatacagctgaaaatttaaaagttgggctttttaaagatcctagtaatttttaat

SEQ ID NO: 285244 - DNA, 331 bp, Unknown
  Bacterial polypeptide expressing nucleotide sequence isolated from the Sargasso Sea
aaaatcaaatttatggttttttgattgtcattttaaagatgatccagttatgccaggttgtctaggattggacgcaatgtggcaacttgtaggcttttatttaggttggttaggccagcctggcaaaggcagggctcttggtgtaggagaagtaaaattcactgggcaagttttaaatactgtaaaaaaagttacttatcatatttctttaaaaaggttgattttaagaaaattaatactaggtgtagcagatggtatcctaaaagctgatgataaaactatatatgaagctaaagatatgaaagttggactatttacagaaaataaataa

SEQ ID NO: 285245 - DNA, 400 bp, Unknown
  Bacterial polypeptide expressing nucleotide sequence isolated from the Sargasso Sea
aatggcagaatatccatcaagttttagtcgtgaagaccttctcaagtgtgcgaaaggtgaattgtttggtgccggtaatgctcagcttccggaacctccaatgcttatgatggatagagttactgacattagtttggatcggggcgaaaatggtaaaggtcatgttatagctgagtatgatataaatcccgacctttggttttttaattgtcactttcctggtaacccaataatgcctggttgccttggtttagatggtctctggcagttaacgggattcaacctaggttggcggggttggcagggacgtggctatgctttgggagtgggtgaagtaaagcttacgggaatggttcgcccagatcgaaagcttttaaaatacacggtaaattcacaaaag

SEQ ID NO: 285246 - DNA, 298 bp, Unknown
  Bacterial polypeptide expressing nucleotide sequence isolated from the Sargasso Sea
tcattttaaaggtgatcctgttatgcctgggtgccttggacttgatgctatgtggcaattagtcggtttcttcttggggtggaaaggtgaaccaggaaaaggacgtgctcttggagtaaatacagtaaaatttactggcgaagtcctaattaatgccaaagttgctatgtataaagtccatatgaaaagaattttaaaaaaagaaggtgctgttgtcggattagctgatggaacattattttctgacggtaaagcaatatacgaggcagaaaacttaaaagtaggattatttaaataa

SEQ ID NO: 285247 - DNA, 376 bp, Unknown
  Bacterial polypeptide expressing nucleotide sequence isolated from the Sargasso Sea
tattataaaaaaggttcaattgaagctgttcttaatataaatccagacctttggttttttaaataccactttaaagaagatcctgttatgccaggatgtcttggtcttgatgcaatgtggcaattacttggattttatcttttatggactgggttacctggtattggaagagccttgggtgcagataatataaaattttttggtcaagtacttccaaaagcaaaaaaagttgtttacaagttagatattaaaagagtaattaatagaggtgctatagttggcttagcagatggtgaaatgtttgtagatgagaagaaaatctatagtgctgaaaagctaaaagttggattgtttaaagatcctagcaatttttgat

SEQ ID NO: 285248 - DNA, 453 bp, Unknown
  Bacterial polypeptide expressing nucleotide sequence isolated from the Sargasso Sea
tatggagaaaaaatcatcatataattatcaagatcttattaaatgtgctaatggaggactttttgggcctggaaatgctaagctgccattacctccgatgttgatgtttgacagaatcactgaaattagcgaaaataaaggaactttaaaaaaaggattattaaaagcagaattggatataaaagatgaactttggttttttaattgtcattttaaggaagatccagtaatgccaggttgtctaggtttagatgccatgtggcaattagttggtttttttctaggttggctaggaaatccaggtagaggaagagctttaggggtaggttctgtaaaatttactggagaagttttgaaaagtacaaaaattgcatcttatgaaattgaaatgaaaagaattctaattaaagaaggaactgctgttggtttagctaatggaatattaaaagcgga

SEQ ID NO: 285249 - DNA, 502 bp, Unknown
  Bacterial polypeptide expressing nucleotide sequence isolated from the Sargasso Sea
atgaaatcaaaatcaagctttactaaagaagaattgctcaaatgtgcccatggaacaatgtttggtataggaaatgcgagattgccattacccccaatgctaatgtttgatagaattataaaaatttcagctgatgatggaaaatttggaaaaggtgagattattgctgaacttgatgtaaatccttctctttggttttttgattgtcattttgagatggatcctgttatgccaggatgtcttggcttagatgccatgtggcaacttgttggtttttatttaggttggattggtgaaccaggaagaggaagggcattgggatcaggtaatgtaaaatttggtggagaaattctaaaagactctaagcttgtagagtataatatagacatgaaaaaaataattaaacgcggtgtagttgttggagtaggtgatgggattgtaaaagtggatggtaaggaaatataccgagcagaaggtttaaaagtaggattgattaagtaat

SEQ ID NO: 285250 - DNA, 309 bp, Unknown
  Bacterial polypeptide expressing nucleotide sequence isolated from the Sargasso Sea
atttccctggggaccctgtaatgccgggatgcctcggactcgatgcattatggcagttggtcggatttttccttgcttggaggggataccctggaaaaggcagggctctgggcgctggcgaagttaaatttactggcgaaattaggcctgacgctaaaaaggtcacctatgaactttcgataagtcgcatcattgacagaaaattagttgtcggtttagctgatggaacggtagccgtggatgacaaaataatctatacaacaaagtcattgaaagttggtctattcactcccgagcagacgttttaga

SEQ ID NO: 285251 - DNA, 308 bp, Unknown
  Bacterial polypeptide expressing nucleotide sequence isolated from the Sargasso Sea
ttttgattgtcactttaaggaagatccagtgatgccgggatgtttaggcttagatgcgatgtggcaactagttggcttttacttgggttggcttggaaatcctggaagaggaagagctttaggagtaagcacagtaaagtttacaggagaagttttaaaagatgtcaaaatggcgacatatattattgatatgaaaagaatattgattaaaggtgaaacaacagttggactagcgaatggtattcttcttgctgatggaaaaaaaatatactctgcagacagtctaaaagtaggattatttaaataat

SEQ ID NO: 285252 - DNA, 241 bp, Unknown
  Bacterial polypeptide expressing nucleotide sequence isolated from the Sargasso Sea
ctttctatgctggagtgaattacctgggattggaagagctttaggagctgaaaaagttaaattctttggccaggtgcttccaacagcaaaaaaagttaattatgttcttgatataaaaagagttgtaaatcgtggagctgtagttggtttttctgatgctgatatgtttgtagacgataaacatgtttattcagcagataaccttaaagtaggcctttttgctgacccaagcaaattttaa

SEQ ID NO: 285253 - DNA, 361 bp, Unknown
  Bacterial polypeptide expressing nucleotide sequence isolated from the Sargasso Sea
atgaaaaaaaatagtttcaaatttgatgagctaatcgattgtgctaatggaaaattatttggggcaggcaatgctaaacttccatctcccccaatgttaatgtttgacagaattactaatattcaagaaaataaaggagtttatagtaagggattgattcaagcagagcttgatataaaagaaaaaatgtggttttttgattgccattttaaagaagaccctgttatgcctggatgcttaggcttggatgctatgtggcaattagttggtttctatttgggatggacaggagagccaggtaagggaagagctttaggagtaaatagtgtaaaatttacaggcgaagtactaaaaacgtcaa

SEQ ID NO: 285254 - DNA, 280 bp, Unknown
  Bacterial polypeptide expressing nucleotide sequence isolated from the Sargasso Sea
tatgccgggttgtcttggcctagatgctatgtggcagttagttggattttatttaggctggataggagagccaggaaagggtagagctttaggagtaaattctgtaaaattcacaggtgaagtattaaaaaatattaaaatggcgacttatgaaataaatatgaaaagaattttaaaaaaagaaggcactgctgttggattagccaatggtattttaagtgcagacggtaaaataatttacactgcagaaaatttaaaagtgggattatttaaatcatga

SEQ ID NO: 285255 - DNA, 508 bp, Unknown
  Bacterial polypeptide expressing nucleotide sequence isolated from the Sargasso Sea
aatgaaacaaaaaaacagttacaactataatgaattaattgattgtgcaaatggttctctttttggagagggaaatgcacgtttgccgctacctccaatgttaatgtttgatagaattacagaaataaattctgatacaggaaaatttaaaaagggaataataaaagctgagcttgatataaaagataatttgtggttttttgattgtcactttaaggaagatcctgttatgccgggatgcttaggtttagatgcaatgtggcagttggttggtttctaccttggttggattggagagcccggtaaaggacgtgctttaggcgtaaattctgttagatttacaggtgaagttcttaaaaaagtgaaattggcaacttatgaagttgatatgaaaaaagttttaaaaacagaaggcggaacagttggatttgctaatggaattttaaaagcagatggaaaattaatatatactgcggaaaccttaaaagttggagtttacaaacaatga

SEQ ID NO: 285256 - DNA, 310 bp, Unknown
  Bacterial polypeptide expressing nucleotide sequence isolated from the Sargasso Sea
gttttttaattgtcattttaaagaagatccagttatgcctggatttcttggtttagatgcaatgtggcaactagtaggtttttatctaggatggctaggtaaccctggaaaaggtagagctttaggagttggtactgtaaaatttactggagaagttttgaaaagtgtaaaaaaagcaaaatatgtaattgatatgaaaaaaattatatctcctggtggaacaactgttggtttggcaaatggcgttttatttgctgatgataaaaaaatttattctgcagaaaatttaaaagtgggattatttaaataa

SEQ ID NO: 285257 - DNA, 292 bp, Unknown
  Bacterial polypeptide expressing nucleotide sequence isolated from the Sargasso Sea
taaatctgaccccgttatgcctggttgcttagggttagacgctatgtggcaacttgtaggtttttacctaggttggctaggaaatcctggcaagggtagagcactaggtgttggaacagtaaaatttactggtgaagttttacaaagtgtaaaaaatgtaaggtatgaaatagatatgaaaaaaattatgtcaccaggaggcacaactgttggtcttgctaatggggtagtttttgcagatgataaaaaaatatattcagcagatagtttaaaagtaggattgtttaaataa

SEQ ID NO: 285258 - DNA, 457 bp, Unknown
  Bacterial polypeptide expressing nucleotide sequence isolated from the Sargasso Sea
atgaaaaaaaactcttactcatatgatgagctaataaattgtggtgagggcaatctatttggtccaggtaatgctaaattacctcttccacctatgcttatgtttgatagaattacagagattaatgataataaaggagcttttaataaaggttcaataaaagcggaattagatattaaaaatgacctctggttttttgattgtcattttaaaaaagaccctgttatgccaggatgtctaggtttagatgcaatgtggcagttagtaggtttttttctgggctggcaagggaatccaggtaaaggaagggctttgggagttagcactgttaaatttacaggagaagttttacagactgtaaaaaatgtaagatatgaaatagatatgaagaaaatcatgtcgcctggtgggacaactgtcggtctagcaaatggagtgctgcttgctgatgaaaaaa

SEQ ID NO: 285259 - DNA, 383 bp, Unknown
  Bacterial polypeptide expressing nucleotide sequence isolated from the Sargasso Sea
taataaggatgtgggggtccatggaaaaggcgaaataaccgctgaactcgatattaatcctgatttatggttctttaagtgtcattttttaggggatcctatcatgccaggatgtttgggtcttgacgctttatggcaaatgttaggtttttatttaggttggcttggataccctggaaaaggtcgtgctctaggagttggggaaatcaaatttgtagaagaaataaaaccagataaggaattaattgaatataaagttagtttaaaaaaatctttaaataaaaaagggctatcaattggttatggagatggacaaataatacacaaagaaaaaatgatatatcacgctaatgatttaagagtgggtttgtttaatgagtaac

SEQ ID NO: 285260 - DNA, 349 bp, Unknown
  Bacterial polypeptide expressing nucleotide sequence isolated from the Sargasso Sea
tatgaacaaaaaatcgtcctacaactatcaagagcttatcgattgtggtaacggtaacctttttggtccaggaaatgcaaagttgcctcttcctcctatgctcatgtttgacagaatatcagaaattagcgagaataaaggagcttttaaaaaaggaataattaaagctgagttagatataaaagatagtttgtggttctttgagtgtcactttaaaaatgactcagttatgccgggctgtcttggtttagatgctatgtggcaactagtgggtttttatttgggttggcttggtaaccctggtaaaggaagagctttaggagtacattctgttaagtttacaggagaa

SEQ ID NO: 285261 - DNA, 502 bp, Unknown
  Bacterial polypeptide expressing nucleotide sequence isolated from the Sargasso Sea
tatgaaaaaaaactcgtttagttatgatgagttaattagctgcgcaaatggtgagctttttgggcctggaaatgcaaaattaccatctcccccgatgctcatgtttaacaggatatcagaaattgacgaaaataaaggattttttaaaaaaggagttattaaagcagagcttgatattaaagaggatttgtggttttttgattgccactttagagaggatcctgtgatgcccggatgtttagggttagacgctatgtggcagctagtcggtttttatttaggttggcttggaaatccaggtagaggaagggctttgggtgtaagttctgttaagtttacaggtgaagttttaaaaaatgttaaaattgcgacatatgagatagatatgaaaagaattttaattaagggagaaacgactgtcgggcttgcaaacggtatattatgtgcggatggtaaaaaaatatattcagcagaaaacttaaaagtaggcttggttaaataa

SEQ ID NO: 285262 - DNA, 526 bp, Unknown
  Bacterial polypeptide expressing nucleotide sequence isolated from the Sargasso Sea
atgagttttaatcctaaaaataaatactccaaggaagaattggtagcatgttcaaatggtgagttatttaccaaagaaggagatggaaggctgccttctgatttaatgcttatgtttgatgaaatatcaaatattgatgatcattctggaatttataaaaaaggctcaatagaagcaaatctaaaaatcaatcctgacttatggttcttcaagtatcactttaaagaagaccccgtaatgccaggatgtcttggtttagatgcaatgtggcaattgttagggttttatcttctatggacaggtctacctggcataggaagggcattaggagcagataatattaaattctttggacaggttcttccaagtgctaataatgtgaattataaaatagatattaaaagagttattaatagaggagcaatagttggattggcagatggcgaaatgtttgtcgatggtagaaaaatatatagcgctgagaaattaaaggttggtttatttaaagatccaagtagtttttgat

SEQ ID NO: 285263 - DNA, 419 bp, Unknown
  Bacterial polypeptide expressing nucleotide sequence isolated from the Sargasso Sea
tatgaataaaaaatcgtcttacaactaccaagagctaatagattgcggtaacggtaagctttttgggcctggaaatgcaaagttaccactacctcctatgctcatgtttgacagaatatcagaaattagggagaataaaggaacttttaaaaaaggattaattaaagctgaactagatataaaagatagtttgtggtttttcgaatgtcactttaaaaatgattcggttatgcccggctgtttaggtttggatgctatgtggcaactagtaggtttttatttgggttggcttggtaaccctggtaaaggaagggctttaggagtaaattctgtaaaatttactggtgaagtgttaaaaaatgttaagttggcaacttatgagatagatatgaagagagtttctattaaagaagggacaa

SEQ ID NO: 285264 - DNA, 370 bp, Unknown
  Bacterial polypeptide expressing nucleotide sequence isolated from the Sargasso Sea
aacggagccttcaaaaaagggtctcttaaggctgaattagacattaaaaaagatctttggttttttgattgtcattttaaagaagaccctgtgatgccaggctgtcttggtcttgacgctatgtggcagctagtaggtttttatttgggttggattggaaaccctggaaaaggaagagcattgggagttggaacagtaaaatttactggtgaagttttgcaaaatgtaaagttagtaacttatgaaatagatatgaaaaaaattatgtctccaggaggaactactgttgggcttgcaaatggagtagtaacggcagatgggaaaaaaatttattcagccgatagtttaaaagtaggattatttaaataat

SEQ ID NO: 285265 - DNA, 328 bp, Unknown
  Bacterial polypeptide expressing nucleotide sequence isolated from the Sargasso Sea
tattaaagaaaaaatgtggttttttgattgtcactttaaggaagatcctgttatgccaggatgtctagggttagatgctatgtggcaattagttggtttttttttaggatggactggtgaaccaggtaaaggaagagcgttaggcgtaaatgcagttaaatttactggagaagtgcttaaaaatgtcaaaattgcaagctaccaaattgatatgaagagaatattaaaaaaaaaaggaaccgtagtaggtctagctgatggaactttgttagctgacaaaaaacctatatatgaagcagaaaatctgaaggtagggttatttaaataa

SEQ ID NO: 285266 - DNA, 401 bp, Unknown
  Bacterial polypeptide expressing nucleotide sequence isolated from the Sargasso Sea
gtttgacagaataacagaaattagtgaagataaggggtcatttaaaaaaggacttatgagagctgaactcgatataaaagatgatttatggttttttgattgccattttagagaggatcctgttatgccaggttgtttaggactagatgctatgtggcaattagtagggttttatttgggatggttaggtaatccaggtaggggaagagctcttggagttggaactgtaaaatttactggagaagttttaaaaagtgttaaattagctacttacgaaatagaaatgaaaagagttttaattaaagagggtacaactgttgggcttgctaacggaatattgaaagcagatgaaaaaaaaatttattctgcagataacttaaaagtaggattatttaaataat

SEQ ID NO: 285267 - DNA, 304 bp, Unknown
  Bacterial polypeptide expressing nucleotide sequence isolated from the Sargasso Sea
aatgaaaaaagggtcttttaattatgaagaattaataagttgcgcaaatggcgagctttttggccctggtaatgcaaaattaccatcaccaccaatgttaatgttcgatagaatcatagaaattaatgagaataaaggtttttttaaaaaaggattaattaaagctgagcttgacgttaaggataatctctggttctttgattgtcattttaaagaagatccagtaatgcctggatgtcttggtttagatgcaatgtggcaactagttggattttatttggggtggctaggaaatccaggaaga

SEQ ID NO: 285268 - DNA, 291 bp, Unknown
  Bacterial polypeptide expressing nucleotide sequence isolated from the Sargasso Sea
aggaccctgtcatgcctggttgccttggtctagacgcaatgtggcagttggttggtttttttttaggctggattggaaatccaggaaaaggaagggcattaggggttggaacagtaaaatttacaggagaagttttacaaagtgtaaaacttgttaagtatgagattgatatgaaaaaaattatgtcgcctggaggtaccactgtagggcttgctaatggaatagttttagcagatggtaaaaaaatttactcagccgataatttaaaagtaggattatttagatcatgag

SEQ ID NO: 285269 - DNA, 379 bp, Unknown
  Bacterial polypeptide expressing nucleotide sequence isolated from the Sargasso Sea
aatgtctcaaaaaaattcttttactaagaaagagctcttggcgtgcgcatcaggagatttgtttacaaaaaaacatagccgagttcctactgaccctatgctgatgatagatagaataacaaacatctcaactgagggtggcaattttaataaaggtataattaacgcagaaaaagatataaacgaagaaaactggttttttcattcccattttattggtgacccagtaatgcctggttgtttaggcttggatggtttttggcagctaactggattttttttaacatggtatgggtgtactggaaggggaagagcactgggtgttgggaatgtaaaatttaaaggacaagtaagaccctatcatgatattattacatat

SEQ ID NO: 285270 - DNA, 433 bp, Unknown
  Bacterial polypeptide expressing nucleotide sequence isolated from the Sargasso Sea
tgcacgtttaccagcgccaccaatgttaatgtttgatagaattacgcaaataaaatcagatgaaggcaaatttaaaaaaggcacagtaaaagctgagctagatataaatgataaaatgtggttctttgattgccattttaaggccgatcctgtaatgcctggatgtctaggattagatgcgatgtggcaattagttggtttctaccttgggtggattggtgaaccaggtaaaggacgtgctttaggtgtaaattctgttagatttactggtgaagttataaaaaaagtaaaaatggcgacttatgaggtagatatgaaaaaagttttaaaaactgaaggtggaactgttggttttgcagacggaattttgaaagccgatggtaaacaaatatatactgcagaaaatttgaaagtaggagtttataaacaatga

SEQ ID NO: 285271 - DNA, 277 bp, Unknown
  Bacterial polypeptide expressing nucleotide sequence isolated from the Sargasso Sea
tatgccaggttgtcttggtttagatgctatgtggcagctagttggcttttttcttggttggcttggaaatccaggaagaggtagagcattaggtgtaagcactgtaaaattcactggggaagttcttaaaaatgtcaaaatggcaacatatgaaatagatattaaaagaattcttgttaaaggagagacaactgtaggtcttgcgaatggaatattgcttgctgatggaaaaaagatttatagtgcagaaaatcttaaggtaggattatttaaataa

SEQ ID NO: 285272 - DNA, 457 bp, Unknown
  Bacterial polypeptide expressing nucleotide sequence isolated from the Sargasso Sea
tatgaaaaaaaattcctttgattatgatgaattaataagctgcgcaaatggggaactttttggttctggaaatgcaagattaccttctcctccaatgcttatgtttgatagaattactgaaattagtgaaaaaaatggagcttttgataaaggattaatgaaggcagaacttgatataaaagaagatttgtggttttttgattgtcactttagagaagatccagtcatgccaggatgtttaggtttggatgcaatgtggcaactggtgggtttttacttgggttggctcggaaatcctggaagaggaagagctttaggagtaagcacggtaaagtttacaggagaggttttaaaaaatgtcaaaatggcgacatatattattgatatgaaaagaatattaatcaaaggtgaaacaacagttggactagcaaatggtattcttcttgctgatggcaaa

SEQ ID NO: 285273 - DNA, 365 bp, Unknown
  Bacterial polypeptide expressing nucleotide sequence isolated from the Sargasso Sea
agcttttgacaaaggattaatgaaggctgaacttgatataaaagatgatctgtgtttttttgattgtcactttaaagaagatccagtaatgccaggatgtttaggtttagatgcgatgtggcaactagttggcttttacttgggttggcttggaaatcctgggagaggaagggctttaggagtaagcacagtaaagtttacaggagaggttttaaaaaatgtcaaaatggcgacatatattattgatatgaaaagaatattgattaaaggtgaaacaacagtaggactagcaaatggtattcttcttgctgatggcaaaaaaatatactctgcagacagtctaaaagtaggattatttaaataat

SEQ ID NO: 285274 - DNA, 356 bp, Unknown
  Bacterial polypeptide expressing nucleotide sequence isolated from the Sargasso Sea
aaaaggctctattactgccgaactagatataaaagatgacctttggttttttaattgtcattttaaagaggatccggttatgcctggatgtcttggcttagatgcaatgtggcaactagtaggtttttatctgggatggctaggtaatcctggaaaaggtagggctttaggagttggtactgtaaaatttactggagaagttttgaaaagtgtaaaaaaagcaaaatatataattgatatgaaaaaaattatatctcctggtggaacaactgttggtttagcaaacggagttttatttgctgataataaaaaaatttattcagcagaaaatttaaaagtaggattatttaaataat

SEQ ID NO: 285275 - DNA, 388 bp, Unknown
  Bacterial polypeptide expressing nucleotide sequence isolated from the Sargasso Sea
tatgaaactgggcggtttatttaaaaaaggagaaattattgctgagttggatataaaaactgatttatggttctttgattgtcattttaaaggagaccccgtaatgcctggatgtttaggtttagatgcaatgtggcaactagttggtttttatcttggatggttaaaacaaccaggtaaaggaagggcattgggcgttggtgaagtcaaatttactggacaagttttaaacactgtaaagaaagtaacttatcacatctctttaaaaagattaattcttagaaaattaatcttaggtgttgcagatggtattcttaaagcagatgggcagtctatatatgaagctaaagatatgaaggttggtctttttcaatctaaagaaaaataa

SEQ ID NO: 285276 - DNA, 428 bp, Unknown
  Bacterial polypeptide expressing nucleotide sequence isolated from the Sargasso Sea
agatctaatgttaatgtttgatgaaatagttaatattgatgatttttcaggaaattataataaaggctcaattgaagctgtgctaaacgtaaatcctgatttgtggttttttaagtatcattttaaggaagatcctgtcatgcctggatgtctaggtcttgacgctatgtggcaacttctaggattttacttgttgtggactggcttaccaggaattggaagagctcttggagctgaacatgtaaagttctttggacaagttcttccaaaagcaaaaaaagttgtatataaattagatatcaaaagggttatcaatagaggtgcaatagttggtttagcagatggtgaaatgtttgtcgataataaaaaaatctatagcgctgaaaaattaaaagttggtttatttaaggatccaagtaatttctgat

SEQ ID NO: 285277 - DNA, 331 bp, Unknown
  Bacterial polypeptide expressing nucleotide sequence isolated from the Sargasso Sea
tgatgtaaaggatagtctttggttttttgattgtcattttaaggaggatccggtaatgcctggatgccttggattggatgctatgtggcaactagttggcttttatttggggtggttgggaaacccaggaaggggtcgagcgttaggagtaaatagtgtaaaattcacaggagaagttttaaaaaatgttaaattggctagttatattattgatatgaaaagaatacttattaaaaaaggaaccactgttggtctagcaaatggagttttattagctgatggtaaaaaaatatattctgcggaaaatttaaaggtaggtttatttagataa

SEQ ID NO: 285278 - DNA, 429 bp, Unknown
  Bacterial polypeptide expressing nucleotide sequence isolated from the Sargasso Sea
tatgaaaaaaaactcatattctaatgatgaacttattaattgtgctaatggcaaattatttggtcctggcaatgctaaattacctctaccaccaatgcttatgtttgatagaattacagaaattaatgataataaaggtgcttttaaaaaaggaatattaaaagctgagttagacataaaaaaagacctttggttttttgattgtcactttaaaggagaccctgtcatgccaggatgtttgggtttagatgcgatgtggcagttagttggtttttatttaggatggataggaaatcctggaaaaggaagagcactaggagtaggaacagtgaaatttactggagaagttttgcaacaagttaaattggtcagttatgaaatagatatgaaaaagattatgtcaccaggtggaacaactgtgggtcttgc

SEQ ID NO: 285279 - DNA, 316 bp, Unknown
  Bacterial polypeptide expressing nucleotide sequence isolated from the Sargasso Sea
aatgaaaaaaaaatcctacacttatgatgagctaattaattgtggagagggaggtttatttgggcctggaaatgcaaaacttccgcttccaccaatgttgatgtttgatagaataacagaaattagtgaaaaaggtggaaataataaaaaaggtataattaaagctgaattagacattaaagacaatttatggttttttaattgccattttaaagaagatccagttatgcctggatgtttaggtttagatgcgatgtggcaattggttggtttttttcttggctggctaggaaatcaggaaaaggtagggctttag

SEQ ID NO: 285280 - DNA, 302 bp, Unknown
  Bacterial polypeptide expressing nucleotide sequence isolated from the Sargasso Sea
ttgtcattttaaagacgatcctgttatgcccggatgtcttggactggatgccatgtggcaattggttggtttttttttaggttggaaaggggagcctggaaaagggcgagctctaggcgtaaataatgtaaaatttactggagaggtgcttattaatgccaaaattgctaaatataaggttgatatgaaaagaattttaaaaaaagaaggtgctgttgtaggattagctgatggaactttatattgtgataacaaggcgatatacgaagcagaaaatttaaaagtaggattgtttaaataat

SEQ ID NO: 285281 - DNA, 481 bp, Unknown
  Bacterial polypeptide expressing nucleotide sequence isolated from the Sargasso Sea
atggaaaaaaacagttacaattatgatgagctaatttcgtgtggagagggaaaattatttggtgaaggaaatgctaaactcccactaccaccgatgttaatgtttgataggataaccgaaataaaaaaagatgcgggtgaatttaagaaaggttttattgaagctgaactagacattaaagataacttgtggttctttaattgtcattttcaaaaagatccagttatgcctggatgtcttggtttagacgctatgtggcaattagtaggtttttaccttggatggataggagaaccaggaaaagggagagctttaggcgttaattctgtaaaatttactggagaagttttaaaaaatataaaaatggctaaatatgaaataaatatgaaaagagttttaaaaaaagagggaacaactgttggtttagcaaacggtactttaagtgcagatggtaaaacaatttatcgtgcggaaaattgaa

SEQ ID NO: 285282 - DNA, 456 bp, Unknown
  Bacterial polypeptide expressing nucleotide sequence isolated from the Sargasso Sea
tatgacaaaaaaacacagcttcaaatatgaggaattaattgattgtgcaaacggaaaaatgtttgggccgggaaatgccaaactcccatcgccacctatgctaatgtttgataggatcacaaacattgaagataacaaaggaatttttggcagaggattaattgaagcagaacttgatataaaagataaaatgtggttttttgattgccactttaaagaagatccggtaatgcccggctgccttggtctagatgctatgtggcaattagtgggcttttttttaggatggaaaggagagccaggaaaaggaagggcgcttggtgtaaattcagtaaagtttacaggagaagtacttaaaaatgtcaaaattgccaaatacaaagtggatatgaaaagaattttaaaaaaagaaggggctgttgtaggtttagcagatggaatattatttgccgataa

SEQ ID NO: 285283 - DNA, 346 bp, Unknown
  Bacterial polypeptide expressing nucleotide sequence isolated from the Sargasso Sea
atgaaacaaaaaaacaattacaactataacgaattaattgactgcgccaatggcgttctattcggtgaagggaatgcacgtttaccatcacctccaatgttgatgtttgacagaattactcaaattcaatcgagtgagggaaaatttaaaaagggtataataaaagctgaattagatattaaggataatatgtggttctttgattgtcatttcaaaagtgatcctgtgatgcctggatgtcttggattagacgcaatgtggcaattagttgggttttacttaggatggatgggtgaaccaggtaaaggacgtgctttaggcgtaaattctgttagatttacaggag

SEQ ID NO: 285284 - DNA, 451 bp, Unknown
  Bacterial polypeptide expressing nucleotide sequence isolated from the Sargasso Sea
cctttttggggtgggaaatgcacgtttaccatcaccaccaatgttaatgtttgatagaataactgaaataaaatctgatactggaaaattcaaaaagggtattgtgaaagcagaacttgatattaaggaaaagatgtggttttttgattgtcacttcaaggaagatcctgttatgccaggatgtttaggacttgatgcaatgtggcagcttgtaggtttttatttaggatggattggagaacctgggaaaggaagagctttaggagtaaattcagtgagatttacaggtgaggtgattaaaaaaataaagattgcttcatacgaagtaaatatgaaaaaaattttgaaaacagaaggtggaacagtcggttttgctgatggggttttaaaagcggatggaaaacagatatatacagctgaaacattaaaagtaggagtttataaacaatga

SEQ ID NO: 285285 - DNA, 334 bp, Unknown
  Bacterial polypeptide expressing nucleotide sequence isolated from the Sargasso Sea
tatggaaaaaaaatcatcttatagctacaaagacttaattaattgtggaaatggagagctttttgggccaggaaacgctaaattaccacttcctccaatgcttatgtttgatagaataactgaagttaaagaagataatggtgcttataaaaagggctctattactgctgaactagatattaaggatgacctttggttttttaactgtcattttaaggaagatccagttatgccagggtgtcttggcttggatgctatgtggcaacttgtgggtttttatttaggatggctaggcaatcctggaaaaggaagagctttaggagttggtactgta

SEQ ID NO: 285286 - DNA, 336 bp, Unknown
  Bacterial polypeptide expressing nucleotide sequence isolated from the Sargasso Sea
aacttgatatcaagcctgatctttggtttttcgaatgccattttaaaaatgatccagttatgccaggatgtttaggtttagatgctatgtggcaactattaggtttttacctagggtggttaggtaaacctggcaaaggaagagctttgggagttggtgaagtaaaattttcaggagaagttctaacaacagcaaaaaaagttacgtatcatatatctttaaaaaaattagttttaaaaagacttactttgggtgttgcagatggtataatgaatgtagatggaaaaaatatttacagtgctaaagatatgaaagtagggctttttaaaacataat

SEQ ID NO: 285287 - DNA, 382 bp, Unknown
  Bacterial polypeptide expressing nucleotide sequence isolated from the Sargasso Sea
tttgaaaaaaaatcatcttatagctatcaggaattgattgagtgcggaaatggtaagctttttggtcctggaaatgcaaaacttcctcttccaccaatgttaatgtttgatagaatttcagaaataaatgagaaaaaaggtatctttaaaaaaggtcatatgagagcagaattagatataaaagatagcttatggttttttgaatgccattttaaagatgattctgttatgccaggatgtttaggactagacgctatgtggcagctagtaggattttatttggggtggttaggaaatccaggaaaaggtagagcattaggagtaaatactgtgaaatttacaggagaagttcttaaaaatgtcaaaatggtcaagttatgaa

SEQ ID NO: 285288 - DNA, 490 bp, Unknown
  Bacterial polypeptide expressing nucleotide sequence isolated from the Sargasso Sea
atgaaaaaaaatagtttttcttatgatgatttaatcagctgtggaaatggcaagctttttggacctggaaatgcaaagctaccgttacctccaatgttgatgtttgacagaattagcgaaattagtgagaataaaggagtttttaaaaaaggatttattaaagctgaactggatattaaagataatctatggttttttgattgtcactttagggaagatccagtaatgccaggatgtctaggattagatgcaatgtggcaattggttggattttatcttgggtggcttggaaatcctggaagaggaagagctctaggagtaggtacagttaagtttactggcgaagttttaaaaattgctaaacttgctagctatgaaatagatatgaaaagaattttgattaaagaaggaacaacagttggtctagcaaatggtatattaaaagcagatggggaaaaaatttattctgcagaaaatttaaaagtaggat

SEQ ID NO: 285289 - DNA, 333 bp, Unknown
  Bacterial polypeptide expressing nucleotide sequence isolated from the Sargasso Sea
tatgaaaaaaaactcatactcctataatgatctcataacttgtggaaatggtgacctttttggccctggtaatgctaaattacctcttccaccaatgcttatgtttgacagaataacggaaatcaatgagaataatggtgcatttaataaaggctcattaaaagctgaattagatattaaagatgatctttggttttttgattgtcattttaaaaaagatccagttatgcctggttgtctaggtttagatgctatgtggcaactagtaggattttttctaggttggctaggaaaccctggaaaaggtagagctttaggtgtgggtaatgtaaa

SEQ ID NO: 285290 - DNA, 346 bp, Unknown
  Bacterial polypeptide expressing nucleotide sequence isolated from the Sargasso Sea
aatgaaggctgaacttgatataaaagatgatctgtggttttttgattgtcactttaaggaagatccagtaatgccgggatgcttgggtttggatgcaatgtggcaactggtgggtttttacttaggttggcttggaaaccctggaagaggaagggctttgggagtaagcacggtaaagtttacaggagaagttttaaaaaatgtcaaaatggcgacatatattatagatatgaaaagaatattgatcaaaggtgaaacaacagttggactagcaaatggtatacttcttgctgatggcaaaaaaatatactctgcagacagtttaaaagtaggattatttaaataa

SEQ ID NO: 285291 - DNA, 404 bp, Unknown
  Bacterial polypeptide expressing nucleotide sequence isolated from the Sargasso Sea
aatgtttgatagaattacagaaattacagaaaatcaaggtttttataaaaaaggttctatgaaagccgaacttgatattaaggatgatttatggttctttgattgtcattttaaagaagatccggttatgccaggttgtctcggtttagatgctatgtggcagctagttggcttttttcttggttggcttggaaatccaggaagaggtagagcattaggtgtaagcactgtaaaattcactggggaagttcttaaaaatgtcaaaatggcaacatatgaaatagatataaaaagaattcttgttaaaggagaaacaacagtaggtcttgcgaatggaatattgcttgctgatggaaaaaagatttatagtgcagaaaatcttaaggtaggattatttaaataat

SEQ ID NO: 285292 - DNA, 475 bp, Unknown
  Bacterial polypeptide expressing nucleotide sequence isolated from the Sargasso Sea
atgaaacaaaaaaacaattacaactatgacgaattaatcgactgtgcaaatggtgccctttttggagaagggaatgcacgtttaccatcaccgccaatgttgatgtttgacagaattacacaaattcaatcgggtgaaggaaaatttaaaaaaggtataataaaagctgagttggatattaaagatagtatgtggttctttgattgtcattttaagagtgatcctgtgatgcctggatgtcttggattagacgcaatgtggcaattagttggattttacttaggatggataggtgaacccggtaaagggcgtgctttaggtgtaaattctgttagatttacaggagaagttataaaaaaagttaaaatggcaacttacgaagttaatatgaaaaaagttttaaaaacagaaggtggaactgttggatttgctgacggtattttaaaagctgacgataaacaaatatatactgcag

SEQ ID NO: 285293 - DNA, 508 bp, Unknown
  Bacterial polypeptide expressing nucleotide sequence isolated from the Sargasso Sea
atgaaacaaaattctttcacatatgatcagctaatagattgtgcaaaaggaattctttttgggaagggcaatgcacagctaccaatgcctcctatgttaatgtttgatagaattaccttaattaatgaagatggaggtattttttcaaaaggtgaagttattgcagaattagatataaatgaaaacttatggttttttgaatgtcactttaaaaatgatcctgtgatgcctggttgtttgggattagatgctatgtggcaattattaggattttatcttggatggctaggtcaaccaggaaaaggtagagcgcttggagtaggtgaagttaaatttactggacaagtgcttcaaacagttaaaaaagttacttatcatatttctttaaaaagactcatattaagaaaactaattcttggtgttggagatggtgttcttaaagctgatggtgaaacaatttatgaagcaaaagatatgaaagttggattattttctcctgagaaataaa

SEQ ID NO: 285294 - DNA, 250 bp, Unknown
  Bacterial polypeptide expressing nucleotide sequence isolated from the Sargasso Sea
gtggcaattagttggtttttacctaggatggattggggagccgggtaagggtagagctttaggagttaactctgtaaaatttacaggtgaagttttaaaaaatattaaaatggctacttatgaaattaatatgaaaagaattttaaaaaaagagggtacggctgtgggacttgctaatggaattttaagtgcagatggaaaaataatttataaagcagaaaatttaaaagtgggtttatttaaatcatga

SEQ ID NO: 285295 - DNA, 349 bp, Unknown
  Bacterial polypeptide expressing nucleotide sequence isolated from the Sargasso Sea
ctctttaaggctgaattagatataaagaaagacctatggttttttgattgtcatttcaaagaagatcctgtgatgcctggatgtcttggtcttgatgctatgtggcaactcgtaggattttatttaggctggattggaaatccaggaaaaggcagagccttgggcgttggtacagtaaaatttacaggagaagttttacagaatgttaaattagtcaaatatgaaatcgatatgaaaaaaattatgtctcctggtggtacaacagttggtttggctaatgggatattattagcagatgaaaaaaaaatttattcagcagataatttaaaagtggggttattcaaataat

SEQ ID NO: 285296 - DNA, 334 bp, Unknown
  Bacterial polypeptide expressing nucleotide sequence isolated from the Sargasso Sea
tatgaaaaaaagttcctttaattacaacgaactaattgattgcgctaatggtaagttatttggtccaggtaatgcaaaattaccttctccaccaatgctaatgtttgatagaattacagaaataactgagagtgagggtttttataaaaaaggatctatgaaagccgaacttgatattaaagataatttatggttctttgattgtcattttagagaagatccagtaatgccaggttgtcttggtttagatgctatgtggcagctagttggcttttttcttggttggcttggaaatccaggaagaggtagagcactaggtgtaagcactgtaaaa

SEQ ID NO: 285297 - DNA, 340 bp, Unknown
  Bacterial polypeptide expressing nucleotide sequence isolated from the Sargasso Sea
gaattggatattaaagataatatgtggttctttgattgtcattttaaaagtgatccagtaatgccgggttgtctaggattagatgcaatgtggcaattagttggattctacttaggatggattggtgaaccaggtaaaggacgtgctttaggtgtaaattctgttagatttacaggtgaggttttaaaaaaaattaaaatggcaacttacgaagtagacatgaaaaaagttttaaaaacagaaggtggaacagttggatttgccgacggcgttttaaaagctgatggaaagcagatatacactgcagaaaatttaaaagtaggagtttataaacaatgaa

SEQ ID NO: 285298 - DNA, 360 bp, Unknown
  Bacterial polypeptide expressing nucleotide sequence isolated from the Sargasso Sea
ataaaaagggattaattaaagctgagttggatattaaagatgatttatggttttttaattgtcactttaaagaggatccagttatgccaggatgtttaggtttggatgcgatgtggcaattagttggattttatcttggatggcttggaaatcctggtagaggaagagctttaggcgtaagtacggttaaatttactggagaagttctaaaaaatgttaaaaaagccacttatgaaatagatatgaaaagaataataattaaaggagaaactacagttggcctcgcaaatggtatattattagcagatggaaaaaaaatttattctgcagaaaatttaaaggtaggattatttaaataat

SEQ ID NO: 285299 - DNA, 487 bp, Unknown
  Bacterial polypeptide expressing nucleotide sequence isolated from the Sargasso Sea
tatgaaaaaaaactcctatagctacgatgacctaattacttgtggaaatggtgaactttttggacctggtaatgctaaattaccccttcctccaatgttaatgtttgatagaataactgagattaacgacaataatgggacttttaataagggatccttaaaagctgaattagatattaaagacaatctttggttctttgattgtcactttaaatcagatcctgttatgcctggttgtttggggttagacgcgatgtggcagttggtcggtttttacctgggttggcttggtaaccctggcaagggtagagcactaggagttggaactgtaaaattcactggtgaagtgttgaaaaatgttaagttagtaacgtataagattgatatgaagaaaattatgtccccagggggaacaactgtaggacttgccaatgggttcgttttcgcagatgataaaaaatatattcagcagacagctttaaagtag

SEQ ID NO: 285300 - DNA, 508 bp, Unknown
  Bacterial polypeptide expressing nucleotide sequence isolated from the Sargasso Sea
aatgaaacaaaaaaacagttataactataatgaattaatcgattgtgctaacggtgtcttgtttggtgaaggtaatgcacgtttaccatcaccaccaatgttaatgtttgatagaattacacaaattaaattagatgagggaaaatttaaaaaagggactataaaagctgagttggatataaaggataatatgtggttttttgattgtcattttaaagctgatcctgttatgccaggatgtctgggattggatgcaatgtggcagttagttggatttttcttaggttggattggagaaccaggcaaaggacgtgctttgggtgtaaattctgttagatttacaggtgaggttataaaaaaagttaaaatggcaacttatgaagtagatatgaaaaaagttttaaaaacggaaggtggaactgttggttttgcagatgggattttgaaagctgatggtaaacaaatatatactgcagaaaatttgaaagtaggagtttataaacaatga

SEQ ID NO: 285301 - DNA, 409 bp, Unknown
  Bacterial polypeptide expressing nucleotide sequence isolated from the Sargasso Sea
tatgaaaaaaaactcttactcatataatgagctcatcaattgtggtgagggaaaattgttcggtccagggaacgcaaaattaccacttccaccaatgctaatgtttgatagaattacacaaattaataatgataaaggcgcttttaacaaaggttcattaagtgctgaattagacattaaaaaagatctttggttttttgactgtcatttccaaaatgatcctgtcatgccaggatgcttagggttagatgctatgtggcaattagttggtttttttttaggctggataggaaatccaggaaaaggaagggctttgggagttggaacagtgaagtttacaggtgaagtcttgcagaatgttaaacttgttagatatgaaattgatatgaaaaaaattatgtctcctggt

SEQ ID NO: 285302 - DNA, 406 bp, Unknown
  Bacterial polypeptide expressing nucleotide sequence isolated from the Sargasso Sea
atggagaaaaaatcatcctataattataaagagctaattgaatgtggtaatggcaaactttttgggcctggaaacgcaaaattaccccttcctccaatgctcatgtttgacagaatatcagaaattagagaaagtaagggagcttttaaaaaaggtttaattaaagctgaattagatattaaagataatttatggttttttgaatgccattttaaagaggattcagttatgccaggttgtttgggattagatgctatgtggcaattagtaggattttatttaggttggcttggaaacccaggtaaaggaagagctttaggtgttaatagtgtaaaatttactggagaagtattaaaaaatgttaaagtagcttcttataaaatagatatgaaaagaattctttaaa

SEQ ID NO: 285303 - DNA, 523 bp, Unknown; identical to SEQ ID NO: 285213
  Bacterial polypeptide expressing nucleotide sequence isolated from the Sargasso Sea

SEQ ID NO: 285304 - DNA, 394 bp, Unknown
  Bacterial polypeptide expressing nucleotide sequence isolated from the Sargasso Sea
tatgaaaaaaaattcatattcatacgatgatctaatttcttgtggcaatggcgaactctttggacctggaaatgctaaattaccacttcccccaatgctgatgtttgatagaataacagatattaatgatgataaaggaacttttgacaaaggttctttaaaagctgaactagatattaaagatagcctttggttctttgattgtcattttaaatctgatccagttatgccaggatgtttaggtttagatgctatgtggcagttggtgggtttttatttgggttggttaggaaacccagggaaaggtagggcactaggagttggaactgtaaaatttacaggtgaagttttaaaaaatgttaaattagtaacatataaaattgatatgaaaaag

SEQ ID NO: 285305 - DNA, 472 bp, Unknown
  Bacterial polypeptide expressing nucleotide sequence isolated from the Sargasso Sea
atgaaacaaaattctttcacatatgatcaattaattgattgtgcaaagggtctgctttttggaaaaggaaatgcacaacttccaatgcctcctatgttaatgtttgataggattacatcaattaatgaaaatggtggtatattttctaaaggtgaggttattgcagaattagatattaaaaaagacctttggttttttgaatgtcattttaaagatgatccggtaatgccaggctgtttgggtttggacgctatgtggcaattacttggtttttatttaggatggctaggccaaccgggtaaaggtagagctctaggagtaggtgaagttaagtttacaggtcaagtattacaaaaagttagaaaagtaacttatcatatatctcttaaaaggcttatactaagaaaactgattttaggtgttggggatggtgttttaaaagctgatggtggtaacaatttacgaagctaaa

SEQ ID NO: 285306 - DNA, 508 bp, Unknown
  Bacterial polypeptide expressing nucleotide sequence isolated from the Sargasso Sea
aatgaaacaaaaaaacaattacaactataacgaattaattgattgtgcaaatggtaatctttttggtgaaggaaatgcacgtttaccttcaccaccaatgttaatgtttgatagaatcacagaaattcaatctgataaagggaaatttaaaaaaggtgttgtaaaagctgaattagatataaaagataaaatgtggttttttgattgtcattttaagggcgatcccgtgatgcctggatgtcttggattagacgcaatgtggcaattagttgggttctacttaggatggattggtgaaccaggtaaaggtcgtgctttaggtgtaaattctgttagatttacaggagaagttattaaaaaagttaaaatggcaacttacgaagttaatatgaaaaaagttttaaaaacagaaggtggaactgttggatttgcagacgggattttgaaagctgatgagaaacaaatatatactgcagaaaatttaaaagttggagtttataaacaatga

SEQ ID NO: 285307 - DNA, 398 bp, Unknown
  Bacterial polypeptide expressing nucleotide sequence isolated from the Sargasso Sea
gatagaattactgaaatttaatgatgataagggagcttttaaaaaaggttctttaaaagcagagttagatatcaagaaaaacctatggttttttgattgtcattttaaggaagacccagtcatgcctggatgtcttggtcttgatgctatgtggcaactggtgggtttttacttaggttggattggaaatccaggaaaaggaagagctttaggcgtaggaactgttaaatttacaggtgaagttttgcaagatgtaaaattagtaaaatatgagatcgatatgaaaaaaattatgtctcctggaggaacaactgttggtcttgcgaacggggtggttttagctgataataaaaaaatttattcagcagatagtttaaaggtgggattatttaaataat

SEQ ID NO: 285308 - DNA, 365 bp, Unknown
  Bacterial polypeptide expressing nucleotide sequence isolated from the Sargasso Sea
agcttttgacaaaggggtaatgaaggctgaacttgatataaaaaaagatctgtggttttttgattgtcactttaaggaagatccagtaatgccaggatgcttaggtttggatgcgatgtggcaactagttggcttttacttgggttggcttggaaatcctggtagaggaagggctttgggagtaagcacagtaaagtttacaggagaggttttaaaaaatgtcaaaatggcgacatatattatagatatgaaaagaatattgatcaaaggtgaaacaacagttggactagccaatggtattctgcttgctgatggtaagaaaatatactctgcagacagtctaaaagtaggattatttaaataat

SEQ ID NO: 285309 - DNA, 394 bp, Unknown
  Bacterial polypeptide expressing nucleotide sequence isolated from the Sargasso Sea
atgaaaaaaaaaagcttttcttatcaagatttaattagttgcggaaatggtgacctttttggtcctggaaatgctaaacttccattgcctccaatgctgatgtttgacagaataagcgaaattagtgaaaataagggaaattttaaaaaaggatacataaaagccgaactagatataaaagataatctttggttttttgactgtcactttaaagaagatccagtaatgcctggctgtctaggtttagatgcaatgtggcagttagtaggattttatcttggatggcttggaaatcctggaagaggtagggcgttaggagttggaacagtaaaatttacaggagaagtaataaaaactgtaaaaatggcaacttatgaaattgatagaaaagaat

SEQ ID NO: 285310 - DNA, 340 bp, Unknown
  Bacterial polypeptide expressing nucleotide sequence isolated from the Sargasso Sea
atcaatcctgaattgtggttctttaaatgtcactttaaagaggatccggtaatgcctggctgtctaggcttagatgctatgtggcaactgctaggtttttatttgttatggactgggttgccaggaattggaagagctcttggagcagaaaacgtaaaattttttgggcaagtacttcctaaagcaaagaaagttacttatagactcgacattaaaagagtaataaatcgtggagctattgtaggtcttgcagatggcgaaatgttagttgatgataaaaaaatatatagtgcagagaaattaaaggtgggtttgtttaaagatcctagtaatttttgat

SEQ ID NO: 285311 - DNA, 377 bp, Unknown
  Bacterial polypeptide expressing nucleotide sequence isolated from the Sargasso Sea
agatgaaggaaaatttaaaaaaggtataattaaagctgagttggatattaaagataatatgtggttttttgattgtcattttaagagtgatcctgtaatgcctggatgtcttggattagacgcaatgtggcaattagttgggttttacttaggatggataggtgaaccaggtaaaggacgtgctttaggtgtaaattctgttagatttacaggagaagttattaaaaaagttaaaatggcaacttacgaagttaatatgaaaaaagttttaaaaacagaaggtggaactgttggatttgccgacggtattttaaaagctgatgataaacaaatatatactgctgaaaatttaaaagttggagtttacaaacaatgaa

SEQ ID NO: 285312 - DNA, 520 bp, Unknown
  Bacterial polypeptide expressing nucleotide sequence isolated from the Sargasso Sea
gttaatcctaaaagttcctatacaaaagaagaactaattgcatgttcaaatggagaattattacaaaaagaaggtgatggacgattgccatcagacctaatgttaatgttcgatgaaatagttaatattgatgatttttcaggaaattataataaaggctcaattgaagctgtgctaaacgtaaaccctgatttgtggttttttaagtatcattttaaagaagatcctgttatgccaggatgtctaggtcttgacgctatgtggcaacttcttggattttacttgttgtggactggcttgccaggaattggaagagctcttggggctgaaaatgtaaagttctttggacaagttcttccaaaagcaaaaaaagttgtatataaattagatattaaaagggttatcaatagaggtgcaatagttggtttagcagatggtgaaatgtttgttgataataaaaaaatctatagcgctgaaaaattaaaggttggtttatttaaagatccaagtaatttctgat

SEQ ID NO: 285313 - DNA, 290 bp, Unknown
  Bacterial polypeptide expressing nucleotide sequence isolated from the Sargasso Sea
tatgcaaaaaaatagctttaattacgaagagttaattgcttgtggtaaaggtgatttatttggagaaggaaatgcaaaacttccattgcctccaatgttaatgtttgacagaataacccagataaaaaaggaccttggtgaatttaaaaaaggatatattaaagccgaattagatatcaaagaaagtttatggttctttgattgtcacttccaaaatgatccggttatgcccggttgtctagggctagatgcaatgtggcagttagtaggtttttatttagggtggatag

SEQ ID NO: 285314 - DNA, 250 bp, Unknown
  Bacterial polypeptide expressing nucleotide sequence isolated from the Sargasso Sea
atgtggcagttggttggtttttatcttggctggataggaaacccaggaaaaggtagggctttaggagtaaatgctgtaaaatttactggggaagtattaaaatcggccaaaatggctacatacgaaatagatatgaaaagaattttaataaaagaaggaactacagttggactagctgatggaattttattagctgatggaaagaagatatattccgcagaaaatttaaaagtgggattgtttaaataat

SEQ ID NO: 285315 - DNA, 334 bp, Unknown
  Bacterial polypeptide expressing nucleotide sequence isolated from the Sargasso Sea
ggatataaaagataatttatggttttttgattgtcattttaaaaatgatccagttatgccaggttgtctaggtctagatgcgatgtggcaattagttggtttttatttaggatggataggtgaaccaggaaaaggaagggctttaggtgttaattctgtaaaatttactggagaagtgctaaaaaaagtcaaaatggcaacttatgaaataaatatgaaaagaattttaaaaaaagaaggtgctgtagttggtcttgctaatggtatactgagtgcagataaaaaaataatttatacagctgaaaatttaaaagttggattattcaagtcatga

SEQ ID NO: 285316 - DNA, 523 bp, Unknown
  Bacterial polypeptide expressing nucleotide sequence isolated from the Sargasso Sea
aatgtttcatcctaaaagctcctataacaaagaagaactaattgcatgttcaaatggagaattatttacaaaagaaggtgatggtcgattaccctcagacctaatgttaatgtttgatgaaatagttaatattgatgatttttcaggaaattataacaaaggttcaattgaagctgtgctaaacgtaaaccctgatttgtggttttttaagtatcattttaaggaagatcctgtcatgccaggatgtctaggtcttgacgctatgtggcaacttctaggattttacttgttgtggactggcttaccaggaattggaagagctctaggagctgaaaatgtaaagttctttggacaagttcttccaaaagcaaaaaaagttgtatataaattagatattaaaagggttatcaatagaggtgcaatagttggtttagcagatggtgaaatgtttgttgataataaaaaaatctatagcgctgaaaagttaaaagttggtttatttaaggatccaagtaatttctaa

SEQ ID NO: 285317 - DNA, 355 bp, Unknown
  Bacterial polypeptide expressing nucleotide sequence isolated from the Sargasso Sea
agggcttataaaagctgaacttgatataaaagataagatgtggttttctgattgtcattttaaaggagaccctgttatgcctggatgtcttggattagatgccatgtggcaaatggtgggtttttatttaggatggatgggcgaaccaggaaaaggacgtgccctaggtgtaaattctgttagatttacaggggaagttcttaaaaaagtcaaaatcgcaacctatgaagttgatatgaaaaaggttttaaaaacagaaggtgggacagttggttttgctgatggagttttaaaagcagatggaaaacaaatatactctgctgaaaatctaaaggttggagtgtacaaacaatga

SEQ ID NO: 285318 - DNA, 508 bp, Unknown
  Bacterial polypeptide expressing nucleotide sequence isolated from the Sargasso Sea
tatgataaaaaaaaacagttttaaatatgaggaattaattgattgtgcaaatggaaaactatttggaccaggaaatgcgaaattgccatctccgccaatgctcatgttcgatagaattacaaatatacaagataaaaagggggaatttaataaaggtcttattgaagcagaacttgatataaaagataaaatgtggttttttgattgccactttaaacaagaccctgtaatgcctggttgccttggattagatgctatgtggcaattggtaggtttttttttaggttggataggagagccagggaaaggacgcgcacttggagtaaacgcggtaaaatttactggtgaggttttaactaatacaaaaattgctaagtacaaagttgatatgaaaagattaatgaaaagagaaggctctgttgttggtttagcaaatggcatattatatgctgatgaaaaaccaatttatgaagctgaaaacttgaaggtaggattatataaatcatga

SEQ ID NO: 285319 - DNA, 415 bp, Unknown
  Bacterial polypeptide expressing nucleotide sequence isolated from the Sargasso Sea
tatgaaaaaaaactcctactcttacaatgaacttattaattgtggtgaagggaaattatttggccctggtaatgctaaattaccacttcccccgatgctaatgtttgatagaattacagaaattaatgatgataaaggtgcttttaaaaagggctcattaaaagcagaattagacataaaaaaaaatctttggttttttgattgtcattttaaagaggatcccgtcatgcctggatgtctaggtctagacgctatgtggcaattggtggggttttatctaggttggattggaaatccaggaaaaggaagagctttaggagttggaacagtgaaatttacaggtgaagttttgaaagatgtaaaaatggtaagatatgagattgatatgaaaaaaataatgtcccctggaggtact

SEQ ID NO: 285320 - DNA, 370 bp, Unknown
  Bacterial polypeptide expressing nucleotide sequence isolated from the Sargasso Sea
ttttcaaaggccaatcattgctgagctagatatacatccagatttgtggttttttgattgtcatttcaaaggtgatcctgtgatgcctggttgtttaggactagatgcaatgtggcaactggttggattttatttatgttggatggataatccaggtagaggcagagcattaggcgcttctgaagttaaattttttgggcaagttcttccctcagccaaactcgtaacccttaaaattgatatgaaaagaattcttaatcttgatttaactgtaggaatcggtgaaggctctatgcttgtagatggtagagagatttatagtgccaagggtctaaaagttggtcttttccaagatacttctagtttttaa

SEQ ID NO: 285321 - DNA, 349 bp, Unknown
  Bacterial polypeptide expressing nucleotide sequence isolated from the Sargasso Sea
tttggaagcagaattagacatcaaagatgatttgtggttttttaaatgtcattttcaaaaagaccctgtaatgcctgggtgtcttgggttagacgctatgtggcaactggttggattttatcttggttggacaggagaaccaggtaaaggaagggctttaggagtaagtacagttaaatttactggtgaagtgttaaaaaaaattaagatggctacttataaaataaatataaaaagaattttaaaaaaagagggcgctgtagtaggattagcaaatggtactttggacgctgatggaaaagtgatctatgtagcagaaaatttgaaagtaggtttgtttaaatcatga

SEQ ID NO: 285322 - DNA, 487 bp, Unknown
  Bacterial polypeptide expressing nucleotide sequence isolated from the Sargasso Sea
tatgaaacaaaattcatttacctacgatcaattaattgattgtgcaaaaggtatcctttttggaaaaggaaatgcacaacttccaatgcctcctatgttaatgtttgatagaattacaagaattaatgagaatggtggagtattctctaaaggtgaggttattgcagaattagatattagagaagacttatggttttttgaatgtcattttaaagatgatccggtaatgccaggttgtttaggtttggatgctatgtggcaattacttggtttttatttaggatggcttggtcaaccaggaaaaggtagggctttaggagttggtgaggttaagtttactggtcaggtattacaaaaagtaaaaaaagtaacttaccatatatctcttaaaagacttatactaagaaaattgattttaggagttggagatggtgttttaaaggctgacggtgaaacaatttatgaagctaaagatatgaaagtcggt

SEQ ID NO: 285323 - DNA, 526 bp, Unknown
  Bacterial polypeptide expressing nucleotide sequence isolated from the Sargasso Sea
aatgagttttattccaaaaaattactattcaaaagatgaactcatagcttgctcaaatggtaagttatttacaaaagatggtgacggaaaacttccatcagatcaaatgttgatgtttgatgagattaatagaattgataatgattctggtacatataaaaaaggctcaattgaagcaacactcaacataaatcctgatttatggttttttaaatatcattttaaagatgatccagttatgcctggatgccttggcttagatgctatgtggcaacttttaggtttttatcttctttggacaggcttgcctggcattggaagagcgttaggagctgaaaatataaagttttttggacaagttttacctacttcaaaaaaagttttatataaaattaatattaaaagaattataaatagagatgctatagttggccttgcagatggtgaaatgtacgttgatgatagaaaaatctacactgctgagaagcttaaagtaggcttatttagagatcctagtaaattttaa

SEQ ID NO: 285324 - DNA, 508 bp, Unknown
  Bacterial polypeptide expressing nucleotide sequence isolated from the Sargasso Sea
tatgaaacaaaattcttttaactatgatcaactaattgactgcgcaaaaggtgtgctttttggaaaagggaacgcacaacttccaatgcctcctatgttaatgtttgatagaatcacttcaataaacgagagcggtggagttttttcaaaaggtgaagttattgcagaattagatattaaagaagatctttggttttttgaatgtcattttaaagatgacccagtcatgccaggttgtttaggcttggatgctatgtggcaattacttggtttttatttaggatggttaggccaaccaggtaaaggtagagctctgggagtaggtgaggttaaatttacaggtcaagtattacaaaaagttaaaaaagtaacttatcacatatctcttaaaagacttatactaagaaaactaattttaggtgttggggatggtgttttaaaagctgacggtgaaacaatttatgaagctaaagatatgaaagttggtttattttcacctgagaagtaa

SEQ ID NO: 285325 - DNA, 259 bp, Unknown
  Bacterial polypeptide expressing nucleotide sequence isolated from the Sargasso Sea
atgtggcaattagttggtttctatttaggatggttagaacagccaggtaaaggaagggctcttggtgttggtgaagttaaatttaccggacaagttttagatacagtaaaaaaagtcacttaccaaatttctattaaacgattaatacttagaaaattaattctgggggtggctgatggtgttcttaaagcagatggaaaacctatttatgaagctaaagatatgaaggttggtctttttcaatctgataataaataac

SEQ ID NO: 285326 - DNA, 586 bp, Unknown
  Bacterial polypeptide expressing nucleotide sequence isolated from the Sargasso Sea
ttgaattgcgtgttacttctcatcggcagagcagaagggatatggaataaagtgagttcagaacgcaaattcagttttaattacgacgaacttatagaatgtgccaaaggccggctatttggaccaggcaatgcaagactacctctcccaccaatgctgatgtttgatagaattacccgaatttctgagaagggtggggccaatggaaagggagaagtcgaggcagagtttgatgtgaaaccggatctatggtttttcaagtgtcattttgagagtgacccagttatgcccggttgcctggggatggatggtctgtggcaattactaggttttacacttggatggctgggcggccctggttctggcagggcaatatctgtaggtgaggtaaaattcagtggtcaggtcctcccaacagcaaagcttttaaaatttcagcttgacctaaaaagggttataatgcgccgcctgtttatgggaatcgctgatgggcgggtcctgtgtgatggcgaaacggtctttgaagcaaaagatattaaggttggtttatttgctaacaatgcaagagcagaggctatcagttaat

SEQ ID NO: 285327 - DNA, 529 bp, Unknown
  Bacterial polypeptide expressing nucleotide sequence isolated from the Sargasso Sea
atgaataaagtattcaaacctaaagactcctattcaaaagaagatcttgttgattgcggatttggtcagctattcggtgaaggcaatggtaggcttcctgttgatccaatgctaatgtttgatcagattacaaagataaataatactggtggtaaatattcaaaaggtgaggtttatgcagagctggatgtaaaatctgatctctggttttttgattgccatttcaaagaagatcctgttatgccagggtgtcttggacttgatgcaatgtggcaattgcttggtttttttctatgctggagtgaattacctggaattggaagggctttaggagctgaaaaagttaaattctttggtcaagtgcttccaacggctaaaaaagttaactatattcttgatataaaaagggttgtaaaccgtggagctgtagttggtttttctgacgctgatatgtttgtagacgataaacatgtttattcagcaaataacctaaaagtaggcctttttgctgacccaagcaagttttaag

SEQ ID NO: 285328 - DNA, 425 bp, Unknown
  Bacterial polypeptide expressing nucleotide sequence isolated from the Sargasso Sea
aatgcgacaaaaaaatacttatagttatgatgaattaattaattgtgcgaatggctctctatttggagaaggaaatgcacgcctaccactacccccaatgctaatgtttgatagaattacacaaataaaatccggagaaggaaagtttaaaaaaggtgttgtaaaagccgaactcgacataaaagataaaatgtggttttttgattgtcactttaagggagatcctgttatgccaggatgtttagggttagacgctatgtggcagttagttggattttatctaggctggatgggagaaccaggtaaaggacgcgctctaggagtaaactctgttagattcacgggagaggttcttaaaaaagtcaaaatcgcaacatataaagttgatatgaaaaaaattttaaaaactgaaggcgggacagttg

SEQ ID NO: 285329 - DNA, 397 bp, Unknown
  Bacterial polypeptide expressing nucleotide sequence isolated from the Sargasso Sea
aatgaaacaaaaaaacagttacaactataatgaattaattgattgcgcaaatggcaatttatttggtgaagggaatgcacgtttaccgctaccgcctatgttaatgtttgatagaattacagaaattaaatccggtgaaggaaaatttaaaaaaggtcttataaaagctgaacttgatataaaagaaaaaatgtggttttttgattgtcattttaaggaggatcctgttatgccaggatgtctagggttagatgctatgtggcaaatggtaggattttatttgggatggatgggagaaccaggaaaaggacgtgctcttggtgtaaattctgttagatttacaggagaagttcttaaaaaagtcaaaatggcaacttatgaagttgatatgaaaaaa

SEQ ID NO: 285330 - DNA, 505 bp, Unknown
  Bacterial polypeptide expressing nucleotide sequence isolated from the Sargasso Sea
aatgaaacaaaaaaacagttacaactacaatgaattaattgactgtgcaaatggttctctttttggagagggaaatgcacgtctaccgctacctccgatgttaatgttcgatagaattacagaaatcaaatctggcgatggaaaatttaaaaaaggacttgtgaaagctgaacttgatataaaagataagatgtggttttttgactgccactttaagaaagatcctgttatgccgggatgtctagggttagatgctatgtggcagttagttggattttatttgggatggatgggtgaaccgggtaaaggacgtgctttaggcgtaaattctgttagatttacaggagaagttcttaaaaaagtcaaaatagcaacttatgaagttgatatgaaaaaagttttaaaaactgagggtggaacagttggttttgctgatggaattttaaaagcagatggaaaacaaatatattctgctgaaaatctaaaagttggagtttataaataa

SEQ ID NO: 285331 - DNA, 484 bp, Unknown
  Bacterial polypeptide expressing nucleotide sequence isolated from the Sargasso Sea
atgaaaaaaaaagatagttatgactataaagagctaatagattgtggaaaaggtttaatatttggcgagggaaatgcaaaactacctcttccaccaatgttgatgttcgatagaataacaaaaattcaagaaaatagcggcatatataaaaaaggatttataaaagcagaactagacataaaagacgatctgtggttctttaattgtcactttcaggatgatcctgtcatgcctggatgtttaggattagatgctatgtggcaattagtaggattttatttaggatggataggcaatcctggtaagggtagagcgttaggagtaagtactgttaaattcacaggtgaagtattaaaaaaaactaagatggcagtatatgaaatagatatgaaaagaattcttatcaaagaaggaacaacagttggattagctaatggaatattaaaagctgatgggaaaaaatatatacagcagaaaacttaaa

SEQ ID NO: 285332 - DNA, 1105 bp, Unknown
  Bacterial polypeptide expressing nucleotide sequence isolated from the Sargasso Sea
atgaatcagacagatctaattaagcaaatttatagcaattatctttcaaaaattattgatgcaaaaagttttttcaatagacctctaacatttacagaaaaaattcttttttcacatctttccaaagatttacaatctataccggaaagaactaagacattttgcaccttaagcccagatcgtgtggcaatgcaagatgctactgctcaaatggctttattacagtttattaatgcaggaatgcaaacgacagcagttccaaccactgttcattgcgaccatttaatcactgctattaaaggagctgacgatgatctcgataatgctctgttaacaaacaaagaagtgtatgactttttaaaatctgtttgtgcaaaatttggaataggtttttggaaacctggagcaggaattattcatcaaactattttagaaaattatgctgtacctggaactatgatgattggaactgattctcatactccaaatgccggtggactaggcatggttgcgattggagttggaggagcagatgctgttgatgtgatgaccaactctccgtgggaagttaactggccaggtataattggagtcaaacttactggtcaactaagtgattgggcatctccaaaagatattattctaaaacttgctggtatccttacagtaaaaggtggaactggaaaaataattgaatactttggtgaaggaactgagacaatcagttgtactggaaaggcaactataacaaacatgggagctgaagttggagcaacaacatctatttttccatatgataaaaaaatgtatgaatatttagaagcaaccaataggaaagatattgctgatttagcagatgaaattaaaaatcatcttaaagcagatgatgatgttcatgaaaatcctgaaaaatactatgatgaagtcatagaaattaacttatctgaattagaaccacatattgttggaccctatagccctgacttatcaagagaaatttcggatatgccagatgcagttaaagataataattatgatgatgatttaaaggttggattgattggaagttgtacgaattcttcttatgaagatattgaaaaagctg

SEQ ID NO: 285333 - DNA, 276 bp, Unknown
  Bacterial polypeptide expressing nucleotide sequence isolated from the Sargasso Sea
tggttttagacgcaatgtggcaattagtaggattttatttatgttggttaggtaatcctggaagaggaagagcattaggagcatcagaagttaaattctttgggcaagttttgcctaccgctaagaaagtaactttaacaattgatatgaaaaggatattgaacttagatctaactgtaggaattggtgaaggcacaatgttagtggatgatagagagatttatactgctaaaggacttaaggttggactctttcaagatacttctagtttttaaa

SEQ ID NO: 285334 - DNA, 374 bp, Unknown
  Bacterial polypeptide expressing nucleotide sequence isolated from the Sargasso Sea
cacagagagcggcttgtactctaagggccaagtaatcgctgaaatgagtatatcaaaggatagttggttttttgactgtcatttcagaggtgacccagtcatgccgggatgcttgggccttgatgcactatggcagctgcttggattttatctgggctggctcggtcaaccgggaaaaggaagggcgctgggagtcggggaggtaaaattctttggaatgattactccaaaaattaaaagacttgaatatatcataaatattaaaaaactgattacaagaaatctcacgttgggcgttgctgatggtgacctttatgccgatggagagaaagtttattctgcggaaaatctaaaagttggcttatttgaatagt

SEQ ID NO: 285335 - DNA, 508 bp, Unknown
  Bacterial polypeptide expressing nucleotide sequence isolated from the Sargasso Sea
aatgaaacaaaaaaacaattacaactacaacgaattgattgactgtgcaaatggtatcctttttggtgaaggaaatgcacgtttaccatctccaccaatgttaatgtttgacagaattactcaaattcaatctggtgaaggaaagtataaaaaaggtataataaaagctgaattggatattaaagataatatgtggttctttgattgtcattttaagagtgatcctgtgatgcctggatgtcttggattagatgcaatgtggcaattagttggcttttttttaggatggataggtgagccaggtaaaggacgtgctttaggtgtaaattctgttagatttacaggagaagttttaaaaaaagttaagatggcaacttatgaaattaatatgaaaaaagttttaaaaacagaaggtgggactgttggatttgcagacggtattttaaaagctgatgataaacaaatatatactgcagaaaatttaaaagttggagtttataagcaatga

SEQ ID NO: 285336 - DNA, 267 bp, Unknown
  Bacterial polypeptide expressing nucleotide sequence isolated from the Sargasso Sea
gtttggggttagacgcaatgtggcagttggtcggtttttaccttggttggcttggaaaccctggcaagggtagagcattaggagttggaactgtaaaattcacaggtgaagttttgaaaaatattaagttagtaacgtataagattgatatgaagaaaattatgtccccagggggaacaactgtaggacttgcaaatgggttcgttttcgcagatgataaaaaaatatattcagcagacagcttaaaagtaggattatttaaataat

SEQ ID NO: 285337 - DNA, 400 bp, Unknown
  Bacterial polypeptide expressing nucleotide sequence isolated from the Sargasso Sea
tatggaaaaaaaatcatcatacaattatgaagaactaattaattgcggaaatggcaagctttttgggccaggaaacgccaaattaccacttcctccaatgcttatgtttgatagaataacagaagttaaagaagataatggtgctttcaaaaaaggttctattactgctgaactagatataaaagatgacctttggttttttagttgtcattttaaggaagatccagttatgcctggatgtcttggtttagacgcaatgtggcaactggtcggtttttatctaggatggctaggaaatcctggaaaaggaagagctttgggagttggcacagtaaagtttactggagaagttttgaaaagtgtaaaaaaagcaaaatatataatcgatagaaaaaaatta

SEQ ID NO: 285338 - DNA, 361 bp, Unknown
  Bacterial polypeptide expressing nucleotide sequence isolated from the Sargasso Sea
aatgaaacaaaaaaacaattacaactacaatgaattaattgactgtgcaaatggctctctttttggagagggaaatgcacgtttgccgctacctccaatgttaatgtttgatagaattacagaaataaaatctgggataggcaaatttaaaaagggagtcataaaagctgagcttgatataaaagacaagttgtggttttttgattgtcattttaaaggtgatccggttatgcctggttgtctaggattagatgctatgtggcagttagttggattttatttgggatggatgggtgaaccgggtaaaggacgtgctttaggtgtaaattctgttagatttacaggtgaagttcttaaaaat

SEQ ID NO: 285339 - DNA, 436 bp, Unknown
  Bacterial polypeptide expressing nucleotide sequence isolated from the Sargasso Sea
atgcaaaaaaatagttacaattacgatgagctaatttcgtgtgcagagggaaaactatttggtgaaggaaatgctaagctaccattacctccaatgttgatgtttgatagaattgcagaaataaaaaaagatacaggtgaatttaaaaaaggttttattaaagcggagcttgatattaaagacaacctatggttttttgattgccattttaagaaggacccagttatgccaggttgccttggcttagatgctatgtggcagttagttggattttatttaggctggataggtgaaccaggaaagggtagagctttaggagtaaattctgtaaaattcacaggtgaagtattgaaaaatattaaaatggcgacttatgaaataaatatgaaaagaattttaaaaaaagaaggtacagttgttggattagctaatggta

SEQ ID NO: 285340 - DNA, 526 bp, Unknown
  Bacterial polypeptide expressing nucleotide sequence isolated from the Sargasso Sea
aatgacatttataccgcaaaatagttactctaaagatgatttgatagcgtgtgcaaatggagagttattcactaagcctggagacggaagattaccatcagatcaaatgttaatgtttgatgaaatatcaaatattgatgattccagcggaacgtacaaaaaaggttcaataagtgctcatttgaatattaatcctgatttatggtttttcaaatgccactttaaaactgatcctgtaatgccaggttgtcttgggctagatgcaatgtggcagcttttaggattttatttgttatggtctgggcttcctggtattggaagagccttgggtgctgataatgtaaaattttttggtcaagttttaccaaatgcgaaagaggtaacatataaaattgatatcaaaagaattattaatagaggtgcaatagttggtcttgctgatggtgagatgtttgttgatgacagaaaaatatatactgcagagaaacttaaggtaggattatttaaggatccgagtaatttttaa

SEQ ID NO: 285341 - DNA, 502 bp, Unknown
  Bacterial polypeptide expressing nucleotide sequence isolated from the Sargasso Sea
aatggaacaaaaaaataactataactatgaagatcttttaacttgcgcaaaaggtgaattatttggaccaggtaatgcacaattaccaatgccgcctatgctcatgtttgaaaaaataactaatatatcatcaaatggtggtacaaatgataaaggtgttatacaggccgaaatggctataaaaccagatttatggttttttgattgtcattttattgatgatcctgtcatgcctggttgcttaggtttagatgcgatgtggcaattacttggattctacctaggttggcttggtgaaaaaggaagaggaagagcaatttcagttggaaatgtaaagttttcaggaatgatattaccccaaacaaaaaaattagaatatactattaacttgaaaagggtcttaacaagtaaattagttctaggaattgctgatggcttgttatcagcagatggtgaattaatatatgaagcaagcgatctaagagtggcattgttttcataa

SEQ ID NO: 285342 - DNA, 502 bp, Unknown
  Bacterial polypeptide expressing nucleotide sequence isolated from the Sargasso Sea
atgaaaaaagggtcctttaattacgatgaattaataacttgtgcaaatggtgagctttttggacctggtaatgcaaaattaccttctcccccaatgttaatgttcaatagaataacagaaatagatgaaaataaaggtttttttaataaaggattaattaaagctgaacttgatataaaagataacctttggttttttgattgtcattttaaagaagatccggtaatgccaggatgtcttgggctagacgctatgtggcaactagttggtttttatttggggtggctaggaaatccaggtagaggtcgagctcttggtgtaaatagtgtaaaatttactggagaagttcttaaaaatgtcaaaatggcaacttatgtaattgatatgaaaagaatactgattaaagaaggtacaacagttggtttggcaaatggaattttgttggcagatggtaaaaaaatatattcagctgaaagtttaaaagtgggattatttaaataat

SEQ ID NO: 285343 - DNA, 256 bp, Unknown
  Bacterial polypeptide expressing nucleotide sequence isolated from the Sargasso Sea
gtggcacttgttggcttttatcttggttggctaggtcaaccagggaaggggagggcgcttggtgttggagaagttaaattcaccggtcaagtattgaatactgtaaaaaaagtaacttatcacatctctttaaaaagattaattctaagaaaattaatcttaggtgttgctgatggcattctcaaagctgatggaagccctatttatgaagcaaaagatatgaaggttggtctttttcaatctgcagaaaagtaaa

SEQ ID NO: 285344 - DNA, 508 bp, Unknown
  Bacterial polypeptide expressing nucleotide sequence isolated from the Sargasso Sea
aatgaaacaaaaaaacaattacaactacaacgaattaattgactgcgcgaatggcgtccttttcggtgaagggaatgcgcgtttaccatcgcctccaatgttgatgtttgacagaattactcaaattcaatcgggtgagggaaaatttaaaaagggtataataaaagctgaattagatattaaggataatatgtggttctttgattgtcatttcaaaagtgatcctgtgatgcctggatgtcttggattagatgcaatgtggcaattagttgggttttacttaggatggatgggtgaaccaggtaaaggacgtgctttaggcgtaaattctgttagatttacaggagaagttataaaaaaagttaaaatggcaacttatgaagttaatatgaaaaaagttttaaaaacagaaggtgggactgttggttttgcagatggtattttaaaagctgacgataagcagatatatactgcggaaaatttaaaagttggagtttataagcaatga

SEQ ID NO: 285345 - DNA, 505 bp, Unknown
  Bacterial polypeptide expressing nucleotide sequence isolated from the Sargasso Sea
ctcctataacaaagaagaactaattgcatgttcaaatggagaattatttacaaaagaaggtgatggtcgattgccttcagacttaatgttaatgttcgacgaaatagttaatattgatgatttttcaggaaattataataaaggctcaattgaagctgtgctaaacgtaaaccctgatttgtggttttttaagtatcattttaaggaagatcctgtcatgccaggatgtctaggtctagatgctatgtggcaacttctaggattttacttgttgtggactggcttaccaggaattggaagagctcttggagctgaaaatgtaaagttctttggacaagttcttccaaaagcaaaaaaagttgtatataaattagatattaaaagggttatcaatagaggtgcaatagttggtttagcagatggtgaaatgtttgttgataataaaaaaatctatagcgctgaaaaattaaaagttggtttatttaaggatccaagtaatttctga

SEQ ID NO: 285346 - DNA, 1414 bp, Unknown
  Bacterial polypeptide expressing nucleotide sequence isolated from the Sargasso Sea
gtcaaacttactggtcaactaagtgattgggcatctccaaaagatattattcttaaacttgctggtatctttacagtaaaaggtggaactggaaaaataattgaatactttggtgaaggcactgagacaatcagttgtaccggaaaggcaaccataacaaatatgggagctgaagttggagcaacaacatctatttttccatatgataaaaaaatgtatgaatacttagaagcaaccaatagaaaagatattgctaatttagcacatgaaattaaaaatcatctcaaagcagatgatgatgttcatgaaaatcctgaaaaatactatgatgaagtcatagaaattaatttatcggaattagaaccacatattgttgggccctatagccctgacttatcaagagaaatttcggatatgccagatgcagttaaagataataattatgatgatgatttaaaggttggattgattggaagctgtacaaattcttcttatgaagatattgaaaaagctgctcatgtagctaaacaagctcttgatgcgggattaaaagcaaagtcagagttttatatcactcctggatccaatcagattaaagctacaatggaacgagatggatataccaaaatttttgaagaacttggtggaaaagttttagcaaatgcttgtggaccatgtattggtcaatggaaaagatctgatattagtgatggggaaaaaaatacaattattacctcctttaacagaaattttgcaaaaagaaatgatggaaatgcggcgacagaatcatttgtagccagcccagagattgttactgcactagcaatatcaggtaaattaagttttaatccttcaaaagataaactaactcttaatgatggaagtagttttagctttgaatcacctgtaggctcggagttacctgaaatgggatttgaaaaaattggaagtgatgactttctaaaagctgaacttcgtccaaatactgagattgttatcaaagaagaaagtgatcggttgcaggtattagaaccatttatggaatggaataaggaagagatgaataatttaaaaattttattaaaagcagaaggaaaatgtacaactgaccatgtctctcctgctggcccttggctaaaatatagaggccatcttgaaaatatttcccaaaatatgtattctggagctcttaatgcttttacaaaaacaaatggtgaagcaatagatttaattaatgataaaaccgataatatttatgaagtcgctaaaacttacaaagaaaataatattgattggattgctgtagctgatgagaattacggagaaggttcaagtagagagcatgcagcaatggagcctagatttatgggctgtaaaattatcattgcaaaaagttttgcaagaattgctcaaa

SEQ ID NO: 285347 - DNA, 294 bp, Unknown
  Bacterial polypeptide expressing nucleotide sequence isolated from the Sargasso Sea
tatgaaaaaaaactcttactcatacgatgagcttattaattgtggtgagggcaaattatttggtcctggtaatgctaaattacctcttccaccaatgcttatgtttgatagaattacagaaattaatgatgacaaaggagcttttaaaaaaggtttattaaaagctgagctagatattaaaaatgatctttggttttttaattgtcattttaaagaagatcctgtgatgccaggttgtcttggacttgacgctatgtggcaattagtagggttttatttgggctggataggaaa

SEQ ID NO: 285348 - DNA, 278 bp, Unknown
  Bacterial polypeptide expressing nucleotide sequence isolated from the Sargasso Sea
aggatgtcttggtttagatgccatgtggcaacttgttggtttttatcttggttggttaggacagccaggcaaaggaagggcattgggtgttggtgaagttaaatttactggacaagtactaaacactgttaaaaaagtgtcttatcatatttctttaaaaaaattgattttaagaaaattaattttaggtgttgctgacggtgttttaaaagcagatggggaatcaatttatcaagctaaagatatgaaggttgggctatttacccctaataaataaa

SEQ ID NO: 285349 - DNA, 1131 bp, Unknown
  Bacterial polypeptide expressing nucleotide sequence isolated from the Sargasso Sea
tatgaatcagacagatctaattaagcaaatttataacaattatctttcaaaaattattgacgcaaaaagttttttcaataggcctctaacatatacggaaaaaattcttttttcacatctttcggaagatttacagtcaattcctgaaagaactaaaacattttgcaccttaagtccagatcgtgtggcaatgcaagacgcgactgctcaaatggctttattacaatttatcaatgcaggaatgcagacgacagcagttccaactactgttcattgcgatcatttaatcactgctattaaaggagctgacgatgatctagataacgctttgctaacaaataaagaagtgtatgactttttaaagtctgtttgtgcaaaatatggcataggtttttggaaacctggtgcaggaattattcatcaaaccattttagaaaattatgctgtacctggaactatgatgattggaactgattctcatactccaaatgccggtggactaggaatggttgcgattggagttggaggagcagatgctgttgatgtgatgactaactctccgtgggaagttaactggccaggtatgattggagtcaaacttactggtcaactaagtgattgggcatctccaaaagatattattcttaaacttgctggtatccttacagtaaaaggtggaactggaaaaataattgaatactttggcgaaggaacagaaacgattagctgtaccggaaaggcaaccataacaaatatgggagctgaagttggagcaacaacatctatttttccatatgataaaaaaatgtatgaatacttggaagcaaccaatagaaaagatattgctgatttagcgcatgaaattaaaaatcatcttaaagcagatgatgatgttcatgaaaatcctgaaaaatactatgatgaagtcatagaaattaatttatcagaattagaaccacatattgttggaccctacagccctgacttatcaagagaaatttcggatatgccagatgcagttaaagataataattatgatgatgatttaaaggttggattgattggaagttgtacaaattcttcttatgaagatattgaaaaagctgctcatgtagctaaacaagctcttga

SEQ ID NO: 285350 - DNA, 508 bp, Unknown
  Bacterial polypeptide expressing nucleotide sequence isolated from the Sargasso Sea
aatgaaacaaaaaaacaattacaactataacgaattaattgactgtgcaaatggagccctttttggtgaagggaatgcgcgtttaccatcaccaccaatgttaatgtttgatagaattacacaaattcaatcaggtgaaggaaaatttaaaaaaggaataattaaagctgagttagacgttaaagataatatgtggttctttgattgtcattttaagagcgatcctgtgatgcctggatgcctaggattagacgcgatgtggcaattagttggcttttacttaggatggataggtgaaccgggtaaaggacgtgctttaggtgtaaattctgttagattcacaggagaagttataaaaaaagttaaaatggctacttacgaagttaatatgaaaaaagttttaaaaacagaaggtggaactgttggatttgctgacggtattttaaaagctgatgataaacaaatatatactgcagaaaatttaaaagttggagtttataaacaatga

SEQ ID NO: 285351 - DNA, 382 bp, Unknown
  Bacterial polypeptide expressing nucleotide sequence isolated from the Sargasso Sea
aaaaggatacagggtgaatttaaaaaaggatttataaaagctgagcttgatattaaagacaacctatggttttttgattgtcattttaagaaagacccagttatgccaggttgtcttggcttagatgctatgtggcagttagttggattttatttaggctggataggtgagccaggaaagggtagagctttaggagtaaattctgtaaaatttacaggtgaggtattaaaaaatgttaaaatggcgacttacgaaataaatatgaaaagaattttaaaaaaagaaggtactgctgttgggttagctaatggtattttaagcgcagatggtaaaataatttatactgcggaaaatcttaaagtggggttattcaaatcatgaa

SEQ ID NO: 285352 - DNA, 487 bp, Unknown
  Bacterial polypeptide expressing nucleotide sequence isolated from the Sargasso Sea
atgaaaaaaaactcattttcatatgatgatctaataagctgcggaaatggccaactttttggacctgggaacgctaagcttccccttcctccaatgctaatgtttgatagaataactaaaataaacgaaaatgagggctcttttaaaaagggattaattaaagctgagctcgatataaaagatgaattatggttctttaaatgtcattttaacgaggatcctgtaatgccaggctgcttaggattagacgctatgtggcaactagttggtttttatttaggttggctaggtaatcctggaaaaggtagagctttaggagtcaatactgtaaaatttactggagaagttctcaaaaatgttaaaatggcatcatacgaaattgatatgaaaagaatattaattaaagaaggtactactgttggacttgcaaatgggattttgatggctgatggtaaaaaaatttattcagctgaaaacttaaagtagg

SEQ ID NO: 285353 - DNA, 352 bp, Unknown
  Bacterial polypeptide expressing nucleotide sequence isolated from the Sargasso Sea
aggctctataactgctgaacttgatataaaagatgacctttggttttttgattgtcattttaaagaagacccggttatgccaggatgtcttggattagacgcaatgtggcaattggtaggcttctatctaggttggcttggaaatcctggaaaaggaagagcattaggagttggtaatgtaaaatttactggtgaagttttaaaaagagtaaaaaaagcaaaatatataattgatatgaaaaaaattttatctcctagtggaacaacagttggtttggcaaatggtattttattagcagatgaaaaaaaaatttattcagcagaaaatttaaaagtaggattatttaaataa

SEQ ID NO: 285354 - DNA, 502 bp, Unknown
  Bacterial polypeptide expressing nucleotide sequence isolated from the Sargasso Sea
aatggaacaaaaaaataattataattatgaagatcttataacctgcgcaagaggtgaattatttgggccaggaaatgcacaattacctatgcctccaatgctaatgtttgacaaaataaataatatatcctcggaaggtggctctaataataaaggtgttataaatgctgaaatggaaataaaaccagacttatggttttttgattgccattttattgatgaccctgtgatgcctggttgcttaggtttagatgcgatgtggcaactacttggtttctacctaggttggcttggtgaaaagggaagaggaagggcaatatcagttggaaatgtaaaattttcaggaatgattttaccgcaaacaaaaaaattagaatatactattaatttgaaaagagttttaacgagtaagttggtgcttggaattgctgatggtatattatcagctgatggtgaaataatatatgaagcaagtgatcttagagtagcattgttttcataa

SEQ ID NO: 285355 - DNA, 508 bp, Unknown
  Bacterial polypeptide expressing nucleotide sequence isolated from the Sargasso Sea
tatgaaacaaaattcatttacctacgatcaattaattgattgtgcaaaaggtgttctttttggaaaagggaatgcacaacttccaatgcctcctatgttaatgtttgacagaattacttcaataaatgaaaatggaggagtattcgctaaaggtgaggttattgcggaattagatattaaagaagacttatggttttttgaatgtcattttaaagatgatccagtaatgccgggttgtttaggcttggatgctatgtggcaattactcggtttttatttaggatggcttggtcaaccaggaaagggtagagctttaggagttggtgaagttaagtttactggtcaggtattacaaaaagtcaaaaaagtaacttatcatatatctcttaaaagacttatattaagaaaattgattttaggagttggagatggtgttttaaaagctgatggtgaaacaatttatgaagctaaagatatgaaagtcggtttattttcacctgagaaataa

SEQ ID NO: 285356 - DNA, 526 bp, Unknown
  Bacterial polypeptide expressing nucleotide sequence isolated from the Sargasso Sea
aatgagttttaatcctaaaaataaatactccaaagaagaattggtagcatgttcaaatggtgagttatttaccaaagaaggagatggaaggctgccttctgatttaatgcttatgtttgatgaaatatcaaatattgatgatcattctggaatttataaaaaaggctcaatagaagcaaatctaaaaatcaatcctgacttatggttcttcaagtatcactttaaagaagaccccgtaatgccaggatgtcttggtttagatgcaatgtggcaattgttagggttttatcttctatggacaggcctacctggcataggaagagccttaggagcagataatattaaattctttggacaggttcttccaagtgctaataatgtgatttataaaatagatattaaaagagttattaatagaggagcaatagttggattggcagatggcgaaatgtttgtcgatggtaaaaaaatatatagtgctgagaaattaaaagttggcttatttaaagatccaagtagtttttga

SEQ ID NO: 285357 - DNA, 529 bp, Unknown
  Bacterial polypeptide expressing nucleotide sequence isolated from the Sargasso Sea
atggaattacccagcgacagaaaaaattcttatgattacgatgagcttttaagttgtgccaatgggactttattcagcccggacagcgggcgattgccattacctggaatgctcatgacagataggataaatctcatatccaaagagggtggagagtatggtaagggtgaaattcatgcagaattggatatcaatccagagatgtggtttttcaagagccattttcatgaagacccagtaatgcctggatgtcttggattagatgctctctggcaactggttggctttcatcttgtttggttgggtttcaagggtaggggtagagcccttggtgtgaataaggtacgatttaccggtcagatattacccacatcaaaattagtttcttttaagttagattttaaaagatttattacccgtaaacttattcttgcaattgcagacggaactgtcgctgtagatggaagaaaaatttacgaggcagaggatttacgtgttggattatttacgtccactgaggatttttaag

SEQ ID NO: 285358 - DNA, 508 bp, Unknown
  Bacterial polypeptide expressing nucleotide sequence isolated from the Sargasso Sea
atgaaacaaaaaaacaattacaactataacgaattaattgactgtgcaaatggtgtgctttttggtgaagggaatgcgcgtttaccatctccaccaatgttgatgtttgacagaattactcaaattcaatctggtgaaggaaaatttaaaaaaggtataataaaagcagaattagatattaaagataatatgtggttctttgattgtcattttaagagtgatcctgtgatgcctggatgtcttggattggacgcaatgtggcaattagttggcttttacttaggctggataggtgaaccaggtaaaggacgtgctttaggtgtaaattctgttagatttacaggagaagttataaaaaaagttaagatggcgacttacgaagttaatatgaaaaaagttttaaaaacagagggcggaactgttggttttgcagacggcactttaaaagctgatgacaaacaaatatacactgcagaaaatttaaaagttggagtttataagcaatgaa

SEQ ID NO: 285359 - DNA, 517 bp, Unknown
  Bacterial polypeptide expressing nucleotide sequence isolated from the Sargasso Sea
atgaacacatttactccccaatctagttatagttatgaagagattattgaatgtggaaaagggaatttatttggagaagggaatgctcaactacccgctccacccatgcttatgtttgaccgtattaccagagttaataaggacggcgggatacatggaaaaggcgaaataaccgctgaactcgatattaatgctgatttatggttctttaagtgtcattttttaggggatcctgtcatgccaggatgtttgggtcttgacgctttatggcaaatgctaggtttttatttaggttggcttggatacccaggaaagggtcgtgctctaggagttggggaaatcaaatttgtagaagaaataaaaccagataaagaattaattgaatataaggttagtttaaaaaaatctttaaataaaaaagggctatcaattggttatggagacggacaaataatacacaaagaaaaaataatatatcacgctaatgatttaagagtgggtttgtttaatgagtaac

SEQ ID NO: 285360 - DNA, 523 bp, Unknown
  Bacterial polypeptide expressing nucleotide sequence isolated from the Sargasso Sea
atgtttaatccaaaaagttgttataaaaaagatgagcttattgcatgttcaaatggagagctttttacaaaagaaggtgatggaaggctaccttcagacttaatgttaatgtttgatgaaattacaaatattgatgacttctctggaaactataataagggctctatagaagcagttctagatattaatcctgatttatggttctttaaatatcactttaaggaagatccagtaatgcctggatgtcttggacttgatgcaatgtggcaacttctaggattctaccttttgtggactgggttgcctggaattggaagagcgcttggtgctgataacattaaattttttggtcaagttcttccaaaagcaaaaaaggttgtttataaattagatattaaaagagttattaatagaggtgctatagttggtctagcggatggagaaatgtttgtagacggtaagaaaatctatagtgcagaaagattaaaagttggattatttaaagatccaagtaatttttgat

SEQ ID NO: 285361 - DNA, 493 bp, Unknown
  Bacterial polypeptide expressing nucleotide sequence isolated from the Sargasso Sea
tatgaaaatttctaaagaagaattattaaaatgttctagtggtgaaatgtttggtattggaaacccccaattaccaatgcctcctatgctaatgtttgaccacatttgtgaaatttctaaagatagtggaataaataaaatgggacatgtggttgcagaattgataattagtccaaatatgtggttttttgactgtcattttgttggcgacccagtcatgccaggttgccttggccttgatgctctctggcaattaacaggttttaatctaggttggaggggtcttaaaggtcgtggaagagcccttggtgttggcgaggttaaatttaaaggtatggtaacacctaatacaaaattaataagatatgagattaatttttctagggttttggaaagaagacttaagctaggaatatctgatggaaaagtatttgcagatggtgaagaaatttttacagctaaagggcttaaagttggtttgtttgaagattag

SEQ ID NO: 285362 - DNA, 547 bp, Unknown
  Bacterial polypeptide expressing nucleotide sequence isolated from the Sargasso Sea
aatgaataacaaaaagcatttttctaaaaaagatttgttaagtagtggaataggtaaattatttgaaagccttgatggtaagcttccaacgccccctatgctaatgatggatagaatcattcacatctccgatcaaggaggtgcatatggaaaaggtgaaattaaagctgagttagatatagataaatcactatggttctttgattgccacttcaaaaatgatcccgttatgcctggatgcttggggctcgatggtttttggcaattgcttggattctttttaacctgggctggcggtaaaggaaaaggtcgcgcacttggcgtcaaggatttaaaatttaaaggacaagttcgtccttatcatgaaaaaattacatatcatattgatattaaaaaatttataaccaggccaacgcatatggtctggggcgatgcggtgttaaaagtaaaaaataaagcaatttattttgctaaggatttgcaggtagggctttttgaaagccttacgtgggatcatggaaaagatccttcgcttgaccccttttaa

SEQ ID NO: 285363 - DNA, 502 bp, Unknown
  Bacterial polypeptide expressing nucleotide sequence isolated from the Sargasso Sea
atgaaatcaaaatcaagcttcacaaaagaagagttgctagaatgtgctcatggatcaatgtttggagttggaaatgctcgattgcctctcccaccaatgctgatgtttgatagaattacgaaaattactgatcatggaggaaaatttaacaaaggtgaaattatggctgaatttgatataaatccttcactttggttctttgattgtcactttgaaatggatccagttatgccagggtgccttggtttagatgcactgtggcaacttgtaggattttatttaggttggattggagaaccaggaagaggaagagcattaggttcaggggctgtaaaatttggaggagaaattttgaaagattctaaacttgtcgaatatcatattgacatgaaaaaagttatcaaaagaagtgtaatagttggggtaggtgatgcgactgtaaaggttgatggtaaagaaatatatcaagctgaaaatttaaaggtaggtttaataaaataat

SEQ ID NO: 285364 - DNA, 365 bp, Unknown
  Bacterial polypeptide expressing nucleotide sequence isolated from the Sargasso Sea
tatgaaaaaaagttcctttaattatgatgaattaattagctgtgcaaatggggaactttttggccctggaaatgcgaaattgccttctccaccaatgctaatgtttgatagaattactgaaattagtgaaaaaaacggagcttttgacaaaggaataatgaaggctgaacttgatataaaagatgatctgtggttttttgattgtcactttaaggaagatccagtaatgccaggctgtttaggtttagatgcgatgtggcaactagttggcttttacttaggttggcttggaaatccaggaagaggtagagctttaggagtgagtacagtaaaatttacaggtgaagtattaaagaatgtcaaaa

SEQ ID NO: 285365 - DNA, 499 bp, Unknown
  Bacterial polypeptide expressing nucleotide sequence isolated from the Sargasso Sea
gaccttatagaatgtgccaaaggccggctttttggaccaggtaatgcgagattacctctcccaccaatgctgatgtttgatagaatcacccgaatttctgaggagggtggggccaatggaaagggagaggtcgaggcagagtttgatgtgaaaccggatctatggtttttcaaatgtcattttgagagtgacccggttatgcctggctgccttgggatggatggtctatggcaattattaggttttactcttggatggctgggtggccctggttctggcagggcaatatctgtaggtgaagtaaagttcagtggccaggtgctcccaacagcaaaacttctcaaatttcaacttgaccttaaaagggtaataatgcgtcgattattcatgggaattgcggatggacgggtcctgtgtgatggtgagaccgtttttgaagcgaaagatattaaggttggtttatttgctaataatcccagcatagaggctgcgacctaat

SEQ ID NO: 285366 - DNA, 505 bp, Unknown
  Bacterial polypeptide expressing nucleotide sequence isolated from the Sargasso Sea
aatgaaacaaaaaaacaattacaactataacgaattaattgagtgtgcaaacggtaacctttttggtgaaggaaatgcacgtttgccgtcgccaccgatgttaatgtttgatagaataacagaaatcaaatctgatgggggagaatttaaaaaaggtgttataaaagctgagttagatattaaagaaaaaatgtggttctttgactgtcactttaaaggagatccggtaatgccaggatgtctcggattagatgcgatgtggcaattagttggattttttttaggatggattggagaacctggtaaaggacgtgctttaggtgtgaattctgttagatttactggtgaagttcttaaaaatgtcaaattagctagttatgagattgatatgaaaaaagttttaaagacagagggtggaactgttgggtttgctgatggaattttaaaggctgatggaaaaaaaatatatacagcagaaaatctaaaggtaggagtttataaataa

SEQ ID NO: 285367 - DNA, 277 bp, Unknown
  Bacterial polypeptide expressing nucleotide sequence isolated from the Sargasso Sea
atgcctggatgtcttggtttggatgcaatgtggcaactggttgggttttatttaggttggttgggtaatcctggaaaaggaagagctttaggagttggcactgtaaagtttactggtgaagttttaaaaagtgtaaaaaaagcaaaatatataattgatatgaaaaaaattatatctcctggtggaacaactgttggtttagcaaacggtattttattagcggatgataaaaaaatttatggcgctgaaaatttaaaagtaggattatttaaataat

SEQ ID NO: 285368 - DNA, 526 bp, Unknown; identical to SEQ ID NO: 285323
  Bacterial polypeptide expressing nucleotide sequence isolated from the Sargasso Sea

SEQ ID NO: 285369 - DNA, 514 bp, Unknown
  Bacterial polypeptide expressing nucleotide sequence isolated from the Sargasso Sea
atgagaaaaaattttagtagcatcaattatgaagggttaatttcatgtgctaagggtgagatgtttggggagggaaatcctcagctccccatgccaccaatgctaatgatagatagaataactgaaatttcttctgatggtggaaccaatgaaaaaggtcatgtaatagcagaattggatattgatcctgagctttggttttttaaatgtcatttttttaatgatcctgtgatgccgggctgtttgggtgttgatgctctttggcaattgactggttttaatttaggctggaggggtatggagggtcgaggaagagctttaggtgttggggaggtgaaatttacaggaatggtaacgccacaaataaaactggtaacttatgaggtaaatttcacaagaataattaatcgtaggctaaagttaggtttagctgatgggagagtatttgctgatggagagcaaatttattctaccagagatatgaaagttggtttatttaatcagcagacctaaa

SEQ ID NO: 285370 - DNA, 523 bp, Unknown
  Bacterial polypeptide expressing nucleotide sequence isolated from the Sargasso Sea
aatgtttagtccacaaaactcctatactaaagatgatttagtagcatgctcaaatggggagttattcactaaagatggagatggcaggcttccttcagatcaaatgttgatgtttgatgaaattacaaatattgatgatttttcaggagcttataaaaaaggctctattgaagcagttttaaacatcaatcctgaattgtggttctttaaatgtcactttaaagaagatccggtaatgcctggttgtctaggcttagatgctatgtggcaactgctaggtttttatttgttatggactgggttgccaggaattggaagagctcttggagcagaaaacgtaaaattttttgggcaagtacttcctaaagcaaagaaagttacttatagactcgacattaaaagagtaataaatcgtggagctattgtaggtcttgcagatggcgaaatgttagttgatgataaaaaaatatatagtgcagaaaaattaaaggtgggtttgtttaaagatcctagtaatttttga

SEQ ID NO: 285371 - DNA, 502 bp, Unknown
  Bacterial polypeptide expressing nucleotide sequence isolated from the Sargasso Sea
aatgaaaaaaaattcctatagttatgatgaattaatcaattgtggtgaaggaggcttgtttggaccaggaaatgcaaaactacctcttcctccaatgctgatgtttgacagaataacagaaattagtgaaaatggtggcgcttataaaaaaggtgtaattaaagctgaattaaatgttaaagatgatttatggttttttaattgtcattttaaagaggatccagtaatgcctggatgtttaggtttagatgctatgtggcagttagttggtttttatcttggttggctgggaaagcctggaaaaggtagagctttaggagtaaacgctgtaaaatttaccggtgaagtattaaaatcagttaatatagctacatatgaaatagatatgaaaagaattttaattaaagaaggaaccacagttggattagctgatggaattttatctgctgatggaaaaaaaatttattccgcagaaaatttaaaagtaggattattcaaataa

SEQ ID NO: 285372 - DNA, 502 bp, Unknown
  Bacterial polypeptide expressing nucleotide sequence isolated from the Sargasso Sea
atgaaaaaaggggcatttaattacgacgaattaataagttgtgcaaatggcgaactttttggcccaggtaatgcaaaattaccatctccaccaatgctaatgttcgacagaattatagaaatagatgaaaataaaggtttttttaataaaggaataattaaagcagagcttgatgtgaaagataatctttggttctttgattgccattttaaagaagatccagtaatgcctggatgtcttggtttagatgctatgtggcaactagttggattttacttaggttggttgggaaatccaggaagaggtcgagctctaggggtaaatagtgtaaaatttactggagaagttcttaaaaatgtcaaaatggcaacatatgtaatagatatgaaaagaattttaattaaagaaggaactacagtagggttagcaaatggaattttactggctgatggaaaaaaaatatattcagcagaaagtttaaaagtaggtttatttaaataat

SEQ ID NO: 285373 - DNA, 502 bp, Unknown
  Bacterial polypeptide expressing nucleotide sequence isolated from the Sargasso Sea
aaaaaaaacgtcatacaactatgaagatctaattaagtgcggaaatggtaaactttttggcccaggaaatgcaaaattaccacttcctcctatgctcatgtttgacagaatatcagaaattagagaaaatgaaggaacttttaaaaaaggtttaattaaagcagaactggacataaaagataatttatggttttttgattgtcactttaaagatgactcagttatgccaggatgtttaggtttagatgctatgtggcaactagttggcttttatttgggttggctcggtaacccaggaaagggacgagcgttgggtgttaatactgtaaaatttacaggagaagtattgaaaaatataaaactagcttcttacgaaattaatatgaaaagagttcttataaaagaaggtactactgtaggcttagcaaatggaattcttaaagctgatggaaaagaaatatattcagctgaaaatttaaaggtaggattatttaaaaaatga

SEQ ID NO: 285374 - DNA, 508 bp, Unknown
  Bacterial polypeptide expressing nucleotide sequence isolated from the Sargasso Sea
tatgaaacaaaaaaataattatacttatcaagaattaatagactgtggtaatggattactttttggaaaaggtaatgcaaaattacctcttcccccaatgttaatgtttgatcgtattacgaaaattgaggaaaacaaaggcaaatataaaaaaggatttataaacgcagaactagacataagggaaaatctatggttctttaattgtcactttaaagaagatccggttatgccaggatgtttgggattagatgcgatgtggcaattagtaggtttttttttaggctggaaaggagagcctggaaaaggtagagctcttggagttagtgctgtaaaatttacaggagaagttcttcaaaatgtaaagatggcaacttataaaatagatatgaaaagaattttgaaaaaagaaggtgctgtggttggattagcagacggtattctagacgctgacggaaagataatttatcgtgcggaaaatttaaaagtaggattatttagatcatga

SEQ ID NO: 285375 - DNA, 475 bp, Unknown
  Bacterial polypeptide expressing nucleotide sequence isolated from the Sargasso Sea
tgattgcgcaaatggagatttatttggaaagggtaatgctcaattaccatccccaccaatgctaatgtttgacagaattacaaatattaatgaaacaggtggtatatttaacaaaggtgagattgttgctgaattagatatcagacctgacctttggttttttgactgtcatttcaagggagatcctgtaatgccaggatgtctaggtttagatgcaatgtggcaattggttggtttttatcttgggtggttagagcagccagggaaaggaagggctcttggcgttggtgaagttaaatttacagggcaaattttagataccataaaaaaagtaacttaccatatttctcttaaaagattaattctaagaaaattaattttaggagtagctgatggcattcttaaagcagatggagaacctatatatgaagctaaagatatgaaggttggactttttcaatctgataataaataa

SEQ ID NO: 285376 - DNA, 508 bp, Unknown
  Bacterial polypeptide expressing nucleotide sequence isolated from the Sargasso Sea
aatgaaacaaaaaaatagttatacatatgaagatttaataaattgtggtgatggtgaattatttggtaaaggtaatgcaaaactacctctgcccccaatgcttatgtttgatagaataactgaaattcaaaaagatacgggtaaattcaaaaaaggtcatatgaaagctgaattagatataaaagatagtttatggttttttaactgtcatttcaaagatgatcctgtgatgccaggatgtttagggttagatgctatgtggcagctagtcggtttttttttgggttggacaggtgaacctggtaaagggagagcgctaggcgtgagttcagtaaaattcacaggagaagttctaaaaaatgttaaaatggcaacatataatatagatatgaaaagaattttgaaaaaagaaggcgcagtagtaggtttggctgacggagtattagacgcagatggaaaaaaaatatatagtgcagaaaatttaaaagtaggattgtttaaaacatga

SEQ ID NO: 285377 - DNA, 460 bp, Unknown
  Bacterial polypeptide expressing nucleotide sequence isolated from the Sargasso Sea
aatgtttgggttaaacaatgctcaactaccactaaaacctatgctgatgtttgatcgtatcatcgaaatttctaataatggtggaaaaactggtaaaggagagattattgcagaacttgatataaatccggaactctggttttttgattgtcattttgatggagatccagttatgcctggctgccttggtttagatgcaatgtggcagctgattggattctttcttggttggtcaggtgctgagggaaagggacgagcacttggtgctggcgccgttaaattttctggtcaagtaacaccaaaaaataaattagttacttatcatgttgatatgagaagagttgtcttaagaaaattagttatgggagtagcagacgctagtatgtctgttgatggtgaagaaatttatgcagcagaagacctgcgtgttggtctattcaaatcgactgaaaacttttag

SEQ ID NO: 285378 - DNA, 490 bp, Unknown
  Bacterial polypeptide expressing nucleotide sequence isolated from the Sargasso Sea
ttatgagcaactaattgattgtgcaaatggagatctatttggaaagggtaatgctcaattaccatcaccaccgatgctaatgtttgatagaattacaaatattaatgaaacaggtggtgtatttaaaaaaggtgagattgttgcagaattagacatcagacctgacctttggttttttgactgtcacttcaagggagatcctgtaatgcctggatgtctaggtttagatgcaatgtggcaattggttggtttttaccttggttggttagaacaaccaggtaaaggaagggcccttggtgtcggtgaagttaaatttacaggacaagttttaaatacaataaaaaaagtaacttaccatatttctcttaaaagattaattcttagaaaattaattttaggagtagctgatggtgttcttaaagcagatggggagcctatatatgaagctaaagatatgaaggttggactttttcaatctaataataaataa

SEQ ID NO: 285379 - DNA, 505 bp, Unknown
  Bacterial polypeptide expressing nucleotide sequence isolated from the Sargasso Sea
catgcaaaaaaatagttacaattatgatgagctaatttcgtgcggagagggaaaattgtttggtgaaggaaatgctaaacttccgctgcccccaatgttaatgtttgatagaattacggagattaaagaagatactggtgagtttaagagaggatttattaaagcagagcttgatatcaaagataatttatggtttttcgattgtcattttaaaaaggacccagttatgccaggttgtttaggattagatgctatgtggcagttagttggattttatttaggctggattggtgaaccaggaaaaggtagagctttaggtgtaaattctgtaaaatttacaggcgaagtattaaaaaatgttaaaatggccacatatgaaatcaatatgaaaagaattttaaaaaaagagggaactgctgttgggttagcaaatggtatattaagtgccgatggtaagataatatacacagcagaaaatttaaaagtaggattatttaagtcatga

SEQ ID NO: 285380 - DNA, 502 bp, Unknown
  Bacterial polypeptide expressing nucleotide sequence isolated from the Sargasso Sea
atgaaaaaagggtcttttaattatgatgagctaataaactgcgcaaacggtgatctttttggtcctggcaatgcaaaattaccttctccaccaatgttaatgttcgacagaatatcagaaatcaatgaaaacaagggtttttttaataaaggcttaattaaagctgagcttgatataaaggatgatctttggttttttgattgtcattttaaacaagacccagtaatgcctggttgtcttggattagatgctatgtggcagctagtaggtttttatttaggatggttaggaaatccaggaagaggtcgagctctcggagtaaatagtgtaaaattcactggagaagttcttaaaaatgtcaaaatggcaagttatgtaattgatatgaaaagaatactaattaaagaaggaacaacggtaggattagcaaatggagttttattggcagatggaaaaaaaatatattcagcagaaagtttaaaagtagggttgtttaaataaa

SEQ ID NO: 285381 - DNA, 508 bp, Unknown
  Bacterial polypeptide expressing nucleotide sequence isolated from the Sargasso Sea
aatgaaagaaaattcttttagttatgaaaaacttatagagtgtggaaagggcatactgtttggtgaaggtaatgctcaattgcctttgccaccaatgttaatgtttgatagaattataaatattaatgaaactggtggagaattttctaaaggagaagtaatcgctgagttagatataagatctgacctctggttctttgattgtcactttaaaaatgaccctgtaatgcctggatgtcttggattggatgctatgtggcaacttgtaggtttttatttaggttggctgggtcagccaggtaaaggaagggctttgggtgttggtgaagtaaaatttactggacaggtattgcatacagtaaaaaagattacttatcatatttctttaaaaaaattaattttaagaaaattaattttaggtgtagcagatggagttttagaggctgatggcaaaccaatctatcaagctaaagatatgaaagttgggctatttacccctaataaataa

SEQ ID NO: 285382 - DNA, 502 bp, Unknown
  Bacterial polypeptide expressing nucleotide sequence isolated from the Sargasso Sea
atgaaaaaaggctcattcaattatgatgaactaatcagctgcgctaatggaatgctatttggccctggaaatgcaaaattgccttctccacccatgctaatgtttgacagaatttcggaaattagtgaaaacaatggtttttttaacaaagggttaattaaagcagagcttgatattaatgataatctttggttttttaactgtcattttaaagaagatccagtaatgcccggatgtcttggtttagatgctatgtggcaactagttggtttttatttaggatggttaggaaatccaggaaggggtcgagcattgggagtaaatagtgtaaaattcactggagaagttctaaaaaatgtcaaattggcaacttatattattgatatgaaaagaattcttattaaagaaggaacgactgttggtcttgcaaatggagttttattagctgatggtaaaaaaatttattctgcggaaaatttaaaggtaggtttatttaaataat

SEQ ID NO: 285383 - DNA, 511 bp, Unknown
  Bacterial polypeptide expressing nucleotide sequence isolated from the Sargasso Sea
gatggcaacctatccgactgaatttaataaagaggaattgttgaagtgctcaaggggagaactatttggcccaggcaatgctcagctaccggcacctcctatgctaatgattgatagaattacagagattagtgaagatagcggacctgataggaaaggtcatgttgtagccgaatttaaaattactcctgatctttggttttttgagtgccatttcccggacaatccaattatgccaggctgcctcggcttggatgcattatggcaattgacaggttttaatctgggctggcgaggatggccaggtaagggctacgctttgggagtgggagaggtaaaattgacgggcatggtccgccctgataggaaattactgacctatcgggtgaacttttcgaaggccattcaaacacggcgcctaacaatgggcgttgccaatggcattgtagaggctgatggtgacgtgatataccaagtaaccgatatgaaagttgcgttgtcagaaaactaa

SEQ ID NO: 285384 - DNA, 499 bp, Unknown
  Bacterial polypeptide expressing nucleotide sequence isolated from the Sargasso Sea
aaaaaaaagtttcaattatgatgaattaattgcttgtggcaaaggtgagctatttggtgaaggtaatgccaaacttcctcttcctccaatgctaatgtttgatagaataacagagattaaaaaagacataggcgaatttaagaaaggttttattaaagctgaattagatataaaaaatgatctgtggttttttaattgccattttaaaaatgatccagttatgccgggttgtttaggtcttgatgcgatgtggcagctagtaggtttttatttaggatggataggtgagccaggaaagggaagggctttaggagttaatactgtaaaatttactggggaagtcctaaaaaaagccaaaatggcaacttatgaaataaatatgaaaagaattttgaaaaaagaaggtgctgtagttgggcttgcaaatggtatattgagtgcggatggaaaagtaatttatacagctgaaaatttaaaagttggattatttaagtcatga

SEQ ID NO: 285385 - DNA, 463 bp, Unknown
  Bacterial polypeptide expressing nucleotide sequence isolated from the Sargasso Sea
ctgcgccaatggggaactttttggacctggaaatgcaaaataccttctccaccaatgcttatgttcgatagaattactgaaattagtgaggaaactggggcttttggtaaaggattaatgaaagcagaacttgatattaaagaggatttgtggttttttgattgtcactttaaggaagatccagtgatgccaggatgtttaggattagatgcaatgtggcaactagttggattttatttaggctggcttggaaatccagggagaggaagagctttgggagtgagtgcggtaaaatttactggagaagtattaaagaatgtcaaaatggcaacatatattattgatatgaaaaggatattaattaaaggcgaaactacagttggtttagcaaatggagttcttcttgctgatgataaaaaaatttattcagctgatgggctaaaagtaggattatttaaataat

SEQ ID NO: 285386 - DNA, 502 bp, Unknown
  Bacterial polypeptide expressing nucleotide sequence isolated from the Sargasso Sea
atgaaaaaaaactcctatagctatgatgacctaattaattgcggaaatggtgatctttttggccctggtaatgctaaattaccccttcctccgatgctaatgtttgatagaataacagagattaacgacaataacggaacctttaacaagggatctttaaaggctgagttagatattaaagatgatctttggttctttgattgtcattttaaatctgaccccgttatgcctggttgcttagggttagacgctatgtggcaactagtaggtttttacctaggttggataggaaatcctggcaagggtagagcactaggtgttggaactgtaaagttcacaggtgaagtattgaaaaatgttaagttagtaacgtataaaattgatatgaaaaaaattatgtcaccaggaggcacaactgttggccttgctaatggagtagtttttgcagatgataaaaaaatatattcagcagatagtttaaaagtaggattgttcaaataat

SEQ ID NO: 285387 - DNA, 505 bp, Unknown
  Bacterial polypeptide expressing nucleotide sequence isolated from the Sargasso Sea
atgaacaaaaaatcatcatataattataaagagcttattagttgtgggaatggagagctttttggtccaggaaatgctaaattacctttgccaccaatgcttatgtttgacagaattactgaaattagtgaaaatactggaacgtttaaaaaaggacttattaaagcagaactagatataaaaaatgatttatggttttttgattgtcactttaaagaagattcggttatgccaggttgtttaggtttggatgcgatgtggcaattagttggtttctttttaggttggctaggaaacccaggaaaaggaagagcgttaggagttaatgctgtaaaatttacaggagaagtattaaaaaatgttaaattagcttcttatgaagtggatatgaaaagagttcttataaaagaaggaaccacagtaggtttagcaaatgctgttcttaaggctgacgggaaaaaaatatattcagctgaaaatttaaaagtagggttatttaaataat

SEQ ID NO: 285388 - DNA, 508 bp, Unknown
  Bacterial polypeptide expressing nucleotide sequence isolated from the Sargasso Sea
atggaaaaaaaatcatcctacaaatatgaagaattaattgattgcggaaatggcaaactttttggaccaggaaatgcaaaattgcctcttcctcctatgcttatgtttgacagaatatcagaaattaaggaaaataaaggagcttttaaaaagggtttaattaaagctgaactagacataaaggaaaatttatggttttttgagtgtcattttaaagatgactcagttatgccaggatgtttgggtttagatgctatgtggcaactagttggtttttatctaggatggctaggaaatccaggaaagggaagggctttgggagtaaatactgtaaaatttactggagaagtattaaaaaatgttaaactagcttcttatgaaatagatatgaaaagaatttttattaaagaaggtgctacagtaggtttagcaaatggaattcttaaggctgatggaaaacaaatatactcagctgaaaatctaaaagtaggattgtttaaatcatgaa

SEQ ID NO: 285389 - DNA, 502 bp, Unknown
  Bacterial polypeptide expressing nucleotide sequence isolated from the Sargasso Sea
tatgaaaaaaaactcctatagctacgatgacctaattacttgtggaaatggtgaactttttgggcctggtaatgctaaattaccccttcctccaatgctaatgtttgatagaataactgagattaacgacaataatgggacttttaataagggatccttaaaagctgaattagacattaaagacaacctttggttctttgattgtcattttaaatcagatcctgttatgcctggttgtttggggttagacgcaatgtggcagttggtcggtttttaccttggttggcttggaaaccctggtaagggtagagcattaggagttggaactgtaaaattcacaggtgaagttttgaaaaatattaagttagtaacgtataagattgatatgaagaaaattatgtccccagggggaacaactgtaggacttgcaaatgggttcgttttcgcagatgataaaaaaatatattcagcagacagcttaaaagtaggattatttaaataa

SEQ ID NO: 285390 - DNA, 496 bp, Unknown
  Bacterial polypeptide expressing nucleotide sequence isolated from the Sargasso Sea
tcttttagttatgaaaaacttatagagtgtggaaagggcatactttttggtgaaggtaacgcacaattaccgttacctccaatgttaatgtttgacagaattataaatattaatgaaagtggaggagcattctctaaaggtgaagtaatagcagaattagatataaaatctgacctgtggttctttgattgtcattttaaaaatgatcctgttatgccgggatgtcttggtttagatgccatgtggcaacttgttggcttttatcttgggtggttagggcaacctggtaaaggaagagcattgggtgttggtgaagtaaaatttactggacaagtattaaatactgttaaaaaagtttcttaccatatttctttaaaaaaacttattttaagaaagttaattttaggtgttgctgacggtgttttaaaagcagatggggaatctatttatcaagctaaagatatgaaggttgggctatttacgcctaataaataaa

SEQ ID NO: 285391 - DNA, 502 bp, Unknown
  Bacterial polypeptide expressing nucleotide sequence isolated from the Sargasso Sea
atgaaaaaagggtcttttaattatgatgagttaataagttgtgcaaatggtgaactttttggccctggaaatgcaaaattgccttctcctccaatgttaatgttcgacagaatatcagaaatcaatgataataaaggattttttaataaaggattaattaaagcagaacttgatataaaggacgatctttggttttttgattgtcattttaaagaagatccagttatgcccggatgtcttggactggacgctatgtggcaacttgttggtttttatttaggatggctaggaaacccaggaagaggtcgagcgttaggagtaaatagtgtaaaatttactggagaggttctaaaaaatgtcaaaatggcaacttatattattgatatgaaaagaatattgattaaagaaggaacaactgttggtctagcaaatggaattttgttagccgacagtaaaaaaatatactcagcagaaaatttaaaggtaggtttgtttaaataat

SEQ ID NO: 285392 - DNA, 523 bp, Unknown
  Bacterial polypeptide expressing nucleotide sequence isolated from the Sargasso Sea
aatgtcttttatacctaaaaatagctacaacaaagaggaattactggattgtgcgcagggcaatctttttgggcaggaaaatgggcgtcttccatctcccaatatgcttatgttcgatagaatatcgaccataaataccgacggcggaaaattttctaaaggtgaaataatagccgaattggatgtaaatcctgatttatggttttttgattgtcactttaaaggtgatccggtgatgcctggatgtctagggcttgatgcaatgtggcaacttgtaggcttttatttatgttggttgggaaatcctggccgaggaagagctttaggagcctcagaagtaaaatttttcggtcaagtgctccctacagccaaactggttactcttaaaatagatatgaagagaatactgaatcttgatcttactgtaggcattggagaaggttcaatgttggttgatggtagagagatatatactgcgaaaggactgaaagttggtctttttcaagatacatcgagcttttga

SEQ ID NO: 285393 - DNA, 502 bp, Unknown
  Bacterial polypeptide expressing nucleotide sequence isolated from the Sargasso Sea
atgaaaaaaaactcatactcatatgatgagcttattaattgtggagaaggtaaattgtttggaccaggaaatgcgaaattaccccttccaccaatgcttatgtttgatagaattactgaaatttatgatgataaaggtgcttttaaaaaaggctctttaaaagcagaactagatataaaagagaatctttggttttttgattgtcattttaaagaagatcctgttatgccgggatgccttggtcttgatgctatgtggcaactagtaggtttttatcttggttggattggaaatccaggtaaaggaagagctttaggagttggaactgtgaaatttactggagaagttttacaagatgtaaaattggtgaaatatgagatcgatatgaaaaaaattatgtctccgggaggaacaacagtaggtcttgctaatggagtgcttttggctgatgataaaaaaatatattcagcagatagcttgaaagtgggattatttaaataat

SEQ ID NO: 285394 - DNA, 505 bp, Unknown
  Bacterial polypeptide expressing nucleotide sequence isolated from the Sargasso Sea
atggaaaaaaaatcttcgtatagctataaagaattaattaattgtggaaatggtgagctttttgggcctggaaacgctaaattaccacttcctccaatgcttatgtttgatagaataacagaagttaaagaagataatggtgcttttaaaaaaggctcaattactgctgaactagatataaaagacaacctttggttttttgattgtcattttaaagaagacccggtcatgccagggtgtcttggtttggatgcaatgtggcaactggtaggtttttatctaggatggctgggtaatcctggaaaaggaagagctttaggagttggtactgtaaagtttactggtgaagttttaaaaagtgtaaaaaaagcaaagtacataattgatatgaaaaaaattatatctccaggtggaacaacggttggcttagcaaatggcattttattagcagatgaaaaaaaaatttattcagcagaaaatttaaaagtgggattgtttaaataat

SEQ ID NO: 285395 - DNA, 449 bp, Unknown
  Bacterial polypeptide expressing nucleotide sequence isolated from the Sargasso Sea
cctttttggtccaggtaatgcaaaattacccttacctcccatgttgatgtttgatagaattacagaaataaatgaaaataaaggtttttttaataaaggccaaattaaagctgagcttgatattaaggataatctttggttttttgactgtcattttaaagaagatccggtaatgccaggatgtttgggtttagacgcaatgtggcaattagtaggattttacctcggctggttaggaaatccaggaagaggtcgagcactaggagtaaatagtgttaagttcacaggtgaagttctaaaaaaggtcaaaaatgcaacgtatgaaattgatatgaaaagaatacttattaaagaaggaacaacagtaggattggcaaatggagtcttgttagctgacggaaaaaaaatatattcagctgaaagtttaaaagtaggtttgtttaaataat

SEQ ID NO: 285396 - DNA, 502 bp, Unknown
  Bacterial polypeptide expressing nucleotide sequence isolated from the Sargasso Sea
atgcaaaaaaatagtttcacatatgatgaattaatagcttgtggtaaaggtgagttgtttggagaagggaatgctaaactgcccctccctccaatgttgatgttcgacagaattactaaaatcgataataaaagtggagaatttaaaaaaggtatcattgaagcagagcttgatattaaggacaatttatggttttttgattgtcattttcagggtgatcctgttatgccgggttgtctaggcctagatgcgatgtggcagctagttggcttttttctaggatggaccggtgaacctggaaaaggcagagcattaggtgtaaactctgtaaaatttacaggagaagtacttaagaaagtaaaaatggcaacatatgagattaatatgaagaggattcttaaaaaagaaggaactacagttggtttagcaaatggaattcttagtgctgatggtaaagtcatttatcgtgctgaaaacttgaaagtcggattgtttaaataat

SEQ ID NO: 285397 - DNA, 505 bp, Unknown
  Bacterial polypeptide expressing nucleotide sequence isolated from the Sargasso Sea
atgaataaaaaaccgtcttataactatcaagaattaattgattgtggaaatggtaaactttttggacctggaaatgcaaaattaccacttcctccgatgctcatgtttgacagaatatcagaaattagtgaaaataagggagcatataaaaaaggattaattaaggctgaactagacattaaggataacctatggttttttgagtgtcactttaaagaagattcggttatgccaggttgtttaggtttagatgcaatgtggcaactagttggattctatttaggttggcttggaaacccaggaaaaggaagggcactaggagttaatactgtgaaatttacaggggaagtgttaaaaaatgttaaaatggcatcttatgaagtagatatgaaaaggattcttattaaggaaggtgccacagtaggactggcaaatggtattttaaaggcagatggaagaaagatatattctgcagaaaacttaaaagtaggattatttaaataat

SEQ ID NO: 285398 - DNA, 502 bp, Unknown
  Bacterial polypeptide expressing nucleotide sequence isolated from the Sargasso Sea
tatgaaaaaaaactcttactcatatgatgagctaattaattgtggtgaaggaaaactatttggtccaggtaatgctaaattaccccttccacctatgcttatgtttgatagaattacagaaattactgatgataaaggtgcttttaataaaggctctttgaaagctgaattagatataaaaaaaaacctttggttttttggttgtcattttaaagaagatccggtcatgcctggttgccttggtcttgatgctatgtggcaattggtagggttctatttaggttggattggaaatccaggaaaaggaagggctttgggagttgggactgtaaaatttactggtgaagttttacaaaatgtaaaaaatgtcagatatgagatagatatgaaaaaaattatgtctccaggaggtacaactgttggtcttgccaatggagtagtattggcagataataaaaagatatattcagcagatagtttaaaagtgggtttatttaaataa

SEQ ID NO: 285399 - DNA, 502 bp, Unknown
  Bacterial polypeptide expressing nucleotide sequence isolated from the Sargasso Sea
atgaaaaaaaacgcatactcctatgatgaccttataacttgtggaaatggtgaactttttggtcctggtaatgctaaattacctcttccaccaatgcttatgtttgacagaataacagaaataaatgaaaataatggtacgtttaataaaggctcattaaaagctgaattagatattaaagatgatctttggttttttgattgtcattttaaaaaagatccagttatgccagggtgtttaggtttggatgctatgtggcaactggtagggttttttctaggttggctaggaaatcctggaaaaggaagagctttaggagtaggtaatgtgaaatttacaggtgaagttttgcagagtgtaaaaaatgtaagatatgaaatagatatgaaaaaaattatgtccccaggaggaacaaccgtaggacttgcaaatggaattgttcttgcagataataaaaaaatatattcagctgaaagtttaaaagtgggattgtttaaataat

SEQ ID NO: 285400 - DNA, 529 bp, Unknown
  Bacterial polypeptide expressing nucleotide sequence isolated from the Sargasso Sea
tatgagtaaagtatttaaacctaaagactgctattcaaaagaagatcttgttgattgcggatttggtcaactatttggtgaaggcaatggcaggcttccggttgatcctatgcttatgtttgatcgaatcactaagataaataatgctggtggtaaatattcaaaaggcgaggtttatgcagagctcgatgtaaatcctgatctctggttctttgattgccatttcaaagaagatcctgttatgccggggtgccttgggcttgatgcaatgtggcaattacttggtttctttctatgctggagtcaattacctgggattggaagagctttaggagctgaaaaagttaaattctttggccaggtgctgccaacagcaaaaaaagttaattatgttcttgatataaaaagagttgtaaatcgtggagctgtagttggtttttctgatgctgatatgtttgtagacgataaacatgtttattcagcagataaccttaaagtaggcctttttgctgacccaagcaagttttaa

SEQ ID NO: 285401 - DNA, 505 bp, Unknown
  Bacterial polypeptide expressing nucleotide sequence isolated from the Sargasso Sea
atggaaaaaaacagctatacttatgatgaattaatttcgtgtggagagggaaaattatttggagaaggaaatgctaaacttcctctaccaccgatgttaatgtttgatagaataactgaaattgaaaaagataaaggtgagtttaaaaagggttttattaaggctgaacttgatatcaaagataatttatggttctttgattgtcactttaaaaaagacccagtaatgcctgggtgccttggattagatgcgatgtggcaattagttggcttttaccttggttggattggtgaaccaggaaaaggtagagcgctaggagttaataatgttaaatttactggagaagttttaaaaaatattaaaatggcaacttatgaaattaatatgaagaggattttaaaaaaagagggtactacagtaggtctagcaaacggtattttaagcgctgatggcaaaataatttatacagctgaaaatttaaaggtagggttgtttaagtcatgaa

SEQ ID NO: 285402 - DNA, 448 bp, Unknown
  Bacterial polypeptide expressing nucleotide sequence isolated from the Sargasso Sea
attcggagaaggaaacgctaaacttccattacccccaatgttaatgtttgacagaattactaatataaaaaaagatactggtgaatttaaaaaagggttcatcaaagctgaacttgatattaaagacaacctatggttttttgattgtcactttcagaaagatcctgtaatgccgggatgtttaggattagatgctatgtggcaattagttggtttttacttagggtggattggagaaccaggaaaaggtagagctttaggagtaaattctgtaaaatttacaggtgaagttttgaaaaatataaatatagctacatatgaaataaatatgaaaagaattcttaaaaaagaggggacaactgttggtctagctaatggattattgagcgctgatggtaaaattatttatcgtgcagaaaatttgaaagtaggattatttaaaacatga

SEQ ID NO: 285403 - DNA, 445 bp, Unknown
  Bacterial polypeptide expressing nucleotide sequence isolated from the Sargasso Sea
ttggttcctggtaatgcaaaattacctcttccaccaatgcttatgtttgatagaattacagaaattaatgacaacaaaggaacttttaaaaaaggtttattaaaagctgagctagatatcaaaaatgatctttggttttttgattgtcatttcaaagaagaccctgtgatgccaggttgtcttgggcttgatgctatgtggcaactggttgggttttatttaggctggataggaaacccagggaaaggaagagcgctgggagttggagcagtaaagttcacaggtgaagtattgcaaaatgttaaattagtaacatatgaaattgaaatgaaaaaaattatgtctccaggtggaactactgttggcctagccaatggtattgttttagctgatggaaaaaaaatttactctgcagatagtttgaaagtaggattatttaagtaat

SEQ ID NO: 285404 - DNA, 503 bp, Unknown
  Bacterial polypeptide expressing nucleotide sequence isolated from the Sargasso Sea
aatgaagcaaaaaaacagttacagttatcaagatttaattgattgtggaaacggcatgctttttggagaggggaatgcgaaattacctctacctccgatgttaatgtttgatagaattactaaaattgaaaataatactgggtctttcaaaagaggttatttggaagcagaattagacatcaaagacgatttgtggttttttaaatgtcattttcaaaaagaccctgtaatgcctgggtgtcttggattagatgctatgtggcaactggttggattttatcttggttggacaggagaaccaggcaaaggaagggctttaggagtaagcacagttaaatttaccggtgaagtgttaaaaaaaattaagatggctacttataaaataaatataaaaagaattttaaaaaaagaaggtgctgtagtaggattagcaaatggtactttagacgctgatggaaaagtgatctatgtagcagaaaatttgaaagttggtttgtttaaat

SEQ ID NO: 285405 - DNA, 505 bp, Unknown
  Bacterial polypeptide expressing nucleotide sequence isolated from the Sargasso Sea
tatggaaaaaaaatcatcgtatagctatgaagaattaattaattgtggaaatggtgagctttttgggccaggaaacgccaaattaccacttcctccaatgcttatgtttgatagaataatagaagttaaagaagataatggtgctttcaaaaaaggctctattactgctgagctagatataaaagatgacctttggttttttaattgtcattttaaagaagatccagttatgcctggatgtcttggtttagacgcaatgtggcaactggtaggtttttacctaggatggcttggcaatcctggcaaaggaagagccttgggagttggtaccgtaaaatttactggtgaagttttaaaaagtgtaaaaaaagcaaaatatataattgatatgaaaaaaattatgtctccaaatggaacaactgttggtttggcaaacggcgttttattggctgatgaaaaaaaaatttattcagcagaaaatttaaaggtaggattatttaaataa

SEQ ID NO: 285406 - DNA, 493 bp, Unknown
  Bacterial polypeptide expressing nucleotide sequence isolated from the Sargasso Sea
tcttatagttaccaagagttaattaattgcggaaatggtgacctttttggacctggcaatgcaaaattgcctcttcctccaatgctgatgtttgatagaataactgaaattaaagataatttaggcgcttttaaaaagggtttaattaaagcagaactggatattaaaaaaaatctttggttttttgattgtcactttaaagaagatccagtaatgccaggatgtttaggccttgatgcaatgtggcagttagtaggattttatcttggctggcttggaaacccaggaaagggaagggctttgggcgtcggatctgtaaagtttaccggtgaagtgttaaaaaatgttaaaatagcagaatatataatcgatatgaaaagagttttaataaaagaaggcacaacagtaggactagcaaatggaattttgcttgcagatgggaaagaaatttatacaacagaaaatttgaaggtaggattgtttaaacaatgaa

SEQ ID NO: 285407 - DNA, 430 bp, Unknown
  Bacterial polypeptide expressing nucleotide sequence isolated from the Sargasso Sea
aatgaaagaaaattcctttagttacgaaaaacttatagaatgtggaaaaggtatgctttttggtgaaggtaatgctcagttgccattgcccccaatgttaatgtttgacagaataataaatattaatgaaagtggaggtactttctctaaaggagaagtaatagctgaattagatataaaatctgatctgtggttcttcgattgtcattttaaaaatgatcctgttatgccgggatgtcttggtttagacgccatgtggcaacttgttggtttttatcttggttggttaggtcaaccaggtaaaggaagggcattaggtgttggtgaagttaaatttaccggacaagtattaaatactgttaaaaaaagtctcttatcatatttctttaaaaaaattgattctaagaaaattaattttaggtgttgctga

SEQ ID NO: 285408 - DNA, 523 bp, Unknown
  Bacterial polypeptide expressing nucleotide sequence isolated from the Sargasso Sea
atggctttttcaccgaaaaatagttattcaaaagaagaattattagattgcgcagatggaaatttgtttggagaagataacggaaaattacctactccaaatatgcttatgtttgacagaatcacaaaaatttcagattcagagggaaaatataagaaaggtaaaataatcgcagagttagatgtaaacccggatctatggttttttgattgccattttaaaggagatccagtaatgccaggttgtttgggtttagacgcaatgtggcaattagtagggttttatttatgttggttaggtaatcctggaagaggaagagcattaggagcatcagaagttaaattctttgggcaagttttgcctaccgctaaaaaagtaactttaacaattgatatgaaaaggatattaaacttagatctaactgtaggaattggtgaaggcacaatgttagtggatgatagagagatttataccgctaaagggcttaaggttggtctctttcaagatacttctagtttttaaa

SEQ ID NO: 285409 - DNA, 484 bp, Unknown
  Bacterial polypeptide expressing nucleotide sequence isolated from the Sargasso Sea
aactatgaagaattaatttcatgcgcagaaggtaaattatttggtgaaggaaatgcaaaactaccattacctccaatgctcatgtttgacagaattacggaaattaataaggaagttggagaatttaagaaaggtttcatcaaagccgaacttgatatcaaagaaaatttatggttttttgattgtcactttaagaaagatcctgtaatgccaggttgtttaggattagatgccatgtggcaattggttggcttttatttgggttggattggagaaccaggaaaaggtagagctttaggagttaattctgtaaagttcacaggtgaagttttaaaaaatataaaaaaggccacatatgagataaatatgaaaagaattcttaaaaaagaagggaccaccgttggtttagctaacggaatactgagtgccgatgataaaattatctatcgtgcggaaaatttaaaagtaggattgtttaaataat

SEQ ID NO: 285410 - DNA, 502 bp, Unknown
  Bacterial polypeptide expressing nucleotide sequence isolated from the Sargasso Sea
tatgaaaaaaaactcatactcctacgatgatctaataacttgtggaaatggtgatctttttggtcccggtaatgcaaaattacctcttccaccaatgcttatgtttgacagaataaccgaaatcaatgaaaataatggtgcatttaataaaggctctttaaaagctgaattagatattaaagatgatctttggttttttgattgtcattttaaaaaagatccagttatgccagggtgcttaggtttggatgctatgtggcaactggtaggattttttctaggttggctaggaaatcctggaaaaggaagagcattaggtgtgggtactgtaaaatttacaggtgaagttttacagggtgtaaaaaatgtaagatatgaaatagatatgaagaaaattatgtctcctggagggacaactgttggtcttgcaaatggaattgttcttgcagataataaaaaaatatattcagcagaaagtttaaaggtaggtttgtttaaataa

SEQ ID NO: 285411 - DNA, 505 bp, Unknown
  Bacterial polypeptide expressing nucleotide sequence isolated from the Sargasso Sea
tatgaaaaaaaactcctattcttatgatgagctaataaattgtggaaatggggatctttttggacctggaaatgcgaaattaccacttcctccaatgcttatgtttgatagaattacagatattaatgatggcaatggtgcttttaataaaggatctttaaaagcagagctggacattaagaaagatctttggttttttaattgtcattttaaagaagatcctgttatgccaggatgtcttggtctggatgcgatgtggcagttagttggtttttatttgggttggattgggaacccaggaaaaggaagggcattaggtgttggtacagtaaaatttactggtgaagttttgcaaaatgttaaattggtaaagtatgaaattgatatgaaaaagataatgtcacctggaggtacaactgttgggctcgcaaatggtatattacttgctgatgataaaaagatatactcagctgacaatttaaaagtaggattatttaaatcatga

SEQ ID NO: 285412 - DNA, 505 bp, Unknown
  Bacterial polypeptide expressing nucleotide sequence isolated from the Sargasso Sea
atgcaaaaaaacagttttaattacgacgaattaattgcttgtgcaaatggtgaattatttggtgagggtaatgcaaaacttcctttacctcctatgttaatgttcgatagaattacagaaattaaacgagatataggtgaatttaaaaaaggatttattaaagctgagttagatataaaaaataatctatggttttttgattgtcattttaaaaacgatcctgtaatgccaggttgtttaggcctagatgcaatgtggcaattagttggcttttacttaggttggataggtgagccgggaaaaggaagagctttaggtgttaactctgtaaaatttactggagaggtgctaaaaaaagccaaaaaagcaacttatgaaataaatatgaaaagaattttaaaaaaagaaggtgctacagttggtcttgcaaatggtatactgagtatagatggaaagataatttacaacgcagaaaatttaaaagtaggtttgtttaaatcatgaa

SEQ ID NO: 285413 - DNA, 502 bp, Unknown
  Bacterial polypeptide expressing nucleotide sequence isolated from the Sargasso Sea
tatgaaaaaaaattcctttaattatgacgaattaataggttgtgcaaatggtgagctttttggccctggtaatgcaaaattaccgtctcctccaatgcttatgtttgacagaattactgaaattaatgaaaataagggtgcttttggcaaaggattaatgaaagctgaacttgatattaaagatgatttatggttttttgactgtcactttaaagaagatccggttatgccaggatgcttaggtttggatgcaatgtggcagttagttggattttacttaggttggcttggaaacccaggaagaggaagagctttaggggtaagcacagtgaaatttactggagaagttttaaagaatgtcaaaatggcaacatatataattgatatgaaaagaatattaattaaaggtgaaacaactgttggcttagcaaatggaattcttcttgcggatgataaaaagatttactcagctgatggtctaaaagtaggattatttaaataa

SEQ ID NO: 285414 - DNA, 502 bp, Unknown
  Bacterial polypeptide expressing nucleotide sequence isolated from the Sargasso Sea
tatgaaaaaaagttcctttgattatgatgaattaataaactgtgcaaatggagaactttttggccctggaaatgcaaaattaccttctccaccaatgttaatgtttgatagaattactgaaattagtgaaaaaaatggagcttttgacaaaggattaatgaaggctgaacttgatattaaagatgatttatggttttttgattgtcactttaaagaagatccagttatgccaggatgtttaggtctagatgcaatgtggcagttggttggattttacttgggttggcttggaaatccaggaagaggaagagctttaggggtaagcacagtgaaatttactggagaagttttaaagaatgtcaaaatggcaacatatataattgatataaaaagaatattaattaaaggagaaacaactgttggcttggcaaatggaattcttctggcggatgataaaaagatttactcagctgatggtctaaaagtaggattatttaaataa

SEQ ID NO: 285415 - DNA, 502 bp, Unknown
  Bacterial polypeptide expressing nucleotide sequence isolated from the Sargasso Sea
aatgaaaaaaaattccttcaattatgatgaactgattgattgtggaaatggtgggctttttggtccaggaaatgcaaaacttccattgcctccaatgctaatgtttgacagaataactgaaattaatgaaaataaaggtgcttttaaaaaaggtattattaaagcggaactagatattaaagatgaactttggttttttaattgtcattttaaagaggatcctgtgatgccaggttgtctagggttagatgctatgtggcaattagttggtttttatttaggttggctgggtaaccctggtagaggaagagctcttggtgttaataatgtaaaatttacaggagaagttcttaaaaatgttaaaaaggcaacatatgaaattgatatgaaaagaattttaattaaagaaggaactactgtaggtttagcgaacggaattttacatgcagatggtaaaaaaatttattctgctgaaaacttaaaagtaggtttgtttaaataa

SEQ ID NO: 285416 - DNA, 511 bp, Unknown
  Bacterial polypeptide expressing nucleotide sequence isolated from the Sargasso Sea
tatgaaacaaaattccttttcttatgagcaactaatcaattgtgcaaatggagatttatttggaaagggtaatgcacaactaccgtccccacctatgctaatgtttgatagaataaccaatattaatgaaacaggtggtttatttaataaaggtgagattgttgctgaattagacatcagacctgatctttggttttttgactgtcatttcaagggggatcctgtaatgcctggatgtctaggcttagatgcaatgtggcaattggttggtttttatcttggatggttagaacaaccaggtaaaggtagggctcttggtgttggtgaagttaaatttacaggacaagttttagatacaataaaaaaagtaacttaccatatttctcttaaaagattaattcttagaaaattaattttaggagttgcagatggtattcttaaagcagatggagagcctatatatgaagctaaagacatgaaggttggactttttcaatctgaaaataaataa

SEQ ID NO: 285417 - DNA, 425 bp, Unknown
  Bacterial polypeptide expressing nucleotide sequence isolated from the Sargasso Sea
accattaccacctatgttaatgtttgatagaattaccaacattcaaaatcaaaaaggtaaatttaataagggactagttgaagctgaattagatataaaagaaaaaatgtggttttttgattgtcattttaagaatgatcctgtaatgcctggttgccttggattagatgctatgtggcaactagtaggttttttcttgggatggataggagaaccaggcaaaggacgtgcacttggcgtaaacacagtaaaatttactggtgaagttcttaaaagtatcaaaattgctaggtatgaaattcatataaaaagaattttaaaaaaggcggatgctgttgtaggcttagctgatggaaaattatattctgacaataaagccatatatttggcagaaggattaaaagtaggactttttaaaaaatgag

SEQ ID NO: 285418 - DNA, 502 bp, Unknown
  Bacterial polypeptide expressing nucleotide sequence isolated from the Sargasso Sea
tatgaaaaaaaactcctatagctacgatgacctaattacttgtggaaatggtgatctttttggccctggtaatgctaaattaccccttcctccaatgcttatgtttgatagaataactgagattaatgacaataatggggcctataaaaaaggatctttaaaggctgagctagatattaaagatgatctttggttctttgattgtcattttaaatctgaccccgttatgcctggttgcttagggttagacgctatgtggcagctggtaggtttttacctaggttggctaggaaatcctggcaagggtagagcactaggtgttggaacagtaaaatttactggtgaagttttacaaagtgtaaaaaatgtaaggtatgaaatagatatgaaaaaaattatgtcaccaggaggcacaactgttggtcttgctaatggattagtttttgcagataataaaaaaatatattcagcagatagtttaaaagtaggattgtttaaataa

SEQ ID NO: 285419 - DNA, 505 bp, Unknown
  Bacterial polypeptide expressing nucleotide sequence isolated from the Sargasso Sea
tatggaaaaaaaatcagcatacaattacgatgagttaataaagtgcggtaatggcgaacttttcggccctggaaatgcaaaacttcctttaccaccaatgctgatgtttgatagaattactgaagttgcagagaataaaggagcttttaaaaaaggtattttaaaagcagaactggacattaaaaatgaattatggttttttgattgtcattttaaggaggacccagttatgcctggatgcttaggacttgatgcaatgtggcaactagttggattttttttaggctggcttggaaaccccggaagaggtagagcgttaggagttggcgcagtaaagtttacaggtgaagtgttaaaaaatgttaaaatcgcaacatatgaaattgatatgaagagaattttagttaaagaaggtacaacagtaggtttagcaaatggaattcttaaagcagatgataaaaaaatatattctgctgaaaatttaaaagttggattgtttaaataa

SEQ ID NO: 285420 - DNA, 497 bp, Unknown
  Bacterial polypeptide expressing nucleotide sequence isolated from the Sargasso Sea
aaaaaactcatactcatatgaagagctgattaattgtgctgaaggtaagttatttgggccaggaaatgctaaattacctctaccacctatgcttatgtttgatagaataatagaaattaatgaaaataaaggtgcttttaaaaaaggatctttaaaagctgaacttgatatcaaaaaaaatctttggttttttgattgtcattttaaagaagaccctgttatgccgggttgtttaggtcttgatgcaatgtggcaattagtaggtttttatttaggctggattggaaatccaggaaaaggaagggcattaggagttggaacagtaaaatttacaggagaagttttacaagaagtgaagttagttcgttatgaaattgatatgaaaaaaattatgtcaccaggcggaacaaccgttggtcttgctaatggcattgtattagcagatggcaaacagatatattcagctgaaagtttaaaagtaggattatttaaataat

SEQ ID NO: 285421 - DNA, 433 bp, Unknown
  Bacterial polypeptide expressing nucleotide sequence isolated from the Sargasso Sea
aatgcaaaacttcctcttccaccaatgttgatgtttgatagaataacggaaattagagaaagcaaaggagaatataaaaaagggttaattaaggcagaactagatattaaagatagtttgtggttttttgaatgtcatttcaaaaatgattcagttatgcctggatgtttaggattagatgctatgtggcaactggttggtttttatttaggctggcttggaaatccaggaaagggaagagcactgggtgttaatagtgtaaagttcataggtgaagtgttaaaaaatattaaattagcgagttacgaaatagatataaaaagaattttgataaaagaaggaactacagtaggtttggcaaatggtattcttaaagctgatggaaaagaaatatattcagctgaaaatttaaaagtaggattatttaaataat

SEQ ID NO: 285422 - DNA, 502 bp, Unknown
  Bacterial polypeptide expressing nucleotide sequence isolated from the Sargasso Sea
tatgaaaaaaaactcctactcatatgacgagcttataaattgtggtgaaggtaaattatttggtcctggtaatgctaaattaccacttccacccatgcttatgtttgatagaattacagaaataaatgataaaaaaggtacttttaataaaggagtattaaaagctgaattagatataaaaaaagatttatggttttttgattgtcattttagagaggatcctgttatgcctggatgtctaggtcttgatgctatgtggcaattagtaggtttttatttgggctggattggaaacccaggtaaaggaagagctttaggcgttgggactgtcaaatttacaggtgaagttttacaaaatgttaaattagtaaggtatgagattgatatgaaaaaaatcatgtctcctggtggaacaactgtagggcttgcgaatggagttgtattagctgatgaaaaaaagatatattcagcagacaatctaaaagtaggattatttaaataa

SEQ ID NO: 285423 - DNA, 502 bp, Unknown
  Bacterial polypeptide expressing nucleotide sequence isolated from the Sargasso Sea
atgaaaaaagggtcattcaattataatgagttaataagctgctcaaatggtgagctttttggtcctggaaatgcaaaattaccctcaccaccaatgctgatgttcgacagaataacagaaataaatgaaaataaaggtttttttaataaaggattaattaaagcagaattggatataaaagataacctttggttttttgattgtcattttaaagaggatccggtaatgccaggatgtttaggtttagatgctatgtggcaactggtcggattttatttaggatggttggggaatccaggaagaggtcgagctcttggagtaaatagtgtaaaattcacaggggaagttcttaaaaatgtcaaaatagcatattatgaaattaatatgaaaagaatattaattaaagagggaacaaccgttggccttgcaaatggtttgttattagccgatgataaaaaaatttatactgcagaaaatttaaaagtaggattatttaaataat

SEQ ID NO: 285424 - DNA, 505 bp, Unknown
  Bacterial polypeptide expressing nucleotide sequence isolated from the Sargasso Sea
atgcaaaaaaatagctttaattacgaagagttaattgcttgtggcaaaggcgatttatttggggaaggaaatgcaaaacttccattgcctccaatgttaatgtttgacaggataaccaaaataaaaaaagatgtaggtgaatttaaaaaaggatttattaaagctgaattggacattaaagaaaatttatggttctttgattgtcatttccaaaatgatcctgtaatgccaggctgtttaggtttggacgctatgtggcaattagttggtttttatttaggatgggtaggtgaacctggtaaaggaagggcgttaggagtaaattctgttaaatttactggagaagttcttaaaaaagtcaaaatggctacatatgaaataaatatgaaaagaattttaaaaaaagaaggtgctgttgttggattagctaatggtatattaagcgctgatggaaaaataatttacaaagctgaaaatttaaaagtagggctttttaaacaatgaa

SEQ ID NO: 285425 - DNA, 505 bp, Unknown
  Bacterial polypeptide expressing nucleotide sequence isolated from the Sargasso Sea
atggaaaaaaaatcatcatatagttatgaagagttaattaattgtggaaatggtggactttttggcccaggaaatgccaaattaccacttcctccaatgcttatgtttgatagaataatagaagttaaagaagacaatggtgcttttaaaaaaggctctattacagctgagctagatataaaagaagacctttggttttttaattgtcattttaaagaagatccggtcatgcctggatgtcttggcttagacgcaatgtggcagctggtaggtttttatttaggatggcttggcaatcctggtaaagggagggccttaggagttggtactgtaaagtttactggtgaagttttgaaaagtgtaaaaaaagcaaaatatataattgatatgaaaaaaattatgtctccaaatggaacaacagttggtttggcaaatggtgttctgttagcagatgaaaaaaaaatttattcagcagaaaatttaaaagtaggattatttaaataat

SEQ ID NO: 285426 - DNA, 505 bp, Unknown
  Bacterial polypeptide expressing nucleotide sequence isolated from the Sargasso Sea
catgcaaaaaaatagttacaattacgatgagctaatttcgtgtggagagggaaaactatttggtgaggggaatgctaagctgccgttacctccaatgttgatgtttgatagaattacagaaataaaaaaagatacaggtgaatttaagaaaggttttattaaagcggagctagatatcaaagacaacctatggttttttgattgccattttaagagggacccagttatgccggggtgtcttggcttagatgctatgtggcagttagttggattttatttaggctggataggtgagccaggaaaaggtagagctttaggagtaaattctgtaaaattcacaggcgaagtattaaaaaatattaaaatggcaacttatgaaataaatatgaaaagaattttaaaaaaagaaggtacagctgttggattagctaatggtattttaagtgcagatggtaaaataatttacactgcagaaaatcttaaggtaggattattcaaatcatga

SEQ ID NO: 285427 - DNA, 502 bp, Unknown
  Bacterial polypeptide expressing nucleotide sequence isolated from the Sargasso Sea
atgaaaaaaaactcctatagctacgatgacctaattacttgtgggaatggtgaactttttgggcctggtaatgctaaattaccccttcctccaatgctcatgtttgatagaataaccgaaattaacgacaataatgggacttataataagggatctttaaaggctgagctggatattaaagaagatctttggttttttgattgtcattttaaatctgaccctgttatgcctggttgtttagggttagacgctatgtggcagttggtaggtttttaccttggttggttaggaaatcctggaaagggtagagccctaggagttggagcagtaaaatttactggtgaagttttacaagatgtaaaaaatgtaaggtacgaaatagatatgaaaaaaattatgtcacctggaggcacaactgtaggacttgctaatggagtagtttttgcagataataaaaaaatatattcagctgatagtttaaaagtgggattatttaaataat

SEQ ID NO: 285428 - DNA, 502 bp, Unknown
  Bacterial polypeptide expressing nucleotide sequence isolated from the Sargasso Sea
tatgaaaaaaagttcctttaattatgacgaattaataagctgcgcaaatggcgaactttttggccctggaaatgcaaaattaccttctccgccaatgctaatgtttgatagaattaccgaaattagtgaaaaaaatggagcttttgacaaagggataatgaaggctgaactcgatataaaagatgatctgtggttttttaattgtcactttaaagaggatccagtcatgccaggatgtttaggtttggatgcgatgtggcaactagttggtttttacctgggttggcttggaaatcccggaaggggaagagctttaggcgttagcacggtaaagtttacaggagaggttttaaagaatgtcaaaatggcaacatatattattgatatgaaaagaatattaattaaaggtgaaacaactgttggactagcaaatggtattcttcttgctgatggtaaaaaaatatactctgctgacagtttaaaagtaggattatttaaataa

SEQ ID NO: 285429 - DNA, 421 bp, Unknown
  Bacterial polypeptide expressing nucleotide sequence isolated from the Sargasso Sea
atggaaaaagctaacagtttcactaaagaacaacttatcgcctgtggtaacggtaatttattaggccctaacagacctaagttaccggtagataatatgttgatgattgaccgtatcattaccatcaatgaagatggtggtgaatttggtaaaggtgaaattgttgccgaacttgatatcactccagacttatggttttttgactgtcactttaaaacagatcctgtcatgccgggctgtttaggactagatgcaatgtggcaacttgttgggttttatttaggttgggaaggcgctgaaggaaaaggtcgtgcactgggtgtgggtgaagtcaaatttactggccaggtattacctgatgcgaaaaaagtcacctacaaactcaatattaaacgtaaaatccatcgtaaattagtcatgg

SEQ ID NO: 285430 - DNA, 502 bp, Unknown
  Bacterial polypeptide expressing nucleotide sequence isolated from the Sargasso Sea
atgaaaaaaaattcctacacttatgatgaattaatcaattgtggagaaggaggtttgtttggcccaggaaatgcaaaactcccccttcctccaatgcttatgtttgatagaataacagaaattagtgaaaatggtggtgcttataaaaaaggtataataaaagctgaattaaacgtcaaagatgatttgtggtttttcaattgccattttaaagaagatccagtaatgcctggatgtttaggtttagatgctatgtggcagttagttggtttttatcttggttggttaggaaaacctggaaaaggtagagctttgggagtaaacgctgtaaaatttactggtgaagtattaaaatcagttaaaatggctacatacgaaatagatatgaaaagaattttaataaaagaagggactactgtagggttggctgatggaattttatctgctgatggaaaaaaaatatattctgcagaaaatttaaaagtaggattatttaaataat

SEQ ID NO: 285431 - DNA, 508 bp, Unknown
  Bacterial polypeptide expressing nucleotide sequence isolated from the Sargasso Sea
attgaaaaaaaattcgttcaactatgatcagttaatagattgtgctaaaggaattttgtttggcaaaggcaatgcacaacttcctttacctcccatgctaatgtttgacagaataacaaatataaataaagacggtggtgagttttcaaaaggggagatagaagcagaactagatattaaatctgacttatggttttttaactgtcattttaaagatgatccggtgatgccaggctgtctaggattagatgctatgtggcaattagttggattttatttgggctggttaggccaacctgggaagggtagggctttaggtgtaggagaagtaaaatttacaggccaagtattacaaacagtgaaaaaagttacataccatatttctttaaaaagattaatattgagaaaattaattttgggtgtagcggatggggttatgaaagctgacggtaagcaaatatatgaagttaaagatatgaaagttgggctttttacaccaagtgaataa

SEQ ID NO: 285432 - DNA, 502 bp, Unknown
  Bacterial polypeptide expressing nucleotide sequence isolated from the Sargasso Sea
tatgaaaaaaaactcatattgctatgatgaccttataacttgtggaaatggggatctttttggccctggaaatgcaaaattacctcttccaccaatgctaatgtttgacagaataactgaaatcaatgaaaataatggtaaatttaataaaggctctttaaaagctgaattagatattaaggatgatctttggttttttgattgtcattttaaaaaagatccagttatgccaggatgtttaggtttagatgccatgtggcaactggtaggtttttttttaggttggctgggaaatcctggaaaaggcagagctttaggtgtgggtaccgtaaaatttacaggtgaagttttacggagtgtaaaaaatgtaagatatgaaatagatatgaagaaaattatgtctcctggaggaacaactgtcgggcttgcaaatggaactgttcttgcagataataaaaaaatatattcagcagaaagtttaaaagtaggtttgtttaaataa

SEQ ID NO: 285433 - DNA, 502 bp, Unknown
  Bacterial polypeptide expressing nucleotide sequence isolated from the Sargasso Sea
tatgaaaaaaaactcttactcatacgatgaactaataaattgtggtgaagggaaactatttggtcctggtaacgctaaattacctcttccaccaatgcttatgtttgatagaattacagaaattaatgacgacaagggagcttttaaaaaaggtttattaaaagctgagttagatattaaaaatgatctttggttttttgattgtcactttaaagaagatcctgttatgccaggatgtttaggattagatgctatgtggcaattagttgggttttatctaggctggataggaaatcctggaaaaggaagggcattaggagttggaacggtaaagttcacaggcgaagtattacaaaacgttagactggtaacgtatgaaattgatatgaaaaaaattatgtctccaggtggaacaactgttggtctagctaatggagtggtattggctgatggaaaaaaaatttattcagcagataatttaaaagtaggattatttaaataa

SEQ ID NO: 285434 - DNA, 502 bp, Unknown
  Bacterial polypeptide expressing nucleotide sequence isolated from the Sargasso Sea
atgaaaaagaattcatactcatataaagagctaattgattgtggtaatggccaattatttggtccaggaaacgctaaattaccacttccaccaatgctaatgtttgatagaatcactgaaattaatgatgacaatggtgcatttaataaaggatcaattaaagctgaattagatataaagcaagatctttggttctttaattgtcattttaaagaggatccagtaatgccaggttgtctaggtcttgatgctatgtggcaactagttggtttttatttgggttgggttggcaaccctggaaaaggaagagctttaggagtaggtactgtgaaatttactggagaagttttgaaaaaagtaaaattagtaagatatgaaattgatatgaaaaaaataatgtcacctggtggaacaacagtaggtcttgccaacggagttgttttagctgatgataaaaaaatatattcagcggaaagtttaaaagtaggtttgtttaaataaa

SEQ ID NO: 285435 - DNA, 505 bp, Unknown
  Bacterial polypeptide expressing nucleotide sequence isolated from the Sargasso Sea
tatggaaaaaaaatcgtcatatagctatgaagaattaatcaattgtggaaatggcaagctttttgggcctggaaacgctaaattaccacttcctccaatgcttatgtttgatagaataacagaagttaaagaacacaatggtgcttttaaaaaaggatctatttgtgctgaattggatataaaaagtaatctttggttttttgattgccattttaaagaagatccagttatgcctggatgtcttggtttagatgctatgtggcaactggtaggcttttatctaggttggctagggaatcctggaaagggaagggccttaggagttggcactgtaaagtttactggagaagttttaaaaagtgcaaaaaaagcaaaatatgtaattgatatgaaaaaaattatatctcctggaggaacaacagttggtttggcaaatggtattttattagcagatgaaaaaaaaatctattcagcagaaaatttaaaggtgggattatttaaataa

SEQ ID NO: 285436 - DNA, 508 bp, Unknown
  Bacterial polypeptide expressing nucleotide sequence isolated from the Sargasso Sea
atgaaacaaaattcatttagttatgataaattaattgattgtggcaaaggaattctatttggcaaaggaaatgctcagttacctttaccaccaatgcttatgtttgatagaattataaatattaatgaagatggtggatttttttcaaaaggagaggttaaagctgagcttgatataaaacctgatttatggttttttgattgccattttaaagatgatccagtgatgccaggatgcttaggattagatgcaatgtggcaactactagggttttatcttggatggcttggacaacctggcaaaggaagagcgcttggtgttggagaagttaaatttactggacaagtattaaaaactgtaaaaaaagtaacttatcatatttctataaaaagattaattctaagaaaattaattcttggtgttgctgatggtgtacttgaggctgatggtaaatcaatatatgaagtaaaagatatgaaagtaggactgttcactgatagtgaataaa

SEQ ID NO: 285437 - DNA, 350 bp, Unknown
  Bacterial polypeptide expressing nucleotide sequence isolated from the Sargasso Sea
ttctttaaatataacctcagacttatggttttttgattgccattttattggtgatccagtaatgccaggttgtttgggccttgatgccatgtggcagttagttggcttttatttgggctggtctcaatatcctggcaaaggaagagctcttggtgtaggagaggtaaaatttacagggcaaatcttaccaactgctaaaaaagttacctataaaattcatattaaaaggttaattactagaaaactcattatgggtatcggtgatggtattgtctctgttgacggtcgagagatttatatagcaaaagatttacgcgttggattatttacatcaactgaaggtttttaaa

SEQ ID NO: 285438 - DNA, 508 bp, Unknown
  Bacterial polypeptide expressing nucleotide sequence isolated from the Sargasso Sea
atggataaaaaatcatcatatacttatgaagagcttatagattgtggaaatggcaaactttttggctcaaaaaacgcaaaattacctcttccacctatgttgatgtttgacagaatatcagaaattagtgaaaataaaggcacatttaaaaagggtttaataaaagctgagctagacataaaagataatttatggttttttgaatgtcactttaaagatgactctgttatgccgggttgcttgggattagatgcaatgtggcaactggtaggtttttatttaggttggcttggtaaccctggaaaaggtagagcattaggagttaatactgtaaaatttactggtgaagtattaaaaaatgttaagttggcaagttatgaaattgatatgaaaagaatacttattaaagaaggaactacagtaggacttgcaaatggtatccttaaagctgatggaaaaaaaatatattcagcagaaaatttaaaagtaggattatttaaccaatgaa

SEQ ID NO: 285439 - DNA, 340 bp, Unknown
  Bacterial polypeptide expressing nucleotide sequence isolated from the Sargasso Sea
atgtaatcctgatctctggttctttgattgccatttcaaagaagatcctgttatgccggggtgccttgggcttgatgcaatgtggcaattgcttggtttctttctatgctggagtgaattacctgggattggaagagctttaggagctgaaaaagttaaattctttggccaggtgcttccaacagcaaaaaaagttaattatgtacttgatataaaaagagttgtaaatcgtggagctgtagttggtttttctgatgctgatatgtttgtagatgataagcatgtttattcagcagataaccttaaagtaggcctttttgctgacccaagcaagttttaa

SEQ ID NO: 285440 - DNA, 502 bp, Unknown
  Bacterial polypeptide expressing nucleotide sequence isolated from the Sargasso Sea
tatgaaaaaaggctcgtttaattacgatgaactaataagctgcgcaaaaggtgaactttttgggcctggcaatgcaaaattgccatctccaccaatgttaatgttcgatagaatatctgaaatcgatgaaaataagggtttttttaataagggcataattaaagcagaacttgatataaaggatgatctttggttttttgattgtcattttaaagaagatcctgtaatgcctggatgtcttggattagacgctatgtggcaactagttggcttttatttagggtggttagggaatcctggaagaggtcgagcattaggcgtaaatagtgtaaaattcactggagaagttctaaaaaatgtcaaaatggcaacttatattattgatatgaaaagaatacttattaaagaaggaaccactgttggtcttgctaatggagttttattagctgatggtaaaaaaatatatgcagcagaaaatttaaaagttggtttatttaaataa

SEQ ID NO: 285441 - DNA, 508 bp, Unknown
  Bacterial polypeptide expressing nucleotide sequence isolated from the Sargasso Sea
atggataaaaaatcatcatataattatgaagaactaataaattgtggaaatggcaagctttttggttcaggaaacgcaaaattacctcttccgcctatgttgatgtttgacagaatatcagaaattagtgaaaataaaggtgcgtttaaaaaaggtttaattaaagctgaactagacataaaagataatttatggttttttgaatgtcactttaaagatgactctgttatgccaggttgtttaggattggatgcaatgtggcaactggtaggcttttatttaggttggctaggtaacccagggaaaggaagggcgttaggagttaatacggtaaaatttactggtgaagtattaaaaaatgtaaaattagcaagttatgaaattgatatgaaaagaatacttataaaagaagggactacggtaggacttgcaaatggtatccttaaagctgatggaaaaaaaatatattcagcagaaaatttaaaagtaggattatttaaacaatgaa

SEQ ID NO: 285442 - DNA, 505 bp, Unknown
  Bacterial polypeptide expressing nucleotide sequence isolated from the Sargasso Sea
atgataaaaaaaaacagtttcaaatatgaagatctgattgagtgtgctaatggaaaattatttggcccaggaaatgctaaactgccatctcctccaatgttaatgtttgatagaattacaaatattcaaatagataaagggagatataataaaggattgataaatgcagaacttgatattaaagaaaaaatgtggttttttgattgtcactttaaagaagatcctgttatgccaggatgtttgggtctagatgctatgtggcaattagttggtttttatttaggatggattggtgagccaggtaaaggtagagctttaggagtaaattcagttaaatttacaggtgaagtactaaaaaatgtcaaaattgcaagttaccaaattgatatgaaaagaatattaaaaaaaaaaggaacagtagttggtttagctgatggaactttattagctgataacaagccaatatatgaggcagaaaatttaaaggttggattatttaaataat

SEQ ID NO: 285443 - DNA, 502 bp, Unknown
  Bacterial polypeptide expressing nucleotide sequence isolated from the Sargasso Sea
atgaaaaaaaattcatactcatatgatgagctgattaattgtggtaatggccaattatttggctcaggtaatgctaaattacctcttccgccaatgcttatgtttgatagaattacagaaatcaatgataaaaatggggctttcaaaaaaggatcgttaaaagctgagttagacataaaacaagatctttggttttttgattgtcactttaaagaagatcctgttatgcctggttgtttaggtctggatgcaatgtggcagttagtgggtttttaccttggatggctcggaaatcctggtaaaggaagggctcttggtgtagggacagtcaaatttactggggaagttttaaaaagtgtaaaaaatgttagatatgaaattgatatgaaaaaaattatgtctcctggaggaacaactgttggtttagcaaatggagttgtattcgctgatagtaaaaaaatatattcagcagatagtttaaaggtaggtctatttaaataat

SEQ ID NO: 285444 - DNA, 505 bp, Unknown
  Bacterial polypeptide expressing nucleotide sequence isolated from the Sargasso Sea
attggaaaaaaaatcatcctatagctatgatgaattaattaagtgcggaaatggtgagctttttgggcctggaaacgcaaaactacctttgcctccaatgctgatgtttgacagaataacagaaattagagaaaatgaaggttcttttaaaaaaggggttttgaaagctgaactagatattaaagatgatctatggttttttgactgccattttaaggaagatccagttatgcctggatgtttaggtctagatgcaatgtggcaactggttggcttttatttagggtggctaggaaacccaggaagaggtagagcgttaggagtgagttctgttaaatttacgggagaagttttaaagaatattaaaacagcaacatatgaaatagatatgaaaagaattttggtaaaagaaggaacaacagttggtctagctaatggaatactaaaagctgataacaaaaaaatctacactgctgaaaatctaaaagtaggattatttaaataa

SEQ ID NO: 285445 - DNA, 502 bp, Unknown
  Bacterial polypeptide expressing nucleotide sequence isolated from the Sargasso Sea
atgaaaaaaaactcttactcatatgatgagcttatcaattgtggagagggtaaattgtttggtccagggaatgcaaaattaccgcttccaccaatgctcatgtttgatagaattacagaaattaatgatgaccagggtgctttcaaaaaaggatcactaaaagcagaacttgaaataaaaaaaaacctttggttttttgattgtcattttaaagaggatcctgttatgcctggatgccttggtttggatgccatgtggcaattagttggtttttatttaggctggattggaaatccaggaaaaggaagggctttaggtgttggaacggtaaaatttacaggggaagttttacaagatgtgaggttagtaaaatatgaaattgacatgaaaaaaattatgtctcctggtggtacaactgtgggtcttgcaaatggagtggttttagctgatgaaaaaaaaatatattcagcagataatttaaaagtaggattattcaaataat

SEQ ID NO: 285446 - DNA, 505 bp, Unknown
  Bacterial polypeptide expressing nucleotide sequence isolated from the Sargasso Sea
atggaaaaaaaatcatcatatagctaccaagaattgattagctgtggaaatggtgagctttttgggccaggaaatgccaaattacctcttcctccaatgctcatgtttgatagaataacggaagttaaagaagataatggtgcttttaaaaaaggctctattactgctgaactagatattaaagatgacctttggttttttgattgtcattttaagaaggatccagttatgcctggatgtcttggcttagatgcaatgtggcaactagtaggattttatctagggtggcttgggaatcctggaaaaggaagagctttaggagttggtactgtaaagtttactggtgaagttttaaaaagtgtaaaaaaagcaaaatatataattgatatgaaaaaaattttatctcccagtggaacaacagttggtttagcaaatggtgtgttattagctgatgaaaaaaaaatttattcagcagaaaatttaaaagtgggtttatttaaataat

SEQ ID NO: 285447 - DNA, 505 bp, Unknown
  Bacterial polypeptide expressing nucleotide sequence isolated from the Sargasso Sea
atgcaaaaaaaaacatcctacagttatcaagaattaattagttgtggaaatggtgagctttttggcccaggaaatgctaaattgcctttacctccaatgctgatgtttgacagaataactgaaattagagaaaatagcggtatatataaaaaaggctcggtaaaagctgagttagatattaaaaagagtttatggttttttgactgtcattttaaagaagatcctgtaatgcctggttgtttaggattagatgctatgtggcaactggttggattttatttaggatggttaggaaacccaggaagaggtagggcattaggggtaaatgctgtaaagtttacaggtgaagtattacaaaatgtaaaaaaggcaagttatgaaattgatatgaagaaaatattagctaaagaaggaacaacagttggattagcaaatggagttttgttagctgatggtaaaaaaatttatagtgcagagaatttaaaagtaggattatttaaataat

SEQ ID NO: 285448 - DNA, 375 bp, Unknown
  Bacterial polypeptide expressing nucleotide sequence isolated from the Sargasso Sea
tatgaaatcaaattcttttagttatgagcagctcatagattgcgctaagggacttttatttggtaaaggtaatgctcaacttccattaccaccaatgctaatgtttgatagaataattgagataaacaaacaaggtggagaattcttaaaaggagagattgttgctgaattagatataaaacctaatttatggttttttgaatgtcattttaaaaatgatcccgtgatgccaggctgtttaggattagatgcaatgtggcagttagttggattttatctcggttggcttggagaaaaaggaagaggaagggcgcttggagttggagaagtaaaatttactggacaagttttagattctgtcaaaaaagtcactta

SEQ ID NO: 285449 - DNA, 502 bp, Unknown
  Bacterial polypeptide expressing nucleotide sequence isolated from the Sargasso Sea
tatgaaaaaaagttcctttaattacgatgaacttcttgattgcgctaatggtaaattatttggtccaggaaatgcaaaattaccatctccaccaatgctaatgtttgatagaattacagaaattactgaaaatcagggtatttataaaaaaggctctatgaaagccgaacttgatattaaggataatttatggttctttgattgtcattttagagaagatccagttatgccaggttgtcttggtttagatgccatgtggcagctggttggcttttttcttggttggttgggaaatccagggagagggagagcattaggcgtaagcactgtgaaattcactggcgaagttcttaaaaatgtcaaaatggcaacatatgaaatagatatgaaaagaattcttgttaaaggagaaacaaccgtaggtcttgcaaatggaatattgcttgctgatggaaaaaagatttatagtgctgaaaatcttaaggtaggattatttaaataa

SEQ ID NO: 285450 - DNA, 523 bp, Unknown
  Bacterial polypeptide expressing nucleotide sequence isolated from the Sargasso Sea
atgtctttttcacctaaaaatagttataacaaggaagaaatacttgattgcgcacaaggcaacttatttggagaggaaaatggtcgcctacctaccccaaatatgctcatgtttgatcgtattactgagattaatgttgacggaggtaaattttcaaaaggccaaatcattgctgagttagacataaatccagatttgtggttttttgattgtcatttcaaaggtgatcctgtgatgcctggttgtttaggattagatgcaatgtggcaactggttggattttatttgtgttggatggataatcctggtaaaggcagagcattaggcgcttctgaagtaaaattttttgggcaagttctaccctcagccaaacttgtaacccttaaaattgatatgaaaagaattcttaatcttgatttgacagtaggaattggtgaaggctctatgcttgtagatggtagagaaatttatagtgcgaagggcctaaaagttggccttttccaagatacgtcaagcttttaaa

SEQ ID NO: 285451 - DNA, 502 bp, Unknown
  Bacterial polypeptide expressing nucleotide sequence isolated from the Sargasso Sea
atgaaaaaaaactcgtactcctatgatgatctaattacttgtggaaatggtgacctttttggccctggtaatgcaaaattacctcttccaccaatgcttatgtttgacagaataacagaaatcaatgaaaataacggcacgtttaataaaggctcattaaaagctgaattagacattaaagatgatctttggttttttgattgtcattttaaaaaagatccagttatgccagggtgcttaggtttagatgctatgtggcaactggtaggattttttctaggttggcttggaaatcctggaaaaggaagagcattaggtgtgggtaatgtaaagtttacaggtgaagttttacagaatgtgaaaaatgtaagatatgaaattgatatgaagaaaattatgtctcctggtggaacaactgtagggcttgcaaatggaattgttcttgcagataataaaaaaatatattcagcagaaagtttaaaagtaggattatttaaataat

SEQ ID NO: 285452 - DNA, 523 bp, Unknown
  Bacterial polypeptide expressing nucleotide sequence isolated from the Sargasso Sea
atgtctttttcaccgaaaaatagttactcaaaagaagaattattagattgcgctaatggaaatctatttggagaagataatgggagactacctactccaaacatgcttatgtttgacaggattactaaaatttcagattcagaaggaaaatataagaaaggaaagataatagctgagttagatgtgaacccagatttatggttttttgattgccacttcaaaggcgatccagtcatgccaggttgtttaggtttagatgctatgtggcaattagtaggattttatttatgttggttaggtaatcctggaagaggaagagcgttgggggcttcagaagttaaattctttggacaagttctacctactgccaagaaagtaactttaacaattgatatgaaaagaatattgaacttagatctaacggttggaataggtgaaggttcaatgttagttgacgatagagagatttatactgctaaaggacttaaagttggactctttcaagacacttctagtttctaaa

SEQ ID NO: 285453 - DNA, 502 bp, Unknown
  Bacterial polypeptide expressing nucleotide sequence isolated from the Sargasso Sea
atgaaaaaagggtcctttaattacaaggaattgataagttgtgcaaatggtgagctttttggacctggtaatgcaaaattaccgtctccaccaatgctaatgtttgatagaattacggaaatagatgaaaataaaggtttttttaataaaggattaattaaagctgaacttgatataaaggataatctttggttttttgactgtcattttagagaggatccagtaatgccaggatgtcttggtttagatgctatgtggcaactagttggtttttatttgggatggttaggaaatccaggcagaggtcgagctcttggagtaaatagtgtaaaattcactggagaagttcttaaaaatgtcaaaatggcaacttatgtaattgatatgaaaagaatacttattaaagaaggaacaactgttggtcttgcaaacgggattttattagctgatggtaacaaaatatattctgcggaaaatttaaaagtaggtttatttaaataat

SEQ ID NO: 285454 - DNA, 535 bp, Unknown
  Bacterial polypeptide expressing nucleotide sequence isolated from the Sargasso Sea
atgaccgagcccgctcctttttcaccgcagtctcagtacgacaaagccgagctgatggcctgtggtctgggcgagctgttcggtcccggaaacgcccaattgccggttgataacatgctgatggtggatcgcatcagccatatcagctctgaaggcggctctgccgataagggggagctcattgccgagctcgatattcatccggacctgtggttttttggctgccatttccccggcgatccggttatgccggggtgtctgggcctcgatgccatgtggcagctggttggatttttcctcggctggcgaggcaaccctgggcgcgggcgcgcgctgggctgtggggaggtcaagttcaccgggcagattctgcccagtcacaaacaggtgcagtaccacatccatatgaaacgcgtgattgagcgaaaactggtgatgggtatcgcagacggttctgtgtcagtggacggcgagacgatttacactgcctcggaccttcgcgtaggcctatttcagaatacggaggcaatgtagt

SEQ ID NO: 285455 - DNA, 499 bp, Unknown
  Bacterial polypeptide expressing nucleotide sequence isolated from the Sargasso Sea
tatgaaaaaaaactcattcacttatgaggagctaataagttgtggaaacggggaactttttgggcctgggaacgctaaattaccccttccaccaatgctcatgtttgatagaataaccgaaataaatgataatagcggagcttttaaaaaaggattaataaaagctgaactagatattaaagaagatctttggttttttaaatgtcattttaaagaagatccggtaatgccaggatgtctaggtttagatgctatgtggcaactagttggcttttacttaggatggttaggcaatcctggaaagggtagagctttaggagttggtgcagtaaaatttactggtgaagttttaaaaaatataaaaaaagcaacttatataattgatatgaaaaaaattatgtcgcctggagaaacttcggttggtttagctaatggcttattacttgcagacgacaaagaaatatattcagcagaaaatcttaaagtaggattatttaaa

SEQ ID NO: 285456 - DNA, 511 bp, Unknown
  Bacterial polypeptide expressing nucleotide sequence isolated from the Sargasso Sea
tatgataaaaaaaaatagtttcaaatatgaagagctaattgcttgcgctgatgggaaattatttggtccaggaaatgccaaactaccttctcccccaatgcttatgtttgatagaattataaatattcaagataacaagggtgtatttaataagggtttaattgaagctgaactcgatataagaaaaaaaatgtggttttttgattgtcattttaaagaggatccagtaatgcctggctgtcttggattggatgctatgtggcaattagttggattttttttaggatggaaaggtgagcctggcaaaggacgtgcactaggggttaattcagttaaatttactggtgaagtgctaactaattcaaaagttgcaagatataaagtggatatgaaaagaattttaaaaaaagaaggtgctgttgtaggattagctgatggaatattatattcagatgataaagcaatttacgaagctgaaaatttaaaagtaggtttatttaaaaatgaatag

SEQ ID NO: 285457 - DNA, 464 bp, Unknown
  Bacterial polypeptide expressing nucleotide sequence isolated from the Sargasso Sea
gtggagagggaaaattgtttgtgaagggaacgcaaaactcccattacccccaatgttaatgtttgatagaattacagaaattaaaaaagatactggtgaatttaaaaaaggatttattaaagcagaacttgatattaaagataatttgtggttttttgattgtcatttcaaaaaagatccagttatgccaggctgtctaggtttagatgctatgtggcaattagtagggttttttttaggctggataggagagccaggaaaaggtagagctttaggggtaaattctgtaaaatttaccggtgaagtattaaagaatattaaaatggcgacatatgaaattaatatgaaaagaattcttaaaaaagaaggaactgctgttggattagctaacggtattttaagtgctgatggcaaaataatttatacagcagaaaatttaaaggtaggattgtttaaatcatgaa

SEQ ID NO: 285458 - DNA, 505 bp, Unknown
  Bacterial polypeptide expressing nucleotide sequence isolated from the Sargasso Sea
atggaaaaaaaatcatcatatagctacgaagatttaattaattgtggaaatggtgggctttttgggccaggaaacgccaaattaccacttcctccaatgcttatgtttgatagaataatagaagttaaagatgataatggtgctttcaaaaaaggctctattactgctgagctagatataaaagatgacctttggttttttaattgtcattttaaagaagatccggttatgcctggatgtctaggtttagatgctatgtggcagctggtaggtttttatctgggatggcttggaaatcctggtaaaggaagggcattaggagtcggcactgtaaagtttactggtgaagttttaaaaagtgtaaaaaaaacaaagtatataattgatatgaaaaaaattatgtctccaaatggaacaaccgttggtttggctaatggagttttgttggctgatgaaaaaaaaatttatacagcagaaaatttaaaagtaggattatttaaataat

SEQ ID NO: 285459 - DNA, 421 bp, Unknown
  Bacterial polypeptide expressing nucleotide sequence isolated from the Sargasso Sea
atgactaagaatagctttacaaaacaagatttagtggcctgtggccgtggggaattatttggcgaaggtaacagtcagttgcctgtcgacaatatgctaatgatcgaccgtgtcgtccatatttcggaagaaggtggtaaatacggcaaaggggaaattatcgctgaatttgatatcaaccctgaactgtggttttttgattgtcacttcaaaggcgacccggtgatgccaggttgcttaggtttggatgctatgtggcaactggtaggttttttccttggctgggctggtggcccaggtaaaggtcgtgctttaggtgtgggcgaagttaaattcactggccaaattttgccaacagcaaagaaagtgacctatcgcatcgacatgacccgtgtgattaaacgtaaattgtttatgggta

SEQ ID NO: 285460 - DNA, 448 bp, Unknown
  Bacterial polypeptide expressing nucleotide sequence isolated from the Sargasso Sea
atgaaagaaaattcttttaattacgaaaagcttatagagtgtggaaaaggtatactgtttggtgaaggtaacgctcagttgccattgcctccaatgttaatgtttgacagaattataaatattaatgaaagtgggggagcattctctaaaggagaagtaatagctgaattagatataaaatctgacctatggttctttgattgtcattttaaaaatgatcctgttatgccagggtgtcttggtttagatgccatgtggcaacttgttggtttttatcttggttggttaggtcagccaggtaaaggaagggcattgggtgttggtgaagtaaaatttactggccaagtattaaatactgttaaaaaagtctcttatcatatttctttaaaaaaattgattctaagaaaattaattttaggtgttgctgagcggtgttttaaaagctgat

SEQ ID NO: 285461 - DNA, 511 bp, Unknown
  Bacterial polypeptide expressing nucleotide sequence isolated from the Sargasso Sea
aatgccggggtttccattaagttttagtcgtgaggatcttttaaagtgcgccagaggtgaattatttggcccagggaatgctcaacttcctgaaccccccatgcttatgatggatagaattacggatattagctcagataaaggtgaacatgggaaaggccacgtgatcgctgaatttgacattgtccccgacctttggtttttcgattgtcactttcctgggaaccctattatgccaggttgtcttggtttagatggactttggcagttaacaggttttaacttgggttggcgaggttggcgggggcgcggatatgccttgggagttggtgaagtcaaactaacgggaatggttcgcccagatcgaaagctgttaaaatacacggtgaatttcacaaaagcgcttcaaacaagaaggctcactatgggtgttgctgacggaacggttgaagcagacggtgagctaatttatcaagtgaaagatatgaaagtcgctttgtcttcaaattaa

SEQ ID NO: 285462 - DNA, 502 bp, Unknown
  Bacterial polypeptide expressing nucleotide sequence isolated from the Sargasso Sea
tatgaaaaaaaactcgtattcttatgaagatcttataagttgcggaaacggagctcttttcggtccaggaaatgcaaaattaccacttccaccaatgttgatgtttgatagaattacacaaattagtgataaagatggcgcttttaaaaaaggttctctaaaagctgaattagacataaacaaggacctttggttttttgattgtcattttaaaaaagatccagtaatgccaggatgtcttggacttgatgctatgtggcaactcgtaggattctatttgggatggattggaaatccaggaaaaggtagagccttgggtgttggtacggtaaaatttacaggagaagttttacaaaatgttaaattagtaaaatatgaaattgatatgaaaaaaataatgtctcctggtggtacaacagttggattagccaacgggatattattagcagatgaaaaaaaaatctattcagcggacaatctaaaagtagggttattcaaataa

SEQ ID NO: 285463 - DNA, 505 bp, Unknown
  Bacterial polypeptide expressing nucleotide sequence isolated from the Sargasso Sea
atgcaaaaaaatagttacaactataacgagttaatagactgcggtaagggcaaactatttgggaaaggtaatgcaaaattaccccttcctccaatgttaatgtttgatagaattactgaaataaatcaaaatgccggggaatttaaaaaaggattaattaaagctgagttagatgtaaaagacaacctttggttttttgattgtcactttcaggatgatcctgttatgccaggatgtttaggtttagatgctatgtggcagttagtgggtttttttcttgggtggattggagaaccaggtaagggtagagcacttggcgtaggctctgtaaaatttacgggtgaggtaataaaaaaaattaaaatggcatcatatgaagtaaatataaaaagagttttgaaaaaagagggaaccgcagttgggctagcaaatggagtcttaaatgctgatggtaaaactatttacacagcagaaaatctaaaagttggtttgtttaaatcatgaa

SEQ ID NO: 285464 - DNA, 505 bp, Unknown
  Bacterial polypeptide expressing nucleotide sequence isolated from the Sargasso Sea
tatgattaaaaaatcatcttatagctataaagagctaatagattgtggaaacggtaagctttttggtccaggaaatgctaaattgccccttcccccaatgctgatgtttgatagaatatcagaaattaaggaaaatgagggtgcatttaaaaaaggattaattaaagcagaactagacataaaagatagcttatggttttttgaatgtcactttaaggatgattcagtgatgccaggatgtttaggattagatgctatgtggcaacttgttggtttttatttaggatggctcggaaaccccggaaaagggagagctttgggagttaatagtgtaaagtttactggagaagtattgaaaaatgttaaattagcttcatacgaaatagatatgaaaagaattcttataaaagagggcactacggttggtttagcaaatggaattctaaaagctgatggtaaagatatttatagtgcggaaaatttaaaagtaggattatttaaataa

SEQ ID NO: 285465 - DNA, 505 bp, Unknown
  Bacterial polypeptide expressing nucleotide sequence isolated from the Sargasso Sea
atggaaaaaaaatcatcatacagctatgaagaattaattaattgcggaaatggtgagctttttggacctggaaacgctaaattaccacttcctccaatgcttatgtttgatagaataacaaaaattaaagaaaacaatggcgcttttaaaaaaggaaatatttgtgccgagctggatataaaagatgatctttggttttttaattgccattttaaagaagatccggttatgccaggttgccttggtttggatgctatgtggcaactagtaggattttatttaggatggcttggccatcctggaaaaggaagagctctcggagttggtactgtaaagtttactggagaagttttaaagagtgtaaaaaaagcaaaatatataattgatatgaaaaaaattatatcacctggcggcacaacagttggtctagcaaacggtgttttatttgctgatgaaaaaaaaatttatagtgctgaaaatttaaaagtaggattatttaaataat

SEQ ID NO: 285466 - DNA, 502 bp, Unknown
  Bacterial polypeptide expressing nucleotide sequence isolated from the Sargasso Sea
tatgaaaaaaagttcctttaattacgacgaactaattgattgcgctaatggtaagttatttggtccaggtaatgcaaaattaccttctccaccaatgctaatgtttgatagaattacagaaataactgagagtgagggtttttataaaaaaggatctatgaaagccgaacttgatattaaggataatttgtggttctttgattgtcattttagagaagatccagttatgccaggttgtcttggtttagatgcaatgtggcagctggttggcttttttcttggttggcttggaaaaccaggaagaggtagagcattgggtgtaagcactgtaaaatttactggagaagttcttaaaaatgtcaaaatggcaacatacgaaatagatatgaaaagaattcttgttaaaggagaaacaactgtgggacttgcaaatggaatattgctcgctgatggaaaaaagatttatagtgcagaaaatcttaaggtaggattatttaaataa

SEQ ID NO: 285467 - DNA, 523 bp, Unknown
  Bacterial polypeptide expressing nucleotide sequence isolated from the Sargasso Sea
ctgtgtgaacaaggcaaagactcgtttacccgtgaagagctgctcgcctgcagccgtggcgaactgtttggtgagggtaacagtcagctgcccgcccccaacatgttgatgatggatcgcatcgtcaagatcaatgacaacggtggtgagcatggcaaaggcgaaatcctggcagagctcgatatcacgccggatctctggttcttcgattgccacttcccgggtgatccggtcatgcctggctgtctcggtctggatgccatgtggcaactggtcggtttcttcttgggttggaaaggcggccctggcaagggtcgtgcactgggggttggcgaggtgaaattcaccggccagatcctgccaaccgccaagaaagtgacctacaagatcaccttcaagcgcgtcatcaaccgcaagctggtgatggggatcgccgatggcgtggtggaagtggatggtcgcccgatctacagcgctaccgatctgaaagtgggtctgttcaaggacactaccgcattctaag

SEQ ID NO: 285468 - DNA, 529 bp, Unknown
  Bacterial polypeptide expressing nucleotide sequence isolated from the Sargasso Sea
tatgaataaagtattcaaacctaaaaactcatattcaaaagcagaccttgttgattgcggatttggtcaactattcggtgagggcaatggcaggcttcctattgatccaatgcttatgtttgatcggatcactaagataaatgatactggtggtaaatattcaaaaggtgaggtttatgcagagctcgatgtaaatcctgatctctggttctttgattgccatttcaaagaagatcctgttatgccagggtgccttggacttgatgcaatgtggcaattgcttggtttctttctatgctggagtgaattacctggaattggaagagctttaggagctgaaaaagttaaattctttggccaagtgcttccaacagcaaaaaaagttaattatgttcttgatataaaaagagttgtaaaccgtggagctgtagttggtttttctgatgctgatatgtttgtagacgataaacatgtttattcagcagataaccttaaagtaggcctttttgctgatccaagcaagttttaa

SEQ ID NO: 285469 - DNA, 502 bp, Unknown
  Bacterial polypeptide expressing nucleotide sequence isolated from the Sargasso Sea
tatgaaaaaaaactcctactcatttgatgagctaataaattgtggaaatggtggactttttggagcaggaaatgccaaattaccgcttcctccaatgctaatgtttgatagaattacagaaattaatgataataatggtgcttttaaaaaagggtcacttaaagctgaactagacattaaaaaagatatgtggttctttgattgccattttaaggaagaccctgtaatgcctggttgccttggtctggatgcgatgtggcagctagtaggcttttatttgggttggattggaaatcctgggaaaggaagagctttaggagttggaacagtaaagtttacaggtgaagttttgcaagatgtaaaattagtaaaatatgaaattgatatgaaaaaaataatgtctccaggggggacgactgtgggactcgctaatggagttgtttcagcagatggtaaaaagatctattctgcagaaagtttaaaagttggattatttaaataa

SEQ ID NO: 285470 - DNA, 502 bp, Unknown
  Bacterial polypeptide expressing nucleotide sequence isolated from the Sargasso Sea
tatgaaaaaaaactcttactcatacgatgaactaataaattgtggtgaagggaaactatttggtcctggtaatgctaaattacctcttccaccaatgcttatgtttgatagaattacagaaattaatgacgacaagggagcttttaaaaaaggtttattaaaagctgagttagatattaaaaatgatctttggttttttgattgtcactttaaagaagatcctgttatgccaggatgtttaggattagatgctatgtggcaactagttggtttttttctaggttggaaaggaaatcctggtaagggaagggctttaggagttggtactgttaaatttacaggtgaagttttaaaaaatgtcaaaaatgtaagatatgaaatagatatgaaaaaaataatgtcgcctggaggaacaactgttggtcttgctaatggggtattacttgctgatgagaaaaaaatatattcagctgacaatttaaaagtaggtttatttaaataa

SEQ ID NO: 285471 - DNA, 505 bp, Unknown
  Bacterial polypeptide expressing nucleotide sequence isolated from the Sargasso Sea
catgcaaaaaaacaactacaactatgatgacttaatttcgtgtggagagggaaaattattcggcgaagggaatgctaaacttccgctaccaccaatgttaatgtttgataggattacagaaattaatcagaattctggagagtttaaaaaaggttttataaaagccgaacttgatatcaaagacaatttgtggttttttgattgccattttcaaaaagatccagttatgccaggatgtcttgggttagacgctatgtggcaattggttggattttatctaggatggcttggcgagccaggaaaaggaagggctttaggagtaaattcggtcaaatttacaggagaagttcttaaaaatgtaaaaatggcaacgtatgaaattaatatgaaaagaattcttaaaaaagagggtacaacagttggtttggcaaatggggtattaagtgcggatggtaaaattatttatcgtgctgaaaatttaaaagttggattatttaaatcatga

SEQ ID NO: 285472 - DNA, 502 bp, Unknown
  Bacterial polypeptide expressing nucleotide sequence isolated from the Sargasso Sea
tatgaaaaaaaactcttactcatatgatgagctaattaattgtggtgaaggaaaactcttcggtccaggtaatgctaaattaccccttccacctatgctcatgtttgatagaattacagaaattactgatgataaaggtgcttttaataaaggctctttaaaagctgaattagatataaaaaaaaacctttggttttttgattgtcattttaaagaggaccccgttatgcctggttgccttggtcttgatgctatgtggcaattagtaggattctatttaggttggattggaaatcctggaaaaggaagagctttaggagttgggactgtaaaatttactggtgaagttttacaaagtgtaaaaaatgtcagatatgagatagatatgaaaaaaattatgtctccgggaggtacaactgtaggtcttgctaatggagtggtattagcagataataaaaagatatattcagcagatagtttaaaagtgggtttatttaaataa

SEQ ID NO: 285473 - DNA, 505 bp, Unknown
  Bacterial polypeptide expressing nucleotide sequence isolated from the Sargasso Sea
tatgcaaaaaaatagttataactacgaagaattaatttcttgtggtgaaggaaagttgtttggagaaggtaatgctaagttacctttacccccaatgttaatgttcgacagaataactgaaataaaaaaagatgttggtgaatttaaaaaaggtattatcaaagctgaattagatattaaagataatctttggttttttaattgtcattttcaaaacgaccctgtaatgccagggtgtttaggtctagatgctatgtggcaattggttgggttttatttaggctggattggggagccaggaaaaggaagagctttaggtgttaatactgtaaaatttactggagaagtattaaaaaacgtaaaaaaagctacgtatgaaataaatatgaaaagaattttaaaaaaagagggtgctgtagtaggattagcaaatggtatacttaatgctgatggaaaaacaatatatacggctgaaaatttaaaagtaggattattcaaatcatga

SEQ ID NO: 285474 - DNA, 502 bp, Unknown
  Bacterial polypeptide expressing nucleotide sequence isolated from the Sargasso Sea
atgaaaaagaattcattcaattatgatgaattaattaattgtggaaaaggtgacctttttgggcctggaaacgcaaagctaccattaccaccaatgctaatgtttgacagaataacagaaattagtgaagataaaggtgcttttaaaaaaggattaataaaagctgaattggatattaaagatgagctttggttttttgattgtcattttcaaggagatcctgtgatgccaggatgccttggattagatgcaatgtggcaactggttggattttatttgggctggctaggtaatccaggtagaggacgtgctttgggcgtaaatagtgtaaaatttactggagaggttttaaaaaatgttaaaaaagcgatttatgaaattgatatgaaaagaatattagtaaaagaaggtactacagttggtctcgcgaatggaattttattagctgacggaaaaaaaatttatagtgctgaaaatttaaaagttggactgtttaaataat

SEQ ID NO: 285475 - DNA, 502 bp, Unknown
  Bacterial polypeptide expressing nucleotide sequence isolated from the Sargasso Sea
tatgaaaaaaactcctatagctacgatgacctaattacttgtggaaatggtgaactttttgggcctggtaatgctaaattaccccttcctccaatgctaatgtttgatagaataactgagattaacgacaatactgggacttttaataagggatccttaaaagctgaattagacattaaagacaatctttggttctttgattgtcattttaaatcagatcctgttatgcctggttgtttagggttggatgctatgtggcagttagtcggtttttaccttggttggcttggaaaccctggtaagggtagagcactaggagttggaactgtaaaattcacaggtgaagttttgaaaaatgttaagttagtaacgtataagattgatatgaagaaaattatgtccccagggggaacaactgtaggacttgcaaatggtttcgttttcgcagatgataaaaaaatatattcagcagatagcttaaaagtaggattatttaaataat

SEQ ID NO: 285476 - DNA, 508 bp, Unknown
  Bacterial polypeptide expressing nucleotide sequence isolated from the Sargasso Sea
atgaaagaaagttcttttagttatgaaaagcttatagagtgtggcaaaggtttgctttttggcgaaggtaatgcacagttaccattgccaccaatgttaatgtttgacagaattataaatatcaatgaaactggagggatgttttctaaaggtgaagtaatagctgaattagatataaaatctgatctatggttctttgattgtcattttaaaaacgaccctgttatgccaggttgtcttggtttagatgccatgtggcaacttgttggtttttatcttggttggttaggtcaaccaggtaaaggaagggcattaggtgttggtgaagttaaatttacaggacaagtattaaatactgttaaaaaagtttcttatcatatttctttaaaaaaattgattctaagaaaattaattttgggtgttgctgacggtgttttaaaagcagatggtgaatcaatttatcaagctaaagatatgaaagttgggctatttacccctaataaataaa

SEQ ID NO: 285477 - DNA, 505 bp, Unknown
  Bacterial polypeptide expressing nucleotide sequence isolated from the Sargasso Sea
tatggaaaaaaaatcatcatatacctataaagaattaattagttgtggaaatggtgaactttttggacctggaaatgcaaaattaccccttcctccaatgttgatgttcgacagaataactgaaattaatgaaaataatggtatatataataaaggcttcttgaaagctgagctagatattaaaaatgagttatggttttttgactgtcattttaaagaagatccagtgatgcctggttgtttaggtttggatgcgatgtggcaattggttggattttatttaggatggcttggtaatccaggaagaggtagagcattaggtgtaaatgcagtaaagtttacgggagaagtattaaagaatattaaaatggcaacatacgaaattgatattaaaaaaattttaactaaagaaggagctacagttggtttagcaaatggagtattactagctgatgggaaaaaaatttatagtgctgaaaatcttaaagtaggtttgtttaaataa

SEQ ID NO: 285478 - DNA, 502 bp, Unknown
  Bacterial polypeptide expressing nucleotide sequence isolated from the Sargasso Sea
aatgaaaaaaaattcctttgattatgaagagttaattcactgcgcaaatggcgaactttttggccctggaaacgcaaaactaccttctccaccaatgctgatgtttgacagaataacagaaattagtgaaaatactggagaatttaaaaagggtattattaaagctgaattagatattaaagatgaactttggttttttgattgtcattttaaggaggatccagtaatgccaggatgtttaggtttagatgcaatgtggcaactagttggtttttatttaggatggcttggaaatcctggaagaggaagagcattaggtgtaaacagtgtcaaatttactggcgaagttctaaaaaaatgcaaaactgcattctatcaaatagatatgaaaaggatactggtcaaagaggggacaactgttggtctagcaaatggaattttgcttgctgacggtaaaaaaatttatagtgctgaaaacttaaaagtgggattattcaaataa

SEQ ID NO: 285479 - DNA, 373 bp, Unknown
  Bacterial polypeptide expressing nucleotide sequence isolated from the Sargasso Sea
tttattaaaaaaggtgagattgttgctgaattagacattagacctgatctttggttttttgaatgtcacttcaagaaagatcctgtaatgcctggatgtctaggtttagatgcaatgtggcaattggttggtttttatcttggatggttagaacaaccaggtaaaggtagggctcttggtgttggtgaggtaaaatttacagggcaagttttagatacaataaaaaaagtaacttaccatatttctcttaaaagattaattcttagaaaattaattttaggagtagctgatggcattcttaaagcagatggtgagcccatatatgaagctaaagatatgaaagttgggctttttcaatctgataataaataat

SEQ ID NO: 285480 - DNA, 460 bp, Unknown
  Bacterial polypeptide expressing nucleotide sequence isolated from the Sargasso Sea
gcaaatggtgaactttttgggcctggaaatgcaaaattaccttctccaccaatgctaatgtttgatagaattactgaaattagtgaaaaaaaaggagcttttgacaaagggttaatgaaggctgaacttgatataaaagatgatctgtggttttttgattgtcacttcaaggaagatccagtaatgccaggatgtttaggtttagatgcgatgtggcaactagttggcttttacttgggttggcttgggaaccctggaaggggaagagccttgggagtaagcacagtaaagtttacaggagaagttttaaaaaatgtcaaaatggcgacatatattattgatatgaaaagaatattaattaaaggggaaacaacagttggtctagcaaatggtattctgcttgctgatggtaagaaaatatactctgcagacagtttaaaagtaggattatttaaataat

SEQ ID NO: 285481 - DNA, 502 bp, Unknown
  Bacterial polypeptide expressing nucleotide sequence isolated from the Sargasso Sea
tatgaaaaaaaattcctttaattatgacgaattaatagattgtgcaaatggtgagctttttggccctggtaacgcaaaattaccatctcctccaatgcttatgtttgacagaattactgaaattgatgaaaataagggtgcttttggcaaaggattaatgaaagctgaacttgatattaaagatgatttatggttttttgactgtcactttaaagaagatccggttatgccaggatgcttaggtttggatgcaatgtggcagttagttggattttacttaggttggcttggaaacccaggaagaggaagagctttaggggtaagcacagtgaaatttactggagaagttttaaagaatgtcaaaatggcaacatatataattgatatgaaaagaatattaattaaaggtgaaacaactgttggcttagcaaatggaattcttctggcggatgataaaaagatttactcagctgatggtctaaaagtaggattatttaaataa

SEQ ID NO: 285482 - DNA, 505 bp, Unknown
  Bacterial polypeptide expressing nucleotide sequence isolated from the Sargasso Sea
tatgaataaaaaatcgtcatacaattatgaagatctaattaattgtggaaatggcggactttttggaccaggaaatgccaaattacctttacctccaatgctcatgtttgataggataacaaatattgaagaagatggtggaacttttaaaaaagggataattgaagcagaactagatattaaagataacttatggttttttgattgtcattttaaaaacgacgcggttatgccaggttgtctagggttagatgcaatgtggcaattggttggtttttatttaggttggctgggaaaccctgggaaaggaagggcactaggggttaatactgtaaaatttactggagaagttcttaaagatgtaaaagttgcaaaatatgaagtagatatgaaaagagtgcttataaaagaaggaacgactgttggtttagctaatggaattttaaaagctgatggaaaaaaaatttattcagcagaaaatttaaaagtaggattatttaaataa

SEQ ID NO: 285483 - DNA, 502 bp, Unknown
  Bacterial polypeptide expressing nucleotide sequence isolated from the Sargasso Sea
atgaaaaaaaactcatactcctatgatgatctaataacttgtgggaatggtgatctttttggtcctggtaatgcaaaattaccactcccgccaatgcttatgtttgacagaataacggaaatcaatgaaaataatggagcgtttaataaaggctctttaaaagctgaattagatattaaagatgatctttggttttttgattgtcattttaaaaaagatccagttatgccagggtgcctaggtttagatgctatgtggcaactggtaggtttttttctaggttggctaggaaatcctggaaaaggaagagctctaggagtgggtactgtgaaatttacaggcgaagtattacagagtgtaaaaaatgtaagatatgaaatagatatgaaaaaaattatgtctcctggaggaacaactgttgggcttgcaaatggaattgttcttgcagataataaaaaaatatattcagcagaaagtttaaaagtggggttatttaaataat

SEQ ID NO: 285484 - DNA, 502 bp, Unknown
  Bacterial polypeptide expressing nucleotide sequence isolated from the Sargasso Sea
tatgaaaaaaagttcctttgattatgatgaattaataagctgcgcaaatggcgagctttttggccctggaaatgcaaaattaccttctccgccaatgctaatgtttgatagaattactgaaattagtgaaaaaaatggagcttttaacaaagggttgatgaaggctgaacttgatataaaagatgatctgtggttttttgattgtcactttaaagaagatccagtgatgccgggatgtttaggcttagatgcgatgtggcaactagttggcttttacttgggttggctcggaaatcctggaagaggaagagctttaggagtaagcacggtaaagtttacaggagaggttttaaaaaatgtcaaaatggcgacatatattattgatatgaaaagaatattgattaaaggtgaaacaacagttggacttgcaaatggtattcttcttgctgatggcaaaaaaatatactctgcagacagtctaaaagtaggattatttaaataa

SEQ ID NO: 285485 - DNA, 502 bp, Unknown
  Bacterial polypeptide expressing nucleotide sequence isolated from the Sargasso Sea
atgaaaaaaagttcatttgattatgatgatttaataagctgtgcaaatggggaactttttggccctggaaatgcaaaattaccctctccaccaatgctaatgtttgatagaattactgaaattagtgaaaaaaatggagcttttgacaaaggattaatgaaggctgaacttgatataaaagataatctgtggttttttgattgtcactttaaagaagatccagtaatgccaggatgtttaggtttagatgctatgtggcaactagttgggttttacttgggctggcttggaaatcctggaagaggaagagctttgggagtaagcacagtaaagtttacaggagaggttttaaaagatgtcaaaatggcgacatatattattgatatgaaaagaatattgattaaaggtgaaacaacagttggactagcaaatggtgttcttcttgctgatggcaaaaaaatatactctgcagacagtctaaaagtaggattatttaaataat

SEQ ID NO: 285486 - DNA, 502 bp, Unknown
  Bacterial polypeptide expressing nucleotide sequence isolated from the Sargasso Sea
atgaaaaaaagttcctttaattataatgaattaattgattgtgcaaatggtggcctttttggtccaggtaatgcaaaattacccttacctcccatgttgatgtttgatagaattacagaaataaatgaaaataaaggtttttttaataaaggccaaattaaagctgagcttgatattaaggataatctttggttttttgactgtcattttaaagaagatccggtaatgccaggatgtttgggtttagacgcaatgtggcaattagtaggattttacctcggctggttaggaaatccaggaagaggtcgagcactaggagtaaatagtgttaagttcacaggtgaagttctaaaaaaggtcaaaaatgcaacgtatgaaattgatatgaaaagaatacttattaaagaaggaacaacagtaggattggcaaatggagtcttgttagctgacggaaaaaaaatatattcagctgaaagtttaaaagtaggtttgtttaaataat

SEQ ID NO: 285487 - DNA, 502 bp, Unknown
  Bacterial polypeptide expressing nucleotide sequence isolated from the Sargasso Sea
atgaaaaaaaactcatacacatatgaggatttaattagttgcgcaaatggagatctttttggaccaggtaacgcaaaacttcccttaccacctatgctaatgtttgacaggatcactgaaattagcgagaataagggcacgtttagtaaaggattaataattgctgaactggatattaaagataatctttggttttttgattgtcattttaaaaaagatccagttatgccaggatgcttaggtttagatgcaatgtggcaattagttggattttatttaggttggcttggaaatccaggaagaggaagggctttgggtgtaaacactgtaaagtttactggtgaagttctaaaaaatgtcaaaaaagcaatttatgaaataaatatgaaaaaaattcttaaaaaagagggagcgactgttggtctagctaatggaatactattagctgatggaaaacaaatttatacaacagaaaatttaaaagtaggtttatttaaataat

SEQ ID NO: 285488 - DNA, 505 bp, Unknown
  Bacterial polypeptide expressing nucleotide sequence isolated from the Sargasso Sea
tatggaaaaaaaatcagcatacaattacgatgagttaataaagtgcggtaatggcgaacttttcggccctggaaatgcaaaacttcctttaccaccaatgctgatgtttgataggattactgaaattgcagagaataaaggagcttttaaaaaaggtattttaaaagcagaactggacataaaaaatgaattatggttttttgattgtcattttaaggaggacccagttatgcctggatgcttaggacttgatgcaatgtggcaactagttggattttttttaggctggcttggaaaccccggaagaggtagagcgttaggagttggcgcagtaaagtttacaggtgaagtgttaaaaaatgttaaaatcgcaacatatgaaattgatatgaagagaattttagttaaagaaggcacaacagtaggtttagcaaatggaattcttaaagcagatgataaaaaaatatattctgctgaaaatttgaaagttggattgtttaaataa

SEQ ID NO: 285489 - DNA, 502 bp, Unknown
  Bacterial polypeptide expressing nucleotide sequence isolated from the Sargasso Sea
atgaaaaaaaactcttactcatatgatgagctaataaattgtggtgagggcaaattatttggtccaggtaacgctaaattacctcttccacccatgcttatgtttgatagaattacagagattaatgatgataaaggtgcttttaataaaggctcactgaaagcggagttagatattaaaaataatctctggttttttgattgtcattttaaaaaagaccctgttatgccaggttgtctaggtttagatgcaatgtggcaattggtaggtttttttctaggatggcaggggaatcctggcaaaggaagagctttaggtgtcggcaatgttaaattcacaggagaagttttaaaaaccgtgaaaaatgttagatatgaaatagatatgaaaaaaatcatgtcacctggtgggacaactgtcggtcttgcaaatggaatactgcttgcagatgaaaaaaaaatttactcagcagacaatttaaaagtaggtttgtttaaataat

SEQ ID NO: 285490 - DNA, 496 bp, Unknown
  Bacterial polypeptide expressing nucleotide sequence isolated from the Sargasso Sea
aaaaactcttactcatatgatgagctaattaattgtggtgaaggaaaactatttggcccaggtaatgctaaattaccccttccacctatgctcatgtttgatagaattacagaaattaccgatgacaaaggtgcttttaaaaaaggctctttgaaggctgaattggatataaaaaaaaacctttggttttttgattgtcattttaaggaggaccccgttatgcctggttgccttggtcttgatgctatgtggcaattggtaggtttctatttaggctggattggaaatccaggaaaaggaagagctttaggagttgggactgtaaaatttacaggtgaagttttacaaagtgtaaaaaatgtcagatatgagatagatatgaaaaaaattatgtctccaggaggtactactgtaggtcttgctaatggagtggtattagcagataataaaaagatatattcagcagatagtttaaaagtgggtttatttaaataat

SEQ ID NO: 285491 - DNA, 505 bp, Unknown
  Bacterial polypeptide expressing nucleotide sequence isolated from the Sargasso Sea
tatggaaaaaaaatcctcgtatacttatgaagaactgattagttgtggaaatggtgagctttttgggccagggaacgcaaaattgcccctcccaccaatgttgatgtttgatagaataactgaaattaatgaaaatagtggtatatttaaaaaaggttcaatgaaagccgaactagatattaaagatgaattatggttttttgattgtcattttaaagaggatccagtaatgcccggttgtttaggtttagatgctatgtggcaattggttggtttttatttaggatggcttggtaatccaggaagaggccgagcattaggagtaaattctgtaaagtttactggagaagtactaaaaaatgtaaaaatggctacttataaaattgatattaaaaaaatactaacgaaagaaggaacaacagttggattagcaaatggaattttattagctgatggaaaaaaaatttataatgcagaaaatttaaaagtaggattgtttaaataa

SEQ ID NO: 285492 - DNA, 517 bp, Unknown
  Bacterial polypeptide expressing nucleotide sequence isolated from the Sargasso Sea
aatgaataaagcaaacagtttcaacaaagaagaacttatcgcctgtggccatgggaaattatttggtccaaactcccctcgcctccccgtagacaacatgctgatgatcgacaggatcatcaccatcaatgacaacggtggtgagtttggaaaaggtgaaattgttgccgaactcgacattaagccagaattatggttttttgactgccactttatcactgacccagttatgccgggttgcttaggcttagatgccatgtggcaactggttggtttttacctaggctgggaaggtgctgaaggcaaaggtcgcgctttaggtgtgggtgaagtgaagtttacaggtcaagtattacccggcgcgaaaaaggtcacttataagctcaatatcaaacgtaccatccaccgtaaattagtaatgggtattgcagatgccatccttgaagtagatggacgtcaaatttacagtgcaaccgatcttaaagtcggtgtatttagcgatacttcgaccttctaa

SEQ ID NO: 285493 - DNA, 293 bp, Unknown
  Bacterial polypeptide expressing nucleotide sequence isolated from the Sargasso Sea
tgttatgccggggtgccttgggctagatgcaatgtggcaattacttggtttctttctatgctggagtgaattacctgggattggaagagctttaggagctgaaaaagttaaattctttggccaggtgcttccaacagcaaaaaaagttacttatgttcttgatataaaaagagttgtaaatcgtggagctgtagttggtttttctgatgctgatatgtttgtagacgataaacatgtttattcagcagataaccttaaagtaggcctttttgctgacccaagcaagttttaaa

SEQ ID NO: 285494 - DNA, 529 bp, Unknown
  Bacterial polypeptide expressing nucleotide sequence isolated from the Sargasso Sea
tatgaataaagcatttaaacccaaagaatcctattcaaaagaagatcttgttgattgcggatttggtcaactatttggtgaaggcaatggtaggcttccagttgatccaatgcttatgtttgatcgcatcactaagataaataatactggtggtaaatattcaaaaggtgaggtttatgcagagctcgatgtaaatcctgatctctggttctttgattgccattttaaagaagatcctgttatgccaggatgcctggggcttgatgcaatgtggcaattgctaggtttctttctgtgctggaatgaattacctggaattggaagagctttaggagctgaaaaagttaaattctttggccaggtactaccaacggcaaaaaaagttaactatgttcttgatataaaaagagttataaaccgaggaactgtagttggtttttctgatgctgatatgtttgtggacgataaacatgtttattcagcagataaccttaaggttggactttttgctgatccaagcaagttttaa

SEQ ID NO: 285495 - DNA, 508 bp, Unknown
  Bacterial polypeptide expressing nucleotide sequence isolated from the Sargasso Sea
atgaaacaaaattcttttaactacgataaattaattgaatgtgggaaaggtcttttatttggagaaggtaatgctcaacttccacttcctcctatgctaatgtttgatagaattattgaaataaatgaaaatggtggagatttttctaaaggcgaagttatagcagagcttgatataaaaccaaacctgtggttttttgattgtcattttaaaaatgatcctgttatgccaggatgtttaggacttgatgctatgtggcaattggttggattttatcttggatggttaggacagccaggaaaaggtagagcacttggagtaggagaggttaaatttactggacaagttttacaaacagtaaaaaaagttacttatcatatttcgttgaaaaggttgattttaagaaaattaattttaggtattgctgatggagtcttaaaagcagacggtcaaaatatctatgaagcaaaagatatgaaggtaggtttgtttactacaaataaataat

SEQ ID NO: 285496 - DNA, 490 bp, Unknown
  Bacterial polypeptide expressing nucleotide sequence isolated from the Sargasso Sea
tcctttaattatgatgagctgattgattgcggaaatggcgggctttttggtccaggtaatgcaaaacttccattgcctccaatgctaatgtttgacagaataacagaaattagtgaaaataaaggtgcttttaaaaaaggcattataaaagcggaactagatataaaaaatgaactttggttttttaattgtcatttcaaagaggatcctgtgatgccaggttgtttaggattagatgctatgtggcaattagttggtttttatttaggttggctgggtaaccctggaagaggaagagctcttggagttaatagcgtaaaatttacaggtgaggttcttaaaaatgttaaacaagcaacttatgaaattgatatgaaaagaattctaattaaggaaggcactactgtaggtttagctaatggaattttaaaagccgatggtaagaaaatttattctgcagaaaatttaaaagtaggtttatttaagtaat

SEQ ID NO: 285497 - DNA, 502 bp, Unknown
  Bacterial polypeptide expressing nucleotide sequence isolated from the Sargasso Sea
atgaaaaaaaagtcatattcatacgacgatttaattagttgcggaaatggtgatctttttggtcctggaaatgcaaaattaccacttccaccaatgctgatgtttgatagaataacagagattaatgaaaataatggtgcttttaataaaggttttttaaaagctgaattagatattaaaaaggatctttggttttttgattgccactttaaaaaggatccagtcatgccaggatgtttgggacttgatgctatgtggcaattggttggtttttatttaggatggcttggcaaccctggaaaaggcagggccctgggagtaggaactgtgaagtttactggagaggtattacaagatgtcaaaaatgttaggtatgaaatagatatgaagaaaattatgtcacctggaggtacaactgtaggtcttgctaatggggttgtttttgcagataataaaaaaatatattcagctgatagtttaaaagtaggcttgtttaaataat

SEQ ID NO: 285498 - DNA, 412 bp, Unknown
  Bacterial polypeptide expressing nucleotide sequence isolated from the Sargasso Sea
gttggaccgaatttccaccatagagagcacgggcggtaatcatggaagaggacacgttattgccgagctcgacatacatccagacttgtggttttttgaatgccatttccccggggaccctgttatgccgggatgcctcggactcgatgcattatggcagttggtcggatttttccttgcttggaggggataccctggaaaaggcagggctctgggcgctggcgaagttaaatttactggcgaaattaggcctgacgctaaaaaggtcacctatgaactttcgataagtcgcatcattgacagaaaattagttgtcggtttagctgatggaacggtagccgtggatgacaaaataatctatacaacaaagtcattgaaagtcggtctattcactcccgaacagacgttttag

SEQ ID NO: 285499 - DNA, 502 bp, Unknown
  Bacterial polypeptide expressing nucleotide sequence isolated from the Sargasso Sea
atgaaaaaaaactcctttaattatgatgaactcatagattgtgcaaatggaggtctttttggtcctggaaatgctaaattacctttacctccaatgttaatgttcgataggatcacaaaaatcaatgataaagagggtttttttaaaaaaggccatattaaagcagaattagatattaaagatgaactttggttttttaactgtcattttaaagaagatccagtaatgccaggatgtttgggtctagatgctatgtggcaactagtaggtttttatttaggttggcttggaaatccaggaagaggtcgagcgttaggtgtaaatagtgtaaaatttacaggagaagttttaaaaaatgtcaaaatggcaacatacgtaattgatataaaaagaatactaattaaggaaggaactacagttggtttagcaaatggaatattgttagcagatggtaaaaaaatatattcagcagaaaatttaaaagtgggattattcaaataat

SEQ ID NO: 285500 - DNA, 502 bp, Unknown
  Bacterial polypeptide expressing nucleotide sequence isolated from the Sargasso Sea
atgaaaaaaaactcatactcctacgatgacctaataacttgtggaaatggtgatctttttggacctggcaatgcaaaattacctcttccgccaatgcttatgtttgacagaataactgaaatcaatgaaaataatggtacatttaataagggctccttaaaagctgaattagacattaaagatgatctttggttttttgattgtcattttaaaaaagatccagttatgccagggtgcttaggtttagatgctatgtggcaactggtaggtttttttctaggttggcttggaaatcctggaaaaggaagagctttaggggtgggtactgtaaaatttacaggtgaagttttacagagtgtaaaaaatgtaagatatgaaatagatatgaagaaaattatgtctcctggaggaacaactgttgggcttgcaaatggaattgttcttgcagataataaaaaaatatattcagcagaaagtttaaaagtaggtttatttaaataat

SEQ ID NO: 285501 - DNA, 511 bp, Unknown
  Bacterial polypeptide expressing nucleotide sequence isolated from the Sargasso Sea
atgaaacaaaattccttttcttatgagcaactaattgattgtgcaaatggagatttatttggaaagggtaatgctcaattaccgtcaccacctatgctaatgtttgatagaattacaaatatcaatgaaacaggtggtttatttaaaaaaggtgagattattgctgaattagatatcaaacctgaactttggttttttgactgtcacttcaagggagatcctgtaatgcctggatgtctcggtttagatgcaatgtggcaattggttggtttttatcttgggtggttggaacaaccaggcaaaggaagggctcttggtgttggtgaggtgaaatttacagggcaagttttagatacaataaaaaaagtaagttaccatatttctcttaaaagattaattcttagaaaattaattttaggagtggctgatggcattcttaaagcagatggagagcctatatatgaagctaaagatatgaaggttgggctttttcaatctaataataaatagt

SEQ ID NO: 285502 - DNA, 502 bp, Unknown
  Bacterial polypeptide expressing nucleotide sequence isolated from the Sargasso Sea
aatgaaaaaaaattcatttaattatgatgatttaattagctgtggaaatggccaactttttggtccaggaaatgctaagctgccgttgcctccaatgctcatgtttgacagaataacggaaattagtgaaaataacggtacatttaaaaaaggaataataaaagcagaattggatattaaaaatgatttatggttttttgattgtcactttaaagatgatgcggtaatgccaggttgtttaggtttagatgcaatgtggcagttagttggattttatcttggatggcttgggaatccaggaagaggaagagcattaggagttagctcagtaaaatttacaggggaagttttaagaaatgctaaaaaggccaactatgatattaatatgaaaagaattttaattaaagaaggtacaacagttggtttggctaacggaattttatcagtagatggtaaaaaaatttattctgcagaaaatcttaaagtaggattgtttaaatga

SEQ ID NO: 285503 - DNA, 502 bp, Unknown
  Bacterial polypeptide expressing nucleotide sequence isolated from the Sargasso Sea
tatgaaaaaaaattcctatacctataatgaattaattaactgcggagaaggcgggttatttggtccaggaaatgcaaaattacctcttccaccaatgctgatgtttgacagaattaccgaaattagtgaaaatacaggaaactataaaaaagggctggttaaagcagaattagatattaaaaatgatttgtggttctttaattgtcactttaaagaggaccctgtaatgcccggatgtttaggtttagatgctatgtggcagttagtagggttttatctaggctggcttggaaatcctggaagaggaagagctttgggagttagtgctgtgaaatttacaggggaggttcttaaaaatgtcaaaatggcaacttatgaaattgatatgaaaagaattctcataaaaggagaaactacagtaggtcttgcaaatggaatattgttagcagatggggaaaaaatttattcagctgaaaacttaaaagtgggattatttaaataa

SEQ ID NO: 285504 - DNA, 502 bp, Unknown
  Bacterial polypeptide expressing nucleotide sequence isolated from the Sargasso Sea
tatgaaaaaaaactcctattcttatgaagatcttataagttgcggaaacggagctcttttcggtccgggaaatgcaaaattaccgcttccaccaatgttgatgtttgatagaattacagaaattagtgataaaaatggcgcttttaaaaaaggttctttaaaagctgaattagacataaagaaagacctttggttttttgattgtcattttaagaaagatccagtaatgccaggatgtcttggacttgatgctatgtggcagctcgtaggattttatttgggatggattggaaatccaggaaaaggtagagccttgggtgttggtacggtaaaatttacaggagaagttttacagaatgttaaattagttaaatatgaaattgatatgaaaaaaataatgtctcctggtggtacaacagttggtttggctaatgggatattattagcagatgaaaaaaaaatttattcagcagacaatctaaaagtggggttatttaaataa

SEQ ID NO: 285505 - DNA, 502 bp, Unknown
  Bacterial polypeptide expressing nucleotide sequence isolated from the Sargasso Sea
atgaaaaaaagctcatacacttacgacgatttaatcagttgtgctaatggtgatctttttggcccaggcaacgcaaaattacctgcgcctccaatgttaatgtttgatagaataacagaaatcagtgaaaacaaaggtgaatttggtaaaggatttattgttgctgaattagatataaaagatagtctatggttttttgactgtcatttcaaaaaagatcctgtaatgccagggtgtcttggattagatgcaatgtggcagcttgtaggattttatttgggatggctaggaaatcctggaagaggaagggctctaggagttaacacagtaaagtttaccggtgaagttcttaaaaatgtcaaaaaagcagtttatgagattaatatgaaaagagttctaataaaagaaggtactactgtaggtttagcaaatggaattttgttagctgatggcaaaaaaatttactcaacagaaaatttaaaagtaggtttatttaaataat

SEQ ID NO: 285506 - DNA, 502 bp, Unknown
  Bacterial polypeptide expressing nucleotide sequence isolated from the Sargasso Sea
tatgaaaaaaagttcctttgattatgatgaattaataagctgcgcaaatggggaactttttggccctggaaatgcaaaattaccttatccaccaatgctaatgtttgatagaattactgaaattagtgaaaaaaatggagcttttgacaaagggttgatgaaggctgaacttgatataaaagatgatctgtggttttttgattgtcactttaaggaagatccagtgatgccgggatgtttaggtttagatgcgatgtggcaactagttggcttttacttgggttggcttggaaatcctggaagaggaagagctttgggagtaagcacagtaaagtttactggagaggttttaaaaaatgtcaaaatggcgacatatattattgatatgaaaagaatattgatcaaaggtgaaacaacagttggactagcgaatggtattcttcttgctgatggcaagaaaatatattctgcggacagtctaaaagtaggattatttaaataa

SEQ ID NO: 285507 - DNA, 461 bp, Unknown
  Bacterial polypeptide expressing nucleotide sequence isolated from the Sargasso Sea
tatgaataaagtatttaaacctaaagactgctattcaaaagaagatcttgttgattgcggatttggtcaactatttggtgaaggcaatggcaggcttccagtggatccaatgcttatgtttgatcgaatcactaagataaataatactggtggtagatattcaaaaggcgaagtttatgcagagctcgatgtaaatcctgatctctggttctttgattgccatttcaaagaagatcctgttatgccggggtgccttgggcttgatgcaatgtggcaattacttggtttctttctatgctggagtgaattacctgggattggaagagctttaggagctgaaaaagttaaattctttggccaggtgcttccaacagcaaaaaaagttaattatgttcttgatataaaaagagttgtaaatcgtggagctgtagttggtttttctgatgctgatatgtttgtag

SEQ ID NO: 285508 - DNA, 502 bp, Unknown
  Bacterial polypeptide expressing nucleotide sequence isolated from the Sargasso Sea
atgaaaaaaaactcatactcctatgatgatctaataacttgtgggaatggtgatctttttggtcctggtaatgcaaaattacctctcccaccaatgcttatgtttgacagaataacggaaatcactgaaaataatggagcatttaataaaggctctttaaaagctgaattagatattaaagatgatctttggttttttgattgtcattttaaaaaagatccagttatgccaggatgcttaggtttggatgctatgtggcaactggtaggattttttctaggttggttaggaaatcctggaaaaggaagagctttaggtgtgggtactgtaaaatttacaggtgaagttttacagagtgtaaaaaatgtaagatatgaaatagatatgaagaaaattatgtctcctggaggaacaactgttgggcttgcaaatggactagttcttgcagataataaaaaaatatattcagcagaaagtttaaaggtaggtttatttaaataat

SEQ ID NO: 285509 - DNA, 502 bp, Unknown
  Bacterial polypeptide expressing nucleotide sequence isolated from the Sargasso Sea
tatgaaaaaaaattcttactcctatgatgatctcataacatgtggaaatggtgatctttttgggcctggaaatgctaaattaccacttcctccaatgctgatgtttgatagaataacagaaattaatgagaataatggagaatttaacaaaggttctctaaaagctgagttagatattaaaaatgatctatggttttttgactgtcattttaaagctgaccctgtaatgccaggctgtttaggattggacgctatgtggcagttagttgggttttatttaggttggttaggaaatcctggaaaaggaagagctttaggagttagtactgtaaaatttacaggtgaagttttacaaagtgtaaagaatgtaagatacgaaatagatatgaaaaaaattatgtctccaggaggaacaacagttggtcttgcaaatggtttagtatttgcagacgataaaaaaatttattcagcagaaagcttaaaagtggggttatttaaataa

SEQ ID NO: 285510 - DNA, 505 bp, Unknown
  Bacterial polypeptide expressing nucleotide sequence isolated from the Sargasso Sea
tatgaataaaaaatcatcctataattttgaagaattgatagattgtggaaatggtaagctttttggcccaggaaatgctaaacttccacttcctccaatgctcatgtttgacagaataacagaaattagcgaaaataagggagtttttaaaaaaggagtaattaaagcgacgcttgatataaaggatgaactttggttttttaattgccattttaaagatgatcctgttatgccaggctgccttgggttagatgctatgtggcaactagttggattttatttaggttggcttggaaacccaggaaagggaagggcattaggagttggaactgtaaaatttactggagaagttcttaaaaatgtaaaagaagcgacttatgaaattgatatgaaaagaattcttgtaaaagaaggaacaactgttggattagcaaatggaatgcttaaagctgaccaaaaacaaatatactcagcagaaaatttaaaagtggggttatttaaataa

SEQ ID NO: 285511 - DNA, 508 bp, Unknown
  Bacterial polypeptide expressing nucleotide sequence isolated from the Sargasso Sea
atgaagcaaaagaatagttataattatcaagatttaattgattgtggaaatggtattctttttggtgagggtaatgcaaaattgccactacctccaatgcttatgtttgacagaattacaaaaattgagagtagttcaggaactttcaagcgaggctatctggaagcagaattagacattaaggatgatctttggttttttaaatgtcattttcaaaaagatccagtgatgccagggtgtcttgggttagacgcaatgtggcaactggttggtttttatcttggttggacaggcgaacccggaaaagggagggctttaggggtaagcacagttaaatttactggtgaggttttaaaaaaagttaaaatggccacttataaaataaatataaaaagaattttaaaaaaagagggtgctgtagtaggattagctaatggaacattagatgctgatggaaaagtaatctatgtagcagaaaatttgaaagtaggtttgtttaagtcatgag

SEQ ID NO: 285512 - DNA, 502 bp, Unknown
  Bacterial polypeptide expressing nucleotide sequence isolated from the Sargasso Sea
atgaaaaaaaattcctttaattatgacgaattattaggttgtgcaaatggtgagctttttggccctggtaatgcaaaattaccatctcctccaatgcttatgtttgacagaattactgaaattgatgaaaataagggtgcttttggcaaaggattgatgaaagctgaacttgatattaaagatgatttatggttttttaattgtcactttaaagaagatccagttatgccaggatgtttgggtctagatgcaatgtggcagttggttgggttttacttaggttggcttggaaacccaggaagaggaagagctttaggggtaagcacagttaaatttactggagaggttttaaagaatgtcaaaatggcgacatatataattgatatgaaaagaatattaattaaaggtgaaacaactgttggcttagcaaatggaattcttctggcggatgataaaaagatttactcagctgatggtctaaaagtaggattatttaaataat

SEQ ID NO: 285513 - DNA, 505 bp, Unknown
  Bacterial polypeptide expressing nucleotide sequence isolated from the Sargasso Sea
atgaataaaaaatcatcttataattatgaggatctaattagctgcggaaatggcgtactttttggtcctgggaacgccaaattacctttacctccaatgctcatgtttgatagaattacaaatattaaaataaaaggtggagcttttaataaaggtataattgaagctgaattagatattaaagaaaatatgtggttttttgattgtcattttaaaaatgattctgttatgcctggatgtcttggattagatgcaatgtggcaattggttggtttttatttaggatggttaggaaatcctggaaaaggaagggcgttaggtgttaattctgtgaagtttactggggaagttttaaaaaatataaaaatcgcaaaatatgaagtagatatgaaaagaatacttgctaaagaaggaacaactgttggtcttgctaacggaattttaaaagctgatggaaaaaaaatttattcagctgagaacttaaaagttggattatttaaataat

SEQ ID NO: 285514 - DNA, 502 bp, Unknown
  Bacterial polypeptide expressing nucleotide sequence isolated from the Sargasso Sea
atgaaaaaaaattcattcaattatgatgaactgattgattgtggaaatggtgggctttttggtccaggaaatgcaaaacttccattgcctccaatgctaatgtttgacagaataaccgaaattaatgaaaataaaggtgcttttaaaaaaggaattattaaagctgaactagatattaaagatgaactttggttttttaattgtcattttaaagaggatcctgtgatgccaggttgtctagggttagatgctatgtggcaattagttggtttttatttaggttggctgggtaaccctggtagaggaagagctcttggtgttaataatgtaaaatttacaggagaagttcttaaaaatgttaaaaaggcaacttatgaaattgatatgaaaagaattttaattaaagaaggaactactgtaggtttagcgaacggaattttacatgcagatggtaaaaaaatttattctgctgaaaacttaaaagtaggtttgtttaaataat

SEQ ID NO: 285515 - DNA, 502 bp, Unknown
  Bacterial polypeptide expressing nucleotide sequence isolated from the Sargasso Sea
tatgaaaaaaagttcctttgattatgatgaattaataagctgcgcaaatggcgagctttttggccctggaaatgcaaaattaccttctccgccaatgctaatgtttgatagaattactgaaattagtgaaaaaaatggagcttttaacaaaggtttgatgaaggctgaacttgatataaaagatgatctgtggttttttgattgtcactttaaggaagatccagtgatgccgggttgtttaggcttagatgcgatgtggcaactagttggcttttacttgggttggcttggaaatcctggaagaggaagagctttaggagtaagcacagtaaagtttacaggagaggttttaaaagatgtcaaaatggcgacatatgttattgatatgaaaagaatattaattaaaggcgaaacaacagttgggttagcgaatggtattcttcttgctgatggaaaaaaaatatactctgcagacagtctaaaagtaggattatttaaataa

SEQ ID NO: 285516 - DNA, 514 bp, Unknown
  Bacterial polypeptide expressing nucleotide sequence isolated from the Sargasso Sea
atgaaacaaaattccttttcttatgagcagctaattgattgtgcaaatggggatttatttggcaagggaaatgctcaattaccatctccaccgatgctaatgtttgatagaattacaaatattaatgagacaggtggtttatttaaaaaaggtgagattgttgctgaattagacatcaaacctgacctttggttttttgactgtcacttcaagggagatcctgtaatgcctggatgtctaggtttagatgcaatgtggcaattggttggtttttatcttgggtggttagaacagccaggtaaaggaagggctcttggtgttggtgaagttaaatttacagggcaagttttagatacaataaaaaaagtaacttaccatatttctcttaaaagattaattcttagaaaattagttttaggagtagctgatggcactctaaaagcagatggagagcctatatatgaagctaaagatatgaaggttggactttttcaatctgataataagcaataat

SEQ ID NO: 285517 - DNA, 517 bp, Unknown
  Bacterial polypeptide expressing nucleotide sequence isolated from the Sargasso Sea
aatgaataaagcaaacagtttcaataaagaagaactcatcgcctgtggccatgggaatttatttggtccaaactcgcctcgtttacccgtcgataatatgctgatgatcgaccggatcattactattaacgataacggcggtgaatttggcaaaggtgaaattgttgctgaactcgatattaatccagacctatggttctttggctgccactttatcagcgatccagtgatgccaggctgtttaggcttagacgccatgtggcaattagtgggtttttacctcggttgggaaggcgccgagggtaaaggccgcgcgctgggcgtaggtgaagtgaaatttaccggacaagtgttacccggcgcgaaaaaagtgacttacaagctaaatatcaagcgtactattcatcgcaagttagtgatgggtattgccgatgccatccttgaagtggatggtcgtcaaatctatagcgcgaccgatttaaaagttggcgtgtttagcgatacatcgaccttctaa

SEQ ID NO: 285518 - DNA, 523 bp, Unknown
  Bacterial polypeptide expressing nucleotide sequence isolated from the Sargasso Sea
atgacttttttacctaaaaatagttattcaaaacaagaattattagattgtgccgaagggaatctattcggaagcaataatgggaggttgcctactccaaacatgctgatgtttgataggatcactgaaatctctgaatatggtggaaaatataataaaggaaaaatgatagcggaattggatataaatcctaatctttggttttttgactgtcactttaaaggagatccagttatgccaggttgcttaggcttagatgcaatgtggcaattagttgggttctacttatgttggttaggaaatccaggtcgaggaagggccttaggagcatccgaggttaaattcttcggtcaagttttacctacagcaaagaaggtaacattaataatagaaatgaaaagaatcctaaatttggatttaacggtaggcattggtgaaggttcaatgctagtagataatcgggagatttataccgctaaagggcttaaagtaggactctttaaagatacgtctagtttttaaa

SEQ ID NO: 285519 - DNA, 502 bp, Unknown
  Bacterial polypeptide expressing nucleotide sequence isolated from the Sargasso Sea
atgaaaaaaaactcctatagctacgatgacctaattacttgtggaaatggtgaactttttgggcctggtaatgctaaattaccccttcctccaatgctaatgtttgatagaataactgagattaacgacaataatgggacttttaataagggatccttaaaagctgaattagacattaaagacaacctttggttctttgattgtcattttaaatcagatcctgttatgcctggttgtttggggttagacgcaatgtggcagttggtcggtttttaccttggttggcttggaaaccctggcaagggtagagcattaggagttggaactgtaaaattcacaggtgaagttttgaaaaatattaagttagtaacgtataagattgatatgaagaaaattatgtccccagggggaacaactgtaggacttgcaaatgggttcgttttcgcagatgataaaaaaatatattcagcagacagcttaaaagtaggattatttaaataat

SEQ ID NO: 285520 - DNA, 505 bp, Unknown
  Bacterial polypeptide expressing nucleotide sequence isolated from the Sargasso Sea
atggaaaaaaaatcatcttatagttacaaagaattaattaattgtggaaatggggagctttttgggccaggaaacgccaaattaccacttcctccaatgcttatgtttgatagaataacagaagttaaagaagataatggtgctttcaaaaaaggctctattactgccgaactagatataaaagatgacctttggttttttaattgtcattttaaagaggatccggttatgcctggatgtcttggcttagatgcaatgtggcaactagtaggtttttatctaggatggctaggtaatcctggaaaaggtagggctttaggagttggtactgtaaaatttactggagaagttttgaaaagtgtaaaaaaagcaaaatatgtaattgatatgaaaaaaattatgtctccaaatggaacaacagttggtttggcaaatggaattttattagcagatgaaaaaaaaatttacttagcagaaaacttaaaagtaggattatttaaataat

SEQ ID NO: 285521 - DNA, 502 bp, Unknown
  Bacterial polypeptide expressing nucleotide sequence isolated from the Sargasso Sea
atgaaaaaaggctcctttaattatgaagaattaataagttgcgcaaacggtgaactttttggacctggaaatgcaaaattaccttctccaccaatgttaatgttcgacagaatatcagaaatcaacgaaaataaggggttttttaataagggcttaattaaagcagaacttgatataaataatgaactttggttttttgattgtcattttaaagaggatccagtcatgcctggatgtcttggcttagatgctatgtggcaactagttggtttttatttgggttggttaggaaatccaggaagaggtcgagcattgggagtaaatagtgtaaaatttacaggagaagttctaaaaaatgtcaaaatggcaacttatataattgatatgaaaagaatacttattaaagaaggaaccactgttggccttgctaatggaattttattagcagatggtaaaaaaatatattcagcagaaaatttaaaagtaggtttgtttaaataat

SEQ ID NO: 285522 - DNA, 502 bp, Unknown
  Bacterial polypeptide expressing nucleotide sequence isolated from the Sargasso Sea
tatgaaaaaaaactcatactctcacgatgagcttataaattgtggtaaaggcaaattatttggcccaggtaatgcaaaattacctctaccacctatgcttatgtttgatagaataactgaaattaatgataataaaggagcttttaaaaaaggatcattaaaagctgaattagatatcaaaaaagatctttggttttttgattgtcattttaaagaagatccagttatgccaggatgcttaggtcttgatgctatgtggcaattagttggtttttatttaggttggattggaaacccaggaaaaggaagggcattaggagttggaacagtaaaatttacaggtgaagtcttacaagaagttaaattagtccgttatgagatagatatgaaaaaaattatgtcaccaggtggaacaacagtaggtcttgctaatggtatagtcctagcagatgagaagaaaatatattcagcagaaagtttaaaagtaggtttatttaaataa

SEQ ID NO: 285523 - DNA, 508 bp, Unknown
  Bacterial polypeptide expressing nucleotide sequence isolated from the Sargasso Sea
aatgaagcaaaaaaatagttataattatcaagatttaattgattgtggaaatggtattctttttggagaaggaaatgcaaaattacccctacctccgatgctcatgtttgatagaattactaaaattgaaaataattctggatcttttaaacgaggttatttagaagcagaattagatattaaagatgatctttggttttttaaatgtcattttcaaaatgatccagtaatgcctggttgtcttggattagatgctatgtggcaattagttggtttttatctaggttggactggagagccaggaaaaggaagagctttaggagtaagcacagttaaatttactggcgaagtgttaaaaaaagtgaagatggcttcttataaaataaatataaaaagaattttaaaaaaagagggtgctgtagtaggattggcaaatggtacgttagacgctgatggaaaaataatctatgtggcagaaaatttgaaagtaggtttgtttaaatcatga

SEQ ID NO: 285524 - DNA, 523 bp, Unknown
  Bacterial polypeptide expressing nucleotide sequence isolated from the Sargasso Sea
atgtctttttcacctaaaaatagttataacaaggaagaaatacttgattgcgcacaaggtaatttatttggagaggaaaatggtcgcctacctaccccaaatatgctcatgtttgatcgtattattgagattaatgttgacggaggtaaattttcaaaaggccaaatcattgctgaattagatataaatccggatttgtggttttttgattgtcatttcaaaggtgatcctgtgatgcctggttgcttaggattagacgcaatgtggcaactagttggattttatctatgttggatgaataatcctggtagaggcagagcactaggcgcttctgaagttaaattttttgggcaagttctaccctcagctaaacttgtaacccttaaaattgatatgaaaagaattcttaatcttgatcttacagtagggattggagaagggtctatgcttgtagatggtagagaaatttatagtgccaagggccttaaagttggacttttccaagatacatcaagtttttaaa

SEQ ID NO: 285525 - DNA, 685 bp, Unknown
  Bacterial polypeptide expressing nucleotide sequence isolated from the Sargasso Sea
tgcctctggtatagttagctcactttatcatttggaaccgggaatggtttggaagaaagaagaaatttcttcgaggttggctgaaatctctggatcaaagagtcacccgaccaacttatcatggcaagtagttgaaagtttgccggtcagtgaggttataaaaacgggctcccaccctcgagacgagcacataaaagcatggattgaatccatggaaaacttatcagaactcggcataaacgttatttgttataatttcatgccaatacttgattggacccgtaccgagttggctgctccaatgtctagtggagctactgctatgtatttcgacttgttagattttattgcttttgattgtttcattctggagcggataaacgctcaaagttattacgaaaaacaattaatggatgtagcaaaaaaacgttttgaaggtttttcgaaagaaaaaaaatcaactctgagcaaaaacatcacagcaggtttacctggtgctggagagaagttaacttttgaagaagtaaaaagaagacttgaaggttattctgcaattgatgccgataagttaagagagaattttaaatattttttggatgctgtcgtgccaactgctgaaaaactgggggtgcgcctatgttgtcatcctgacgaccctccgtggccgctgctagggttgccgcgt

SEQ ID NO: 285526 - DNA, 550 bp, Unknown
  Bacterial polypeptide expressing nucleotide sequence isolated from the Sargasso Sea
aaaaaaaattacggtatatttttagaagaagttattccaacggcggagaaatttggaataaagatgtgtgttcatcctgatgatccaccaaggaatattttgggtttaccccgagtagtttcaagtgaagcggatatagattggatattaaattactatccttctaagtctaatggtttgacgctctgtagtggttccctcggtgctagcgaagataatgatgtgattaaaatagctagcaaattttctaataaggtattcttcgcgcacttgagaaacgtgagtaaggaatttgatggttcttttgaagaaacggcccacttgactggtgacatcaatatgacgaaattaatttcggttatcttagacgaggaaaaaagacgaaggtcatcaggagaaagtcaaatagatattccatttcgtccggatcacgggcatgagttgctctctgatggaaaaaaaaatacccacccaggttatccgctaattggaagattacgaggattatctgagctaaggggggttgtacatgcaattgagagtctttaaa

SEQ ID NO: 285527 - DNA, 599 bp, Unknown
  Bacterial polypeptide expressing nucleotide sequence isolated from the Sargasso Sea
agctctagatctatataaaaatatagattcagaacaattaaaaaaaaatttagcctattttttagaagaaattattcctgttgcagaagaagcgggggttcggatggcaattcatccagatgatccacctagaccattgttaggacttcccagaattatcagtacagaaaaggatctttctgagttattaaacatgattgactcaccgagcaatggatttaccatgtgtgctggttcttacggagcaaatcctgacaatgatttggtaggaatgattgaaagatatgggcatagacttagtttcactcatttaagaagtacaaaaacaattgaaggaaaagattggtgtttttatgaggcagatcatttagctggagatgctgacatgtatggtattgttagagccttggtcaaagaacaaagaaaaagagtggctcaaggacgtgcagatcatcaaattccaatgaggcctgaccatggacatcgaatgttggatgatcttaaaaaagaaagcaatcctgggtattcctgcatcggtcgattaagaggacttgcagaacttagaggtctggaaatgggaatagaaaaaagtctgtaaa

SEQ ID NO: 285528 - DNA, 853 bp, Unknown
  Bacterial polypeptide expressing nucleotide sequence isolated from the Sargasso Sea
tttagatggtttggtcacaatgatccctcaaaattagatcaaattcgacaaattggagtggaaggaattgtaacatcactagcgcaaatgaaatatggtgaaaaatggtcctcaatagaaatcaagaaaagaaaaaaatttattgaaactttcaacattagtaaaaataaaaaattaacttggagtgttgttgaaagtcttcctgttcataatgatataaagaaaagatcaggaaaatatagatattacatagatcaatataaagaatctttggtaaatttaggaaagaataatattaaaaatatttgttataattttatgcctttaattgattgggtgagaacagatttaaatcatcaacttccaaatggtgcttttgctctaaaatataaccatcttcatgtatgtgcgtttgaaaatttcattttgaaatctaaaacagcaaaaaaaaggtattcgaccaaagacatccatacttcaaaaaaaatattacaaaaaatgaattctagtgatttaaaaaaactaaaaatgtctttgcttggagggttagctgcaaatgatagaaaatatacaataaaagatttaaactacgaaatcgatcaatttgcagaattaaatcatagtgatttacaaaataatttaaaagattttatagaagaaatttatccaattataaaaaaatataatattcattacaatattcatccagatgatcctccatataatgtttatggattaccaagaattgtttctaatgagaaagatattaattttattgtgaatataaaaaaagatacaaatgtaggtttaactttttgtacaggatcccttggtgttaataaaaaaaaataac

SEQ ID NO: 285529 - DNA, 913 bp, Unknown
  Bacterial polypeptide expressing nucleotide sequence isolated from the Sargasso Sea
gaaagccttccagttagtgaggaaattaaaaaacaatctggaaattggcagtgtcatattgaaaattatattaagagtatgcaaaatattgcagaatctggagtttttacaatttgttataatttcatgcctatccttgactggacaagaactgatctttcttggcgtctttcaaatggagcaagatgtttaagatttgatctcattgattttttaatttttgatgtatacattctgaaaagatcaggtgcaaagagtaattatttgaactctcagctaaaaagtgctgaaaaaagattaaaaaaattatcacaagttaaaattgatcagttgacctataatattataaaaggtcttccaggtacggtagaaaatctttcgattaatgatgttaaaaaacaaattttatcttactctgagatttctgaaaaacaacttcgaaaaaattttatagaatttctgtctagggttattccagccgcccaagatttaggtattaaattatgctgtcatccagatgaccctccattttctctaatgggattgccaagaattgtatcaactgaaaaagactataaaactattttggaagaagtagatcttccagctaatggaattactttatgctcgggttcattaggcgtacgccacgataatgatgttttaggtataatgaagcgatatggacatcgcgtacatttccttcacctaagaaatgtaaaaagagaaaactcaagtattccatgctcgttttatgaagcagaacatctaaacggtgacactgatatgattggtcttattacagaaatactgtttcaagaaaaatgtagacgcgatgaaggcagagaggattggtctattccttttagaccagatcatgggcatgagattttggatgatttagatcgtagta

SEQ ID NO: 285530 - DNA, 820 bp, Unknown
  Bacterial polypeptide expressing nucleotide sequence isolated from the Sargasso Sea
atgctgtattcatttagatggtttggtcataatgatcttcaaaaattagatcaaattcgacagataggcgtgaagggaatcgtatcatcactagcacaaataaaatatggtgaaaaatggtctgcattcgaaatcaagaaaagaaagaaatttattgaaagtttcaaaattaataacaataaaaatttaacttggagtgttgttgaaagccttcctgttcataatgatataaaaaagagatcagggagatataaatattatatagatcaatacaaagagtcattggtaaatttaggaaagaataagattaaaaatatttgttataattttatgccattgattgattgggtgagaacagatttaaattatcaactaccaaatggagcatttgctctaaaatataatcatcttcatgtctgtgcatttgaaaattttattttgaaatctaaaacagcaaaaaaaaggtattcacccaaagacatccatacttcaaaaaaaatattacaaaaaatgaattctagtgatttaaaaaaacttaaaatgtctttacttggaggtttagctgcaaacgatagaaagtatacaattaaagatttaaattatgagattgatcaatttgcagaattaaatcatagtgatttacaaaataacctaaaagattttattgaagaaatttatccaatcataaaaaaatataatattcattacaatattcatccagatgatcctccatataatgtttatggattaccaagaattgtttctaatgagaaagatattaattttattgtgaatataaaaaaaagatacaaatggtagg

SEQ ID NO: 285531 - DNA, 835 bp, Unknown
  Bacterial polypeptide expressing nucleotide sequence isolated from the Sargasso Sea
taataatgccaataatattaatttaaaatggaatgtagttgaaagtattccagttcataacgatattaaattaagacataaaaattttagaaaattcattgataactacaaagatacaatatcaaatatttctaaaaataatatacgaacaatttgttataattttatgccaatagtagattggacgagaactcaattagattttaaattaccaacagatggtttggctttaaaatttaattatcaacatataattatatttgaaacttttattttaaaattaaatgatgttgattctagatattcatctaaagaaattagaattgcagaaaaaatatttaagaaaatgaataaaaaagatattgaaaatctgaagattgcagtaatgggtggattaccagcatctgaaaaaaaatattctataaatgaatttaaaaaaatgatttatgcttacagaaattatcaaaaaaaagaattgcaagaaaatttaattgattttgtaaaagaaatcatacccgttgctgaggaatgtaaagttaatatgactcttcatccagatgatccgccagtagcactttttggaatacccaaaatagtctcaaatttaaaggattataagtttattttagattcatataactcattatcaaatggtatggcgttttgttcaggttctctagcatcaaacgttaataataatatttataaaatttttgatacgtttaaagaaaaaataaattttattcatctaagaaacgtaaaaattgataaagacagaaaaagcttttatgaaacaaatcatctaagtggtgatgttgattttgttaaattataa

SEQ ID NO: 285532 - DNA, 530 bp, Unknown
  Bacterial polypeptide expressing nucleotide sequence isolated from the Sargasso Sea
ttgctcctgttgctccgaattaggacttagattatgttgccatccagatgacccaccttttcctttattggggttgcctcgaattatgtctaccgaaaaagattataaaattataatggatgaaatccctcttaaatcaaatgggattacgctttgctctggttctcttggtgtgagagcagaaaataacttgataaagatgatgtcacgattaggtgatagagttcattttttacatttgagaaatgtgaaaagggagtctgacatggttcctaattctttttatgaggaggaacatctgaagggtaatacagacatggtttctttaataagagctattttagaggaagagaaacgtcgacgaaaaaataaacgtgaggactggtctattccatttcgtccagatcatggacataatatacttgatgatcttaaaaaaaaatccaaacctggctatcctgctataggccggttaaaaggattagctgaacttagaggtatattaactgctttatctaacagtttgtaat

SEQ ID NO: 285533 - DNA, 589 bp, Unknown
  Bacterial polypeptide expressing nucleotide sequence isolated from the Sargasso Sea
aatggaactttcttttcgttggtatggacctaatgatgtagtaaaattaacagatatacgtcaatcaaatgcagactatatagttacttccttacatcaaataccagcgggagaaaaatggaattattctgacatcaatgaaagagttaatttcattgagaaatctaatcataaaaattcaaatagattaaaactaaacgtaatagaaagtattccggttcataatgatattaaattaagaaaaggcaattatagaaaatatatagataattataaggatagtatcgttaatgtagcaaaaaataacattaaaacaatttgttataattttatgcctattattgattggacgagaactcaaatagattacaaattaccaacagatggtttggctttaagattcagttttatacattttataatttttgaaaaatttattttaaaattacctgaactagaagaaagatataacgagaatcttttaataaaagcagagaatgaatataaaattatgtcagaacgggatattgataatttaaaaattgcaattatgggaggcttacctgcatcagaaacaaagtataatatt

SEQ ID NO: 285534 - DNA, 859 bp, Unknown
  Bacterial polypeptide expressing nucleotide sequence isolated from the Sargasso Sea
ttggacccgtaccgagttggctgctccaatgtccagtggagctactgctatgtatttcgacttgttagatttcattgcttttgattgtttcattttggagcggataaaggctcaaaatgactatgaaaagaaattagtggacaaggcgaaacatcgttttgaagggttttcaaaagaaaaaaaattaactcttaccaaaaatatcacagctggtttgcccggtgctagcgagaaattaactttccaagaagtaaaaagaaggcttgaaagttattctggaattgatgcccataagctaagagaaaattttaaatattttttagatgctgttgtcccgagtgctgaaaaaatgggagtgcgtctatgttgtcaccctgacgatcctccatggcctttgctagggttgccccgtattatgtcttcagaagaagatttcaattggttagtgaatattcatccaagtaaggctaatggcataactctttgtactggctcgctgggaaccagttttgagaatgatctacctggaatggtttcccgaatgggaaagcatattcatttccttcatttgaggaatgtaaccagagaacaagaaagtataccaactagtttctatgaagacgagcatttatcaggacacacagatatgattgagactatctctgaaattattcgagaagaaaatcgtcgcaaggctgaaggacgggaagattggtctattcccatgcgacctgatcacggtcagaatatccttgatgatcatggacgcaatgcaatgccaggatatcctgctattggtcgattaaagggcctggctgagttgcggggagttttcaaagctcttgaacgcaaaatttaa

SEQ ID NO: 285535 - DNA, 1189 bp, Unknown
  Bacterial polypeptide expressing nucleotide sequence isolated from the Sargasso Sea
atgctgtactcatttagatggtttggtcataatgatccctcaaaattagatcaaattcgacagataggagttgaaggaattgtatcatcgctagcacaaataaaatatggtgaaaaatggagctcaatcgaaatcaaaaagagaaaaaaatttattgaaagtttcaaaattagtaaaaataaaaaattaacttggagtgttgttgaaagtcttcctgtgcataatgatataaaaaagagatcagggagatatagatattatatagatcaatacaaaaagtcattgataaacttaggaaagaataagattaaaaatatttgttacaattttatgcctttgattgattgggtgagaacagatttaaatcatcaactaccaaatggagcatttgctctaaaatataatcatcttcatgtctgtgcatttgaaaattttattttgaaatctaaaacagcaaaaaaaaggtattcatccaaagaaatccatacttcaaaaaaaatattacaaaaaatgaattctagtgatttaaaaaaacttaagatgtctttacttggtgggttagctgcaaacgatagaaagtatacaattaaagatttaaattatgagattgatcaatttgcagaattaaatcatagtgatttacaaaataatttaaaagattttatagaagaaatttatccaatcataaaaaaatataatattcattacaatattcatccagatgatcctccatataatgtttatggattaccaagaattgtttctaatgagaaagatattaattttattgtgaatataaaaaaagatacaaatgtaggtttaactttttgtacaggatcccttggtgttaataaaaaaaacaacttagtcaatataattaaaaaatatggttcttatataaattttattcatttaagaaatataagacacattccaaaatctctcgatttttatgaagatgaccaccttaatggaagcctggacatggtgtctattgtcaaagcaatattaaaagaagaaaataaaaggaaaaaaagtaatcatcctattaaacaaattcctatgaggcctgatcatgggcatacaatacttcatgaccaatttaattcagtaatacctggatattcattattaggcagaatgaaagggctagatcagcttaaaggtgtaataaaagctataaattaat

SEQ ID NO: 285536 - DNA, 775 bp, Unknown
  Bacterial polypeptide expressing nucleotide sequence isolated from the Sargasso Sea
aatgcaatattcttttcgatggtatggacctaaagacccagtaaaactaacggatataagacaatctaatgcagattatattgttacttctttgcatcaaatacctactggggaaaaatggaactacacagatgtggaagatagaataaatctcatcaataaatcaaataatgattatgcaaataaactaaagtggaatgtagttgaaagtataccagttcataatgatattaaattaagaaaaaacaattttaaaagatatattgctaattataaagacactattgttaatatagctaaaaataaaatcccaataatttgctataattttatgccaataattgattggacaagaacccaacttgatcttcaattgccaactgatggacttgcattaaggttttcttatgttcaaattattatatttgaaaaatatattttgaaattaaataatttagaaaatagatacagtgatgagctattatcagaagcgtcaaatcaatataaattaatgtcaaatagtgatttagaaaacctaaaattttcagttatgggagggctgccagcagcagaaaagaaatacactgttgaagagtttaaagaaatgctcttatcatataaggacataaataatgatgaactacaaagtaatttttcagaatttcttaaagaaataatacctgtagctgaagaaaataatattaagatggcactacatcctgatgatccaccaatttcactttttggcttacctagaattgtatcaaatcatgaa

SEQ ID NO: 285537 - DNA, 704 bp, Unknown
  Bacterial polypeptide expressing nucleotide sequence isolated from the Sargasso Sea
catgcttgagacctggcgttggtttgggccggacgatccggtgacatgttcagacattcggcaggccggcgccgacgggattgtcaccgcgcttcacgcggccgccccgggcgaggtctggcaggccgatgacatcgcggcccgcaagggttttatcgaggctgaagggctgacatggtcggtggtggagagcattccggtgcatcccgccatcaagcttggcaatgacagggccgcacagcatatcgacgggtggatccagacgatgcgcaacctcgcggcgaacgggctggaggtcatctgttacaatttcatgccggtggtggactggacccgcaccgaccttcgctggaaggcgcgtcgcggcgggcttgcgctgcgcttcgatccggtggaattcgccgcctacgacctgttcgtgctgcgccgggccgacgccgaccgggattacaccgccgagataatcgcgcaggctgaggctcttcacgcaagcatggatgaggccgcgatcgagcggttggaatccaccatcattgccggtctgccgggctcggaactgtcacatggccgcgagggcatccgtgccgcgatcgccgattatgacgagctgaccgctgccgatctgcgggcgaatctgatcgccttcctggaacaggcagccccggcggcagaagaatgcggtgtgcggatctgccttcaccccg

SEQ ID NO: 285538 - DNA, 160 bp, Unknown
  Bacterial polypeptide expressing nucleotide sequence isolated from the Sargasso Sea
catggaacagacatggcgctggtatggtcctaacgatccggtcaccttagcggatgtacgtcaggcgggtgccacaggcgttgtcaccgccttgcaccatatcccgaacggggaagtgtggacggttgatgagatcctaaaacgcaaagccattattgag

SEQ ID NO: 285539 - DNA, 913 bp, Unknown
  Bacterial polypeptide expressing nucleotide sequence isolated from the Sargasso Sea
tgaaaacctctcgaaatgtggtatttataatatttgctacaattttatgccagttttagattggacacgcacacatttacactaccaaatgaaagatggttcaaaagcattatattttgataaaactgccctagctgcatatgatttatttattgtaaaaagaaaaaatgcaaaaaagcaatacaatgagaatataattttggaggcaaaaaactattatgacagtctcaccaaagaagagattgaaacactttcaatgagcattatagctggcttacctggttcagaagaggaatattctcttgaaaaatttagaaatcaattagaatattatgaatcaattaacaagtctgatttacagaaaaatttaatttattttttagaacagattatcccagttgcagaaaaatttggtgtaaggatgtgtattcatccagacgaccctccgtttgatttgtttggaatcccaagagttgtaagtacttatgaagatttagatttcatttttaaagctattccttcactttcaaacggcttaacattttgtacgggttcattaggagttcgcactgacaataatctattagaaatttttcaagaattcgctgaacgaattcactttttacatcttagaagcacaaaacgagatgataaaggtaacttttatgaagctaatcatttagagggtgattttgacatgtttgaagtagttagagcaattttaattgaagaacaaaaaagaaaaaaaggtaatcgatcagattggaaaattccaatgagaccggatcatgggcatcaaatgttagatgatttaaataaaaaaacaaatcctggatattctgcgataggcaggttaagaggattggctgaaattcgaggactagctttagggattgacaaaatattatcttaa

SEQ ID NO: 285540 - DNA, 760 bp, Unknown
  Bacterial polypeptide expressing nucleotide sequence isolated from the Sargasso Sea
atgaaagaaacttggcgctggtatggagagtttgataaaatctctcttgcagaaattgctcagacgggggctcaaggcattgttacagccttgcatcagataccctacggcgacgtttgggaaaaggagcctatctctgttctgaaatcgaaaattgaaaactctggttttgattttacttgggatgtggtagagagccttccggtccatgagaatattaaaatggggaaaggtaatttaaaaactttgtttgcaaattatcggacatctattgaaaatttagctgatgcgggagttagaacgatatgctacaattttatgcctgttttagattggacacgcacccatctaaagcaacctgtttctggaggaggaacagcattaagattttcagctgcacacatggctgcttttgaaattaatatgttgggtaggaaggatgcggagactgaatatagtcctgatgccgttgagaacggtttgaggtggatagcgtcctccagtgacgaggaaaaaaataacttgttgctaagtattatggcaggattacctggaaaattcacacgatacgacgtagcgggattaaaatctgcaatatcactttataacgggatagaccaagccgtgcttcgacaaaattacggtagattcttagatgaagttattccaactgcggaaaagttaggaataaagatgtgtgttcatcctgatgatccacccaaggaatattttagggttgcctcgaatagtttcgagtgag

SEQ ID NO: 285541 - DNA, 640 bp, Unknown
  Bacterial polypeptide expressing nucleotide sequence isolated from the Sargasso Sea
ctgcatatcctccagcgtccgggcgcggaagcggactacaccgccgaagagattgctcaggcaaatgaacgcttcgccaccatgagcgatgaagacaaagcgcgtctgacccgcaacatcatcgccggtttgccgggcgcggaagagggctacaccctcgaccagttccgccagcatcttgcgcgctacaaagatatcgacaaagccgcgctgcgtgagaatttcgccgtcttcctgaaggcggttattccggtggcggaagaagctggcgtacgcatggcggtacacccggacgatccgccgcgcccgatccttggcctgccgcgcattgtttccaccgtggaagatatgcagtggatggtcgatacggtcaacagcatggcgaacggtttcaccatgtgcaccggctcctatggcgtgcgggcggacaacgatctggtcgacatgatcaaacagtttggcccacgcatttacttcacccatctgcgctccacgctgcgtgaagataacccgaagaccttccatgaagcggcgcatcttaatggcgatgtcgacatgtacgaggtggtgaaagcgatcgttgaagaagaacaacgccgtaaagccgagggtaaagaggatctgatcccgatgcgtccgg

SEQ ID NO: 285542 - DNA, 260 bp, Unknown
  Bacterial polypeptide expressing nucleotide sequence isolated from the Sargasso Sea
gatggaacaaacctggcgttggtatggaccgaacgatccggtgtcgcttgatgatgtacggcaggctggcgcgacgggtgtggtcactgcgctgcaccatattcctaatggtcaagtctggccggttgacgaaattaaacagcgtcaggcgctgctggcggaaaaagggctgacgtggtcggtcgtggaaagtatcccggtacacgaagagatcaaaacccaaagcgggcagtgtgcgacctggatagccaactaccagc

SEQ ID NO: 285543 - DNA, 394 bp, Unknown
  Bacterial polypeptide expressing nucleotide sequence isolated from the Sargasso Sea
atggaacaaacctggcgttggtacggacctaacgatccggtatcgcttgatgatgtgcgtcaggctggcgcaacgggtgttgtaaccgccttgcaccatattcctaacggtgaagtgtggccggtagaagaaattcaacagcgtcaggccattctggctgaaaaagggctgacctggtcggtggtggaaagtatccctgtccacgaagatatcaaaacgcgttcaggtcaatatcaaacgtggattgccaactatcagcagagtatccgtaatctggcgacctgcggtatcgataccgtgtgctataacttcatgccgatcctcgactggacgcgtaccgacatcgaatatcagctgccggatggttccaaagcgctgcgtttgaccagatagc

SEQ ID NO: 285544 - DNA, 1164 bp, Unknown
  Bacterial polypeptide expressing nucleotide sequence isolated from the Sargasso Sea
taacagatatacggcaaacaggagcaactggaattgtgaatgcattacatgaaattgaaataggtaaagtatggagtattgaagcaattgaagaaaggaaacgtctgattgaatgggaagattcaaatgaaattccccaaaaaactggcttgagatggtctgtagtagaaagtgtggcagtccatgaagacattaaaactcaaacaggaaatttccaaacatacattgaggcctacaagcaaactatacgaaatcttggaaagtgcgggattgatacaatttgttataactttatgccagtactggactggactagaacaaatcttgaatatttgcttgaggatggttccacggctttgtattttgacttcagtgtattggctgcttttgatcttttcattctcaaacgtcctgatgcaaaaaaatcttataccgaaaaagaaataaagattgcaagaaaaaaatttgatgaaatgagtgaattagagatagaggaattggttgatactatattaaaaggattacctggaacagatacaggttattctcttgaagatgttcaagcagctctagacctatataaaaatatagattcagaacagttaaaaaaatacctagcctattttttagaagaaattattcctgttgcagaagaagccggggttcggatggcaattcatccagatgatccgccaagatcattgttaggtcttcctagaatcatcagtacagaaaaggatctttctgagttattaaacatgattgactcaccgagcaatggatttaccatgtgcgctggttcttacggagcaaaccctgacaatgatttagtaggaatgattgaacgatatgggcatagacttagtttcactcacttaagaagtacaaaaaccattgaagggaaagattggtgtttttatgaagcagatcatttagctggagatgctgacatgtatggtattgtcagagcattggtcaaagaacaaagaaaaagagtggctcagggacgtgccgatcatcaaattccaatgaggcctgaccatggacatcgaatgttggatgatcttaaaaaagaaagcaatcctgggtattcctgcatcggtcgtttaagaggacttgcagaactcagaggtctggaaatgggaatagaaaaaagtctgtaat

SEQ ID NO: 285545 - DNA, 655 bp, Unknown
  Bacterial polypeptide expressing nucleotide sequence isolated from the Sargasso Sea
atgagtaaagaaacaattactaataatactaatgaaaattataatgaaaaccatcatcatagccataacttgctcccagaagaaccagaattaagagtaagggccctagagactttgctggttaaaaaaggattagttgatccaaataccttaaataaattaattgatacatatgaaaataaagttggacccagaaatggtgctagggttattgcaaaagcgtgggtagatatttctttcaaagaaagattattaaaaaactctactaaagctatagaagaacttagttacacaggaaggcagggtgaacatatggtggtagttgaaaatacagatgaaattcataatatggttgtttgtactctttgtagttgttatccatggccagttttaggattgcccccatcttggtataaatcagatgaatatagggctagagccgttagagagccaagaaaagttttaaaagaatttgggcttgttttaaaggataatgtaagaattaaggtttgggactctacatctgagatgagatatttagttttgcctatgaggcctaaaggtactgatctgctctccgaagatgagcttgcaaagctggtgacaagaaatagtatgatagggacaggtttacctgaaataattaatgactaga

SEQ ID NO: 285546 - DNA, 561 bp, Unknown
  Bacterial polypeptide expressing nucleotide sequence isolated from the Sargasso Sea
agctacgcgtccgggcgctggaatccctgctacaggagaaagggctgatcgacccggcggcactcgatgatctgatcgacacttacgagcacaaggtcggcccccgcaacggcgcgcaggtggtcgccaaagcgtggaatgatccggagtataaacgtcggctgctggaagacgccacggccgccatcgccgagctgggtttctccggcgtgcagggtgaagacatgctggtggtggagaacacggcggacgtacacaacgtaaccgtgtgtacgctatgttcctgctacccctggccggtgctgggtctgccgccggtgtggtacaaatcggccccctatcgttcgcgcatcgttatcgacccgcgcggcgttctggccgaattcgggttaaacattccagaaagtaaagaggtgcgcgtctgggacagcagcgccgaactgcgctatctggtactgccagaacgtccggcgggcacagacggctggagcgaagcgcagctggtcgaactggtcacccgcgattccatgatcggtaccggcctcgtcgccgcgccataac

SEQ ID NO: 285547 - DNA, 565 bp, Unknown
  Bacterial polypeptide expressing nucleotide sequence isolated from the Sargasso Sea
tatgagtacccaccaccactcaacagttccttccgatcctgaacttcgggtcaaggccctggagtctcttctggtagagaaagggctggtggccccaaagacactcgatgaactggttgatctttacgagacgaaaatcggcccaagaaacggggcaaaagtggtcgccaaggcctggaaggatccagagtttaaaaaatatctgcttgaaaaacctaccgatgcgatcgcctccatcggataccggggtcgtcagggggagcaaatgcgagtggtggaaaacactgcggacatccacaacatcgtcgtttgcaccctttgttcctgctatccctggccggttctcgggcttcctccggtctggtacaaatctgcaccttatcgctcccgagtggtcagtgatccccgttcggtattggaggaattcggaacccaactggcagaaaatgtggaaatccgggtctgggattcgacatctgaaatgcggtattttgttcttccggaagcccctgctgatttccagaacaaatcgctggatgaattggaatcgatggtgagccagaaa

SEQ ID NO: 285548 - DNA, 433 bp, Unknown
  Bacterial polypeptide expressing nucleotide sequence isolated from the Sargasso Sea
aatgagtacccaccaccacacaacagttccttccgatcctgaacttcgggtcaaggccctggagtctcttctggaagagaaagggctggtggacccaaagacactcaatgaactggtagatctttacgagacaaaaatcggcccaagaaacggggcaaaagtggtcgccaaggcctggaaggatccaaagtttaaaaaatatctgcttgaaaaacctaccgacgcgattgcctcactcggataccggggtcgtcagggggagcacatgagagtggtggaaaacactgcagacatccacaacattgtcgtttgcaccctttgttcctgctatccctggccggttctagggcttcctccagtctggtacaaatccgcaccttatcgctcccgggtggtcagtgatccccgttcggtatggaggaattcggaaccc

SEQ ID NO: 285549 - DNA, 417 bp, Unknown
  Bacterial polypeptide expressing nucleotide sequence isolated from the Sargasso Sea
actttaagacgtggtggctcgaggatgcgaccgaggcgatgcgtcccctcggctacaccgggcgacagggcgagcatatgatggtgacggagaatacggcggaggtgcacaacgtggtcgtttgtaccctctgttcctgctatccgtggccggtcctcggattgccgccggtttggtacaaggcggcgccttaccgctcacgcgtcgtggcggatccgcgcggcgtgttgcgggaatttgggaccgagttggcggacgacgtcgaggtgcgtgtctgggattcgacggccgagatgcgctatctcgtcctgccgatgcggccggcgggtaccgatgactggtccattgaaaaacttgagacactggtcactcgaaattcgatgatcggtgttgagctggcgcaggacccggtatgaa

SEQ ID NO: 285550 - DNA, 649 bp, Unknown
  Bacterial polypeptide expressing nucleotide sequence isolated from the Sargasso Sea
atgacatcagacgatcatcactcccatgaccacactgagctgccggatagcctcacacttaaggtcaaggcgctcgaatctctattggttgagaagggccttgtctcggaggagacgctggatgccctgatcgagacgtatgagcataaggtaggtccgcgcaacggggcacaggttgtcgccaaggcttggacacacccggagttcaaagcatggttgctgaaggatcctaatggcgccattgcctcactgggtttcaccggaaggcagggcgagcatatgcaggttgtcgaaaatacggacaccgtccataacctcgtcgtctgtaccctttgctcctgctacccctggccggtgctgggcctgcctccggtctggtacaaatctgctccctaccgggcccgggcagtccgggatccacggggtgtgctgactgagttcggcacaaagcttgaacctgatattcacatcgaggtctgggactcgacggcagagatgcgctatctcgttttgcctcagcgccctatgggaaccgagggatggccagaggagaagttggccgaccttgttacgcgtaacagcatgatcggagtcgagaagatttctctccccggtgacgaccccagtgcgggtggagaggtttcgtgat

SEQ ID NO: 285551 - DNA, 501 bp, Unknown
  Bacterial polypeptide expressing nucleotide sequence isolated from the Sargasso Sea
catgtcagacgatcatcactcccacgaccataccgagccgccggacaacctcgcactcaaggtcaaggcgctcgaatccctgcttattgagaagggtctcgtgtctgaaaagacgctggatgccctgattgagacttatgagcataaggtgggcccacgcaacggggcacaggtcgtcgccaaggcctggacagacccggagttcaaagcatggctgctgaaagatcccaatggcgccattgcctcactgggtttcaccggaaggcagggcgagcatatgcgggttgtcgaaaatacagacaaggtccataacctcgtcgtctgcactctttgctcttgttacccttggccggtgctgggattacctccggtctggtacaaatctgctccataccgggctcgcgcagtccgggacccgcgcggtgtgctggctgagttcggcacacagctgggcggtgatatccaggtcgaggtctgggactcgacggccgagatgcgcta

SEQ ID NO: 285552 - DNA, 613 bp, Unknown
  Bacterial polypeptide expressing nucleotide sequence isolated from the Sargasso Sea
atgagtacccaccaccactcaacagttccttccgatcctgaacttcgggtcaaggccctggagtctcttctggtagagaaagggctggtggacccaaagacactcgatgaactggtagatctttacgagacgaaaatcggcccaagaaacggggcaaaagtggtcgccaaggcctggaaggatccagagtttaaaaaatatctgcttgaaaaacctaccgatgccattgcctccatcggataccggggtcgtcagggggagcacatgagagtggtggaaaactctaatgacatccacaacatcgtcgtctgtaccctttgttcctgctatccctggccggttctcgggcttcctccggtctggtacaaatccgcaccttaccgctcccgggtggtcagtgatccccgttcggtattggaggaattcggaacccaactggcagaaaatgtggaaatccgggtctgggattcaacatctgaaatgcggtactttgtccttccggaagcccctactgatttccataacaaatccctgcatgaactggaatcgatggtgacccgaaattccataatcggtgttgagaaaatcaaggaaccagagaatcaatcatgaa

SEQ ID NO: 285553 - DNA, 826 bp, Unknown
  Bacterial polypeptide expressing nucleotide sequence isolated from the Sargasso Sea
aggaaccattatttgggaggcaagaagattgcatgctaaaggagaaattaattacgaggaatttatggatatggcagctgcatcttctccaagtcctggtcattgtaatacaatgggaactgcttcatcaatgaattcagtagcggaagcattgggaatgtctttacctggatgtgctgtgataccggcaccttatcgagaaagagaacaaatttcttttgagacaggaacgagaattgtaaatatggtccatgaagatcttacaccctctaaaataatgacaaagaaagcttttgaaaatgcggttgtggttgctagtgctataggtgcatcaagtaattgtactactcatctaattgcaattgcgaaacacatgggtgtaaaatttgatttatctaattggcaaaaattaggtcataaaattcctttattggcgaactgccaacctgctggggaacatttaatggaaggtttttacagagcaggcggtatacctgcaatcatgaaagaattaatgaagcataaaaaaattcaccaaaacttaataaccgtaacaggaaaaacagttgctcaaaacttaagaaaaaaaatcaatgttgatagagatgtaataaaaactttcaaagataatttaactgataaggctggttttttagttatgaaaggtaatttcttttcatcagcaatcatgaaaacttcagttattagcaaagaatttagggaaagatatttgtcaaatcctaaacatccaaatgtctttaaaggtaaaaaggtagtttttgaaggtcctgaagattatcataaaagaataaatagcaaaaagtta

SEQ ID NO: 285554 - DNA, 232 bp, Unknown
  Bacterial polypeptide expressing nucleotide sequence isolated from the Sargasso Sea
atgttgcgtggcgtaggttttactacagaagatttttcaaaaccttttgttgggatagcgtctacaggagcaaaagttactccttgtaatatgcatattaataaattatctgaaactgttgaagattctgtaaactcatcaggaggaaaaggagtactttttaatacgattactgtttcagatggtatatctatgggaactcaaggaatgaaatattctttgatttcaagag

SEQ ID NO: 285555 - DNA, 505 bp, Unknown
  Bacterial polypeptide expressing nucleotide sequence isolated from the Sargasso Sea
atggtggtagtaagatatgaagggcctgttggtgggccaggaatgccagagatgttggactcaacttccagaatcacagccatttgtcgagaaaaaaatatagttgttgggttgatgactgatggcagattttcaggtggttcagtgggcttggtcataggtcatgttggccctgaggcggctattggaggacctattggacttctcgaggatggagacataatagaagtaaacttgaataagaatgagttgaattgtgaacagctttctaacccagatatttatcggtttaggaaatcagagtggaagaataaactggataaaaataataattttcatcctgccgtcggtgtggctgacacgcgtttactgaataggatgagatgttctgcagtgtctgcagtttacggggctgggatgcacccaaatagttccttatgggtgtcaaatccaagggaaccagaggtttccaatttcgtgccagaaaacaaccacaagcaataaa

SEQ ID NO: 285556 - DNA, 762 bp, Unknown
  Bacterial polypeptide expressing nucleotide sequence isolated from the Sargasso Sea
aatgaaaaaaagaaactttgatcataataaattacctagtagacatgttagagtgggttctcaaaaagctcctcatagatcttactactatgcaatgggcttagatgaagatgatatcgataaaccatttgttggtgttgcaacatgttggaatgaatctgctccatgtaatatttctcttatgagacaatcaaagagcgttaaagatggcgtttcaaaagaaggtggaacaccaagagaatttacaacgattactgtaactgatggaattgccatgggacatcaaggaatgaaatcatcacttgttagtagagagataatttccgactcaattgaagtatcaatgagaggacattgttatgatgccttggttggtgttgcaggttgcgataagtctttacctggcatgatgatggcaatgctaagactaaatgttccatcagtatttatttatggtggttcaattcttccgggaagttacaaaggtaaagatgttacagttgtagatgtttttgaagctgttggtgaattttctgctggtaaaataagtgaagaagagctgcatgaattagagtgtgtagcatgtcctagcgctgggtcatgcggtggtcaattcaccgccaatactatggcatgtgtttctgaggcaataggtctagccttaccttattcagctggtcctcctgctccagatgaaggtagagataaatacgcattagaatctggaaaagctgttatggatttgctcgaaaataatattag

SEQ ID NO: 285557 - DNA, 775 bp, Unknown
  Bacterial polypeptide expressing nucleotide sequence isolated from the Sargasso Sea
gcggtgatcgacgagcgctcgctggtcaacgggctggtggccctgctcgcctccggcggcagcaccaaccacagcatccatatggtggcgctggcccgcgccgccggcctgcacctgacctgggatgacatcagcgatctctccgacgtggtgccgctgttggtacgcatgtacccgaacggcccggccgacgtcaacgccttcgaacaggcaggtagcgtgcccggcctgatgcgccggttggccgaagaggggctgatccacctggacgccaccccggtgtttggcgagatgcaggattacctcagccgcccggcactggtggatggccagctggtatggcagtcggtgggtgagagcggcgatgcgagcgtattgtccccctccggtagccggttccaggccactggcggcaccaagctgctggccggcaatctgggccgcgccgtggtcaaggtctccgccgtggcccccgagtatcgcgtcatcgaggcgccggcacgggtcttctcctcccagcatgcggtggaggcggcctacaaggcgggcgatctcaatcaggacgccgtcatcgtggtgcgccacaatggcccggctgccaacggtatgccggagctgcacaagctgatgccggtgctcggcaacctgcagaaggcgggttacaaggtggcgctggtcaccgacggccgtctctccggcgcctccggcaagatcccggccgccatccacgtcaccccggaagcgctgcacggcggggccatcggcctgcttgccg

SEQ ID NO: 285558 - DNA, 1012 bp, Unknown
  Bacterial polypeptide expressing nucleotide sequence isolated from the Sargasso Sea
aaattagctggttcaggaatggtagtttgggaagcaagaaaaatgttagccaaaggagaaattaaatacgaggaatttatggatatggttgcatcctctgccccaagtgctggacattgtaatacaatgggaacagcttcttcaatgaactctgtagcagaagcattagggatgtctttaccaggtggtgctattattccagctccttatagggaaagagaacaaatttcttacgaaacaggaaaaagaatcgttagaatggttcatgaagatttaaccccatcaaaaattatgacacgtaaagcttttgaaaatgcagtagttgttgcaagtgctattggtggatcaagcaattgcacagctcatctaagcgctattgcaaaacatatgggaattaaatttgatctttctgattggcaaaaacttgggcacaacattcctttattggtaaattgccaacctgcaggagaatacttaatggaaagttttcacagagctggagcaatacctgctgtaatgaaggagttaattaaaaacaaaaaaattcatacaaacataaagactgttacaggaaaaactgtaggagaaaatttaagaaagaaagttgatgtagataacaaagtaattaaaacatttaagaatgcattgactgaaaaagctggttttttagttatgaaaagcaactttttctcatctgctatcatgaaaacatctgtaattagcaaagaatttagagatcaatatttatcaaaccctaaacaaccaaatgtttttgagtgtaaagctatagtttttgaaggtcctgaggattatcataaaagacttaatgataagaagttaaagatagatgaaaactctctattaattattagaggttgcggacctgttggttatcctggatcagctgaagtggttaacatgcaaccaccagacagattattaaaaaaaggaataagacatctaccaactttgggtgatggaagacaaagcggaacttcagaaagtccatcaa

SEQ ID NO: 285559 - DNA, 907 bp, Unknown
  Bacterial polypeptide expressing nucleotide sequence isolated from the Sargasso Sea
atggctgcatcatcagcgccaagtgtcggacattgtaatacaatgggtaccgcttcctcaatgaactctgttgctgaagcattaggaatgtctttgcctggttgtgctgttatacccgcaccgtacaaagaaagaaaacatatttcatttgaaacaggtaaaagaatagttggaatggtgcatgagaatttaacaccttcaaagattatgactagaaaggcttttgaaaatgcaattgttgttgcaagtgctattggcggatcaagtaattgcacaacacatttaagtgcaatagctaaacatatgggtataaagtttaatttatctgattggcaaaaattaggtcatgaaattcctttacttgtaaactgtcaaccatctggagaatatttaatggaaagtttttacagttcaggtggggtacctgctgtaatgaaagaactaataaaaaataataaaattcataaaaatttattaactgtcacgggtaaaaatattgctcaaaatttaagaaaaaatataaaagtagatcctaaagtgattaaatcattcaaaaattctcttgctgataaagctggatttttagttatgagaagtaattttttttcaactgcaataatgaaaacttctgtaattagtaaagaatttaaagatagatatctttcaaaccccaagcatttaaatgtttttaagtgtaatgctgtagtttttgaaggaccagaggattaccataaaagactgaatagtaaaaaattacaaattgatgaaaactcaattttaatcataagaggttgtggtccatttggttaccctggttcggcagaggtaattaatatgcagccacctgacagattactaaaaagaggaattaatactttgccaacacttggtgatggaaggcaaagtg

SEQ ID NO: 285560 - DNA, 527 bp, Unknown
  Bacterial polypeptide expressing nucleotide sequence isolated from the Sargasso Sea
aatgaagaaatttaataagaagaaactaccaagtagacacacatctttaggacccgataaggctcctcaaagatctttttattatgcaatggatttaacggaaaaagatgttgcaaaaccttttgtaggcgttgtttcaacttggaacgaagctgctccttgcaacattgctttaatgagacaggctcaatcggttaaaaaaggagttcatcaagcaggaggtacaccaagagaattttgtacgattacggttacagatggaatagcaatgggtcatgaaggaatgaaatcttcattgatttcacgagatgtaatagcagactcaactgaattaactgtaagaggacattgttatgacgctctagttggcgttgcaggatgtgataaatctttaccaggcttaatgatggcaatggttagattaaatgtaccaagtgttttcatttatggtggttcaatattaccaggtagatttaatggaaaagatgtaacagttgttgatgtatttgaaggagttggaaaatttt

SEQ ID NO: 285561 - DNA, 394 bp, Unknown
  Bacterial polypeptide expressing nucleotide sequence isolated from the Sargasso Sea
aatgctgaaatttaataaaaaaaaactgccaagtagacatacttccttaggccctgataaggctccgcaaagatctttttattatgcaatgaaccttacagaaaaggatgttgctaaaccattcgtgggtgttgtttcaacctggaacgaggctgctccatgtaatattgctttaatgagacaagctcagtcggttaaaaaaggcgtacatcaatcaggtggaacaccaagagaattttgcaccattacagttactgacggtatagctatggggcatgaaggtatgaaatcatcactgatttcaagagatgttattgcagattcaactgaattaactgttagaggacattgttacgatgcactagtaggagttgcaggttgtgataaatcatta

SEQ ID NO: 285562 - DNA, 1045 bp, Unknown
  Bacterial polypeptide expressing nucleotide sequence isolated from the Sargasso Sea
ttcctactcacccaattcaagaaactgggaaaaaagcctactgcaatgttggacagaaacttatcatatttgtctttggttgagatactttatggatacccacttgacggagttatacttacaactggatgtgataaaactaccccagcagcgttaatggcagctgcaacagtgaatattccagcaattgttttgtcgggtggtccaatgcttgatggaaattataaaggtaagaaagctggtgcaggaaccattatttgggaagcaagaagattacatgctaagggagaaattaattacgaagaatttatggatatggcagcagcatcttcaccaagtcctggtcactgtaatacaatgggaacagcttcatcaatgaattctgttgctgaggcattgggaatgtctctaccaggatgtgcagtaataccagctccctatagagaaagagaacaaatttcttttgagactggatctagaattgtaaaaatggttcatgaagacttaactccttcaaaaattatgacaaagaaagcttttgaaaatgcagtaatagttgcaagtgctataggagcttctagtaattgtacaacacatttaattgctatcgcaaaacatatgggtgttaaatttgatttatctaattggcaaaaacttgggcacaaaatacctttattagcgaactgccaacctgcaggcgaacatttaatggaaggtttttatagagctggaggtataccagcaatcatgaaagaattaatgaagaataataaaattcaccaaaacctaattactgtgactggcaaaacagttgcacaaaacttaagaaaaaaaattgatgtagatagggatgtaattaaaacatttaaagataatttgactgataaggctgggtttctagttatgaaaggaaatttcttttcatcagcaattatgaaaacttcagtaattagtaaagaatttagaaaaagatatctatcaaatcctaagcaccctaatgtttttaaagggaaagcagtagtttttgaaggtccagaggattatc

SEQ ID NO: 285563 - DNA, 342 bp, Unknown
  Bacterial polypeptide expressing nucleotide sequence isolated from the Sargasso Sea
aatgaaaacttttaacaaaaaaaaattaccaagcaggcatacctcgctaggtccagacagagccccccagagatctttttattacgcgatgggcgaaactgagaaagatgtagccaaaccttttgttggagttgtttctacatggaatgaggctgctccatgtaatattgctcttatgaggcaagcccaatctgtaaaaaaaggagttaagtctggaggcgggacaccaagagaattttgtactattacggtaacagatgggatcgcaatgggtcatgaaggaatgaagtcatcattagtttctagagatgtgattgcagattcaactgaattaactgttag

SEQ ID NO: 285564 - DNA, 363 bp, Unknown
  Bacterial polypeptide expressing nucleotide sequence isolated from the Sargasso Sea
aaggtggacctggtatgccagaaatgttaaagccaactgcagcaattatgggagctggtttaggaaaaagtgtagcattgattactgatggtcgcttttctggaggcacccatggttttgtagttggacatattgttcctgaagctcaagaagggggtgaaataggattactaaaagatggcgatcaaattaccatagatgctgaaaaaaatacccttagcgttgatttgagcaattctgaattggctaatcgaaaggcagcttggaaaaaacctcactacaagtttgaaaaaggtattttatataaatacattaaaaacgtagcaacagcctctgaaggttgtgttacagattctaattagt

SEQ ID NO: 285565 - DNA, 385 bp, Unknown
  Bacterial polypeptide expressing nucleotide sequence isolated from the Sargasso Sea
atgaaaaaattcaataaaaaaaaactacctagtagacatacttctttaggacctgataaagctcctcagagatcattctactatgctatgaatttaaccgaaaaagatgttgcaaaaccatttgttggcgttgtttcaacttggaatgaagctgctccttgtaatatagcgttaatgagacaagctcagtcagttaaaaaaggtgtacaatctgcaggcggtactccaagagaattttgtacaattacagtaacagatggtattgcaatggggcatgaaggaatgaaatcttcattaatttcaagagatgtaattgctgattcaactgagttaacagttagaggacattgttatgatgcactagttggtgttgctggctgtgata

SEQ ID NO: 285566 - DNA, 463 bp, Unknown
  Bacterial polypeptide expressing nucleotide sequence isolated from the Sargasso Sea
atgaagaaatttaataagaagaaattacctagtaggcatacatctttaggacctgataaggctccacaaagatctttttattatgcaatggatttgaccgaaaaagatgttgcaaaaccttttgttggtgttgtttcaacatggaatgaagcagctccttgtaatattgctttaatgagacaggctcaatcggttaaaaaaggagttcatcaagcaggaggcacaccaagagaattttgtacgattacggttacagatggaatagctatgggtcatgaaggaatgaaatcttcgttaatttcgcgagatgtaattgcagactcaactgaattaactgttagaggtcattgttatgacgctttagttggtgttgcaggatgtgataaatcattaccaggtttaatgatggcaatggttagattaaatgtacccaagtgttttcatttatggtggttcaatatac

SEQ ID NO: 285567 - DNA, 451 bp, Unknown
  Bacterial polypeptide expressing nucleotide sequence isolated from the Sargasso Sea
acaggtgaaactttagctgaacaagttgatcgactagctcctaaaaaacccgatggaagagttatatatcctgtaaagaaaccttataaagaaactggtgggcttagattattaggaggaaatttatctcctgaatttagttccatcttaaaactagctggtgttgaaggtggtttagataataatgttttcattggaaaagctagaatatttgatggtgaacaaaaacttctttggaccttagaaaatgaaccagaaagctttaacaataatgatatggttgtagttaggtatgaagggccagttggtggacctggaatgccagaaatgcttgattctacttctaggataaccactttgtgtagagaaagagaaataattgtagggttaatgactgatggacgtttttctggtggatctgttggtcttgttattggtcatgttggtcctg

SEQ ID NO: 285568 - DNA, 387 bp, Unknown
  Bacterial polypeptide expressing nucleotide sequence isolated from the Sargasso Sea
aatgaaaaaatttaataagaaaaaattaccaagtagacatacaacaataggtgctgataaagctcctcaaagatcattttattatgcaatggatttaacagaaaaggatgttgctaagccatttgtaggagttgtttcaacatggaatgaagctgctccatgtaacattaatttaatgaaacaagcacaatcggttaaaaaaggtgttcaagcaactggtggaacgccaagagaattttgtactattactgtaactgatggaattgcaatgggtcatgagggaatgaaatcatctttgatttcaagagatgtgattgcagactcaacagaactaactgttagaggacattgttatgatgcattagttggattagctggatgtgataa

SEQ ID NO: 285569 - DNA, 292 bp, Unknown
  Bacterial polypeptide expressing nucleotide sequence isolated from the Sargasso Sea
atggctaaattcaataaaaagaaacttccaagcagacatacatcattaggggcagatagagctccacacagatcattctattatgctatgggggaaactgagaaagatgtggcaaaaccctttgttggcgtcgtttccacatggaatgaggccgctccatgtaacattgcgctaatgagacaagctcaatctgttaaaaaaggagttagagcaaatggtggaactccaagagaattttgtaccattaccgtaactgacggtatcgcaatgggtcatgaaggaatgaagtcat

SEQ ID NO: 285570 - DNA, 424 bp, Unknown
  Bacterial polypeptide expressing nucleotide sequence isolated from the Sargasso Sea
aatggcaaagtttaacaaaaaaaaattaccaagtagacatacatctttaggtccagataaagcgccacaaagatccttttattatgcaatgaatttaactgaaaaagatgttgctaaaccatttgtcggagtggtttcaacttggaatgaagcggcaccttgtaatatagcattaatgagacaagcacagtcagttaaaaaaggtgttagtctttcaggtggtacaccaagggagttttgtacaattacggttactgacggtattgctatgggtcatgaaggaatgaaatcttcacttatctcaagggatgtaattgcagattcaaccgaattaacagtaagagggcattgttacgatgctctagttggagttgcaggttgtgataaatctttaccaggattaatgatggcaatggttcgatta

SEQ ID NO: 285571 - DNA, 839 bp, Unknown
  Bacterial polypeptide expressing nucleotide sequence isolated from the Sargasso Sea
taattacgaagaatttatggatatggcagcagcatcttcaccaagccctggtcactgtaatacaatgggaacagcttcatcaatgaattctgttgctgaggcattgggaatgtctttaccaggatgtgcagtaataccagctccttatagagaaagagagcaaatttcttttgagactggatcgagaattgtaaaaatggttcacgaagatttaactccctcaaaaatcatgacaaagaaagcttttgaaaatgcagttatagttgcaagtgctataggagcttccagtaattgtacaacacatttaattgctatcgcaaaacatatgggtgtaaaatttgatttatcgaattggcaaaagcttggacacaaaatacctttattagcaaactgtcaacctgcaggtgaacatttaatggagggtttttacagagctggaggtataccagcaatcatgaaagaattaatgaagaataataaaattcaccaaaacctaattactgtaactggtaaaacagttgaacaaaatttaagaaaaaaaatcgatgtagatagagatgtgattaaaacatttaaaaataatttgactgacaaggctgggtttctagttatgaaaggaaatttcttttcatcagcaattatgaaaacctcagtaattagtaaagagtttagagaaagatatttatcaaatcctaagcaccctaatgtttttaaaggtaaagcagtagtttttgaaggccctgaggattatcaccataggattaatagtaagaagttaaatattaatgaaaattcaattttaataataagaggttgcgggcctgttggataccctggtt

SEQ ID NO: 285572 - DNA, 160 bp, Unknown
  Bacterial polypeptide expressing nucleotide sequence isolated from the Sargasso Sea
tcaagcgggtgaaacagtcttacgtttgatagaaaaaaatatttgtccacttgacattcttaccaaagaagcatttgagaacgcgattactgttgtgatggcactgggaggatctacaaatgcaggttttacatcttcttgctatggccaatgcggctaa

SEQ ID NO: 285573 - DNA, 524 bp, Unknown
  Bacterial polypeptide expressing nucleotide sequence isolated from the Sargasso Sea
aatgattaaatttaataaaaaaaaattacctagtagacatacaacattaggacctgaaaaagcttttcaaagatctttttactacggtatgaatttaactgaaaaagatgtttcaaaaccattcgttggtgttgtgtcaacctggaatgaagctgcaccatgtaatattgctcttatgagacaagcacagtcagttaaaaaaggtgtcaaatcagctggagggacaccaagagaattttgtacaattacagttacagatggaatagctatgggtcacgagggaatgaaatcatcgctagtatcaagagatgtaattgcagattcaacagaattaactgttagaggacactgctatgatgctttagttggtttagctggatgcgataagtctttacctggtttaatgatggcaatggttagattaaacgttccaagtgtttttatttatggtggatcaatattaccaggaagacttaatggtaaagacataacagttcaagatgttatagagggtgtaggcgagt

SEQ ID NO: 285574 - DNA, 280 bp, Unknown
  Bacterial polypeptide expressing nucleotide sequence isolated from the Sargasso Sea
gatgattgataaatctcgtttgccaagtagacacgtaacaataggagctaaaagttcacctcatagatcttattattatgcaatgggtctctcagaaaaagaaataaatcaaccttttgttggtgttgctacctgttggaatgaatctgcaccgtgcaacatatctctttctagacaagctcaagcagccaaaaagggtattaaagatagaaaaggtactccaagagaattcacaactattgcagttacagatgggattgcgatggggcatgagggaatg

SEQ ID NO: 285575 - DNA, 505 bp, Unknown
  Bacterial polypeptide expressing nucleotide sequence isolated from the Sargasso Sea
catgatcatagtgcggtacgaaggtccaagtggagctccgggcatgccggaaatgttggactctacttcgcgtattactacactttgtagggaaaataatatcgtcgttggattaatgactgatggccgtttctcaggtggatcagttggccttgtgattgggcacgttggcccagaggcggcacttggtggggaaatcgcacttatcgagaatggcgatgaaattgttattgatctcaatttaaatgaaattaattgtacgcctttacaaaatgaggaaacattaaataagcggcgtaatttatggaaagagacagtggaagctaatgggggaacccacccgtcaataggtcttgccgacacgcgacttttgaataggatgcgaagatcagcggtttctgccgtttacggcgcaggcatgcacccggatagacagctgtgggtaagtgaaccgcgtgatccggtaatgacagagttctcgccaacaaataaatatcgtgactaa

SEQ ID NO: 285576 - DNA, 376 bp, Unknown
  Bacterial polypeptide expressing nucleotide sequence isolated from the Sargasso Sea
aatgaataaatttaataaaaaaaaattaccaagtagacatacatctttaggtgcagataaagctcctcaaagatccttttattatgcgatgggtgaaactcaaaaagatgtagcaaaaccttttgttggtgttgtttctacatggaatgaagctgccccatgtaatattgcattaatgagacaagctcagtcagttaaaaagggtgtcaaattttctggcggcacaccaagagagttttgtactataactgttactgacggtatcgctatggggcatgaaggaatgaaatcttctttggtatctcgagatattattgctgactcaacagagttaacagttagaggacattgttacgatgcattagtaggagttgcc

SEQ ID NO: 285577 - DNA, 598 bp, Unknown
  Bacterial polypeptide expressing nucleotide sequence isolated from the Sargasso Sea
gaagagtttaataatttgtctagaaatgttattccggtggtcatagatgcacgtccttttgggcaatattcgatggtagatattgatgccaaaggcggtatgcaagttatagttaaggaactaatggacgctggattgttaaatggtgacactttgacttgtacaggagagactctgtctgaacaagtcgagcgactgaaccctccttcaccggatgaagatgtaatttatactgttcaaaacccatataaggatacgggtggattgcgggttttaggtggaaatttgtcgcctgaatttagcgctgtgctgaagttagctggcgttgaaggcggactggaaaataacatttttaaaggtaaagctaaggtttttgatggagagcaggagctattaaaggcattagattctcaagccgatatgttcgaaaactttgatatgatcgtggtacgatacgaggggccgtttggtgcgccaggtatgcctgaaatgctagactctacctctagaattactgcgttatgtcgtgaaaaaaatattgtagttggccttatgactgatggtaggttttctggcgggtctgtcggtttagttattg

SEQ ID NO: 285578 - DNA, 310 bp, Unknown
  Bacterial polypeptide expressing nucleotide sequence isolated from the Sargasso Sea
gaaaggagcaggtctaggtaaagatgtattacttattacagatggcagattctctggtgggacgactggtttatgtattggacatgttactcctgaaagtttcgataatggacctattgcaatttgtgaaactggtgatgaaataagcttggacttaaaaaaaagggaactaaatctaaatgttgatgaagaggaaatagaaaaaagattaaaaaaatataccaatccagagccaaggtacaattctggagttctaaataaatattctaaattagttacaggtgctgataggggagctgtaacaggttag

SEQ ID NO: 285579 - DNA, 838 bp, Unknown
  Bacterial polypeptide expressing nucleotide sequence isolated from the Sargasso Sea
gctttaatggcagctgcaacagttaatattcctgcaattgttttgtctggtggcccaatgcttgatggaaactataaaggtaagaaagctggtgcaggaaccattatttgggaagcaagaagattgcatgctaaaggagaaattaattacgaagaatttatggatatggcatcagcatcttcaccaagtcctggtcactgtaatacaatgggaacagcttcatcaatgaattctgttgctgaggcattgggaatgtctttaccaggttgtgcagtaataccagctccttatcgagaaagagaacaaatttcttttgagactggttcaagaattgtaaaaatggttcacgaagatttaactccttcaaaaattatgacaaagaaagcctttgaaaatgcagttatagttgcaagtgctataggcgcatctagtaattgcactacacatttaattgctatcgcaaaacatatgggtgtaaaatttgatttatctaattggcaaaaacttgggcacaaaatacctctattagcaaactgccaacctgcaggcgaacatttaatggaaggtttttatagagccggaggtataccagcaatcatgaaagaattaatgaagaataataaaattcaccaaaacctaattactgtaactggtaaaacagttgcacaaaatttaagaaaaaaaatcgatgtagatagagatgtgatcaaaacatttaaaaataatttgactgataaggctgggtttctagttatgaaaggaaattttttttcatctgcaattatgaagacttcagtaattagtaaagagtttagagatagatacttatcaaacccca

SEQ ID NO: 285580 - DNA, 475 bp, Unknown
  Bacterial polypeptide expressing nucleotide sequence isolated from the Sargasso Sea
atgacaaagtttaataaaaaaaaattaccaagtagacatacatcattagggccagataaagcaccacaaagatctttttattatgcaatgaatttaaccgaaaaagatgttgctaaaccatttgttggtgtggtttcaacatggaatgaagctgcgccttgtaatatagctttaatgagacaagcacagtctgttaagaggggtgttagtctttcaggtggtactccaagagagttttgcacaattacagttactgatggtattgctatgggccatgaaggtatgaagtcttcacttatttcaagagatgtaatcgcagattcaacagaacttactgtaagaggtcattgttatgatgcactagttggtgtcgcaggctgcgataaatctttaccaggattaatgatggccatggttcgattaaatgttccaagtggtttttatatatggaggttcaattctacccaggtagatt

SEQ ID NO: 285581 - DNA, 859 bp, Unknown
  Bacterial polypeptide expressing nucleotide sequence isolated from the Sargasso Sea
tgtatatgaagcaggtggttttcctctagagttcccagttttttctgcaagtgaatctaatctaagaccaactgctatgctttttagaaatcttgcaagtatggatgttgaggaggctattagaggtaatcctattgatggtgtagtactcttaatgggttgtgataaaacaactccttctttaatgatgggtgctgcaagtgttgatattccaacaataggtgtatcaggtggaccaatgttaaatggtcatcacagaggtgaaatcattggttctggaacaggtgtttggcagttagacgcagatcttaatgctggaaaaattacagaagatgattttgtttctgcagaaatttcaatgagtagatctaagggcaactgtatgactatgggtacagcttcaacaatgggaagtatggtagaggcacttggtatgtcattaccacataatgcagctattccagcagttgatgcaagacgctatgcgttagctcatatgtctggcaaaagaatagttgagatggttaaagaaaatttaaacatgtcaaaagttgtctcaaaagattcttttgaaaatgcaatcaaagtaaatggagcaattggaggctcaacaaatgcagttatccaccttgcagctattgctggaagattagaaattgatttgtctttagatgattgggaaaaatgtggaaaggatattcctacgctagtaaatcttcaaccatctggaaaatatttaatggaagatttttattatgcaggagggttacccgcagtaataagacaacttttagaaaaaaatcttcttagtaaagatgccttaactgtaaatggtaaaacaattgaagaaaataattta

SEQ ID NO: 285582 - DNA, 217 bp, Unknown
  Bacterial polypeptide expressing nucleotide sequence isolated from the Sargasso Sea
ttttgatggaggtttgctgggtatggttgaaaatggtgataacattacaattgatattactaaacgcaccatagatctagaagtttcggaacaagaaattaaaaggagaaaagataactgggtttgccctcaggcccgttatacaagaggagtacttgcaaaatacgcaaaattagttagttcagcttcgttgggcgcagtaacagatttggcttaa

SEQ ID NO: 285583 - DNA, 832 bp, Unknown
  Bacterial polypeptide expressing nucleotide sequence isolated from the Sargasso Sea
cgaggttcccttttgcctccccgacgtccagatcattcttcgatcgactccggtgcttgccaatttcgcgccacgcggcaaaagaaccatggtggacctgcataatctgggcggaacacccgtattcctaaagctcctgctcgatgccggcttgttgcatggtgattgcgccacggtgaccggcaagacgatggccgaaaacctggccgaggtgccggaggttccggatgaccaggatctgctggctccggccgacaaaccattcaaggcccatgccgacatgcaggtctgcttcggcaacgttgctccctacggtgtggtgttcaaggtgtcgagtatggaggatacttccttccgcggtatcgccctttgctttgatgatgcccgtgaagtagcccaggcggtggaggccgggaacatcaagcctggcatggttgtcgttctccgctaccaaggtccggtggcttgcggtatgcccgaggtgctggtggctaccgctgcactcgccttgcccgaactggatggcaaggtggccttcctgtccgacacacgggtctccggcgtgtcgcatggagccatcggcgtgcattgcgctcccgaggccgcggtgggcggacccattgccttggtccaagatggtgatgagatatccttcgacctgttggccggagagatcactttacaagtaagtgacaaagacttggccaagcgtcgcgagtcatggacagctgcgacacctgattacaggggccgtggctatttggccgatttcagcgccaccgtagcccaggccaatttcggctgcgtcagccgagcccattatccggagtgc

SEQ ID NO: 285584 - DNA, 208 bp, Unknown
  Bacterial polypeptide expressing nucleotide sequence isolated from the Sargasso Sea
atgtgaagaactcagccccacacaatccataataaaaccgctctcctctcctatcaaaaaaactggacatctacaaatattaaaaggcaacctagctcctggcggtgcagttgctaaaatcactggaaaagaaggcctaatgttcaaaggacctgcgagagtttttgactcagaagaaacgatgcttgagggattacgcgagggtaag

SEQ ID NO: 285585 - DNA, 586 bp, Unknown
  Bacterial polypeptide expressing nucleotide sequence isolated from the Sargasso Sea
atgaaaaaatttaacaaaaaaaaattacctagtagacatacaacattaggtccagataaagcatttcaaagatctttttattatgcaatggatttaaccgaaaaagatgttgcaaaacctttcgttggtgtcgtttcgacttggaatgaggcagcgccatgcaatattgctttaatgagacaagctcaatctgttaaaaaaggagtttatcaatcaggtggtacaccaagagagttttgcactattactgttactgatggtattgcaatgggtcacgagggtatgaaatcttcattaatttctagagatgtaatcgcagactctactgagttaaccgtaagaggacattgttatgatgcattagtgggacttgcaggatgcgataaatcattaccaggattaatgatgtctatggttagacttaatgttccaagtgttttcatttatggaggttcaattttgccaggtagatttaatggtaaagatgtaaccgttgttgatgtaattgaaggtgttggtaaatatcattctggtaaaatgtcattgcatgcacttagaaaattagaacttaaagcttgtccaagtg

SEQ ID NO: 285586 - DNA, 172 bp, Unknown
  Bacterial polypeptide expressing nucleotide sequence isolated from the Sargasso Sea
tgatgaaactcttcttgatggtggttttttacatggtgattgtataacagttacaggaaaaactattgaacaaaatttgaaagacactgctttttccaatagagcaagatgtaatctatcctgttaccaatcctttgtccaaaactggaggtgtagtaggtttaaagggtaa

SEQ ID NO: 285587 - DNA, 864 bp, Unknown
  Bacterial polypeptide expressing nucleotide sequence isolated from the Sargasso Sea
gatgcttcatgcacccgaattatcaagagctgctggatattcgaattttaatagagacattatgagtgctagcgaatttaattatttatctgagtcagttgtcccagttgtagtaaatgctcggccatttggtaagtactccatggtggatatagataaaatgggtggaatccaagtcatcgtaaaaaaccttctggatgctggattacttaatggagacacactaacttgtacaggtgaaacattatctcaacaggtagataggctatctccaagtaatcctgatgggaatgtaatttacagtgtaaaaaaaccttttaaaaaaaccggtggattaagattattaggtggtaatttatcccctgagtttagcgcaatattaaaactagccggtgttgaaggaggtctagaaaatgggatatttaaaggaaaagcaaaagtttttgatggagagcaaagtcttttaaatacactagataaccagcctgagagcttttcaaattttgatatggtagtagtgagatatgaaggaccagtgggagggcccggtatgcccgagatgttagactcaacttcaaggattacagccctatgtcgtgaaaagaatatagtgataggtttaatgacagatggtagattttcaggcggatcagtaggtttggttattggacacgtaggaccagaggctgcaataggaggtccaattgccttaataaaagacggtgatactataactgtagatctaaatgaaaataccttagtttgtaatgaattaactaatattgaaacagttaatcaacgcaaagatgaatgggacaatgaatgtaataaaaataaagggatacatcctgcagttggaatttg

SEQ ID NO: 285588 - DNA, 931 bp, Unknown
  Bacterial polypeptide expressing nucleotide sequence isolated from the Sargasso Sea
tgccacccacaagggaaaagaaatggttctggaacaggagtttggcaattagatgctgatttaaatgctggtctaattacagaagaagattttatagcagctgaaatagcaatgagtcgctctaaaggtaattgtatgactatgggaactgcatcaacaatgggaagtatggttgaagctttaggtatgtctttacctcataacgctgcaataccagcagttgatgctagaagatatgcacttgcatatatgtcaggcaaaagaattgtagaaatggtcaaagaaaatttaataatgtcaaaaatattaaataaaaaatcttttgaaaatgcaattaaagtcaatggagcaattggaggttcgaccaatgctgtaattcatttagctgctatcgcaggcagaatggaaatagatttaagtttagatgattgggagagatgtggaaaaaatattccaactcttgtcaatcttcaaccatcaggaaagtacttaatggaagatttttattatgcaggaggtttgcctgcagtgatcaagcgtttgcttgaaaaagatttgatttataaggatgctcttaccgtgaatggtaaaacaataaatgaaaacaacttagaatcagcttgttggaatgaagatgtaatcagatcatttgataatcctgtaactaaagatggtggaattaaaattttaaaaggaaatattgcacctgatggtgcaattcttaaaccttcagctgcttcaccacacttgatgcagcatactggaagggctgttgtttttgaaagtatagaagaatttcatgataaaattcatgatcctaatttggatgttgataaaaattgcattttggttttaaaaaattgtggacctaaaggttatccaggaatggcagaagtgggtaatatgattttacctcaaaaaaattcttaaa

SEQ ID NO: 285589 - DNA, 502 bp, Unknown
  Bacterial polypeptide expressing nucleotide sequence isolated from the Sargasso Sea
gtgatcgtgcgctacgaggggccgagtggtgcaccgggtatgccggagatgctggactccacatcccggatcaccaccttgtgccggcaaaaggacataacaattgctttgatgaccgacgcccgattttccggtggctcggtgggtctggtgattggacatgtaggcccggaggctgcactgggtggacctattgctctggtggaagatggagacgagatcgtggtcgacctcagcagtaatgagctcaattgcaccgccctcgatgatcccgccgtgtatgcggagcgtaagagtgcttgggacaaagtcctggctgacaaccagggtttgcacccctcgtgtggtgacgtcgatacccggttgctgaatcgtatgcggcgctctgccgtgtcagcggtctatggcgccggcatgcaccccgatcgcgagctctgggtgagcgagccgcgggcgcccgtgcaaactggcttcgtgccccaaaatcgctggcgggcgtaac

SEQ ID NO: 285590 - DNA, 384 bp, Unknown
  Bacterial polypeptide expressing nucleotide sequence isolated from the Sargasso Sea
aatgaaaaaatttaataagaaaaaattaccaagtagacacacaacaataggtgctgataaagcgccccaaagatcattttattatgcaatggatttaacagagaaagacgttgctaagccatttgttggagttgtatcaacatggaatgaagctgcaccctgtaacattaatttaatgaaacaggcacaatctgtaaaaaaaggtgttcaagcaactggtggaaccccaagagaattttgtacaattactgtaacagacggaattgcaatgggtcatgagggaatgaaatcatctttgatttcaagagatgtgattgcagactcaacagaactaactgttagaggtcattgttatgatgcattagttggattagctggatgtga

SEQ ID NO: 285591 - DNA, 793 bp, Unknown
  Bacterial polypeptide expressing nucleotide sequence isolated from the Sargasso Sea
gtggaagttttatatgggtacccaattgatggagttatccttacaacaggatgtgataaaactactccagcagctttgatggcagctgcaacggtaaacattcctgcaatagttttatcaggtggtccaatgttagatggagtttacaaaggaaaattagctggttcaggaatggtagtttgggaagcaagaaaaatgttggccaaaggagaaattaaatacgaagaatttatggacatggttgcatcttccgcaccaagtgctggacattgtaatacaatgggaacagcttcttcaatgaactctgttgctgaagcattaggtatgtctttaccagggggcgcagttattccagctccttacagagaaagagaacaaatttcttatgaaacaggaaaaagaattgttggaatggttcatgaagatttaaccccatcaaaaattatgacacgtaaagcttttgaaaacgcagtcgtagttgcaagtgccattggcggatcgagtaactgcacagctcatttaagtgctattgcaaaacatatgggaattaaatttgatctttcagattggcaaaaacttggccacaacattcctttattggtgaattgccaacctgcaggagaatacttaatggaaagttttcacagagctggagcaatacctgcagttatgaaagaattaattaaaaacaaaaaaattcatacaaacataaagacagttacaggaaaaactgtaggtgaaaacttgagaaagaaagttgatgtagacagcaaagtaattaaatcatttaaga

SEQ ID NO: 285592 - DNA, 855 bp, Unknown
  Bacterial polypeptide expressing nucleotide sequence isolated from the Sargasso Sea
agctacagttaatattccatctattgttttatcaggaggcccaatgctagatggaaattataaaggtaaactggcaggatcaggaacaattgtttgggaagctagaaaacttcttggcaaaggtaaaattaactatgaagaatttatggatatggtttctgctgcagctccaagcataggacactgcaatacgatgggaacagcatcttcaatgaattctgttgctgaagctcttggtatgtctctaccaggatgcgctgtaatacctgctccttacagagaaagagaacagatctcattcgaaacaggaaagagaatagttggaatggtgcacgaaaatcttaaaccatctaagattatgacgcgtaaagcttttgaaaatgccgttattgttgcaagtgcaataggaggatcaagtaattgtactactcacttaattgcaatagctaaccatatgggtattaaatttgatttatctaattggcaaaaactaggtcataaaattcctttattagttaattgtcaaccagctggtgaatatttaatggaaagtttttatagagcaggaggaataccggctataatgaaagaactaattagaaataaaaaaattcatacaaatatcatcacagtaactggaaaaacagttggagaaaatttaaagaaaaaaatacaaattgatagaaaagtaattaaaagttttaaagataacctatccgaaaaggcaggatttttaattatgaaaggaaactttttttcatctgcggtaatgaaaacatcagttataagctctgaatttagagaaagatatttatctaatccgggccatctgaatgtatttaaaggaaaggcagt

SEQ ID NO: 285593 - DNA, 727 bp, Unknown
  Bacterial polypeptide expressing nucleotide sequence isolated from the Sargasso Sea
ggacaggttatttactcagtaaagaacccatataaagatacagggggcttgagagtgttaggagggaatctatcccctgaacacagtgcgatattaaagctagcaggcgttgaaggcggcctagaaaacaatgttttcagtggaagagcaagaatttttgatggagagcagtctctcttagatactctagacaaaacaccagaaatttttaaaaactttgacatgattatagttcgatacgaagggcctgttggagggccaggaatgcctgaaatgctggactctacttcgcggatcacaactctgtgcagagaaaataatatagtggttgccttaatgacagatggcagattctccgggggttctgtaggcttagttatcggacacgtaggacctgaagcagcagtcggcggaccaattgcactcattgaggaaggagatgaaattattgttgatttaaacaaaaatgaaattaattgtactcctctacaagacacaaatgcgtataatcagcgaaaggctacttggcaatctaccgttgataacaacaatggaacccacccttcggtaggcgaagcgaatacaagactgctgaataaaatgcgctgtacagctgtttcagctgtttacggagcaggaatgcatcctggtagggaaatatttgtgaacgaaccccgaacagggtcagtatcagaatttaaaccaagcaataaatttagaagctaga

SEQ ID NO: 285594 - DNA, 920 bp, Unknown
  Bacterial polypeptide expressing nucleotide sequence isolated from the Sargasso Sea
catgaactcagttgcagaagcattgggcatgtctttaccagggggtgcagttattccagctccttatagagaaagagaacaaatttcttatgaaacaggaaaaagaatcgttggaatggtttatgaagatttaacaccatcaaaaatcatgacacgtaaagcttttgaaaacgcagtagtagttgcaagtgctattggtggatcaagtaactgcacagctcatctaagtgctattgcaaaacatatgggaattaaatttgatctttctgattggcaaaaacttgggcacaacattcccttattagtgaattgccaacctgcaggagaatacttaatggaaagttttcatagagccggagcaatacctgcggtaatgaaagaattaattaaaaacaaaaaaattcatacaaaaataaaaacagttacaggtaaaactgtaggagaaaatttaagaaagaaagttgatgttgatagcaaagtaattaaaacatttaagaatgcattgactgaaaaagctggatttttagttatgaaaagtaactttttctcatctgcaatcatgaaaacatctgtaattagcaaagattttagagatcaatatttatcaaatcctaaacacccaaatgtttttgagtgtaaagctatagtttttgagggtcctgaggattatcataaaagacttaatgataaaaaattaaaaatagatgaaaactctctgttaattattagaggttgcggccctgttggttatcctggatcagctgaagtagttaatatgcaaccaccagacagattattaaaaaaaggaataagacatttaccaactttgggggatggaagacagagtggaacatcagaaagcccatcaatacttcatgtttcaccagagtcagcagtaggtggagatttaggaattgtta

SEQ ID NO: 285595 - DNA, 406 bp, Unknown
  Bacterial polypeptide expressing nucleotide sequence isolated from the Sargasso Sea
aatgtggaaatttaataaaaaaaaattacctagtaggcatacttctataggtccagataaagctccacaaagatctttttattatgcaatggatctaacagaaaaagacgtagcaaaaccatttgttggcgttgtttcaacttggaatgaggctgctccttgtaacattaatttaatgaaacaagcccaatctgttaaaaagggtgttcattcagcaggcggcacgccaagagaattttgcacaattacagtaacagacggtattgcaatgggtcacgaaggaatgaagtcttccttaatatcaagagatgtaatagcagattcaacagaacttacagttagaggtcattgttatgatgctttagttggtttagctggttgtgataaatcattaccgggtcttatg

SEQ ID NO: 285596 - DNA, 469 bp, Unknown
  Bacterial polypeptide expressing nucleotide sequence isolated from the Sargasso Sea
atgaaattcaataaatccaagctaccaagtagacatgtatcagttggtgtaaagagtgctccccatagatcgatgtattatgcaatgggtttaaaaaatgaagacatccaaaaaccttttgtcggagttgctacaacatggaatgaggctgcgccatgtaatataaccctttcaagacaagcacaatcagcaaaaaaaggtgtaaaaattgcaggaggcactccaagagaatttaccacaattactgtaacagatggaatagcaatgggacatgctggaatgaaatcatcactaattagtagagaagtaatagccgactccgtggaattaactatgagaggacattgttatgatgcgcttgttggcttagcaggttgtgataaatctttgccaggcttaatgatggtaatgttaaggctaaatgttccttcagtatttatttacgggggttcaatactccccaggtagc

SEQ ID NO: 285597 - DNA, 896 bp, Unknown
  Bacterial polypeptide expressing nucleotide sequence isolated from the Sargasso Sea
catgaactctgttgctgaagcattaggtatgtctttaccagggggtgcagttattccagccccttatagagaaagagaacaaatttcttatgaaacaggaaaaagaatcgttgggatggttcaagaagatttaaccccatcaaaaattatgacacgtaaagcttttgaaaatgcagtcgttgttgcaagtgcaattggtggatctagtaattgtacagctcatctaagtgctattgcaaaacatatgggaattaaatttgatctttctgattggcaaaaactcgggcacaacattcctttattggtaaattgccaacctgcaggtgaatacttaatggaaagttttcacagagcgggagcaatacctgcggtaatgaaagaattaattaaaaacaaaaaaattcacacaaacataaagacggttacaggaaaaactgtaggtgaaaacttaagaaagaaagttgatgtagataacaaagtaattaaatcatttaagaatgcgttgactgaaaaagctggttttttagttatgaaaagcaactttttctcatctgctattatgaaaacatctgtaatcagtaaagaatttagagatcaatatttatcaaatcctaaacatccaaatgtttttgagtgtaaagcaatagtttttgaaggtcctgaggattatcacaaaagacttaatgataagaagttaaaaatagatgaaaactctctattaattattagaggctgtgggcctgttggttatcctggatcagctgaagtagttaacatgcaaccaccagacagattattaaaaaaaggaataagacatttaccaactttgggtgatggaagacaaagtggaacatcagaaagtccatcaatattacatgtttcaccagagtctggca

SEQ ID NO: 285598 - DNA, 904 bp, Unknown
  Bacterial polypeptide expressing nucleotide sequence isolated from the Sargasso Sea
tcgacaaatgttttacttcatgcgcctgaaattgcaagatcagcaggatactctgattttgagagagacatcatgaatatgaaagagtttaatgatttatctcaaaatattgttccagttgttatagatgcaaggccctttggtaaatactctatggttgatattgatgaaaaaggtggaatacaagtgataattaaaaatttatttgattccggtctgttaaatggcgacactttaacttgtacaggtgaaacacttagtgaacaagtattaagattaaatcctaacagcccagacaataaagtaatatatcatgttgagagtccattcaaaaaaactggtggattaagacttcttggtggaaatttgtcacccgaaaatacagctatactgaaattagctggtgttgaaagagggcttgaaaataatatattcaaagggaaagcaagaatatttaatggtgagaaaaaactgctagaaaaattagataatgatccagatttttttaatgacttagatatgattattgtaagatatgaaggacctgtgggtgcgcctggtatgcccgaaatgttagacccaacctcaagaattactactctatgtagacaaagagatataacattagctttaatgacagatgcaagattttctggtggttctgttggtttagttattggtcatgttggccctgaagctgctctaggtggcccaatcgctttagttgaagagggtgatacaattgaagcaaatttgaatacaaatgaacttaattgtattgaacttcaagataaagaaacatttttatctagagaaaaaaaatggaaagaggaagtagagaaaaatggtgggattcatcctttagttggagaagtagacacccgcttattagctagaatgagaa

SEQ ID NO: 285599 - DNA, 298 bp, Unknown
  Bacterial polypeptide expressing nucleotide sequence isolated from the Sargasso Sea
tatgcctaaaattaataagaaaaaattacccagtcgatatacttctttgggaccagatagagcaccacaccgatccttttattatgcaatgggcgaaactgaagaagatgtagcaaaaccttttgtaggagttgtttcaacttggaatgaagcagctccctgtaacacagctttaatgagacaggcacaatcagttaaaaaaggtgtcaagcaatctggtggaacaccaagagaattttgcacaataacagtcactgatggtatagcaatgggtcatgaaggaatgaatcatctttaa

SEQ ID NO: 285600 - DNA, 928 bp, Unknown
  Bacterial polypeptide expressing nucleotide sequence isolated from the Sargasso Sea
gatagaaacttatcatatttgtctttggttgagatactttacggatacccacttgatggagttatacttacaactggatgtgataaaactaccccagcagcgttaatggcagctgcaacagttaatattcctgcaattgttttatctggtggtccaatgcttgatggaaattataaaggtaagaaagctggtgcaggaaccattatttgggaggcaagaagattacatgctaagggagaaattaattacgaagaatttatggatatggcggcagcatcttcaccaagccctggtcactgtaatacaatgggaacagcttcatcaatgaattctgttgctgaggcattgggaatgtctttaccaggatgtgcagtaataccagctccctataaagaaagagaacaaatttcttttgagactggatctagaattgtaaaaatggttcatgaagatttaactccttcaaaaattatgacaaagaaagcttttgaaaatgcagttatagttgcaagtgctataggagcatctagtaattgtactacacatttaattgctatcgcaaaacatatgggtgtaaaatttgatttatcgaattggcaaaagcttggccacaaaatacctttattagcaaactgccaacctgcaggtgaacatttaatggaaggtttttacagagccggaggtataccagcaatcatgaaagaattaatgaagaataataaaattcatcaaaacttaattactgtaactggtaaaacagttgcgcaaaatttaagaaaaaaaatcgatgtagatagagatgtgattaaaacttttaaagataatttgactgataaggcagggtttttagttatgaaagggaattttttttcatcagcaattatgaaaacctcagtgattagtaaagagtttagagaaaggatattat

SEQ ID NO: 285601 - DNA, 775 bp, Unknown
  Bacterial polypeptide expressing nucleotide sequence isolated from the Sargasso Sea
gtgatccacggttatcccatagatggcgtcgttctaaccactggttgcgataaaacgactcctgcaatgttgatgggtgcagcgacagtagacttgccagctattgtcctttcgggtggcccaatgcttgatgggtggtggaatggtcagttagctggatcaggaatgatagtttgggaaagccgtagattgcttgctgacggaacaatcgattatgaagaattcatatcaagagtttgcgcatctgctccttcgcttggacactgcaatacgatgggaacggcttccacgatgaattctttggcggaagctttggggatgagtcttcctggctgtgcagccatcccagcaccatttagagaaagaatggaaatggcctaccaaacgggaaaaagagcagttcagatggttcatgaagatttaaagccatccgacataatgacacgaaaagcatttgaaaacgctattgtggtaaattcagctatcgggggctcgacaaatgctccacctcacctacaggctattgcacgacatgtcggagttgaattagatgtcaaggattggcaaacccatggatttgatatcccacttctcgtaaacatgcagcctgcaggaaaatatttaggggagtcttattaccgcgctggaggcgtgcccgcagtgatgggagaattactatcggaaaataagcttcattctgacgtgatgactgcctccggaaacactttaggtgaaaaccttaagggcaaacgtagtttagacttgggtgtaattg

SEQ ID NO: 285602 - DNA, 795 bp, Unknown
  Bacterial polypeptide expressing nucleotide sequence isolated from the Sargasso Sea
aaatttaagaccaacagcaatgttatttagaaatcttgctattatggatgttgaagaagcaataagaggcaacccaatagatggagtagttctacttatgggttgtgataaaactacaccatcactactaatgggtgcagcaagtgttgatttaccaacaataggagtatcaggtggcccaatgctaaatggacaccatagaggagaaactattggctctggaacaggggtgtggcggttagatgcagacttaagtgcaggaaaaatcactgaagaggattttattgaagcagaaatttctatgagtcggtctaagggaaattgtatgacaatgggtacagcttcaacaatgggcagtatggtggaagctcttggaatgtcattgccaaataatgccgcaatacctgccgttgatgcaagaagatattcacttgcttatatgtcaggaaaaagaattgttgatatggtgaaagaaaacttagtaatgtctaaaattataaacaagcaatcatttgaaaatgcgattaaggttaatggagctattggtggatctaccaatgctgtaatacatttagctgcaattgcgggtagattagaaatagatttaaaattaagtgattgggaaaaatgtggcaaaaacatcccaactttagtaaacttacaaccttcaggaaaatacttaatggaagatttttattatgcaggtggagttcctgttgtaattaaaagattattagaaaaaaatttattaaacagtgattctttaaccgctaatggaaaaacaatttttgaaaa

SEQ ID NO: 285603 - DNA, 358 bp, Unknown
  Bacterial polypeptide expressing nucleotide sequence isolated from the Sargasso Sea
aatgaaaaaatttaataaaaaaaagttacctagtagacatacttctttagggcctgataaagctcctcaaagatcattctattatgccatgaacttaactgaaaaagatgttgcaaaaccattcgttggtgttgtttcaacttggaatgaggcagctccttgtaatattgctttaatgaggcaagctcagtcagttaaaaagggcgtacaatctgcaggtggtactccaagagaattttgtacaattacagtaactgacggtattgcaatgggtcacgaaggaatgaaatcttcattaatttcaagagatgtaattgcagattcaactgaattaacagttagaggacattgctatgat

SEQ ID NO: 285604 - DNA, 881 bp, Unknown
  Bacterial polypeptide expressing nucleotide sequence isolated from the Sargasso Sea
cccaattgatggagttatcctaacaacaggatgtgataaaactacgccagcagctttaatggcagctgcaacagtaaatattcctgcaatagtattatcaggtggtccaatgttggatggagtttacaaaggaaaattagctggttcaggaatggtagtttgggaagcaagaaagatgttagccaaaggagaaattaaatacgaagaatttatggatatggttgcttcgtctgcaccaagtgccggtcattgtaatacaatgggaacagcttcttcaatgaactctgttgctgaagcgttaggtatgtctttaccagggggtgctgttattccagctccttatagagaaagagaacaaatttcttacgaaacaggaaaaagaatcgttggaatggttcatgaagatttaaccccatcaaaaattatgacacgtaaagcttttgaaaatgcagtagttgttgcaagtgctattggtggatctagtaattgcacagctcatctaagtgctattgcaaaacacatgggaattaaatttgatctttctgattggcaaaaacttgggcacaacattcctttattagtaaattgccaacctgcaggagaatacttaatggaaagttttcatagagctggagcaatacctgctgttatgaaagaactaattaaaaacaaaaaaattcatacaaagattaagacagttaccggaaagactgtaggtgaaaatttaagaaagaaagttgatgtagataacaaagtaattaaaacatttaaggatgcattgactgaaaaagctggttttttagttttgaaaagcaactttttctcatctgctatcatgaaaacatctgtaatcagtgaagaatttagagatcaatatttat

SEQ ID NO: 285605 - DNA, 316 bp, Unknown
  Bacterial polypeptide expressing nucleotide sequence isolated from the Sargasso Sea
ataacagatggaagattttctggggctacaagaggtttttgtattggacatgttggacctgaagcatctgtaggtggaccaatagctttactaagaaacggagatataattgatttagatgcgaagaaggggacaattaatgttcgtttaactaaaaaagaattagctaaaagaagaaagaaatggaaaccaaagaaaattaactttggaaatggaacactttggaaatatgcgcaaacggtcggaccagcttatttaggtgctccaactcatcctggtggtaaaaacgaagtaaaaacttacgcagatatttaat

SEQ ID NO: 285606 - DNA, 328 bp, Unknown
  Bacterial polypeptide expressing nucleotide sequence isolated from the Sargasso Sea
aatgcggaaatttaataagaaaaaactaccaagtagacatacatcgttaggtgctgatagagctccacatagatccttttattacgcaatgggcgaaactgaaaaagatgtttctaaaccattcgttggagttgtatccacatggaatgaggcagctccatgtaatattgccctaatgagacaagcacaatcagttaaaaaaggtgtacgatcatcaggaggaacgcctagagaattttgtacaattactgttacggatggtattgcaatgggtcacgaggggatgaaatcatcattaatctctagagaagtaatgcagactcggcag

SEQ ID NO: 285607 - DNA, 297 bp, Unknown
  Bacterial polypeptide expressing nucleotide sequence isolated from the Sargasso Sea
aatgtttaaatttaataaaaaaaaattaccaagtagacacacttctttaggtccagacaaggcacctcaaagatcattttactatgcaatgaatttaactgaaaaggacgtggccaaaccatttgttggagttgttacaacatggaatgaagctgcaccatgtaatattgctttaatgagacaggctcaatcagttaaaaaaggtgttaaaacctcaggtggtactcctagagaattttgcacaattactgtaactgatggtatcgctatggggcatgagggcatgaaatcatcttt

SEQ ID NO: 285608 - DNA, 430 bp, Unknown
  Bacterial polypeptide expressing nucleotide sequence isolated from the Sargasso Sea
atgaaaaaatttaataaaaaaaaactacctagtagacatacttctttaggacctgacaaagcacctcaaagatcattctattatgccatgaatttaactgaaaaagatgtttcaaaaccatttgttggtgttgtttcaacttggaatgaagctgctccttgcaatatagccttaatgaggcaagctcaatcagtgaaaaaaggtgtacaatcagcaggtggcaccccaagagaattttgtacaattacagtaacagatggtattgcgatggggcatgagggaatgaaatcttcattaatttcaagagatgtaattgctgattcaactgagttaacagttagaggacattgttatgatgcattggttggtgttgccggttgtgataaatctttaccaggattaatgatggcaatggtaaggttaaatgttc

SEQ ID NO: 285609 - DNA, 490 bp, Unknown
  Bacterial polypeptide expressing nucleotide sequence isolated from the Sargasso Sea
agatatgagggtcctgttggtggacctgggatgcctgaaatgttggattcaacctcaaggatcactgctctttgtagagaaaaaaatatagttgttggtctgatgactgatggaaggttttctggaggttcggtaggattagttattggtcacgtaggacctgaagcagcaattggtggtcctattgccttaattgaagagggagatgacattattgtaaatttaaattctaatgaaattaattgtattcaattatctgacaatacaacctacaagaaaagaaaacaatcatgggatgaaaaggtttctcataataatggaattcacccatctgttggttcagcagatacgcgccttcttaatagaatgagatcttctgctgtttctgcagtatatggtgctggtatgcaccccaatagacaaatttggataagtgacccaagaaattcagataaggtaaattttaaacctcaaaacaagtttaagtaat

SEQ ID NO: 285610 - DNA, 403 bp, Unknown
  Bacterial polypeptide expressing nucleotide sequence isolated from the Sargasso Sea
atgaaaaaatttaataaaaaaaagctcccaagtagacatacctcgctaggcccagataaagctccacaaaggtctttttattatgcaatgaatttaactgaaaaagacgttgctaaaccattcgttggggttgtatcaacatggaatgaagctgctccttgcaatattgccctcatgagacaagctcaatctgttaaaaagggtgtacaagcaactggaggaacaccaagagaattttgtacaattacagtaactgatggtatcgcgatgggacatgaaggaatgaaatcttctttaatttcaagagatgttattgctgattcaacagagttaaccgttagaggtcactgctacgatgcattagttggtttagcaggatgtgataaatctttgccaggtctaa

SEQ ID NO: 285611 - DNA, 865 bp, Unknown
  Bacterial polypeptide expressing nucleotide sequence isolated from the Sargasso Sea
acattgtaacactatgggaacagcttcttcaatgaattcagttgctgaagctttgggaatgtctctaccaggttgcgcgattattcctgcaacgtacagagaaagaagtcaaatatcatttgaaacaggaaaaagaattgtaaaaatggtaaatgaagatttaacaccatcaaaaataatgacaaaaaaagcatttgaaaatgccgtggtagttgcaagcgctattggggcatcaagtaattgtactacacatctaattgcaattgcaaaacacatgggtattaaatttaatttatcaaattggcaaaagcttggccacaaaattcctttattagccaattgccaacctgctggagaatatttgatggaagatttttacagagctggaggtataccagcaatcatgaaagaattaataaaaaataaaaaaattaatataaattcattaacagtcacaggtaagacagtaggtcaaaacctaaaaaataagataaaagttgacagaaatgttataaaaacttttgaagaaaatataactgacaaagcaggatttcttgtaatgaaaggaaatttcttttcatcagcaataatgaaaacttcagtaatcagtagagagtttagagaaagatatttattaaatcctaagcatcctaatatttttaatggtaaagctgtagtttttgagggtccagaagattatcatgacaggatcaacagcaagaaactaaaaatagatgaaaattctattttaattataagaggttgcgggcctgttggataccctggttctgccgaggtggttaatatgcaaccacctgatagactactaaaaaaaggtattaatgcacttccaactcttggagat

SEQ ID NO: 285612 - DNA, 871 bp, Unknown
  Bacterial polypeptide expressing nucleotide sequence isolated from the Sargasso Sea
tcggccctttcaccaagcggaactcctgcctggcatgacatcgcacgtcgttctgcacgtgctttagtgatgatggaacatcgtggagtaacgtccacggatatcttggtagacgccgcttttgagaatgcaatggcggttcatgctgcttgcggaggttcaacgaacctgttgttgcacatgccagcgattgcccacgccgccgggcgaaaacgtatgactgtcgaagactggaacagagttaatttagatgtacccagattggttgatgttttaccgaacggaccagtcggtcaccctactacccagctgtatgctgcaggtggtgttccggaggtgatgctgcacctgcgaagtttgggtcttataaataccgatgttcttacagctacaggtcagacacttgatgagaaccttgattggtgggaagactctgagcgacgccatgatgtccgaaagtatctcaaagacgtggatggggtagaccccgaggacgtcatcatgtcgccggatcgtgcaagtgaaaagaaacttacaagtaccgtgacatttcctaggggcaacattgcacccgaaggttctgtaatcaaaagtactgcaatagatccttcagttgttgacagagacggcgtgtatagaaaagttggtcctgctcgagtatttcgatcagagcgtgctgcgatgggtgcgattaaatctagagatgacgaacataaaattaaggcaggtgacattatggtcgtcacctgtggtggtccccttgggacaggtatggaagaggtgtatcagttaacagccgcgctcaagcatctttcatatggcaaacacgtagcgctgataactgatgcaagattttctggtgtatcaacca

SEQ ID NO: 285613 - DNA, 307 bp, Unknown
  Bacterial polypeptide expressing nucleotide sequence isolated from the Sargasso Sea
tatgtctaaaattgataaaaaaaaattacctagtcgtcacacttctctaggacctgatagggctccacacagatctttttattatgcaatgggcgaaacagagcaagatgtagctaagccttttgtaggtgttgtttcaacttggaatgaagcggctccctgcaatacagctttaatgagacaggctcaatcagttaaaaaaggtgtcaaacaatttggtggaactccaagagaattttgcacaattacagtaaccgatggtatagctatgggtcatgaaggaatgaaatcatctttgatttcaaga

SEQ ID NO: 285614 - DNA, 328 bp, Unknown
  Bacterial polypeptide expressing nucleotide sequence isolated from the Sargasso Sea
atccgcgattatgggcaaaggtttaggcgaggatgttgcactgattactgacggcagattctctggtggttcccatggatttgtggtgggccatgtgacgcctgaagcgtatgacggcgggccgatagcagtcgtgagagatggagatccaatctctatcgatgccgagtcaaacaaaattacactcgaactcagtgataacgagatagaagtcagacttgctgaatggaaaaaaccttctccacgctacaaacgcggagtattggcaaagtacgctgcttcagtagcttcggcctcggaaggtgcagtcacagataaatatctctaa

SEQ ID NO: 285615 - DNA, 394 bp, Unknown
  Bacterial polypeptide expressing nucleotide sequence isolated from the Sargasso Sea
aatgaaaaaatttaataaaaaaaatttgccaagtagacatacaactttaggtccagataaagcaccacaaagatcattttattatgcaatgaaacttacagaaaaagatgttgctaaaccatttgtaggtgttgtttcaacatggaatgaggctgcaccatgtaacatagccttaatgagacaagcacaatcagtcaaaaaaggcgtttatcaaagaggaggaacacctagagaattttgcactattacagtaacagacggtattgcaatgggtcatgaaggaatgaaatcctcattaatttcacgtgacgtaattgcagattctactgaattaacagttagaggacattgttatgatgcattagttgggttggctggatgtgataaatcttta

SEQ ID NO: 285616 - DNA, 127 bp, Unknown
  Bacterial polypeptide expressing nucleotide sequence isolated from the Sargasso Sea
catgcttcgctccgacgccgtcaccaaggggattcagcggtctcccaaccgcgccatgttgcgggccgtgggcattggagacagcgatttcggcaagcccatcctgggcatcgccaacggctacagc

SEQ ID NO: 285617 - DNA, 451 bp, Unknown
  Bacterial polypeptide expressing nucleotide sequence isolated from the Sargasso Sea
aatgcggaaattcaataaaaaaaaattacctagtagacacacttcattaggtccagataaagcgccacaaagatctttttattatgcgatggatctaacagaaaaagatgtagcaaaaccctttgttggtgttgtatcaacttggaatgaagctgcgccttgtaacattaatctaatgaaacaagcccaatctgttaaaaaaggtgttcatgcagcaggcggaacaccaagagaattttgcacaattacagtaacagatggaattgcaatggggcatgaaggtatgaagtcttcattgatatcaagagatgtaatagcagattcaactgaacttactgtgagaggtcattgttacgatgcattagttggtttagctggctgtgataaatcattacctggtcttatgatgtctatggttcgattaaatgtaccaagtgtatttatttatggt

SEQ ID NO: 285618 - DNA, 541 bp, Unknown
  Bacterial polypeptide expressing nucleotide sequence isolated from the Sargasso Sea
atgaaaaaatttaataagaaaaaattaccaagtagacatacaacaataggtgcagataaagcccctcaaagatcattttattatgcaatggatttaacagaaaaagatgtagcaaaaccatttgttggtgttgtttcaacatggaatgaagcagctccttgtaacattaatttaatgaagcaagctaaatcagttaaaaaaggtgttcaagcaaccggtggaacgccaagagaattttgtactattacagtaacagatggaattgcaatgggtcatgaaggaatgaaatcatcattaatatcaagagatgtaattgcagactcaacagaacttacggttagaggacattgttatgatgcattagttggattagcgggctgtgataaatcattacctggtttaatgatgtcgatggttcgtttaaatattccaagcgtatttatatatggtggatcaattctccctgggagatttaatggaaaagatgtgactgttgtagatgtatttgagggagttggaaaatatacatcaaaaaaaatga

SEQ ID NO: 285619 - DNA, 507 bp, Unknown
  Bacterial polypeptide expressing nucleotide sequence isolated from the Sargasso Sea
actgcctagtcgtcacgtaactgagggtccagaacgtgcgcctcacaggagctatctttacgctatggggcttacagaaaagcagatccatcagccacttgttggtgttgcgacgtgctggaatgaagccgctccgtgtaatatttcgctatcacgtcaggcccaagcagccaaacgaggtgttgccgaaaatggtggaaccccgagggaattcactactattacggttacggatggtatcgcaatggggcatgccggcatgaagtcatctctggtttcaagagaaattattgcggattccgtcgagttaacgatgcgcgggcattgttacgatgccctggttggacttgcaggttgtgataaatctctgcccggaatgatgatggccatggttcgtcttaacgttcctagtgtgtttatttatggtggaacgattttgccggggcgttttaaaggccgcgacgttacggttgttgatgtttttgagggtgttggaatgcatgcggc

SEQ ID NO: 285620 - DNA, 399 bp, Unknown
  Bacterial polypeptide expressing nucleotide sequence isolated from the Sargasso Sea
aatgcggaaatttaataaaaaaaaattacctagtaggcatacttctttaggtccagataaagctccacaaagatctttttattatgcaatggatttaaccgaaaaagatgtagcaaaaccatttgttggcgttgtttcaacttggaatgaggctgctccttgtaacattaatttaatgaaacaagcccaatctgttaaaaagggtgttcattcagcaggcggcacgccaagagaattttgcacaattacagtaacagacggtattgctatgggacatgaaggaatgaaatcttcgttaatttcaagggatgtaattgcagattcaacagaacttacagttagaggccactgttatgatgctttagttggtttagctggttgtgataaatcattaccggg

SEQ ID NO: 285621 - DNA, 355 bp, Unknown
  Bacterial polypeptide expressing nucleotide sequence isolated from the Sargasso Sea
aggtgggcctggaatgagagagatgttacaaataactgccgcgatgaaaggagcaggtctaggtaaagatatattgcttatcacagatggaagattctctggtgggacgactggtttatgtattgggcatgttactcctgaaagtttcgacaatggaccgattgcaatttgtgaaactggtgatgaaataagcttggacttaaaaaaaagggaactaaatctaaatgttgatgaagatgaaatagaaaaaagattgaaaaaatataccaatcctgaaccaaggtacaattctggagttctaaataaatattctaaattagttacaggtgctgataggggagctgtaacaggttag

SEQ ID NO: 285622 - DNA, 443 bp, Unknown
  Bacterial polypeptide expressing nucleotide sequence isolated from the Sargasso Sea
aatgccaaaatttaataaaaaaaaactacctagtagacacacatctgttggaccagataaggctccccaaagatcattttattatgcgatgaacttaactgaaaaagatgttgcaaaaccatttgttggtgttgtttcaacttggaatgaggcagctccttgtaacattgctctaatgagacaagcacagtcagttaaaaaaggtgtacaatctgcaggtggtactccaagagaattttgtacaattacagttacagacggtattgcaatgggccatgaaggaatgaaatcttcattaatttcaagagacataattgcagattcaactgaattaacagttagaggtcattgttatgatgcattagttggtgttgctggttgtgataaatctttaccaggttttaatgatggcaatggtaaggttaaatgtaccaagtgttttt

SEQ ID NO: 285623 - DNA, 160 bp, Unknown
  Bacterial polypeptide expressing nucleotide sequence isolated from the Sargasso Sea
gggtttgacagttacagggaaaactatgaaagaaaatttaactaacattaagtttaatactaatcaaaaagttttaagagaatataataatccactttctccagaaggtggagttgtcggattaaaaggaaacttagctccagacggagcaattgtaaaa

SEQ ID NO: 285624 - DNA, 668 bp, Unknown
  Bacterial polypeptide expressing nucleotide sequence isolated from the Sargasso Sea
ctagatggagtttataaaggtaaattagctggttcaggaactgttatttgggaagcaagaaaacttttagccaaaggtgaaattaattatgaagaatttatgaatatggtagcatcttcagctccaagtgtagggcattgtaacactatgggtacagcatcatctatgaattcagtagctgaagctcttggtatgtcactaacaggatgtgctataatacctgctccttatagagaaagagaacaaatttcttttgagaccggaaaaagaatagttggaatggttcatgaaaatttaactccttcaaaaataatgacacgaaaagcatttgaaaatgctgttgttgtagcaagtgcgattggaggttcaagtaattgtacaacacatttaagtgctattgctaaacatatgggcataaaatttgatttatctgactggcaaaaattaggacataaaattccactacttgttaattgtcaacctgctggagaatatttgatggagagtttttatagagcgggaggagtaccagctgtaatgaaagaattaattaaaaataaaaaaattcacacaaatataaaaacagtttcaggaaaaacagttgggcagaatttaaaaagaaaaattgatacaaacaaaaaagtaattaaatcttttaaagattgttt

SEQ ID NO: 285625 - DNA, 351 bp, Unknown
  Bacterial polypeptide expressing nucleotide sequence isolated from the Sargasso Sea
aatgcggaaatttaataaaaagaaattacctagtaggcatacttctttaggtccagataaagctccacaaagatctttttattatgcaatggatttaacagaaaaagatgtggcaaaaccatttgttggcgttgtttcaacctggaatgaggcagccccatgtaacattaatttaatgaaacaggcccaatctgttaaaaaaggtgttcatgcagcaggtggtacaccaagagaatttttgcacattacagtaacagacggtattgcaatgggtcacgaaggaatgaagtctttcttaatatccagagatgtaatagcagattcaacagaaactacagttagaggtcattg

SEQ ID NO: 285626 - DNA, 907 bp, Unknown
  Bacterial polypeptide expressing nucleotide sequence isolated from the Sargasso Sea
tacttatcaatggtagaggttttatacggatatccaatcgatggagtcgtattaacaactggatgtgataaaactactcctgcagctttaatggcagctgcaacagtaaacttacctgctatcgttttatccggtggaccaatgttggatgggaattacaaaggtaagttagcaggatcaggaacaattgtttgggaagctagaaaacttctaagtaaaggaaaaattaattatgatgaatttatggatatggtttcagcagcagcaccaagtatcggccattgtaatacaatgggaacagcatcgtcaatgaattctgtagcagaagcattaggaatgtctctgcctggatgtgctgtaatacccgctccttacagggagagagaacaaatttcttttgatacaggaaaaagaattgttgggatggtacatgaagatcttaagccatctaaaattatgactcgtaaagcttttgaaaatgcagttattgtagcaagcgctattggagggtcaagcaattgcacaacacatttaactgctattgctaaacacatcggtattaaatttgatttatctaattggcaaaaattaggacatgaaattcctttattagtaaattgtcagccagcaggtgaatatttaatggaaagtttttatagagcaggaggaataccagctataatgaaagaattaattaaaaataaaaaaatacatacaaatataatcacagttactggaaaaactgttaaagaaaatttaaaaaaaaaaatagaagttaatagaaaagtaataaaaacttttgaagaaagtcttactgaaaatgcaggttttttagttatgaaaggaaacttcttctcatcagcaataatgaaaacttcagttattagctctgagtttagagaaaggt

SEQ ID NO: 285627 - DNA, 361 bp, Unknown
  Bacterial polypeptide expressing nucleotide sequence isolated from the Sargasso Sea
ggcccagtaggtggacctggaatgagggagatgcttagtcctactgcagcgattatgggcaaaggtttaggaggtaaggtcgcttttttgactgatggaagattttctggtgggacccatggtttcgtagttggccatatatctccagaagcacatctgggtggccctttagctttaatagaagagggcgatgtaatatctattgatgcaaataaaaatgaaataaatttaatggtggaggatcaaatccttttacaaagaaaaaacaagtggcaagctccaaaaaatgaaaatgttggagtattagccaaatactctaaaatggtatcttcagcttcaaaaggagcctttacaagctaaa

SEQ ID NO: 285628 - DNA, 823 bp, Unknown
  Bacterial polypeptide expressing nucleotide sequence isolated from the Sargasso Sea
atggccgcctaccggcaacttgaacatttcgtcgaaggtcccagcaaccaactggcttaccgatcggtgtgtcgactcctcgaagatcctcagcatgcctcccccatgtcgcccttgtttttgcatggggattgtggggtaggcaagacccaccttctgcaaggggcggttcgtgccgcttcggctcaattcagccggatccgctactactccgctgagcaattcacgaacgaatacatccgtgccgtccgtgagcatgatttggaacggttccgacaacaattgcgaacgttggatctcttggccatcgatgacgtgcacttcttctctcataaagaaggcacgcaaaacgaattcctgcacatgctggacgcctgcttgctccacggcaccaaactgttgctcgctggtgatgggcacccaaaccgcttcaaagccttttctcgggcgctcagttctcgatgcgtgtccggcatggtggtgcacatcgagtcccctgatgtcaatacccgtttggcaatcgtcaatcacttggccagccgacgaggtctgaccctcgaacctgccgcagccgagttggtggtagaacgcacactgggtacggttcgagaactcgaaggcgcgctcacccgacttgatgccatggcccgactggtgggttccggtgagaccatcggtttgcatttggtcacgcaaacccttggcgctgctgccgctccacgcccggtccgaccagccgatgtggtcaacgcggtttgcgaagctttgaacatcccccaccacgaactgcttgggaacagccggcatcgacgcattacgctcg

SEQ ID NO: 285629 - DNA, 777 bp, Unknown
  Bacterial polypeptide expressing nucleotide sequence isolated from the Sargasso Sea
tagaggtaacccaattgatggtgtagttcttttaatgggatgtgataaaacaacaccctcattattaatgggagcaggtagtgttgatctaccaacaataggtgtgtctggaggaccaatgttaaatggtcaacataaaggtgagataataggttctggaacaggtgtttggaaattagatgcagatttaaatgcaggactgattacggaagatgaatttattgaagcagaaatttcaatgagtcgttcaaaaggtaattgtatgacaatgggaacagcttcaactatgggtagcatggtagaggctcttggaatgtctttaccaggtaatgctgcaataccagctgtagattctagaagatatacattagcacatatgtcaggaaagagaattgttgaaatggttaaggataatttaaaaatgtctaaaattataacaaaaaaatcttttgaaaatgctattaaaataaatggcgcaattggaggatcaactaatgctgtcatccatctagcagcaatagctggcagactagaaattgatttaagtctaaatgattgggaaaagtgtgggaaaaatattccaactttagtaaatctacaaccatctggaaaatatttgatggaagatttttattatgctggaggattacctgtagtaattaaaaagctattggatcaaaaacttcttcataaagattgtattactgtaaatggaaaaactatttctgaaaataatgaaaaagcaaaatgttggaataatgaagttataaaagattt

SEQ ID NO: 285630 - DNA, 812 bp, Unknown
  Bacterial polypeptide expressing nucleotide sequence isolated from the Sargasso Sea
aatgttggatagaaatctttcttatttgtcactagttgaagttttatatggatacccaattgatggagttatcctaacaacaggatgtgacaaaactactccagctgctttgatggcagctgcaacagtaaacattcctgcaatagttttatcaggtggcccaatgttagatggagtttacaaaggaaaattagctgggtcaggaatggtagtttgggaagcaagaaaaatgttagccaaaggagaaattaaatacgaggaatttatggatatggttgcatcttctgcaccaagtgccggacattgtaatacgatgggaacagcttcttcaatgaattctgttgctgaagcgttaggtatgtcattaccagggggtgcagttattccagctccttatagagaaagagaacaaatttcttatgaaacaggaaaaagaattgttggaatggttcatgaggatttaacaccatcaaaaattatgatacgtaaagcttttgaaaatgcagtagtagttgcaagtgctattggtggatcaagcaactgcacagctcatctaagtgctatagcaaaacatatgggaattagatttgatctttcagattggcaaaaacttgggcacaacattcctttattggtgaattgccaacctgcaggagaatacttaatggaaagttttcacagagctggagcgatacctgctgttatgaaagaattaattaaaaataaaaaaattcatacaaatataaaaacagtcacaggaaaaactgtaggtgaaaatttaagaaagaaagttgatgtagataataaagtaa

SEQ ID NO: 285631 - DNA, 319 bp, Unknown
  Bacterial polypeptide expressing nucleotide sequence isolated from the Sargasso Sea
tttattacagatggaagattttctggagcaaccagaggtttttgtattggacatgtaggtccagaagcatcaataggaggtcctataggattattaaaaaatggagacataattcatatagacgcaaaaaaaggaacgattaatgttaatctttcaagaaaagagttgtcaaaaagaaagaaaaagtggaagcctaaaaaaattaattttggaaatgggacactttggaagtatgcacaaacagttggaccagcgtatctaggcgcgtctacacaccctggaggcagagaagaagttaagtgttacgcagatatttaaa

SEQ ID NO: 285632 - DNA, 833 bp, Unknown
  Bacterial polypeptide expressing nucleotide sequence isolated from the Sargasso Sea
tacgaagaatttatggatatggcagcagcatcttcaccaagccctggtcactgtaatactatgggaacagcttcatcaatgaattctgttgctgaggcattgggaatgtctttaccaggatgtgcagtaataccagctccttatagagaaagagagcaaatttcttttgagactggatcgagaattgtaaaaatggttcatgaagatttaactccctcaaaaattatgacaaagaaagcttttgaaaatgcagtcatagttgcaagtgctataggagcatctagtaattgtaccacacatttaattgctatcgcaaaacatatgggtattaaatttgatttatctaattggcaaaaacttgggcataaaatacctttgttagcaaactgccaacctgcaggtgaacatttaatggaaggtttttatcgagctggaggaataccagcaatcatgaaagaattaatgaagaataataaaattcaccaaaacttaattactgtaactggcaaaacagttgcacaaaatttaagaaaaaaaatcgatgtagatagagatgtgattaaaacatttaaagataatttgactgataaggccgggttcttagttatgaaaggaaatttcttttcatcagcaattatgaaaacttcagtaattagtaaagaatttagagatagatatttatcaaaccctaaacatccaaacgtttttaaaggaaaagcagtagtttttgaaggtccagaggattatcatgacaggatcaatagcaagaaactaaaaatagatgaaaattctattttaattataagaggttgcgggcctgttggataccctgg

SEQ ID NO: 285633 - DNA, 454 bp, Unknown
  Bacterial polypeptide expressing nucleotide sequence isolated from the Sargasso Sea
atgccaaaatttaacaaaaaaaaattaccaagtagacacacatcagtagggcctgacaaagcgcctcaaagatctttttattatgccatgaatttaactgaaaaggatgtagcaaaaccattcgtaggggttgtatcaacatggaatgaggctgcaccttgtaatatagctttaatgagacaagctcagtcagtaaaaaagggtgttaaactttcaggaggcacacctcgggaattttgtacaattacagttacagatggtattgcaatgggtcacgaaggaatgaaatcttcattgatttcaagagacgtaattgcagattccactgaacttacagttagaggacattgttatgatgctctagtaggtgtcgctggttgtgataaatcattaccaggtttaatgatggcaatggtacgattaaatgtacctagtgtttttatttatggaggct

SEQ ID NO: 285634 - DNA, 264 bp, Unknown
  Bacterial polypeptide expressing nucleotide sequence isolated from the Sargasso Sea
tatgaataaactcagatcatctgcaataacccaaggtgtgcaaagatcacctaacagatcgatgttaagagctgttggatttaatgatgaagattttaataaacccattattggagttgcaaatggatacagcaccataacaccatgcaatatgggtttaaataagttagctctaaaagctgaagagtctataaaaagatcaggtgggatgcctcagatgtttgggactataacagtaagtgatgggatttctatgggaacaga

SEQ ID NO: 285635 - DNA, 200 bp, Unknown
  Bacterial polypeptide expressing nucleotide sequence isolated from the Sargasso Sea
atgggatatcaatagaaaaccgtccgaagaagttaaagaattctattctgctgctccgggaatgattccaacaactcagcctttctcgcaaaataaaagatatccagaactggatttggatcgcgaaaacggatgcattagaggttctgatagtgcgcatagccaagacggtggattagctgtgttaaaaggcattattg

SEQ ID NO: 285636 - DNA, 1027 bp, Unknown
  Bacterial polypeptide expressing nucleotide sequence isolated from the Sargasso Sea
aaaacccctgacatgacggctttatatctggaaagatatttaaattatgttctcacaagaaaagaatgcatctctggaaatccaattataggaatagctcaatcaggaagtgatctttctccatgcaacaggcactttatgtctttgagcaaaagaataaaagatggaataagaagagcaggcggtataccaatggaatttcctactcacccaattcaagaaactggaaaaagaccaacagcaatgttggatagaaatctttcttacttatcactagtggaagttttatatggttatccaattgatggagttattttaacaacaggatgtgacaaaactactccagcagctttgatggctgcagcaactgtaaacattcctgcaatagttttatcaggtggtccaatgttagatggagtttacaaaggaaaattagctggttcaggaatggtagtttgggaagctagaaaaatgctagccaaaggagaaattaaatacgaggaatttatggatatggttgcatcttctgcaccaagtgcaggtcactgtaatactatgggaacagcttcttcaatgaactctgttgcagaagcattaggaatgtctttaccaggaggtgcggttattcctgctccttacagagaaagagaacaaatgtcctatgaaacaggaaaaagaattgttggaatggttcatgaagatttaaccccatcaaaaattatgacacgtaaagcttttgaaaacgcagtagtagttgcaagtgctattggtggatctagcaactgtacagctcatctaagtgctattgcaaaacatatgggaattaaatttgatctttctgattggcaaaaacttgggcactacattcctttattagtaaattgccaacctgcaggagaatacttaatggaaagttttcacagagctggagcaatacctgctgtaatgagggaattgattaaaaataaaaaaattcacacaaatataaagacagttacaggaaaaactgtagggaaaattaagaaag

SEQ ID NO: 285637 - DNA, 920 bp, Unknown
  Bacterial polypeptide expressing nucleotide sequence isolated from the Sargasso Sea
aaaaagaataaaagatggaataagaagagcaggtgggataccaatggaatttcctactcacccaattcaagaaactggaaaaagaccaacagcaatgttggatagaaatctttcttatttgtcactagtggaagttttgtatggatatccaattgatggagttatcttaacaacaggatgtgataaaactactcccgcagctttaatggcagctgctaccgtaaacattcctgcaatagttttatcaggtggtccaatgttggatggagtttacaaaggaaaattagctggttcaggaatggtggtttgggaagcaagaaaaatgttagccaaaggagaaattaaatacgaagaatttatggatatggttgcatcttccgcaccgagtgctggacattgtaatacaatgggaacagcttcttcaatgaactctgttgctgaagcgttaggcatgtctttaccagggggcgctgttattccagctccttatagagaaagagaacaaatttcttacgaaacaggaaaaagaatcgttggaatggttcatgaagatttaaccccatcaaaaattatgacacgtaaagcttttgaaaacgcagttgtagttgcaagtgctattggtggatctagcaactgtacagctcacctaagtgctattgcaaaacacatgggaattaaatttgatctttctgactggcaaaaactaggacacaacattcctttattggtaaattgtcaacctgcaggagaatacttaatggaaagttttcatagagctggagcaatacctgctgtaatgaaagaattaattaaaaacaaaaaaattcacactaacatcaagacagttactggaaaaactgtaggtgaaaatttaagaaagaaagttgatattgataacaaaagtaatcaaaacatttaag

SEQ ID NO: 285638 - DNA, 393 bp, Unknown
  Bacterial polypeptide expressing nucleotide sequence isolated from the Sargasso Sea
aatgaaaaagttcaataaaaaaaaattaccaagtcgacatacttcagttggtcctgataaagctccacaaagatcattttattatgcaatgaatttaacagaaaaagatgttgctaaacctttcgtagggattgtttctacatggaatgaagctgctccatgtaatattaatctaatgaaacaagcacaatttgtaaaaaaaggtgttcattcttcaggtggaactccaagagaattttgcactattactgtaacagacggaattgcaatgggtcacgaaggaatgaaatcatctttaatttcaagagacgtaatagctgactccaccgaacttacagttagaggccactgttatgatgcattagttggtttagcgggatgtgataaatctct

SEQ ID NO: 285639 - DNA, 441 bp, Unknown
  Bacterial polypeptide expressing nucleotide sequence isolated from the Sargasso Sea
aatgccaaaatttaataaaaaaaaattaccaagtagacacacttcattgggtccagataaagcacctcaaaggtcattttattatgcaatgaatttaacagaaaaggatgttgcaaagccatttgttggagttgtatctacatggaacgaagcagcaccttgcaatatagctctaatgagacaggctcaatcagtaaaaaaaggtgttagcatgtcaggaggaacacctagagaattttgtacaattacagtcacagatggaattgcaatgggtcacgaaggaatgaaatcttcattaatttcaagagatattattgcagattcaactgaattaactgtaagaggtcattgttacgatgcgttagttggggtggcaggttgtgacaaatctttaccaggtttaatgatggcaatggtaagattaaatgttccaagtgtttt

SEQ ID NO: 285640 - DNA, 618 bp, Unknown
  Bacterial polypeptide expressing nucleotide sequence isolated from the Sargasso Sea
ttacgaagaatttatggatatggcagcagcatcttcaccaagtcctggtcactgtaatacaatgggaacagcttcatcaatgaattctgttgctgaggcattgggaatgtctttaccaggatgtgcagtaataccagctccctatagagaaagagaacaaatttcttttgagactggatctagaattgtaaaaatggttcacgaagatttaactccttcaaaaattatgacaaagaaagctttcgaaaatgcagtaatagttgcaagtgctataggagcttctagtaattgtacaacacatttaattgctatcgcaaaacatatgggtgtaaaatttgatttatcgaattggcaaaagcttggacacaaaatacctttattagcaaactgccaacctgcaggtgaacatttaatggaaggtttttacagagctggaggtataccagcaatcatgaaagaattaatgaaaaataacaaaattcaccaaaacttaattactgtaactggtaaaacagttgcacaaaatttaagaaaaaaaatcgatgtagatagagatgtgattaaaacatttaaaaataatttaactgataaggctgggtttttagttatgaaaggaaa

SEQ ID NO: 285641 - DNA, 247 bp, Unknown
  Bacterial polypeptide expressing nucleotide sequence isolated from the Sargasso Sea
caaaatgtcataagagacatagatgaccctctttataaaaaaggtcatctagcgatattaaaaggtaacttagcgagcgaaggttctgtagccaaaattagcggagtaaaaaaccctgtattaacaggtcccgcaaagatttttgaaagtgaagaggattgtttaaaatcgatattaaataacgatatcaaagctggtgatgttgttgttattagaaacgaaggtcctgtaggaggaccaggtatga

SEQ ID NO: 285642 - DNA, 1735 bp, Unknown
  Bacterial polypeptide expressing nucleotide sequence isolated from the Sargasso Sea
tatgaataaaaaaaataaatatagatcttctaattggtataattctaaatcacatcgaagagatacatttattcatagaggctggatgagaaatcaaggtcatccaaaccatttatttgacgggcgtcctgtaattggtatttgtaatacttggtcagaattaacaccatgtaatggacatttcagagaaattgctgagtctgttaaaaaaggtgtttatgaggcaggaggctttcctttagagtttccagttttttcagcaagtgaatccaatttacgaccaacagctatgttgtttagaaatttagcaagtatggacgttgaagaagcaataaggggcaatcctatagatggagtagtactactaatgggttgtgataaaacaactccttcattgatgatgggagctgcaagtgttgatcttcctacaattggtgtctctggtggcccaatgcttaatggacatcatcaaggggaaacaataggttctggaacaggagtttggaaactggatgcagatttaaatgcgggcataataactgaagaagattttattaatgctgaaatctcaatgagccgttcaaaaggaaactgtatgacaatgggaactgcatcaacaatgggttcaatggtagaagcattaggaatgtcacttcctggaaatgctgcaatacctgcagtagattcaagaagatatgctttagcgcatatgtctggaaaaagaattgttgaaatggtcaaggaagatataacaatgtcaaaaattgttacaaaaaaatcatttgaaaatgcaattaaagtaaatggagcaatagggggatctacaaatgcagttatccatttagctgcaattgctggtcgaatggaaattgatttagatttagatgattggaataaatgtggggaaggtattccaacattagtaaatctacagccttcagggaaatacttaatggaagatttttattatgcaggtggcgttcctgtagttataaaaagattaatggaaaaaaaattactagatgaaaattcaatgactgttaatggaaaaacaatagctgagaataatataaattctaaatgttggaacaatgacgttataaaagaattcgaaaatccattaacaaaaaatggaggtattaaaattcttaggggtaatatcgctccaaatggtgcaattattaaaccatcagctgcatcaccagaattaatgaaacatacgggaaaagcggtagtttttgaaagcgtagaagaatttcatgaaaagattgatgatcctaatttagaagttgatgaaaattcaatattagttttaaaaaattgtggaccaaagggttatcctggtatggctgaagttggaaatatgagacttccacaaaaagtacttaagaaaggtgtgagagatatgattcgaatatctgatgctagaatgagtggaacagcctatggtacagtaatacttcatacagctccagaagctgctgttaaagggcctttagcagccgttcaaaatggtgatgaaatagaagttgatgttgatcaaggtacaatgaatttaaaagttgatgatgaaacaataaaaaatcgtctggaaaattattcacccgttgttccagaaataacaggtggttatcaaaaaatgtatgtagaacatgtgatgcaagccgacaaaggagcagatttagattttctaattggaaaaagaggtgctgaagtcaaaagacatagccactaa

SEQ ID NO: 285643 - DNA, 1249 bp, Unknown
  Bacterial polypeptide expressing nucleotide sequence isolated from the Sargasso Sea
aggagaaattaaatacgaggaatttatggatatggttgcatcttctgcaccaagtgctggacattgtaatactatgggaacagcttcttcaatgaactctgttgctgaagcattgggtatgtctttaccagggggtgcagttattccagctccttatagagaaagagaacaaatttcttatgaaacaggaaaaagaattgttggaatggttcatgaagatttaactccttcaaaaattatgacacgtaaagcttttgaaaacgcagtagtagttgcaagtgctattggtggatcaagcaactgtacagctcatctaagtgctattgcaaaacatatgggaattaaatttgatctttctgattggcaaaaacttgggcacaacattcctttattagtgaattgccaacctgcaggagaatacttaatggaaagttttcatagagctggagcaataccagctgtaatgaaagaattaattaaaaacaaaaaaattcatacaaaaataaagactgttacaggaaaaactgtaggagaaaatttaagaaagaaagttgatgtagacaataaagtaatcaaaacatttaagaatgcattaactgaaaaagctggatttttagttatgaaaagtaactttttctcatccgctatcatgaaaacatcagtaatcagcaaagaatttagagatcagtatttatcaaatcctaagcacccaaatgtttttgaatgtaaagctatagtttttgaaggtcctgaagattatcataaaagacttaatgataagaagttaaaaatagatgaaaactctttattaattattagaggttgtggacctgttggttatcctggatctgcagaagtagttaatatgcaaccaccagacagattattaaaaaaaggaataagacatttaccaactcttggagatggaagacagagcggaacatcagaaagcccgtcaatacttcatgtttcaccagagtctgcagtaggtggagatttaggcattgtaaaaacttacgacaaaataaaaatagacctaaataaaagaagagttgatttgttgatttctcaagatgaatttaaaaaacgaagaaaaaacaagaaagtatttaaaccaaataatcaaactccttggcaagaaatttttagaaatactgtgggtcaactggatgatggtgcatgtattaactctagaggtaaatatttagatgtatctcacacaaaaggtttacctagagactcacattaa

SEQ ID NO: 285644 - DNA, 1711 bp, Unknown
  Bacterial polypeptide expressing nucleotide sequence isolated from the Sargasso Sea
atgacaaagaaacgcagaagcggcttatggtatggaaataaagatcgcgatggtttcatccatcggtcttggatgaaaaaccaaggttttccagaccacgcttttgatggcaggccaattattggtatatgtaatacttggtctgaattgacgccatgcaactcgagtttaagagatcttgccgaaggagtgaaacggggtgtctgggaagctggaggtttcccagtcgaatttccagttatgtctttgggtgagacacaaatgaagccgaccgctatgctatttcgtaatcttttagcaatggatgtagaggaaagtataagagcttatggtattgacggtgtcgttcttttgggcggatgtgataagacaactccaggtcaactaatgggcgctgcttccgttaatattccaacgattgtggtcagttctggcccgatgctcaacggcaaatggcaaggaaaagatataggttctggtactgatgtatggaaattttccgaagccgtacgtgctggagacatgtcactatctgagtttatggctgcagaaagtggtatgagcagatctaagggggtttgtatgacgatgggtaccgcttctacaatgtctagcttggtggaggctatgggacttagtcttcccgctaacggtgcgctcccagccgtcgatgctcgccgtatggcattagctcacctaactggaaagcgtatcgtagaaatggttgatgaggatttaaagctgtcagaaattctgaccagagatgcctttattaacgcgataattaccaatgcagcagtaggcggatcatcaaatgcagtagttcatttattggcaatagctggtcgggttggggtagagctacgcttagatgatattgatttaggcaaacatgtgccgttgttggtaaattgtatgccgtcaggctcatacctgatggaagatttttgttatgcgggaggcatacctgctgtcttagcggaaatttctcatcttcttaaaccagtgaaaaccgttcttgggtctgatctggaggattattatagggatgccaaatgttggaatagagatgtaattttttcttttaaaaatccgattaaaagggatgcaggtttgacagttttaaggggtactttggctccagagggtgcagttataaagccctctgctgcaacacccgaactgcttgagcatcgtggaccagcttatgtgtttgaaaatgttgaggatatgaaagccaatatcaacaatgaggacttgccagtaaccaaagatactattttggttctaaaaggctgtggccctaaaggctatccgggaatggcagaagtgggcaacatgccaattcctgcgaagctggtaaaagagggtcttcgtgacatggtaagaatatctgatgcgagaatgtcgggcaccgcctatggtactgtagttctgcacgttgcgcctgaggcggcggccggtggtgtgttggctttagtaaagacaggagatgagatcgttttatctgcaaaagacggtagacttgatctgttggttgatgaaaaagagctacttgcaaggagcgcttacatgtcaaccccacttcccgactatgagcgaggatatattaagttatatattgatcatgtatcaggtgctgataaaggagccgatctggacttcttagttggtaatgatacgcgcgtgccacagcgggaaagccactaat

SEQ ID NO: 285645 - DNA, 1426 bp, Unknown
  Bacterial polypeptide expressing nucleotide sequence isolated from the Sargasso Sea
atgccaaaaaaaagaaaaaagagttttagaagtcaccattggtttaataatccaaaaaacccagatatgactgctctttatttagaacgttatttaaattatgggcttactagaaaagaattacaatctggaaatcctataataggaatagcccaatcaggaagtgatctttccccatgtaatcgacattttttatctttaagcgaaaggattaaagatggaataaggagagcaggtggcattcctatggaatttccaactcaccctatacaagagactggcaaaagacctacagctatgcttgaccgaaatctatcatatttatctttagtagaagttttgtatggttatccaattgatggagtaatattaacaactggatgtgataaaaccactccagctgcattaatggctgcagcgactgtcaatattcctgcaattgttttatctggtggtccaatgttggacggagtttacaaaggtaaattagctggttcaggaatggtggtttgggaagctagaaaaatgttagccaaaggagatattaattatgaagaatttatggaaatggcagcatcatcagcaccaagtgctggtcattgtaataccatgggaaccgcatcttcaatgaattcagttgcagaagctttaggtatgtctttacctggcggtgctgtaattcctgcaccttacagagaaagagaacaaatttcatatgaaacgggaaaaagaatagttggaatggttcatgaaaatttgacaccttcaaaaattatgacacgtaaagcatttgaaaatgcagtcgtggttgcaagtgcaataggtggatcaagtaattgcacaattcatttaagcgcaattgcaaaacacatgggaattaaatttgatttatctgattggcaaaaacttggacatgatattcccttacttgttaattgtcagccagcaggtgaatatttaatggaaagctttcacagagctggagcaattcctgcggtgatgaaagaattaattaaaaataaaaaacttcacacaaatataaaaacggttacaggaaaaacagttggagagaatttaagaaaaaaagttgatgtagataataaagtaattaaatcctttaagaattctttaacagaaaaagctggctttttagtaatgaaaagtaattttttctcttcagcaataatgaaaacatctgtaatcggtaaagaatttagagacagatacttatcaaatcctaaacacataaatgcttttgattgcaatgctgtggtttttgaaggccctgaggactaccataaaagattaaatagcaaaaaattaaaaattgacgaaaattctatactaattgttagaggctgtggccctgttggatatcctggatcagccgaagtaattaatatgcagccacctgacaaattataaa

SEQ ID NO: 285646 - DNA, 385 bp, Unknown
  Bacterial polypeptide expressing nucleotide sequence isolated from the Sargasso Sea
ggtatgagagaaatgttgcagacaacagctgcaatttatggacaagaaaaaggggagaaagtagcccttataacggacggtaggttctctggggctacaagaggcttctgtatcggccatgtaggtcctgaggcctctataggcggtccaatagcccttttaaagaacggtgatataattgatatagatgcaaaaaaggggagtattaacgttagattaagtaaaaaagagcttagtttgagaaaaaagaaatggaaacaaagaaaaatgaattttggaaacggaactctttggaaatatgctcaaacagtaggaccagcttatttaggtgcacctacacatccaggtggtaaaaacgaggttaaaacttacgcagatatttgat

SEQ ID NO: 285647 - DNA, 393 bp, Unknown
  Bacterial polypeptide expressing nucleotide sequence isolated from the Sargasso Sea
ccggtgacgtaatagttgttagatacgaaggtcctgttgggggtccgggtatgcgggagatgcttaagccaacatctgcaattatgggcaaaggaatgggtgataaagtcgctttcataacagatggaagattttctggtggatctcacggctttgttgtggggcatataacacctgaagcagctgaaggaggtctaattggacttctagaagatggagatcagattaccatagacgcaattgaaggaaaaatcgacgccaatctttctcaagaagaaattctaaaaagaagaaaatcttggtgtaatcccaagccctacaataagaaaggggttttgtctaaatacgcaagagttgtaagttcagcatctttaggagcaattaccgattaag

SEQ ID NO: 285648 - DNA, 1786 bp, Unknown
  Bacterial polypeptide expressing nucleotide sequence isolated from the Sargasso Sea
atgctaagaaaaagaaaaacaaaattaagaagtgatcagtggtttaacaatccaaaaaatcctgacatgactgcattgtatttagaaaaatatatgaattatggtcttaaaagaaaagatttacaatcaggaaaaccaattatcggaatagctcaatcaggtagcgacctatcaccttgtaatagacattttttatcattaagtaaaaaaattaaggatggaataagaaaagctggaggtatcccaatggaatttccaactcatccaatacaagaaactggaaaaagaccaacggcaatgctagatcgaaatttatcttatttgtcactagttgaagtcttgtatggatatccaattgatggcgtaattctaactacaggatgtgataaaactacacctgctgctttgatggcagctgcaactgtaaatattcctgcgatcgttctttctggaggtccaatgttagatggtttttataaaggtaaattggcaggatctgggaccataatctgggaagctcgaaagttattagcaaaaggtgaaataaattatgatgaatttatggatatggctgcatcatctgcaccaagtgttggtcactgtaacacaatgggcactgcctcttcaatgaattctgttgcagaggcattaggtatgtcattacccggatgtgcaattatacctgcaccttataaagaaagaaaacaaatttcatttgaaacaggaaaaagaattgtggatatggttcatgaaaatttaaccccatcaaaaattatgacaagaaaagcttttgaaaatgcagttgtagttgctagtgcaattggaggatcgagtaactgtactactcatttaagtgcaatagcgaaacatatggggattaagtttaatttatctgattggcaaaaattaggtcataatattcctttacttgtaaattgtcagccagcaggtgaatatttaatggaaagtttttttagatcgggaggagtgcctgcagttatgaaagaattaataaaaaataaaaagattcatacaaatctaatgactgtgacaggtaaatctattactcagaatttaataaaaaaaataaaggtaaatcctaatgtagtaaaaactttcaagaatgctcttgcagataaagctggatttttagtgatgcgtagtaactttttctcgacagctataatgaaaacatcggttataagtaaagaatttagagatagatacctttcaaatcctaagcatccaaacgttttcaatggaaaagcagttgtttttgaaggaccagaggattatcacaaacgactaaatagtaaaaaattaaatattgatgaaaattctgttttaattgtaagaggatgtggaccagttggttatcctggttcagcagaagtaatcaatatgcagccacctgatagattgttaaaaaaaggaatcaacacattgccaacacttggtgatgggagacagagcggtacgtctgcaagtccatcaatcctgcatgtatcacctgaatctgctgttggtggagatttaggtattgttaaaactggcgataaaataaaaatagatcttaacaaaagaagagtggacttgttaatttctcaagcagaatttaaaaatagaagaaaaaaaagaaaaaagtttaagatcaataaccaaaccccttggcaagaaatttttagagacactgtagggcaacttgaagatggtgcatgtattaagtcgcgaggagtttatttaaatgtttctacttcaaaaggtattccaagagactcacattaaa

SEQ ID NO: 285649 - DNA, 1783 bp, Unknown
  Bacterial polypeptide expressing nucleotide sequence isolated from the Sargasso Sea
atgtcacacacgcctcgccgcctgcgcagccaggaatggttcgacgatcccgcgcatgccgacatgaccgcgctctatgtcgagcgcttcatgaactacgggctgacgcgcgaggagttgcagtcgggccgccccgtgatcggcattgcgcagacgggcagcgacctcgcgccgtgcaaccgccaccacatcgaactggccgagcgcacgaaggcgggcatccgcgatgcgggcggcattccgatggaattccccgtgcatccgctggccgagcaaagccgccggccgaccgccgcgctcgaccgcaacctcgcgtacctcgggctggtggaagtgctgcacggctttccgctggacggcgtggtgctcaccaccggctgcgacaagaccacgcccgcctgcctgatggcagccgcgaccgtcgacatgccggcgatcgtgctgtcgggcgggccgatgctcgacggctggcacgacggcaagcgcgtcggctcgggcacggtgatctggcatgcgcgcaacctgctcgccgccggcgagatcgactacgaaggcttcatgcagctgaccacggcttcgtcgccgtcgatcggccattgcaacaccatgggcaccgcgctgtcgatgaacagcctggccgaggcgctcggcatgtcgttgccgggctgcgcgagcatccccgccgcgtaccgcgagcgcggccagatggcgtacgccaccggcaagcgcgcggtcgagctggtgcgcgaaaacgtgcgcccgtcggcgatcatgacgcgcgcggcgttcgagaatgcgatcgtcgtcgcgtccgcgctcggcgcatcgaccaactgcccgccgcacctgatcgcgatcgcgcgccacatgggcgtcgaactgggcctggacgactggcagcgcctcggcgaggccgtgccgctgctcgtcaactgcatgccggccggcgagtacctcggcgagagcttccaccgcgccggcggcgtgcccgcggtactgcgccagctcgatgcggccggcctgctgcggcgcgactgcgcgaccgtgtccggccgcgcgatcggcgagatcgccgacaccgcgcccgacgccgaccacgacgtgatccgcacgcccgacgcaccgctcaagcatggcgcgggcttcatggtgctgtcgggcaacttcttcgacagcgcgatcatgaagatgtcggtggtcggtgaagcgttccgccggacctatctggccgagccgggcgcggagaacacgttcgaggcgcgcgcgatcgtgttcgaaggccccgaggactaccacgcgcgcatcaacgatcccgcgctgaacatcgacgagcgctgcatcctcgtgattcgcggctgcggcacggtcggctacccgggcagcgcggaagtcgtcaacatggcgccgccggccgaactcgtgaagcgcggtgtgacctcgctgccctgcatgggcgacggccgccagagcggtacgtcggccagcccgtcgatcctgaacgtgtcgcccgaggcggcggtcggcggcggcctggcgctgctgcgcacgaacgaccgcattcgcgtggacctgaatcgccgcagcgtcgacgtgctcgtggacgaggatgaactcgcgcgccgtcgcgagacggcgagcttcacggtgccgcaggcgcagacgccgtggcaggcactctatcgccagttcgtcggccagttgtccaccggcggctgcctcgagcccgccacgctgtacctgaaggtgatcgaacaacgcggcaacccgcgccattcgcactgac

SEQ ID NO: 285650 - DNA, 1032 bp, Unknown
  Bacterial polypeptide expressing nucleotide sequence isolated from the Sargasso Sea
tcctgcttgcttaatggctgctgctacaatgaatatacctgcaattgttcttaatggaggacctatgttagatggctggtacaaaggaaaaccagctggctctggaacagcagtttgggatggaagagttgaatatgctgcaggaagaattaattataaagaatttgttgatattgttacttcttcagcaccttcagatggtcattgtaatgttatgggtacagcatctactatgaattctctagcagaagctttaggtatgagtcttacaggaagtgctaatatacctgctccatatagagaaagagggcaaatggcttatagaactggagaaaggatagtggaaatggttgaggaagaccttactccttcaaaaattatgacacgtgaagcatttgaaaattctataattgttaattcagcaattggtggttcaacaaatgcacaaatgcatataactgctatagcaagacatatggggttggaattggaaactgaagcttggcaaaatttaggatatgatattcctttactagctaatgttcagcctgcaggaaagtatttaactgaaagttatcataaagctggtggtacggctgcgttaatgggagagttgttaaaaaataaaatgataaatggaaatgtaatgacagcttcaggtaagatattagctgataatcttgagggtattgatattcaggatgaagacgttattagacctataaataaaccgttaatggaaagagcaggattttgtgttttgaaaggaaatttatttgatgcagctattatgaaaacctctgttatttcagagagctttagaaaaaagtttcttgaaaataaaggtagagaaggaatattagaggggagagctattgtttttgaaggttctgaagattatcacaatcgtgttaatgataaagatttgaaaatggatgagaattctattttagtaataagaggtgctggtccaattggctggcctggttcagatgaagtggttaatatgcaaccttctgatgatttaattaa

SEQ ID NO: 285651 - DNA, 1687 bp, Unknown
  Bacterial polypeptide expressing nucleotide sequence isolated from the Sargasso Sea
tatgcctaaaaaaagaaaaaagagtttcagaagtcaacagtggttcaataatccaaaaaaccctgacatgacggccttatatctagaaaggtatttaaattatggtcttacaagaaaagaattacaatctggtaatccaattataggaatagcgcaatctggcagtgatctatctccatgcaatagacatttcatgtctttgagtaaaagaataaaagatggaattagaagagcaggtggcataccaatggaatttcctactcacccaattcaagaaactggaaaaagaccgacagcaatgttggatagaaatctttcttacttgtcactagttgaagttttgtatggatacccaattgatggagttatccttacaacaggatgtgataaaactactccagctgctttgatggcagctgctacagtaaacattcctgcaatagttttatcaggcggtccaatgttagatggagtttataaaggaaaattagctggttcaggaatggtagtttgggaagcaagaaaaatgttagctaaaggagaaattaaatacgaagaatttatggatatggtcgcatcttctgcgccaagtgctggacattgtaatacaatgggaacagcttcttcaatgaactctgttgctgaagcattaggtatgtctttaccagggggcgctgttattccagctccttatagagaaagagaacaaatttcttacgaaacaggaaaaagaatcgttggaatggttcatgaagatttaaccccatcaaaaattatgacacgtaaagcttttgaaaacgcagtagtagttgcaagtgctattggtggatctagtaattgcacagctcatctaagtgctattgcaaaacatatgggaattaaatttgatctttctgattggcaaaaacttgggcacaacattcctttattagtaaattgccaacctgcaggagaatacttaatggaaagttttcacagagctggagcaatacctgcggtaatgaaagagttaattaaaaacaaaaaaattcacacaaacataaagacagttacaggaaaaactgtaggagaaaatttaagaaagaaagttgatgtagataacaaagtaattaaaacatttaagaatgcattgactgaaaaagctggttttttagttatgaaaagcaactttttctcatctgctatcatgaaaacatctgtaattagtaaagaatttagagatcaatatttatcaaaccctaaacacccaaatgtttttgaatgtaaagcaatagtttttgaaggtcctgaggattatcacaaaagacttaatgataagaagttaaaaatagatgaaaactctctattaattattagaggctgtggacctgttggttatcctggatcagctgaagtagttaacatgcaaccaccagacagattattaaaaaaaggaataagacattacccaactttgggtgatggaagacaaagtggaacatcagaaagtccatcaatattacatgtttcaccagagtctgcagtaggtggagatctaggaattgttaaaacttacgataaaatcaaaatagacttaaacaaaagaagagttgatttattaatttctcaagctgaatttaaaaaacgaagaaaaaataaaaaagtatttaaaccaaataatcaaaccctcttggcaggaaatatttag

SEQ ID NO: 285652 - DNA, 1957 bp, Unknown
  Bacterial polypeptide expressing nucleotide sequence isolated from the Sargasso Sea
atgaacgagaatgtagagcctttaaaaaatattgaagcttcaattaagaataaagaattcaatgaagctttaaatttatgtaataaatataataaatctatttcaaaaagagattatttttatttaacatcagtttgttatagatacttaaatgaattagacaaagcaataaaagggcttgataatttaattcaaattgatcccaagtacggaagagcatttcaagaatttggacatgttcatgttttattaaaagataaagataaggcactaaaggcttatttaagagcagtaaggcacaacccctcgttacaggcttcttggttgggtattttgtctatagaggaaagcaatcaggatttaattaaatttgtagagcaaaatgttttttacttaaaaaaccttccacctgaacttaaaacagtaattagttttactcatgaaggcaagttagcaagagctgatcatatttgtagacaatatttacaagagcaccctcatgatattgaggcaatgagattattagcaaatataggcagagacttaaatatttacgaagatgcagagtttttattggagagcgcattattgtttgatccagataatgcgatgatcaaatatgactacataaacatactaacaaaaagacaaaaatatggagaagcattaaaacatgctcaagcattttatgatgaagatccaaaaaatcttaatgcaatgaaattactatcaactgctttatttagaactgatagatataaagaagcaattgatatatataacgatatattaaaagttgaaccaaaaaacactgatgtaatgttatcaatgggacatttgtacaagacatcgggagaaattaataaatcaatagactcatatcaaaaagcatataagacagataaatattttggagattcatattggagtttagctaatttaaaaacttatgaattttcagacaaagaagtatcttctcttaaacagatggttaaagataaatatgttgatgaagaagaaaaaacatttatgcattttgctttaggcaaggcttatgaagaccgtgaaaagtttaacctttcttttgaacattacaaagcaggaaatcaaataaaaaagaataaagcattatttaatatcgatgattttgaaagagattgtaataatcaaaaagatgtctgtactaatgagttatttgaaatgaaaaaagattggggatcagaaaacaaggctccaatttttatattaggtttaccaagagttggatcaactttaatagagcaaattctttcatcacattctatggtcgaagctactcatgaacttccaaatattatctcaactgctttaagattaaatgaaagaaaggcacaagatattacttcaagatatccagatattttattaagtttatctgcaccacaactaaaaatgataggggataaatatattgcagatagcgaggtctttaggactgataaacaatatttccttgataaaatgcctaataattttagacatatcgggttaataaaattaatccttcctaatgcaaaaattattgatataagaagatcttccatgtctgcatgctttgcttgttacaaacagctttttgctgagggccaggagtttacatatgatttaaaagatctagcaggctattacaataactatattgaactaatggatcactggaataaagttctcccaaatcaaattttatctattaactatgaagatgtagttaataatttcgaagaatctgttaaccaaatcttggaatattgtgagataccgttcgaaaatgagtgtcttgaattttataaatctaaaagatcggttaagacacccagtgctgaacaggttcgtcaacctatatataaaagtgggatggattattggaaaaactatgaaagctatttagatgaactaaaaaataatttaaaatattaaa

SEQ ID NO: 285653 - DNA, 1423 bp, Unknown
  Bacterial polypeptide expressing nucleotide sequence isolated from the Sargasso Sea
tatgttagaaactttaaaaaattttggtggaaaaaaattaggtgggttaatcctaatcatagtaattattattgcatttggttttggtggatttggtggtggcttcagtacaaataatcaaaataatatagcaaaaataaataaaacgaatgtaaccactcaagattttatggactatgtgaaccaaagtggcatatcacttgatgccataagaaccaatttagataataatataattgaagaattattgtcaggtttaatttcaactacattaattgatttagagataaaagacttcgcactttcaatcagcgagagaacaatacttaaaacaattaaagacaacaaaaatttccaagatgaaaatggtatttttcaaagagtaaaatatgaaaaatttttactatcaagcaatttatcagcaccaatgtttgaattgaaattaaaaaatagagaattacaaaaacacctattcgacattattggtgctggaacaataacacctaattttttgattgagaaaaaatatgaagaaaataacaaaacattaagtcttgagtactttaatatggaaggactttataaggataaaaatgaatatacagaggaagatctattaatatttattaaagagaacgaagatcaactaaaaagagaatatatagattttaaatatgttgttttaaatccaaaaaatttaattggagttgaagaatttaatcaagaattttttgatgagatagataaaattgaaaaccaaatttcacagggagctgactttggcactatttcagagagtataaaggtcaacgttaacgaaataattgaatacgctccaagctcagaggctcaaacaagtgaaaatttaatctatcaaaacaaatcatcaaaactaaacttaattgaagatggagataatttcttattatacaacgtcgataaagaatacagtaaaagtccaaatttaaatgatgacaaaactaaaagtgaattagcagagttaatttaccaaaaaggtaaatttgattttaatagaaaaatcctagaagaaattcaaagtaatgaattcaataacagcaaatttgaagatttaggaaataatgatttactaaaattagaagttaaaacaataaatgacgatgcaacatttgacattaattcaattaaaatgctctataccttgcctgtaaattcattcacattggttaatgataaagataataacatttttttagtgaaaattatcgattctaagaaaaattttttcaataaatctgataaagattatgttcaatttgttaagaatcaaaatactgataatcgaaaaagtattttgcaatcctatgatcaattattaaacaacaaatacgaagtcaaagttaaccaaaaatctgttgatagagtaaaaaattatttcaaatga

SEQ ID NO: 285654 - DNA, 1535 bp, Unknown
  Bacterial polypeptide expressing nucleotide sequence isolated from the Sargasso Sea
ggcagaccagttattggtatttgtaatacttggtcggaattaactccttgtaatggacattttagagaaatagcggactctgtaaaaaaaggagtatatgaggcaggaggattccctttagaatttccagttttttcagcaagtgagtcaaacttgagaccaaccgcaatgctatttcgtaatttagcaagtatggatgtggaggaagcaataagaggcaacccaatagatggagtagtgctcctaatgggatgcgataaaactaccccttctttattgatgggcgcagctagtgtggatattcctactattggtgtatcaggaggtccaatgttaaatggacatcatcaaggaaaaacaattggttcaggaacaggtgtgtgggaattagatgctgatttgagcgcaggtaaaattactgaagatgattatgctgccgctgaaatttcaatgagtaggtcaaaaggaaattgtatgactatgggtacagcctcaacaatgggaagtatggtagaggcactcggaatgtccttacctcataatgcggcgataccggctgttgatgcaagacgctattctcttgcacatatgtctgggaaaagaattgttgagatggtgaaagaaaatttaataatgtcaaaaattgttactaaaacatctttcgaaaatgctattaaagtaaatggtgcaattggtggctcaacaaatgcagtaattcatcttgcagctgttgcaggaagattagaaattgatttaaccttagatgattgggagcgatgtgggaaatcaataccaacgcttgtcaacttacagccatcaggaaagtatttaatggaggatttttattatgcaggaggtgttcctgcagtcattaaaaaacttttagaaaaaaaattaattaacaaagaagtcttgactgtaaatggtaaaacaattgaacaaaataatattaatgctgaatgttggaatagcgatgttatcaaagattatgaatctcctcttgtaaaagatgggggaattaagattttaagaggcaatatagctcctaatggagcaattttaaaaccttcagcagcaagttctcaattaatgaaacataaaggaaaagctattgtttttgaaagtattgaggagtttcaagaaaaaatagatgatccaaatttagaagttgatgaaacgtgtattttggttttgaaaaattgtggacctaaaggatatcctggtatggcagaagtagggaatatgcgacttccccaaaaaatactcaaaaagggtattcgggatatgattaggatttcagatgctagaatgagtggtactgcttacggtacagttatcctccacacttctcctgaagcagctgttaaagggcctttagcagccgttcaaaatggcgacctgattgaagtcgatgttgttgaaggtaagctaaatttagatgtatctgatgatattataaacgaaagattaaaaaaatatgaaccagttttacctgatattaaaggaggttatcaaaaaatgtatgtggatcatgt

SEQ ID NO: 285655 - DNA, 1777 bp, Unknown
  Bacterial polypeptide expressing nucleotide sequence isolated from the Sargasso Sea
tatgaaaacaaagaatcttagaagtcaaaaatggtttaataatcctgataacccaagcatgactgctctttatttagaaagatatttaaattttgggttaacaagaaacgagttacaatctgggaagccaataattggaatagctcaaagtggaagtgatttgtctccatgtaatagacattttttggatttatcaaatagaataaaagcaggtattagagatgctggaggcatcccctttgagtttcctactcatcctatacaagaaactggaaagaggcccactgcagcattagatagaaatcttgcttatttatcattagtagaggttctgtttggatacccacttgatggagtagtattgacaacaggctgtgataaaacaactccagctagtttaatggctgctgcaactgttaatttgccttcaattgttttatcaggtggacctatgttagatggaaattacaatggaaaaaaagtaggttcaggaacaattgtttgggaagcaagaagaatgcatgcacgaggtgaaattaattatgaagaatttatggatttagtatcagcttctgcgcccagcattggacattgtaatactatgggtacagcttcatcaatgaactctcttgcagaagctcttggcatgtccttacctggttgtgctgctataccagctccttatagagagagatcgcaaatggcttatgatacaggatatagaagtgttggactggttttagaagatattaaaccttcagatattatgacgataaaagcttttaaaaatgctattgttactgcttctgcaataggtgcctcatcgaatgctcccccccatattattgcaattgccaaacaattaaatttagatcttaagttgcaacattgggaaaattggggtgaaagtattcctttattggtaaatttacaaccagcaggagaatacttaggagagggttactttaaagcaggaggtgtgcctgctgtaatgaaagaattattagataacgataagttaaatagtgattgcctaacagtgagcggaaaaaatgttagagataatttagaaaaaatagtttgtagtgatagaaaaataatttactcttttagtaaaccaatgaaagaaaaagctggatttttaattttgcgaagtaatttttttgatacagctattatgaaaatgtcagtagttagtaaggagtttaaagaaagatatttatcagataaaaaacatccaatggaatttacgttaaaagctattgtttttgatggccctgagcattatcataaagaaattaataatcccaaattaaaaattgatgaaaattgcattttaataattagaggttgtggaccaataggttatccaggtgctgcagaagtagtaaatatgcagcctcctgattatttattaaaaaagggagttacatctttaccttgccttggtgatgggagacaaagtggtacttcggaaagcccttcaattttaaatgtttcaccagaagccgctgttggaggaggtttgtcaataattaaaaactatgatttagtaaaagttaatttaaataaaaaaagagtagatttattaatagatgatcaagaaattaaaaaccgattcaaagaagtaaagtttatttatcctgaaaatcaaactccttggcaggaaatttcaagacaatatactggtcaactcgaagacggagcttgtttggacttaaaagaaggatactttagtgttgctcaaagcaagggcataccaagagacaatcattaa

SEQ ID NO: 285656 - DNA, 604 bp, Unknown
  Bacterial polypeptide expressing nucleotide sequence isolated from the Sargasso Sea
atgaaaaaatttaataaaaaaaagctacctagtagacatacttctttaggacctgataaagctcctcaaagatcattctattatgccatgaacttaactgaaaaagatgttgcaaaaccattcgttggtgttgtttcaacttggaatgaggctgctccttgtaatattgctttaatgagacaagctcagtcagttaaaaagggcgtacaatctgcaggtggtactccaagagagttttgtacaattacagtaactgacggtattgcaatggggcatgaaggaatgaaatcttcattaatttcaagagatgtaattgcagattcaactgaattaacagttagaggacattgctatgatgcattagttggtgttgctggttgtgataaatctttgccaggtttaatgatggcaatggtaaggttaaatgtaccaagtgtttttatatatggaggatcaattcttccaggaagattaaatggtaaagacataactgttgtagatgtttttgaaggtgttggaaagtattcttcagggaaaatatcagaacatgcattaagaaaaatagagttaaaagcttgtccaacagcgggtgcttgtggtggtc

SEQ ID NO: 285657 - DNA, 1210 bp, Unknown
  Bacterial polypeptide expressing nucleotide sequence isolated from the Sargasso Sea
aatagagttcatcttaaattagctgaaagagtgagagaaggcatcagaagtgcaggtggaattgctctggaatttcctgttcatccaattcaagaaactcttaaaagaccaacagcctctgtagatagaaatttagcttatcttggattagtagaaattcttcatggttatccaattgatggggtagtgctaacaacagggtgtgacaaaacaactccagcatgtctaatggcggctggaacggtagatataccagcaattgttctttctggaggaccaatgttagacggctggcataacggtaaactagctggttctggaatggcagtttgggatagcagagttgagctcgctgcaggtagaatagattatgaagaatttatggacatagttacttcatctgccccgtcagatggacactgcaataccatgggaaccgcttctactatgaattcattagctgaggcactaggtatgagtttgactggaaatgcaaacattcctgctccttacagggagagaggtcaaatggcttaccgtactgggatgagaatagttgaaatggtcaatgaagatttaacgccttctaaaatcatgacaagaaaagcttttgaaaatgcaatagtagttaattcagcaattggaggatcaactaatgctcaaattcacatcacagctatagctagacatgtaggtatagatttagaaactgatgcttggcaaaattttggttatgatattcctttgatggttaatattcaaccagcaggaaagtatctttgtgagagttatcatagagcaggaggtactgctgcagtaatgaatgaattactaaaaaatgaaaaaattcatggtgatgtaactactgcaagtggcaaaaaattatcagagtgtttaaaagataaaaatataaaaaatcatgacgtgataacctctttcaatgaaccacttaaaaaaagagctggattcatagttttaaaaggaaatttatttgagtctgcaataatgaaaacatctgtaatttctgacaagtttaaggaaaattttttatctagacccggccaggaaggtatattagagggaagagctatagtttttgaaggttcggaggattatcatgatcgcgtaaatgacgactcattaaaaatggatgagaattctattttagtaattagaggagctggtccggtaggatggccaggttctgcag

SEQ ID NO: 285658 - DNA, 1039 bp, Unknown
  Bacterial polypeptide expressing nucleotide sequence isolated from the Sargasso Sea
atgaaaataaaaaatgaaaaatttagtaacgctttaaatcatatccctcaaaagatacctcctatatggtttatgaggcaggctggaagatatcactctcattatcaaggtttaaaacaaagttatacttttgaagagttatgtaaaaatcctgatttagccgctgaaactgcattaggtccaataaatgacttcgattttgatgtagcaattttatttagcgatattttatttattcttgaagcattaggtatgtcattaaaatatgatccaggccctatctttagcgcatttatagatgaacaaaattatagtgaattagaatctccagagaatgcaattaagaaaatgcgcttccaagaggatgctttattagcgacaagagatttacttccccaagataaaagtcttattggttttgttggaggaccttggacagtggcttcttatggccttggtctaaataaaggtattaagtatgatggtaattacgctaataattttgtttttcgagtcctttcggaaaaggttattcctataattaaatacaatatttcacttcaattaaatgctggggctgaaatagttatgatatttgatactgatgcaaaaagcatatcgaacaaagaacattatagtcagtattctaagtatttgtatgaagaaataataaaggaattcccaaaacaaattggatattattcaaaatctccttttgataataaattttttgttgaggacttaaatagtgatgaatcctatttggccggtttaggagttgatcatcatttatcaatggatcattggtttaaagaaatcaataacggttttattcaaggtaattttaaccaagaaagtatggttaaggctcatgatgaatttaaaaaagattttgatttatatattgataatttccaaaatataaatgaaattgatagagctggttgggtatgtggattaggtcatggaattttaaaagagacacctgaagaaaatgttcattattttatcgagaatataagaaaaatatttagttgat

SEQ ID NO: 285659 - DNA, 1039 bp, Unknown
  Bacterial polypeptide expressing nucleotide sequence isolated from the Sargasso Sea
aatgaaaatatgcaatgaaagatttagtaatgctttagagcatattccgcaaaagacaccacctatatggtttatgagacaggcaggaaggtatcactctcattatcaaaatttaaaaaaaaattataccttcgaagaattatgtaaaaatcctgatttagctgctgaaacagctctaggtccaataaatgattttgattttgatgtcgcaattttatttagtgatattttgtttgttcttgaggcattgggtatgtcgttaaaatatgatcctgggcctatttttggtaattttattgatgaaaataattacgaagaattacaatctcctgaaaatgcaattaaggaaatgagttttcaagaaaatgctttgttggcaacaagagatttactgcctgatcataaaagccttattggttttgtcggcggtccatggacagttctatcatatggtcttggtttgaataaaggtattcaatatgaaaacaattactctaatagttttgtttttaaagtcctttcagaaaaaattattcctttaattaaatacaatatttcacttcaactaaatgcaggggcagaagttgttatgatttttgatacagatgccaaaagcatatctgatagtgagaattttaataattattccaaatatttatacaaggaagtcattaaagaattcccaaaaaaaattggatattattcaaaatcaccttttgataataaattttttgttgatgagcttaatagtgatgattgtcttctagctggcttaggtgtagatcaccaattatctatggatcattggtttaaagagataaataacggctttattcaaggtaacttcaatcaagaaagtatggttaaagatcacgatgaatttaaaaaagactttgatatatatgttgatcatatacaaagtataaatgaaaaagatagagctggctgggtctgtggattaggtcacggaatattaaaagatacacctgaagaaaatgttcattactttattgagactataagaaaaatttttagttaa

SEQ ID NO: 285660 - DNA, 389 bp, Unknown
  Bacterial polypeptide expressing nucleotide sequence isolated from the Sargasso Sea
accaggtatgagagaaatgctttcaacaacaggagcaatctacggacaaggtaaaggagagaaggttgctttaattactgatggaagattttctggagcaactagaggtttttgtgttggtcatgtaggacctgaggctgcattaggtggtccaatagctttattacgtaatggagatgttatcgatattgatgctaagaagggtacaattaatgttcgattgacaaaagctcaattaacttcaagaaagagaaaatggaaggctagaaaatctgattttggatcaggaacactttggaaatatgctcaaactgtgggaccagcatttttaggagcaccaactcatccaggtaagaaaaaagaagttaaggattactcaaaaatttgat

SEQ ID NO: 285661 - DNA, 598 bp, Unknown
  Bacterial polypeptide expressing nucleotide sequence isolated from the Sargasso Sea
aatgaaaaaatttaataaaaaaaagctacctagtagacatacttctttaggacctgataaagctcctcaaagatcattctattatgctatgaacttaactgaaaaagatgttgcaaaaccatttgttggtgttgtttcaacttggaatgaggcagctccttgcaatattgctttaatgagacaagctcagtcagttaaaaagggcgtacaatctgcaggtggtactccaagagaattttgtacaattactgtaactgacggtattgcaatgggtcacgaaggaatgaaatcttcgttaatttcaagagatgtaattgcagattcaaccgaattaacagttagaggacattgttacgatgcattagttggtgttgctggttgtgataaatctttaccaggtttaatgatggcaatggtaaggttaaatgtaccaagtgtttttatctatggtggatcaattttaccaggaagattaaatggtaaagatataactgttgtagatgtttttgaaggagttggaaaatattcttcaggaaaaatttcagaacacgcattaagaaaaatagaattaaaagcatgtccaactgctggtgcttgt

SEQ ID NO: 285662 - DNA, 772 bp, Unknown
  Bacterial polypeptide expressing nucleotide sequence isolated from the Sargasso Sea
aacacctgttcttgcagatctaaaacctagtggaaaatattctatggcagaattagttaatataggaggtgtggctccactaatgaaaaatctggtgaataaaaaattgatgcatggagactgtttaactgtttctgggaaaactcttgctcaaaatcttaaaaatattaaaccatatccgtccaatcaaaagataattatgcctttgatttctcctgttaaaaaagacggacatttaataattctgagaggtaatattgctcctgatggtgctgtagcaaaaatatcaggcaaagagggcacatattttaaaggcaaggcgaaagtattcgagtctgaagagcagtgtttgaaaacaattctaagtggaaaaatatctaaaggtacagtaattgttattagaagtgagggaccagttggagggcctgggatgagagaaatgttatctcctacatcagctataatgggtcaagggcttggtgatcatgtggcattaatcacagatggaaggttttctggtggtagccatggttttgtggtcgggcatattgctccagaagctgctataggaggacctttggctttaataaaaaatagcgacgaaatcgaaatttgtgcaattaaaaaagagatcaatttattaatatctaaaaaagaaatttcatcaagaaataaaaagttaaaaaataaaaatgttaaacatactaatggtgctcttaaaaagtatgctcgacttgtgagtcaagctaatacaggcgctactacaacttaa

SEQ ID NO: 285663 - DNA, 1357 bp, Unknown
  Bacterial polypeptide expressing nucleotide sequence isolated from the Sargasso Sea
atgaaaaaaaaaaatttaagaagtaaagagtggttcgataacccagaagaccctggtcttacagctctttatttggaaagatatctcaattatggtttgaaaaaaaaagatcttcaatcaggtaaacctataattggaatagcacaatctggcagtgatctttctccatgtaataggcattttttatctttaagcaaaactataaaagatggaataagaatagctgggggtgttccaatggaatttccaacgcatccaattcaagaaactggtaaaagacctactgcggctctggatagaaatttatcatatttatctttggttgaagttctttatggatatccaattgatggagtaatactaacaacaggatgtgataagacaacgcccgcagccttaatggctgcggcaacagtaaatattccctcaattgttttgtcgggaggtccgatgttagatggaacttataaaggaaaaaaagctgggtcaggtacaataatatgggaagctagaaagttgcatgcaaaaggtgaaattgattatgatgagtttatggatatggcagcagcttctgctccaagtgtaggacattgcaatactatgggtacagcatcctcaatgaattcaattgcagaagctttaggcatgtcactaacaggcggtgctattattccagcaccttataaagaaagagaaaatatatcatttgaaacaggaaaaagaatagttgatatggttcatgaagatcttacaccatcaaaaattatgacaaagaaagcatttgaaaatgcaacttatgttgccagtgcgataggtgcatcaagtaattgtccaccacatcttaccgccattgcaaaacatatgggaattgattttggaatagaaaattgggaaaaacttggtcatgatattcctttacttgttaattgtcagccagcgggtgaacatttaatggagggattttttaaggcaggaggaattcctgtgataatgcaagaattactaaaaaacaataaattgcataaaaatgttatgacagtaactggaaaaactattgaagaaaatttaaaaaatataaataataataatgaagatgtaattaaatcttttaacaatcctatagtatctaatgctggttttattgtaatgaaaagtaatttttttagctcagctgtaatgaaaacttctgtaataagttatgaatttagagaaagatatttatccaatctagaaaatccaaatgtatttgaagcaaacgcagttatttttgaaggaccggaagattatcacttaagaattaacgatgagaacttagaaataaatgagaattcaattttaatgattagaggatgtggac

SEQ ID NO: 285664 - DNA, 1096 bp, Unknown
  Bacterial polypeptide expressing nucleotide sequence isolated from the Sargasso Sea
tggggcttaacattaccaggggcttcttcgatccccgcacctgacgcgagccacaaacgtatggccaccgattgtggtcgtcgaattgtagaaatgatttgggaagaccttactccgaacgagattataaatgaggccagcacaagaaatgccgtcacagtagccatggcaaccggctgttcaacgaatgcgattattcatttaatcgcgatggctcgccgtgctggcgttaatctgatgttagatcaactagatgaaatcggccgaacaacacccgtcatcgccaatatccgaccatcgggaaaagactacttgatggaagactttttttacgctgggggtttgcgtgcccttatggttgagctgggcgataaacttgatctgagcgtcaaaacagttacgggaaaaacactgggcgagtgtatccaaggatcagagaattttaatactgacgttatccgaactcttaataatccagtttaccacgagggatcactggctgtcttaaaaggtaacctcgcaccaaatggggctgtaataaagccagcagcgatggaccccaaatttcaaaaacatagtggaccagccatcgttgctgatagctatgctgaattaaaagaaattataaatgatgaagattatcccataacagcagatcatattttagttttaagaaatgctggcccaaaaggcgggccaggtatgccagagtggggcatgattccaatgcccaaagcgctcctcaaacaagggcatagagacatgatccggctgtctgacgccagaatgtcaggaacatcttacggtgcatgcattctacacgtcgcacctgaagcctttattggagggcctctagcactaattaaaaccggcgatattattcgggtagatattcccaaccgtaaacttgacgttgatgtttctgaaagtgaaatgaagaagcgtaagaaggaatgggttgagcctaaacctcgatacgaacgtggctacgggtatatgtattcaaaacatattgaacaggctgacaagggttgcgatttcgattttctacgtactgactttggagttgccgttgaggagccggatataaactaac

SEQ ID NO: 285665 - DNA, 415 bp, Unknown
  Bacterial polypeptide expressing nucleotide sequence isolated from the Sargasso Sea
ggcgggcgatctcatcaggacgccgtcatcgtggtgcgccacaatggcccggctgccaacggtatgccggagctgcacaagctgatgccggtgctcggcaacctgcagaaggcgggttacaaggtggcgctggtcaccgacggccgtctctccggcgcctccggcaagatcccggccgccatccacgtcaccccggaagcgctgcacggcggggccatcggcctgcttgccgatggcgacctgctgcgggtggacgcggtaaacggcaacctcgactgcctgaccgatttgagtggccgtacccaggccgagatcgacctcaccctagaacaagaggggtggggccgtgaactgttcagcgtgatgcgtcgcgcggtatcgagcgccgagtgcggcgccaccatctttgattaag

SEQ ID NO: 285666 - DNA, 1777 bp, Unknown
  Bacterial polypeptide expressing nucleotide sequence isolated from the Sargasso Sea
tatgaaaaagaagaatttaagaagtaaacaatggtttgacgacccaaaagatccaggcatgacagccatgtatttagaaagatatctaaattatggtcttacgagaaaagaacttcaatcaggaaatccaataattggaatagcccaatcagggagcgatttatctccatgtaacagacattttttggatttaagtaaaagaattaaagatggaattagaagagcaggtggtattccgatggaatttcctactcacccaattcaagaaactggaaaaaagcctaccgcaatgttggatagaaacttatcatatttgtctttggttgagatactttatggatacccacttgacggagttatacttacaactggatgtgataaaactaccccagcagcgttgatggcagctgcaacagttaatattcctgcaattgttttatctggtggtccaatgctagatggaaattataaaggcaagaaagctggtgcaggaaccattatttgggaagcaagaagactgcatgctaagggagaaattaattacgaagaatttatggatatggcagcagcatcatcaccaagtcctggacactgtaatacaatgggtactgcttcctcaatgaactcagttgcagaggcattaggaatgtctttacctggatgtgcagtgataccagcaccttatagagaaagagaacaaatttcttttgagacaggatcaagaattgtaaatatggttcatgaagatcttacaccttcaaaaattatgacaaagaaagcatttgaaaacgcagttatagttgcaagtgctataggagcttctagtaattgtactacacatttaattgctatagcaaaacatatgggtgttaaatttgatttatctcattggcaaaagcttgggcacaaaatacctttattagcaaactgccaacctgcaggtgaacatttaatggaaggtttttatagagctggaggtataccagcaatcatgaaagaattaatgaagaataataaaattcacaaaaacttaattactgtaactggtaaaacagttgcgcaaaatttaagaaaaaaaattgatgttgatagaaatgtgattaaaacatttaaagataatttgactgataaggctgggtttctagttatgaaaggaaatttcttttcatctgcaattatgaagacttcagtaattagcaaagagtttagagatagatacttatcaaaccctaaacaccctaatgtttttaaaggaaaagcagtagtttttgaaggtccagaggattatcatgacaggattaatagcaagaaactaaaaatagatgaaaactctattttaataataagaggttgtgggcctgttggataccctggttctgctgaggtagttaatatgcaaccacctgatagactactaaaaaaaggtattaatgcacttccaacccttggagatggaagacagagtggtacctccgaaagcccatcaatacttcatgtatcaccagagtctgctgttggcggtgatttagctattgttaagacaggagataaaatgacaatagatcttaataaaagaagagtcgatcttcaaataacaaagttagaatttattaaaagaagaaaaaagaaaaggataaaaaaacttacaaatcaaactccgtggcaagaaatatctagatcaaatgttggtcaacttgaagacggcgcatgcattatgtcaagagatcagtatttagacatcactaaaacaaaaggtgttctaagaaactctcattag

SEQ ID NO: 285667 - DNA, 326 bp, Unknown
  Bacterial polypeptide expressing nucleotide sequence isolated from the Sargasso Sea
tatggttgataaagatctcagaaaacattcaaaaaagattgttgatggagttgagcaagcaccaagtagagccatgttaagggctgtcggctttagaacaaaagattttaaaattcctcaagttgggattgcctcaacttggagcatgataactccatgtaatatgcatcttaatgatctagctcaggaaacttcatctggcgtcgaagaatctggtgcaaaaggaattatattcaataccataacggtgtctgatggaatctcaatgggaactccaggaatgagatattcattggtatcaagagagataatagcagattcaattg

SEQ ID NO: 285668 - DNA, 316 bp, Unknown
  Bacterial polypeptide expressing nucleotide sequence isolated from the Sargasso Sea
tgcaataaaaggtgcaggtttaggaaaagatgttctattgattactgatggtcgattttcaggtggaactacaggtttatgtattggacatgtaacaccagaaagttttgatctagggcctattgcaatatgtcaaaatggtgattttataaatttgaatttatcaaaaagggagttgaatatagaattgacagaatctgagattaaaaaaagatttgagtcctataaacttccagaaccaagatacaaatctggagtattaagtaaatactcaaaattagtttcaggagctgattcaggagcggttacctcataa

SEQ ID NO: 285669 - DNA, 1309 bp, Unknown
  Bacterial polypeptide expressing nucleotide sequence isolated from the Sargasso Sea
tatgccaaaaaaaagaaaaaagagtttcagaagtcaacaatggtttaataatccaaaaaatccagacatgactgctctatatttagagcgttatctaaattatggacttactagaaaagagttacaatcaggaaatcctataattggaattgctcaatctggcagtgacctttctccctgtaatcgacattttttatctttaagtaaaagaattaaggatggagtaagaagagcaggcggcattcctatggaatttccaacacatccaattcaagaaacaggcaaaagaccaacagctatgcttgaccgaaatctatcatatttatctttagtagaagttttgtatggctatccaattgatggagtaatattaacaactggatgtgataaaactactccagcagccttgatggcagcagccacagtaaatattccagcaatagttttatctggcggtccaatgttagatggagtttataaaggaaaattagctggttcaggaatggtagtctgggaagctagaaaaatgttagctaaaggagaaataaaatatgaggagtttatggatatggtttcatcatcctcaccaagtgctggccattgtaatacaatgggaacagcatcctctatgaattcagtagcagaagcattaggaatgtctttacctggtggagcagttacacctgcgccttatagagaaagagaacaaatctcttacgaaactggaaaaagaattgtaggaatggttcatgaaaatttaactccttcaaaaattatgacccgtaaagcatttgaaaatgctgtcgtcgttgcaagtgctataggtggatcaagtaactgcacaactcatttgagtgcaattgcaaaacatatgggaattaagtttgatctttctgattggcaaaaactaggacacaatattcctttactagttaattgtcagcctgcaggtgaatatttaatggaaagctttcatagagctggagcaattcctgcagtgatgaaggaattaattaaaaataaaaaacttcacacaaatataaaaacagttacgggaaaaaccgttaaagaaaatttaagaaaaaaaattgatgtagataataaggtaattaaatcatttaaaaattcattagcagaaaaagctggctttttagtaatgaagagcaattttttctcatcagcaattatgaaaacctcagtaattagtaaagaatttaaagaaagatatttatctaaccctaaacacctaaacgtgtttaatggaaaagcggtagtattgaaggaccagaggattaccataagagattaa

SEQ ID NO: 285670 - DNA, 586 bp, Unknown
  Bacterial polypeptide expressing nucleotide sequence isolated from the Sargasso Sea
atggaagataaaggatcaaatagtaaatcaaaactacccagcagatatgtaagtgtaggtccaaaaagtgctcctcataggtcatattactacgcaatgggtttaaaagagcatgaaatttatcaaccatttgttggagttgtgagcacttggaatgagtctgctccatgtaacataactctccaagatcaagctcaacatgtaaaaacaggtgttaaatcttctggaggaacccctagagaatttactactattacagtaacagatggtattgctatgggtcacgaagccatgaaatcatccttaattagtagagaggtgatagcagactctatagagttatcagttagaggtcactgttatgatgcaattgttggtttagctggatgtgataaatctctgccaggtcttatgatggctatggtaagattaaatgttccatctgtctttatatatggaggctcaatattgccaggcagatacaaaggaaaagatgttacagttatagatgtatttgaagccgttggaaaacatgcagcaggctctataacagaccaagatttaaaagatttagaacaagttgctt

SEQ ID NO: 285671 - DNA, 1753 bp, Unknown
  Bacterial polypeptide expressing nucleotide sequence isolated from the Sargasso Sea
gatgtcggcaacgaaacccaggctgcgctctacccaatggttcggcacgaacgacaagaacggcttcatgtaccggagctggatgaagaaccagggcatccccgatcacgagttcgacggccggccgatcatcggcatctgcaatacgtggtccgaactgacgccgtgcaacgcgcacttccgcaagctcgccgagcacgtgaagcgcgggatctccgaggcgggcggcttcccggtcgagttcccggtgttctcgaacggtgaatcgaacctgcgcccttcggcgatgctcacgcgcaacctcgcgtcgatggacgtcgaggaggcgatccgcggcaacccgatcgacgcggtcgtgctgctcgccggctgcgacaagacgacgcccgcgctgctgatgggcgcggcgagctgcgacgtgccggcgatcgtcgtgtccggcggcccgatgctgaacggcaagctggagggcaagaacatcggctccggcaccgccgtgtggcagttgcacgaagcgctgaaagccggcgagatcgatgtccatcacttcctgtcggccgaagccgggatgtcgcgctcggccggcacctgcaacacgatgggcaccgcgtcgacgatggcgtgcatggccgaggcgctcggcgtcgcgctgccgcacaacgcggcgattccggccgtcgattcgcgccgctacgtgctcgcgcacatgtcgggcatccgcatcgtcgaaatggcgctcgaagggctcgtgctgtcgaagatcctgacgcgcgcggcgttcgagaacgcgatccgcgcgaacgcggcgatcggaggctcgaccaacgcggtgatccacctgaaggcgatcgcgggccgcatcggcgtgccgctcgaactggaagactggatgcgcatcggccgcgacacgccgacgatcgtcgacctgatgccgtcggggcgcttcctgatggaagagttctattacgcgggcggcctgccggcggtgttgcgccggctcggcgaaggcgggctgctgccgaacccggatgcgctgacggtgaacggcaagtcgctgtgggacaacgtgcgcgaagcgccgaactacgacgaggaagtaatccgcccgctcgaccggccgctgatcgcggacggcggcatccgcatcctgcgcggcaatctcgcgccgcgcggcgcggtgctgaagccgtcggcggcgagccccgagttgctgaagcatcgcggtcgcgcggtcgtgttcgagaacctcgaccactacaaggcgacgatcaacgacgaggcgctcgacatcgacgcaagctcggtgatggtgctgaagaactgcgggccgcgcggttatccggggatggccgaggtcggcaacatggggctgccgccgaagctgttgcgccagggcgtgaaggacatggtccggatttccgacgcgcggatgagcggcaccgcgtacggcacggtcgtgctgcacgtcgcgccggaagccgctgccggcgggccgctcgcggccgtgcgcaacggcgactggatcgagctcgactgcgaggccggcacgctgcatctggacattacggacgacgaactgcatcgccgcctgtcggacgtcgatccgaccgcggcgccgggcgtggccggccagctcggcaagggcggctatgcgcggctgtacatcgatcacgtgctgcaggccgacgaggggtgcgacctcgacttcctggtcggcacgcgcggcgctgaagtgccgagccattcgcattga

SEQ ID NO: 285672 - DNA, 241 bp, Unknown
  Bacterial polypeptide expressing nucleotide sequence isolated from the Sargasso Sea
tttgttgttggacatatttcacctgaggctgctgagggaggtatgattgcatttataaaggacggtgacgttattgttattgacgcgataaaaaatgaaattaatgtaaaattgaataaaaatgaacttgattcaagaaaaaaagagtggataaaacctgaattaaaatataaatccggtattttgtataaatactccaaacttgtatcaagtgcatctaaaggatgtattactgattaat

SEQ ID NO: 285673 - DNA, 172 bp, Unknown
  Bacterial polypeptide expressing nucleotide sequence isolated from the Sargasso Sea
atgtgtgacggtatatattattggtttagctggttatttcagcaaaaagcattaaataaactctgtttgtatggctttatctatcattttgttgaaattaataatgaattgtgtaaagtagcccctcttaacagtttgttacaaaatgctacaaacttttatgccaattagt

SEQ ID NO: 285674 - DNA, 151 bp, Unknown
  Bacterial polypeptide expressing nucleotide sequence isolated from the Sargasso Sea
atgaggaatgcccgcttacacagcggcaaaacagaggtaactatggctaaattaagaagtgcaacaacaactgaaggacgtaaacgcgcaggcgcacgtgcattatggcgcgcaacaggcatgaccgacaccgactttggtaaaccaatta

SEQ ID NO: 285675 - DNA, 766 bp, Unknown
  Bacterial polypeptide expressing nucleotide sequence isolated from the Sargasso Sea
ttctgaacagataacgagactaaatccgcccctacccgacggagatgtaatttatacagtcaaagatccatataagcctacaggcggcctaagagttttagggggtaatttatctcctgaatttagctccgttctaaaattagctggtgttgaaggtggactggaaaataatatctttatcggaactgcgagagtctttgatggggaagaaggacttttgtattctttggcaaatgaaccagaagtttttcagaatggtgatatgatcatagtgcgctacgagggcccaagcggtgcgcctggcatgccagaaatgctagattcaacctcacgtattaccacgctctgtagagagaagaatatcatcgttgggctgatgactgatggccgattttccggagggtcggttggccttgtgattgggcacgttggcccggaagcagcgctgggaggagaaatcgcatttattgaaaatggcgatgaaattgtcattgatctcaattcaaatgaaataaattgcacgccgttaaaggatgaaaaaatattgacccaccgcaaaaaggcctggatggagacagtcgaagctaacgggggaacccacccatcaattggaatagcagatactcgccttttaaatagaatgcgaagatcagcagtttcagcagtttatggagcgggcatgcatccagaccggcagctatgggtaagtgaaccgcgcgatccagtgatgaccaaattctcgccagcgaataaataccgcagctaa

SEQ ID NO: 285676 - DNA, 358 bp, Unknown
  Bacterial polypeptide expressing nucleotide sequence isolated from the Sargasso Sea
cgttggagggccaggaatgagggaaatgctttcaccaacatcagcaattatgggtaaaggtcttggtaatgatgttgctctaatcacagatggaagattttccggggggagtcatggttttgtagtcggacatatttcaccagaagctgcgatagggggaccattgcaaatagtcaaaaacaacgaccctatcgaaatatgtgccagaaagagagaaattaatatactcgtagcaaaaaaagagattgataaaagaatgagagaattccaaaaaccaaattcaaaaacggaaaatggagctctcactaaatatgcaagattggtaagtcaagctgatactggtgcgattacgaactag

SEQ ID NO: 285677 - DNA, 455 bp, Unknown
  Bacterial polypeptide expressing nucleotide sequence isolated from the Sargasso Sea
agtgataagtagaaagtataaagatggagatattataattattagatatgaaggaccaataggaggccctggaatgagagaaatgcttcaaacaactgcagcaatctatggtcaaggaaaaggggagaaagtagcccttattacagacggtaggttctctggggctaccagaggcttttgcattggtcatgtgggccctgaggcctccgtaggcggtcctatagcccttttaaggaatggggatatcatcgatatagatgctaaaaagggcactattaacgtaaggcttacaaagaaggaattaagtgcaagacgtaaaaaatggaaaccaagaaaaatgaattttggtaatggtactttatggaaatatgcacaaacggttggaccagcttacaaaggtgcaccaactcatccgggtggtaaaaacgaggttagaacttacgctgatatttaat

SEQ ID NO: 285678 - DNA, 691 bp, Unknown
  Bacterial polypeptide expressing nucleotide sequence isolated from the Sargasso Sea
atgaaaaaatttaataagaaaaaattaccaagtagacatacaacaataggtgcagataaagcccctcaaagatctttttattatgcaatggatctaactgaaaaagatgtagcaaaaccatttgttggtgttgtttcaacatggaacgaggccgctccttgtaacataaatttaatgaaacaagctcaatcagttaaaaaaggagttaaagcttcaggtggaactccaagagaattttgtactattacagtaactgatggtattgcgatgggtcatgagggaatgaagtcatcattaatatcaagagatgtgatagcagactcaactgaacttacggttagaggacattgttatgatgcattagttggattagcgggctgtgataaatcattacctggtttaatgatgtcgatggtacgtttaaacattccaagtgtatttatatatggtggatcaattcttcctgggagatttaatggaaaagatgtaactgttgtagatgtatttgaaggagttggaaaatatacttcaaagaaaatgacagctcatgcattaagaaaattagaattaaaagcatgtccaagtgcaggtgcttgtggtggacaatttactgcaaacacaatggcatgtgtttctgaagcaataggattagctttaccattctcagcaggaacgccagcaccatattaga

SEQ ID NO: 285679 - DNA, 501 bp, Unknown
  Bacterial polypeptide expressing nucleotide sequence isolated from the Sargasso Sea
tggtcaaggtggcaggtatagacgtagaccggtttgacggtagggccagggtgttcgatggcgaggacgcggccatggcggccgtgctcggcagccagattgaggcgggtgacatcgtggtcatccgctacgagggtcccaaggggggtcctggcatgcgcgagatgttggccatcaccggggccatgaagggcgccggtcgtggtggcgacgctgcactcattaccgacggacgcttctccggtggcacccatggattctgcgtgggccatgtggcccccgaggcggttgatggcgggcccattgcgctggtcgccgagggtgaccgcatcgtgatcgacgtggtgagccacaccattgacctgatggtcgacgaactcacgctggctgagcggagggcaaacctgaagcccttcgagccgcgctacacctcggggttcctcgccaaatacgccgccctagcccagggggccgagaagggtgctgtcacccaggcgtaaa

SEQ ID NO: 285680 - DNA, 517 bp, Unknown
  Bacterial polypeptide expressing nucleotide sequence isolated from the Sargasso Sea
atggttgataagggatcaaatattaaatcaaaacttcctagccgtcatgtaagtgttgggccaaagagcgctccacatagatcaatgtattatgctatgggtatgactgaagatcaaatatatcaaccttttataggagtagctactacatggaatgaatctgcgccatgtaatataactttaggtaggcaggctcaatctgtcaaaattggtgttaaagaaaaaaatggaacacctagagaattcactacaataacagtcactgatggtatagctatgggtcatgaagcaatgaaagcatcgcttgtaagcagagaagttattgcagattcagtagaattatctgttagagggcattgttatgatggaatagttggtttggcaggatgtgataagtccttaccaggtttaatgatggctatggtgcgtttaaatataccttctgtttttatttatggaggttcaatacttcctggtaaatataaaggtaaagatatgacaataatagatttttgaa

SEQ ID NO: 285681 - DNA, 751 bp, Unknown
  Bacterial polypeptide expressing nucleotide sequence isolated from the Sargasso Sea
atgtcaaaaattaataagaaaaagctacctagtcgtcatacttcattgggaccagatagagcaccacaccgttctttttattacgccatgggtgaaacagaacaagatgttgcaaagccttttgttggagtggtatctacctggaacgaagctgcgccttgtaatacagctttaatgagacaagctcaatctgtaaaaaaaggtgtaaaagaaaatggaggaacaccgagagaattttgcacaattactgtaacagacggtattgctatggggcatgaaggtatgaaatcatcgctgatttcaagagagataattgcagactcagccgaactgacagtaagaggacattgttatgatgctctagtaggtatcgcgggatgtgataaatctttaccaggtttaatgatgtccatgcttagattaaatgttccaagtgtttttatttatggtggttcaatcttgcccggcaaatataaaggtaaagacgttacagtagttgatgtttttgaagctgtaggaaaacattcctcaggttcaatgtcgtctgaagaattaagagagttagaattagtagcatgtccaagtgctggagcttgtggagggcagttcacagctaatacaatggcatgtgtatccgaagcgattggattagcacttccttattcagctggaacacccgctccttacgaggaaagagataaatatgcttttgaaagtgggcaaactgtaatgaacttgttagaaaaaatat

SEQ ID NO: 285682 - DNA, 490 bp, Unknown
  Bacterial polypeptide expressing nucleotide sequence isolated from the Sargasso Sea
atgcggaagtttaataagaagaaattacccagcagacatacatcgttaggtgcagatagagctccacatagatcattttactatgcaatgggagaaactgaaaaagatgtttctaaaccatttatcggtgttgtatcaacgtggaatgaggcagctccttgtaacattgccttaatgagacaagctcaatcagtcaagaagggtgttagagcctctggtggaacacctagagaattttgtacaattactgttactgacggtatagcaatgggccatgaaggaatgaaatcctcattaatttcaagagaagtgatagcagatagtgctgaacttactgttagaggtcattgttatgatgcattagtgggtatcgcaggttgtgataaatctttaccaggtttgatgatgtctatggttcgattaaacgttccaagtgtttttatttatggcggatcaatacttccaggaaaatataaaggtaaagatgtaa

SEQ ID NO: 285683 - DNA, 289 bp, Unknown
  Bacterial polypeptide expressing nucleotide sequence isolated from the Sargasso Sea
aataggatttattacagatgggaagattttcaggtggcaccccatggttttgtagttggacatgtttctccagaagcagctgagggtggtttaatagcattagttgaagacggagatactatacttattgatgcagaaagtgatcagcttgttctaaaagttgatgatgatgaaattaaaagaagacaatcaatttgggaaaatccaaacagtaaaccaaaaaaaggagtacttgctaagtatgctgagagcgtaaagtctgcaagcctgggagctataaccgattaaa

SEQ ID NO: 285684 - DNA, 859 bp, Unknown
  Bacterial polypeptide expressing nucleotide sequence isolated from the Sargasso Sea
gggttgccgtccaacgcggcaatacctgctgcagactctcggcgtaaggtggtagcccggatggttggccaacgtattgtagacatggtcaaggagaacctgaccattgataagatcctcacgaaggaggccttcgagaatgccatcatggtgaatggcgccatcggaggctcgaccaacgcagtggttcacttgatggcgattgctggccgtcttggtgttgaactcaccctcgacgattgggatcgccttggccgtaatatgccatgcctcgtcaatttgatgccgtcgggtaagtacctgatggaggacttcttttacgcgggtggcctgcccgcggtgatcaaggaaattggtgacaatctgcataaggatgcgctgaccgtgaatggccagagtatttgggagaattccaaagatgctgtttgttacgaccgcgacgtgatcttcgagaagaataacccatttaaggaatcgggaggtatcgttgtgctgcacggcaatctggcgccaactggagcgatcttgaaaccatcagcggcaactgaagagttgatgcagcatcgcggccgcgctgttgtgtttgaggatattgatcacttcaaagagaaggtgaatgaccccgatctggacgtggaaccaaacgacgttctggtcctgaagaattgtgggccgaagggttatccaggtttcccggaggtgggcaatttggaattgccaccaaaaattctggcgcaaggtattaccgatatggtgcggatttctgatgctcggatgagtggcactgcgtacgggacggtggtcttgcatacctcgccagaggcagcggcgggcggcacgcttgcgcttgttcgggatg

SEQ ID NO: 285685 - DNA, 1070 bp, Unknown
  Bacterial polypeptide expressing nucleotide sequence isolated from the Sargasso Sea
gttgaagaaaaccttgcgctctcaccctattgatggcgcagtcctcatgggaggttgcgacaagtcaacaccagctctaatcatgggcgcaacaagtatgggcttaccctttatatatatgccagccggagcaatgctgcggggtaattacgcagggggaaaactaggatccggtactgatgtttggaagtattgggatgaacgcagggctgggaatatttcgaaagaacaatgggatggggtgcagggcggaatagcccgcagttatggtacgtgcatgacaatgggaactgcgtcgacaatgatgagtattgccgatggctggggcttaacattgcctggagcgtcttcgatccccgcacctgacgcgagccacaaacgtatggccaccgattgtggtcgtcgaattgtagaaatgatttgggaagaccttactccaaacaagattataaatgagaccagcacaagaaatgccgtcactgtggcgatggcaacagggtgttcaacgaatgcgattattcatttgatcgcgatggcccgtcgtgctggcgttaatctcacattagaccagcttgatgaaattggccgaacgacacccgtcattgcaaatatccgtccatcgggaaaagactatttgatggaagattttttttacgctgggggtttacgtgcccttatggtggaactgggcgataagcttgatctgaatgtcaaaacagtcacaggaaaaacactgggcgagtgcattaaaggagcagagaattttaatactgacgtcatccgagctctcgataacccagtttatcatgagggatcgctggcggttttaaaaggtaatctcgcacctgacggcgctgtgataaaaccagcagccatggaccccaaatttcaaaaacatagggggccagctatcgttgctgatagttattctgaattaaaggaaattataaacaacgaaaactatcccataacagttgatcatgtcttggttttaaggaatgccggcccaaagggtgggccaggcatgccagagtggggcatgatcccaatgcccaacgctttactcaagc

SEQ ID NO: 285686 - DNA, 799 bp, Unknown
  Bacterial polypeptide expressing nucleotide sequence isolated from the Sargasso Sea
atgtctaaaattgataaaaaaaaattacctagtcggcatacctcattaggtcctgatagagctccgcatagatctttttattatgcgatgggtgaaacagaacaagatgtagcaaaaccatttgtgggagtagtatcgacctggaatgaagctgctccttgcaatacagctttaatgagacaagctcagtcagttaaaaagggagtaaaacaatttggcggaacaccaagagaattttgcacaataactgtgactgatggtatcgccatgggacatgaaggaatgaaatcttcattaatttctagagaaataatagctgactcagcagagttaactgtcagaggacattgttatgatgctctagttggaattgctggatgtgataaatctttaccaggattaatgatgtcaatgttgagattaaatgttcctagtgtattcatttatggtggatcaattttaccaggcaaatataaaggtaaagatgttacggttgtagatgtttttgaagctgtaggcaaacattcttctggtaaaatgtcttctgaggaattgagagaattagaattagttgcatgtccaagtgcaggagcttgtggcggtcaatttacagctaatacaatggcatgcgtgtcagaagcgataggattagctttaccttattcagctggtaccccagctccttatgaagaaagagataaatttgcatttgaaagtggaaaagcagttatgaatttattagaaaaaaaaattaaaccaagagagattgtaacaaaaaaatctttagaaaatgctgcta

SEQ ID NO: 285687 - DNA, 490 bp, Unknown
  Bacterial polypeptide expressing nucleotide sequence isolated from the Sargasso Sea
tatgtataacaaatacagtcgtgtagtaacaaaagatgactctcagccagctgctcaagctatgctgcatgccactggtttatctgaagaagactttgataaaccatttattggcatcgcaagcactggctatgaaggtaacccttgtaacatgcatttaaatgatttatcagttaagattaaaaatagtatttctgcctctgaatatgttggattaatattcaatacaataggggtaagtgatggtatttctatgggaacttttggtatgagatattctcttccatctagggatattattgctgactccatggaaactgttgttcaagctatgtcctatgatggtctagtaactgtcgttggttgtgataaaaacatgcccggtgcattgatggctatgttaaggcttgataggccaagtatacttgtgtacggaggaacaattgactcaggctgttataataacaaagaattagacgttgtttcagca

SEQ ID NO: 285688 - DNA, 624 bp, Unknown
  Bacterial polypeptide expressing nucleotide sequence isolated from the Sargasso Sea
ttcaggaaaaatttcagaacacgcattaagaaaaatagaattaaaagcatgtccaacagcgggtgcttgtggaggtcagtttactgctaatacaatggcatgtgtatcagaagcaatgggattagctctaccatattctgccggaactccagctccatttaatagaagagataaatatgctttagctagtggaaaagcagttatgaatttgttagcaaaaaatattagaccaagagatattgtcacgaaaaaagccttagaaaatgccgcaacaatagttgctgctacaggtggatcaacaaatgcagctttacatttgccagctattgcaaacgagataggcattaaatttgatttaatggatgttgctaaaatatttaaaagaactccttatcttgctgatttaaaacctggaggaaaatatgtagcaaaagatatgtggaaagcaggaggtgttcctatgctactaaaaacacttatggatggtggatatatacacggcaattgtatgacagttacgggcaatactatgaaagagaatttaaaaaatgttaaatttaatgttaatcaaaaagtaatgagaaaatataataatccattatcccctgacggaggtgttgttgg

SEQ ID NO: 285689 - DNA, 706 bp, Unknown
  Bacterial polypeptide expressing nucleotide sequence isolated from the Sargasso Sea
ttgttgcatgcccctgaattggcacgagcagctggatataagacttttgccaatgaaataatgagccccgaagagtttaataatttgtctagaaatgttattccggttgtcatagatgctcggccttttggacaatattcgatggtggatattgatgccaaaggcggtatgcaagtgattgttaaagaattaatggacgcaggactattaaatggtgacacattgacttgcacaggagagaccctgtctgaacaagtcgaacgactgaaccctcctacaccggatgaggatgtaatttatactgttcaaaaaccatataaagagacaggcggactgcgcgttttaggtggaaatttgtcacctgaatttagcgctgtactaaaattagctggcgttgaaggcggactggaaaataatatttttaagggtacagctaaggtttttgatggagaacaggaactattaaaagcattagattcccaggctgacatgttcgagaactttgatatgatcgtggttcgctacgaggggccgtttggtgcgccaggtatgcctgaaatgctagactcaacttctagaattactgcactatgtcgtgagaaaaatattgtagttggtctcatgactgatggtaggttttctggtgggtcggtcggtttggttattggtcacgttggccccgaagcagctgcaggcggtgccattg

SEQ ID NO: 285690 - DNA, 445 bp, Unknown
  Bacterial polypeptide expressing nucleotide sequence isolated from the Sargasso Sea
aaaaagtataaccgatggtgatgtaattataatcagatacgaaggaccagttggtggtcctggtatgagagaaatgttatctacaacaggtgcaatctacggacaaggtaaaggggagaaagtagctcttataactgatggaaggttctctggagccacaagaggcttctgtgtgggtcacgtgggtcctgaggccgctctagggggtcctataggccttttacgtacaggagatatcattgatatcgatgccaaaaaaggaacgatcaatgtcagactttccaaaaaagaaatggcagcaagaaaaagaaaatggagagctagaaaatcagattttggatctggtacattatggaaatatgcacaaacagttggacctgcgtttttaggtgcgccaacacacccaggtaagaaaaaagaagttaaggattattcagagatttaa

SEQ ID NO: 285691 - DNA, 840 bp, Unknown
  Bacterial polypeptide expressing nucleotide sequence isolated from the Sargasso Sea
aatggcaaaatttaataaaaaaaaattaccaagtagacatacatcattaggaccagataaagctccacaaagatcattttattatgcgatgaatttaaccgaaaaagatgtcgctaaaccttttgttggcgttgtttctacatggaatgaagcagctccttgcaatatagcattaatgagacaagctcaatctgtaaaaaaaggtgtaaaactttcaggcggtaccccaagagagttttgcacaattaccgttactgatggaattgccatgggtcatgaaggaatgaaatcttcacttgtatcgagagatgtaattgcagattcaaccgaactaactgtaagaggtcattgttatgatgctctagtaggagttgcaggttgtgataaatcattaccagggttaatgatggccatggttcgattaaatgtaccaagtgtttttatttatggtggatcaattcttccaggaagatttaatggaaaagatgtaaccgttgtcgatgtattcgaaggggttggtaaatattcatctggaaaaatgacagaacatgctttgagaaaattagaattagtagcttgtcctagtgcaggtgcctgtggaggacaatttactgcaaatacgatggcttgtgtctctgaagccattggattagctttaccttattctgctggaacaccggcaccttatgaacaaagagataaatatgctttacaaagcggtaaggcagtaatgaatttgttaaaaaaaaatattagaccaagacaaattgtaactcgaaaatccttagagaatgcagcaactatagtagcagcaactggtggatcaacaatgcagcttta

SEQ ID NO: 285692 - DNA, 635 bp, Unknown
  Bacterial polypeptide expressing nucleotide sequence isolated from the Sargasso Sea
aatgaaaaaatttaataagaaaaaattacctagcaggcatactacagtcggtgctgataaagcgcctcaaagatctttctactatgctatggatttaactgaaaaagatgttgctaaaccttttgttggagttgtttcaacttggaatgaagccgctccttgtaatattaatttaatgaaacaagcacaatttgttaaaaaaggtgttcatttatctggtggtacaccaagagaattttgcactattactgtaactgatggtatcgcaatgggtcatgaaggaatgaaatcatctttaatatcaagagatgtaattgctgactctacagaacttactgtaagaggtcattgttatgatgctttagttggtttagcaggatgtgataaatctttaccaggtcttatgatgtctatggttcgtttaaatataccaagtgtttttatttatggtggatcgattttaccaggaagatttaatggaaaagatgtaacagttgtagatgtatttgaaggagtaggtaaatacacttcaaataaaatgactgcacacgctttaagaaaactagaacttaaagcatgcccaagtgcaggtgcttgtggtggacaattcacggcaaatacaatggcatgtgttt

SEQ ID NO: 285693 - DNA, 548 bp, Unknown
  Bacterial polypeptide expressing nucleotide sequence isolated from the Sargasso Sea
aatggctaaatttaacaaaaagaaacttccaagtagacatacatcattaggggcagatagagctccacatagatcgttttattatgcaatgggagaaactgaaaaggatgtagctaaaccctttgtaggtgtcgtttccacatggaatgaggcagctccgtgcaacattgctctaatgagacaagctcaatcggttaaaaaaggagttagagctaatggtggaactccgagagaattttgtacaattactgttacagatggtattgcaatgggccatgaaggaatgaagtcttcattaatatcaagagaggttatagccgattcagctgaactaactgttagaggtcattgttatgatgcgttagtaggtatcgcaggatgtgataaatccttaccaggtctcatgatgtctatggttaggttaaatgtgccaagtgtatttatttatggtggttcaattcttccaggtagatacaaagggaaggacgttacagtagttgatgtatttgaagcggttggaaaacattcatctggccaaatgtctgcta

SEQ ID NO: 285694 - DNA, 393 bp, Unknown
  Bacterial polypeptide expressing nucleotide sequence isolated from the Sargasso Sea
aatgcggaagtttaataagaaaaaattaccaagtagacatacatctttaggtgcagatagagctccacatagatctttttattatgcaatgggtgagacagaaaaagatgtctctaaaccatttataggggttgtatcgacatggaatgaagcagcaccatgtaatattgctttaatgagacaagctcagtcagttaaaaagggtgtaagagcttcaggtggaacaccaagagaattttgtacaatcacggttactgatggtattgcaatgggtcatgaagggatgaaatcttcgttaatctctagagaagtaattgcagatagcgctgaattaactgtaagaggtcattgttatgatgcattagtaggtatcgcaggttgtgataagtcttt

SEQ ID NO: 285695 - DNA, 391 bp, Unknown
  Bacterial polypeptide expressing nucleotide sequence isolated from the Sargasso Sea
ggatattgttgttgtgaggtatgaaggacccaaaggcggccccggaatgcgggaaatgctctcacctactagcgctattaatgggagagggttatctcaaagtgtcgccctgattactgacgggaggttctcaggaggatcccacgggttcgtcatcgggcacatctcgccggaggcatacgagggagggcctcttgcgctgctagaggatggtgatcaaatcacaatagacgctgaatcaaaaaccattgatgtggatttaactcaagctgaacttgattcgagaaaaaaatcctggtcaaagcctcagccttacgcgaaaaaagggttactagccaaatacgctaagctagtgagctccgcttcacttggcgcggttacagatctctaa

SEQ ID NO: 285696 - DNA, 832 bp, Unknown
  Bacterial polypeptide expressing nucleotide sequence isolated from the Sargasso Sea
atgcggaaatttaataaaaaaaaattacctagtagacatacatccttaggtccagatagagcacctcatagatctttttattatgcaatgggtgaaactgaaaaagatgtatcaaaaccatttataggagttgtatcaacttggaatgaagctgctccttgcaatattgctcttatgcggcaagcgcaatcagttaaaaagggcgttagagcatcaggaggtacaccaagagaattttgcacaattactgttactgatggtattgccatgggtcatgaaggaatgaaatcgtctttaatttcaagagaagtcatagctgatagtgctgaattaactgtaagaggtcattgttatgatgcattagtaggtattgcaggttgtgataaatctttaccaggattaatgatgtccatggttagattaaatgtaccaagtgtatttatatatggtggctcaatccttccgggaaaatataaaggtaaagatgtaactgtagttgatgtttttgaagcggttggaaaacattcatcaggtcaaatgtctgcaaaagaattaagaaaattagaattagtagcgtgtcctacagcgggtgcgtgtggtggtcagtttacagccaatacaatggcatgtgtttcagaagcaatcggtttagctttaccttattcagcaggaacaccagctccatatgaagaaagagataagtatgcaaaattaagtggtaaaatggtaatggaattattagcaaaaaaaattaaaccaagagatatcgtttcaaaaaaagcattagaaaatgctgcaacaatagttgctgcaaccagggggttcaactaat

SEQ ID NO: 285697 - DNA, 762 bp, Unknown
  Bacterial polypeptide expressing nucleotide sequence isolated from the Sargasso Sea
cgaactaagtagaaatgtacctcatcttgcagatatgaaaccgtttgggaaatttcatatggttgacttagataaaatcggtggagtacctgttgtttcaaaaattttattagaaaacgaacttataaatccaggatgtatgactgttactggtaaaactgttggtgaaaatttagaaaatgttgaaattccaaaaaatcaagatgtaataagttttcccgataatcctatttctaatgaaggagggatagcagttttaaaaggaagtctttcaacaaaaggctcagttgtaaagactgctggaatagaaataaataattttacgggtcctgcaaatgtatttgacagtgaacaagacgctctggatgcactttttaatggtgatatagaaaaaggacaagttgttgttatacgtaatgagggtcctaaaggaggtcctggcatgagggagatgctgcaaataacagctgctataaaaggtgccggtctaggcaaggacgtattgttaattacagatggaaggttttcagggggaacaacaggtttgtgtattggacatgtcgctccagaaagttttgataaaggcccaatatcaatttgtaaagatggagatattattagccttgatatttccaacagaaccctaaaccttgatataagtgaggaagaaatgaataaacgctttggtttattaacccttcctgaacctcgttataaatctggagtactacataaatactctaagctagtcagtggttcaga

SEQ ID NO: 285698 - DNA, 678 bp, Unknown
  Bacterial polypeptide expressing nucleotide sequence isolated from the Sargasso Sea
aatgactcctgctacatatgaagaaagagataattacggtattgaaagtggtaaagctgtcatgcatttgattgaaaaaaatataaggccaagagatatagttactttagaatctcttcgcaatgcagctgttgttgttgctgctacaggtggctctacaaatgcaggattacatttaccagcgattgcaaatgaagctggtattaaatttactttaaaagatgttgtcgatatttataaatcaactccgtatattggagatatgtcacctggaggaaaatatgttgctaaagatttatacgaagtaggtggagttccaattgttataaaatctttaattgatggtggatatattaatggtgattgtatgacagtaacaggtaagactattggagaaaatcatagagatgttatatttcccaaaaatcaagatgttgtttatacttgtgataatcctattagtgaacatagttcagtagtaggtttgtggggaaacttagctgaagatggaagtatttcaaaaattgctggattaaaaaatttacaatttaagggtaaagcaaagtgttttgattgtgaggaagatgcacttactgcagttctgaaaaatgaaatagtagctggagatgcagtaattattcgctatgaaggtccaataggaggacctggtatgagaga

SEQ ID NO: 285699 - DNA, 721 bp, Unknown
  Bacterial polypeptide expressing nucleotide sequence isolated from the Sargasso Sea
atgaagaaatttaataagaagaaattaccaagcagacacacatctttaggacccgataaagctcctcaaagatctttttattatgcaatggatttgaccgaaaaagatgtagcaaaacctttcgtaggtgttgtgtcaacatggaatgaagctgctccttgtaatattgctttaatgagacaggctcaatcggttaaaaaaggagttcatcaagcaggtggcacaccaagagaattttgtacaattacggttacagatggaatagcaatgggtcatgaaggaatgaaatcttcgttaatttcacgagatgtaatagcagactcaactgaattaactgttagaggacattgttatgacgctttagttggcgttgcaggatgtgataaatctttaccaggcttaatgatggcaatggttagattaaatgtaccaagtgttttcatttatggtggttcaatattaccgggtagatttaacggaaaagatgtaacagttgttgatgtatttgaaggagttggaaaattttcttcaggaaaaatgtcagcacatgcattgagaaaactagaacttaaggcttgcccaagtgctggagcttgtggaggacaatttacagcaaatactatggcatgtgtatctgaggcattaggattagcattaccatattcagctggaacaccagcaccatacacacaaagagattcttatgcattaaaaagtggta

SEQ ID NO: 285700 - DNA, 775 bp, Unknown
  Bacterial polypeptide expressing nucleotide sequence isolated from the Sargasso Sea
atgacagaaaaaggatctaatattaaatcaaaacttccaagtaggcatgtaagtgttggtcctaaaagcgcacctcatagatctatgtattatgcaatgggattaacagaagaagaaatttatcaaccttttattggagttgcaacaacttggaatgaatctgcaccatgtaatattacattaggtaggcaggctcaagcagtaaaaattggcgttaaggagttaaatggaacacctagagaatttacaactattacagtgactgatggtattgctatgggacatgaagccatgaaagcttcattagtaagcagggaagtaatagctgatagtgttgagctttcagtaagaggacattgttatgatggtattgttggtttagcaggttgtgacaaatctttaccaggtcttatgatggctatggtaagacttaatataccttctgtatttatttatggaggttctattttaccaggtaattataaaggtaaggatttaactattatagatgtttttgaagcggtaggtaaacatgcacaaggagcaatagatgatgctgaattaaaaaacattgaaaaagttgcttgtccaacagcaggatcttgtggaggtcaatttacagcaaatacaatggcttgtatttctgaagcagttggtttagcactaactaattcagcaatgaccccagctacatataaagaaagagataattatggaatagaaagtggtaaggcagtaatgaatctaatatctaaaaatataagacctagagata

SEQ ID NO: 285701 - DNA, 279 bp, Unknown
  Bacterial polypeptide expressing nucleotide sequence isolated from the Sargasso Sea
gctggtcacagattcaaattctcgtgctgctagtaggggaatgctttacggtgttggatttaaaaaaggtgattttcagaaatctcaagttggtatcgcctctacatggggaacagtaaccccatgcaatatgcacataaatgacttggcagagcatgcagcaagaggcgtacgaaaagcacaagggatgcctttgacttttggaacaattactgtttcagatggtatttccatgggtacagaagggatgaaatattcgcttgtttctcgtgaagtaat

SEQ ID NO: 285702 - DNA, 718 bp, Unknown
  Bacterial polypeptide expressing nucleotide sequence isolated from the Sargasso Sea
atgaaatttaataaatcaaagttaccaagcagacatgtgtcagttggtgttaagagtgcgggacacagatctatgtactatgctatgggactaaaaaaagaagatatagaaaaaccttttataggagttgcgacgacttggaatgaggcagctccttgtaatattactctttcaagacaagcacagtcagtcaaaaaaggtgtgaaatctgctggaggaacacctagagagtttacaactattacggtaactgatggtattgcaatgggccatgcaggcatgaaatcttcgttgattagcagagaggtaatagctgattcagttgaactaacaatgagaggtcattgttatgatgctctcgtaggtttagcgggttgtgacaaatccttacctggactcatgatggttatggttagacttaatgtaccatcggtttttatttatggtggatcaattttgccaggaaattttaaaggcaaggatgtgaccatagccgatgttttcgagggtattggaaaacattctacgggagctatgagtgaagaagatttattagaattagaaagcattgcatgtccgtctggaggatcatgcgggggtcaatttaccgctaatacaatggcatgcgtatctgaagctttaggattagctttaccaggctcagctggcactccagcaatatatgaagaaagagataaattttcttattcaagtggtg

SEQ ID NO: 285703 - DNA, 880 bp, Unknown
  Bacterial polypeptide expressing nucleotide sequence isolated from the Sargasso Sea
ggaatgaaatcatctttaattagcagagaggttatagctgattcagtagaattaactatgagaggtcattgttacgatgcactaataggtttagctggctgcgataaatcattgccaggattgatgatggtaatgttgagattaaatgttccttcagtatttatttatggaggttcaatactaccaggaaattataaaggcaaagatgttaccatagtagatgtttttgaaggtgtaggaaaacaatctacaggaaaaatgagcaaagaagatttattagagttagaaagtgtagcttgtccttcagcaggatcctgcggaggtcaatttacagctaacaccatggcatgtgtttctgaagctattggtttagcattacctggttcagcaggaactccagctgtgtatgaaactcgagataagtttgcaattgcaagtggagaagctgtcatgaatttaataaaaaaaaatataagaccaagagatatagtaacaagaaaatcattagaaaatgctgctgtgatagtagcagcatcaggaggatctactaatgcagctttacatttgcctgctatagcaaatgaagcaggaattaaatttacattagaagatgtaacaaatatttctaaaaaaactccctacattgctgacctaaaacctggcggcaaatatgttgctaaagacttatacgaaataggaggagttccaattttaattaaagcattattagaaggaggttttttacatgaagattgcctgactgtttctggtaagacaataggagaaaatcataaagatgtagtttttccatctaatcaaaaagtaatttataaaacctcaaaaccattaagtccaagaggaggttttgtggatgaaagga

SEQ ID NO: 285704 - DNA, 607 bp, Unknown
  Bacterial polypeptide expressing nucleotide sequence isolated from the Sargasso Sea
atgagcctcctagtaaatcaaagtgtcattagaggaatagataatcctctttacaaaaaagggcatttagcaattttaaaagggaacttggcaaacgagggttctgtagcgaaaatcagtggagttaaaaaccctgttctaacaggtcctgccaagatattcgaaagtgaagaagattgtcttaaagcaattctaaataatgaaataatagcgggtgatgttgtagttgtaagaaatgaaggtcctgtaggaggaccaggtatgagagaaatgttatctccaacatcagcgattgttgggcaagggctcggagaaaaagtggctttaattactgacggaaggtttagtggtggatcttatggtcttgttgtgggtcatatagctccagaagctgctgttggaggaaacattgcactaataaaacaaggggatttgattaccgttgatgctgtaaagcaactaattgaggttaatttgtctgacgaagaattagaaaagagaaaaaaagattgggtaaaacctaaaccaaaatacaaaagagggatactttcaaaatattcgaagattgtaagcacatcaagtttaggagcagttactgatttataaa

SEQ ID NO: 285705 - DNA, 427 bp, Unknown
  Bacterial polypeptide expressing nucleotide sequence isolated from the Sargasso Sea
atgaagatttcaagtagaaacgttgtggaaggtacagctcgagcacctcatcgtgcaatgtacaaggcaatgggattaactaatgaagatttagctaaatctatgataggggtatgtcatactggaaatgaagcaacaccatgcaacattcatcttccaaatcttgcgcaacatgcaaaacaaggagtaaccgatggaggtacaacaccaagagaattcagtacaattgcagtgagtgacggaattgcaatgggacatgaaggaatgaaatcgtcattaattagcagagaagtgattgcagattcaattgaacttatggtcagagcacatcaatatgatgcattagtaggaattgcagggtgtgataagagtttacctggcacaatgatgggaatgattagactcaacataccattccgtctttgtt

SEQ ID NO: 285706 - DNA, 424 bp, Unknown
  Bacterial polypeptide expressing nucleotide sequence isolated from the Sargasso Sea
atgctctatcccacgggattcaagaaggaagacttcagcaagccgcagattggagtcgcttcgctttggagcatggtaaccccctgcaacatgcacataaatcatttagctgaccgggctgttgagggtgctgacagtgctggaggaaaaggcgtgctattcaatacgataaccgtttcagatggtatttccatgggtacgcctggaatgagattctctcttgtatcaagggaaattatcgctgactcaattgagaccgttgtttgtgcacagggctttgatggattcgtggccataggtggttgcgacaaaaatatgcccgcctgcggcattgcgattgcacgcttgaatcgtcctagtgtttttgtatatggcggcaccattttacctggcgagcagcgccgagatattgtctcggtttgag

SEQ ID NO: 285707 - DNA, 613 bp, Unknown
  Bacterial polypeptide expressing nucleotide sequence isolated from the Sargasso Sea
atgccggagggcgacccgaacgatctgaacaagtggagccgaaagattacgcaaccgaagagccaaggcgcgtcgcaggcgatgctctacgccaccggtctcacgccggaacagatgaacaagccgcagatcggcgtgtcgtctgtgtggtggcagggtaacccgtgcaacaaacacctcttggacctcgcgggtaaggtggctgagggcgtcaaggcggcggacatggtgagctttcagtttaacaccgtcggcgtctccgacggcatctccatgggtacgcccggtatgtccttctcgttgcaatctcgcgatttgatcgcggatagcatcgaaacggtgatgggcggtcagtggtacgacggtaacatttcgctcccgggttgcgataagaacatgccgggtacgattatggccatgggtcgattgaaccgtccggcgctgatgatttacggcggtaccattcgaccgggcgtgtcgtccgttgacggctcgtccttggacatcgtctccgcgttccaatcgtacggtcagttcgtgaccggcgccatcaccgaggatcagcgtcaagatatcgtgcgcaactcgtgcccgggcgccggcgcgtgcggcg

SEQ ID NO: 285708 - DNA, 502 bp, Unknown
  Bacterial polypeptide expressing nucleotide sequence isolated from the Sargasso Sea
aatggcaaaatttaacaagaagaaacttccaagcagacatacatcgttaggagcagatagagctcctcatagatcattttattatgctatgggtgaaactgagaaagatgtagcaaaaccctttattggcgtggtttcaacatggaatgaggcagctccttgtaacatagcactaatgagacaagctcaatctgttaaaaaaggtgttagatcaaatggaggtactccaagagaattttgtaccatcactgttactgatggaattgcaatgggtcatgaaggaatgaaatcctctttaatatcaagagaagttattgcagattctgcagagttaacagtcagaggacactgttatgatgcattagttggtattgcaggatgtgataaatctttaccaggcttaatgatgtcgatggttagattaaatgttccaagtgtatttatttatggaggttcaattcttccaggaagatataaaggtaaagatgtaacgggtggttga

SEQ ID NO: 285709 - DNA, 664 bp, Unknown
  Bacterial polypeptide expressing nucleotide sequence isolated from the Sargasso Sea
attggctgaaaaccataaagatgttatttttccaaaagatcaagatgttgtttattcttgtgataaaccaatcagtgaacatagttctgttgtaggtttatggggaaatttagctgaggaaggatctatttctaaaatagctggattaaaaaatttatcttttaaaggtaaggctaaatgttttgattgtgaagaagatgctctaacagcagttttaaaaaatgaaattgttgctggggatgcagtagtaattcgttacgaaggtcctaaaggtggtccaggaatgagagaaatgctttcaactactggtgctatctatggtcaaggactgggcgaaactgttgcattaattactgatggacgtttttctggaggtacaagaggattttgtattggtcatgttggaccagaagctgccgttggaggaatgataggtctattaaaaaatggagatgaaatagtaattgatgcaattaagggtgaaataaatgtatctttaactgacgaagaaattgcaaaaagaaaaaaagaatggaaaccgagaacaactaatcacaactctggatctatctggaaatatgctcaaacagttggtccagctcatgaaggtgcagtaactcagccaggcgcaaaaaaagaaacacacacttacgctgatatttaa

SEQ ID NO: 285710 - DNA, 379 bp, Unknown
  Bacterial polypeptide expressing nucleotide sequence isolated from the Sargasso Sea
atgctgcgtgcggtcggtttcaccgacgaggattttttaaaacctcagatcggagtagcctcgacctggagcatggtgaccccgtgcaacatgcatattaatggcctagctgagctcgcggcggtgggtgcggatgccgcagggggcaaaagcgtcatattcaacacgatcacagtctccgacggtatctctatgggtaccgccggtatgcgctactcgttggtttcccgtgaggttatcgcagattccatagagaccgtgacagcggctgaaggcttcgatggactcgtgaccatcgggggctgcgacaagaatatgcctgggtgtgtaatggccatggcacgccttaaccggccatcggtcttgtctacggaggtac

SEQ ID NO: 285711 - DNA, 730 bp, Unknown
  Bacterial polypeptide expressing nucleotide sequence isolated from the Sargasso Sea
atgaataagtttaataaaagaaaattaccaagtagacatacatcccttggtgcagataaggccccacaaagatctttttattatgcgatgggcgaaaccgaaaaagacgtagcaaagccttttgtaggtgttgtttctacatggaacgaagctgcgccatgtaatattgcacttatgagacaagctcagtcagttaaaaaaggtgtcaaattttctggtggcacaccgagagagttttgtactattaccgttactgatggtatcgctatggggcatgaaggaatgaaatcctccttagtctctagagatgttatagccgactcaacagaattaacagttagaggccattgttatgatgcattagtaggagttgcaggttgtgacaaatctttaccaggtttaatgatggcaatgcttagactcaacgtaccaagtgtatttatatatggcggatcgattcttccaggtagatataatggaaaagatgtaacagttttagatgtgttcgagggagttggaaaatattcttcaggtaaaatgagtgagcatgctttgagaaaactagaattaaaagcttgtcctagcgctggagcgtgcggtggacaatttactgcaaatactatggcatgtgtgtccgagagccattggtttagcattaccttattctgctggaacacccgcgccgtacggacagagagacaaatatgctttacaaagtggcaaggcagta

SEQ ID NO: 285712 - DNA, 607 bp, Unknown
  Bacterial polypeptide expressing nucleotide sequence isolated from the Sargasso Sea
atgagtaatattgtttctaaggtcaccgatataaggcaaaacattgaaaggcgaagtgctgactctagaagtcaatacttaagaattattaatgaatggaaagataagtctccaaatacgaattcaatgggatgctcaaatgtggctcatacgtatgcggcatgtaataaatcaagtcctgatgctatccatcaacctatgattggcattgtatcagcatataacgacatgctttcagcacatgcaccatttgagcaataccctaaaatactcaaagatcatggaaagggtttgggattaaatgttcaggttgccgcaggagttcctgcaatgtgtgatggaatcactcagggtgagcctggaatggaattatcacttttctccagggacactatcgcattatctacagctattggactatcccataatgtcttcaatggaatagtctgtatgggtacttgtgacaagattgtgccaggattagtcatcggtgctttacgacatggacatcttccagcaatttttgtttctggaggcccaatgtcaacaggcatttcaaatactgaaaaatccttgagtagaaaagagttgcagcggggaaaattga

SEQ ID NO: 285713 - DNA, 695 bp, Unknown
  Bacterial polypeptide expressing nucleotide sequence isolated from the Sargasso Sea
aaagttatgcttgatgagggttttaattgatggtgatcaattgaccgtaacgggtaaaacaatagctcaaaatctggagtcatatgattactatccaaaggatcaagatattgttaaagagaccaaggcccccataaaagctgacagtcatctaagagttctttatggaaatttggcacctcaaggagcagtggcaaagatatctggtaaagaaggactcagttttcagggcaaagctaaggtttatgattctgaagagtcggctatggaaggaattttatccaatcaaatatctgaaggagacgttttggtcataagatacgaaggtcctcgcggagcacccggcatgagggagatgcttagcccaacttcggcaataatgggaaaagggcttggagataaagttgctttcttaactgacggaagattttcaggagggacacacgggtttgtagtgggccatattacacctgaggcatttgatggagggccaatatctttaatcaaagatggggatataatttctattgatgcagaaacaaaccaaataaattttgacctttcggaagaagaattgaaaaaaagaaaagagtcttgggtttgtccagtaaaagaagaagagggcggtgttcttgataagtatagatctttagttacttcagcatctttaggcgcagtaaccacaaaaaaataat

SEQ ID NO: 285714 - DNA, 403 bp, Unknown
  Bacterial polypeptide expressing nucleotide sequence isolated from the Sargasso Sea
ggacctaaaggaagtccaggtatgccagaaatgttatcgacaacagcagctattgtgggacaaggtttaggagaagaagttgctttgattactgatgggagattttctggtgcaacgcatggtttttgcatagggcatgttggaccagaagcagcgattggtgggcctataggtttagttaaggacaatgacatagtagaaattgatgctgaaaaaggtttattaaaagttcaattaaacaaaggtgaatttttgaaaagaaaaagaaaatggaaaccaaaaaaaatagaatataactcaggtactttatggaaatattcccaaaccgttggtccagcatttaaaggtgccgttacacatccaggcgcatataaagataaaaaaacgtacgcagatatataga

SEQ ID NO: 285715 - DNA, 817 bp, Unknown
  Bacterial polypeptide expressing nucleotide sequence isolated from the Sargasso Sea
aatgaaaaaatttaataaaaaaaaattaccaagtagacatacttctttaggacctgataaagctccacaaagatcattctactatgctatgaatttaaccgaaaaagacgttgcaaaaccattagtaggcgttgtttcaacgtggaatgaagcagctccatgtaacataacgttaatgagacaagctcagtctgttaaaaaaggtgttaaactttccggcggtaccccaagagaattttgtactattaccgtaacagacggtattgccatgggacacgagggaatgaaatcttccttaatttcacgagatgtaattgccgactctaccgaattaactgttaggggacactgttacgatgcattggttggcgtagctggttgtgataaatctttaccaggtttaatgatggcaatggtacgtttgaatgtaccaagtgtttttatttatggtggatcaatacttccaggaagatttaacggtaaagacgtgacagttgtcgatgtatttgaaggtgttggaaaatattcttcaggaaaaatgactgctcatgcattaagaaaattagaattgaaagcatgtccaagcgcaggttcttgtggagggcaatttaccgctaacacaatggcatgtgtttctgaagctataggattagctttaccttattctgccggaacacctgctccgtacgaacaaagagataaatatgcttttgaaagcggtaaagcagtaatgaatttattagaaaagaatattagaccaaggcaaatagttactcgtaaatctttggaaaatgctgccactatagtgctgcaacag

SEQ ID NO: 285716 - DNA, 691 bp, Unknown
  Bacterial polypeptide expressing nucleotide sequence isolated from the Sargasso Sea
aatggaagataaaggatcaaatagcaaatctaatctacctagtagatatgttagtgtagggcctaaaagtgcacctcatagatcgtattattatgctatgggtttgaaagaacatgaaatttatcaaccatttgttggtgttgttagcacttggaatgaatcagctccttgcaacattactcttcaagatcaagcgcaacatgtgaagacaggtgtcaaagatgctggaggaacaccaagggaatttacaactataacagtaacagatggaattgccatgggtcatgaggcaatgaaatcctctcttattagcagagaggttattgcagattccattgaattatctgtaagaggtcactgttatgacgcaatagttggacttgctggctgtgataaatctttaccaggtttaatgatggctatggttagattaaatgtaccatctgtatttatttatggaggttcaatcttaccaggaaaatacaaaggtaaagatgttactgttattgatgtttttgaagcagtgggaaaacatgctgctggcactatctcagatcaagatttaaaagatattgaacaagttgcctgtccatctgctggatcttgtggaggtcagtttacagcaaatacaatggcatgtatttcagaagcagttggtttggctctaacaaattcagctatgccaccagca

SEQ ID NO: 285717 - DNA, 311 bp, Unknown
  Bacterial polypeptide expressing nucleotide sequence isolated from the Sargasso Sea
tagaggtcttgggaatgatgtggcccttataactgatggaaggttctccggtggttctcacggtttcgttatcgggcatattactccagaggcgtttgatggtggtttgctgggaatagttgaaaatggtgacaatattacaattgatattaccaaacgtacaatagacctagaagtttcagaagatgaaattaaaagtcgacaagacagttgggtttgtccaaaagctcattataaccgtggggtacttgcaaaatacgcaaaactagttagctcagcatcactgggagcagtaacagatttggattaaa

SEQ ID NO: 285718 - DNA, 925 bp, Unknown
  Bacterial polypeptide expressing nucleotide sequence isolated from the Sargasso Sea
atagataagtcaaagctgcctagtagacatacaagcttaggtcccagtagtgctcctcatagatcttattattatgcgatgggaatgacaaaagaagaaattaaccaaccttttgttggagttgtatcaacatggaatgaatctgcgccttgtaatataaccttgagacgccaggcacaatccgtaaaaaaaggagtatctgatgctagtggaactcctagggagtttaccactattacagtgacagacggaatagcaatgggacatcaaggaatgaaagcttcattggccagcagagaaactattgcagatagcattgaattgagcgtaagaggtcattcttacgatgggttagtaggattagctgggtgcgataaagctttacctggagtaatgatggctatgttaagactaaatattccttcagtcttcatctatggaggttcaatactaccaggagttcataagggaaaaaatattacagtacaagacgtattcgaagctgtgggaaattttagcggaggagtgattaataaagatgagcttgaagaaattgaaaaagttgcctgtccaagtgcaggtagttgtggaggtcaattcaccgctaacacaatggcgtgtgtatctgaagctataggtttagcaattcctaattccactatggctccagctccttatgaaagcagagatgagtatggatatgaggcaggtaaaactgtaatgaatcttttagccagtgatataaggcctagagatatagttacaagagagtctttggaaaatgccgcaatggttgttgcagcatccggaggatccacaaatgctgcactacaccttccggctatggcacatgaagctggtataaaatttgatttatttgatgtagcagatatttttaaatcaacaccatacatagctgatttaa

SEQ ID NO: 285719 - DNA, 788 bp, Unknown
  Bacterial polypeptide expressing nucleotide sequence isolated from the Sargasso Sea
aaagcctggtggaaactatgtgcaaaaagatatgcatgaagccggcggagttcctatgctgttaagaactcttttagatgagggttttataaatggagattgtttaacagttactggcaatacgcttgaagaaaatatatcagaagttgtttttgataatacacaaaaagtaatttatccagcaagcagtcctattacagaaactggcggcgttgttggtttaaaaggtaattttgcacctgacggagcaattgttaaggttgctggtatggaaaatttaacttttacagggccagcaagatgttttgactgtgaagaagatgcttttactgcggtagaaaataaaaaatacaacgatggagatgttatcgttatacgttatgaaggtcccaaaggagggcctggaatgagagaaatgttatctacaactgcagctctttatggacaaggtaaaggtgataaagttgcattagttactgacggaagattttcaggcggtactagaggtttttgtataggccatgttggaccggaggcagcggatggtgggcccatagcgcttattaaagatggcgatataatatctataaacgcaaatgaaggaactatagatgttgatttatctgaagatgagttagagtctagaaaaaaacaatggattaaacctaaaacagattataattctggtacattatggaagtattccaatcaagttggtccagcaagatatggggctgtaactcatcctggcgcaaaagaagagacgcattgttacgcagatatttagt

SEQ ID NO: 285720 - DNA, 874 bp, Unknown
  Bacterial polypeptide expressing nucleotide sequence isolated from the Sargasso Sea
aaaagaaaatttcgaaaatgcgataatggtgaatggcgccatagggggttcaacaaacgcggtagttcatatgctggcgattgcagggcgtatgggaattaacataacactagatgattgggatcggttaggacgagacatcccttgtttggtaaatttgatgccgtctggcgaatacctaatggaagatttcttctatgctggagggttacctgcagtgattaaagagcttgagcagtggattaataaagatgcgatgaccgctaatggcaatacgatctgggaaaattgtcaggacgccgaatgctatagtcgggatgtaatttattccgtcaacaaaccttttaaaccaaacggagggattgccgtattaaagggaaatttagccccagatggagccattatcaaaccatcggcagcttcaccagatttaatggtacacagaggacgagccgtagtatttgagagcattgaagaataccacagtcgaatcgacgatccggaacttgatatagatgagacctgtataatggtgctaaaatattgcggcccgaagggataccccggtatggcagaggttggaaacatgggtttaccttcaaaagtactaaaaaagggtataactgatatggttcgtatctctgatgcaagaatgagtggcaccgcatacggcacagttgttctgcatactgcccccgaagcagcagcgggggggagccttgcattcgttgaaaacggagattttatcgaattagatgttccaaaccgaaaactacacctggaaattagcgatgaagagttggcaaaacggaaagctggctggaaacgggttttcatctccctacgaaaggggttacacaaagatttatgttga

SEQ ID NO: 285721 - DNA, 441 bp, Unknown
  Bacterial polypeptide expressing nucleotide sequence isolated from the Sargasso Sea
agggcctgatcgagcaccacaccgttctttttattatgctatgggagagacagaacaggatgttgcaaaaccatttgttggagtcgtttctacttggaacgaagctgcaccatgcaatacagctttaatgagacaagctcaatctgttaaaaaaggagtaaaagaaaacggtggaacaccaagagaattttgcactattacagttactgatggaattgctatgggacatgaaggaatgaagtcatcacttatttcaagggaaattatagcagactctgctgagttaacagtcagaggacattgttatgatgcgttagtaggtattgcaggatgtgataaatctttaccaggcttgatgatgtctatgctaagattaaatgttccaagtgtctttatatatggtggttccattttacctggtaaatacaaaggaaaagacgt

SEQ ID NO: 285722 - DNA, 742 bp, Unknown
  Bacterial polypeptide expressing nucleotide sequence isolated from the Sargasso Sea
atgcggaaatttaacaaaaaaaaactaccaagtagatatacaactgtaggtgctgatagagcaccacaaagatccttttattatgcaatggatttaacggaaaaagatgtagcaaaaccttttgtaggtgttgtttcaacttggaatgaggctgcaccatgcaacattaatttgatgaaacaagctcaatttgtaaaacaaggtgtaaattcatcaggaggaactcctagagaattttgtacaataacagttactgatggtatcgctatgggtcatgaaggaatgaaatcttcattgatttcaagagatgtaattgcagactccactgaattgactgtaagaggtcattgttatgatgctttagttggtttagctggctgtgataaatccttaccaggtctaatgatgtctatggttagattaaatattcctagtgtatttatttatggtggttcaatacttccaggtagatttgaaggtaaagatgtaactgttgttgatgtttttgaaggtgttggaaaatatacatcaaaaaaaatgacagctcatgcacttagaaaattagaattaaaagcctgtccaagtgcaggtgcttgtgggggtcaatttactgcaaatacaatggcgtgtgtttcagaagcaattggattagccctaccatattcagcaggaacacctgctccatataaagaaagacacaagtacgctattaacagcggtaaagctgtaatgaaactttaga

SEQ ID NO: 285723 - DNA, 788 bp, Unknown
  Bacterial polypeptide expressing nucleotide sequence isolated from the Sargasso Sea
attaccaagtagacatacatcattaggaccggataaagcgccacaaaggtcattttattacgcaatgaatttaaccgaaaaagatgttgctaaaccatttgtcggagtggtttcaacatggaatgaagcagcaccttgtaatatagcattaatgagacaggcacagtcagttaaaaaaggtgttagcctttcaggtggtacaccaagggagttttgtacaattacggttactgacggtattgctatgggtcatgaaggaatgaagtcttcacttatctcaagggatgtaattgcagattcaaccgaattaacagtaagagggcattgttacgatgctctagttggagttgcaggttgtgataaatctttaccaggattaatgatggctatggttcggctaaatgttccaagtgtttttatatatggtggttcaatacttccgggtagatttaatggaaaagatgtaactgtagtagatgtatttgaaggtgttggaaaatattcttcaggaaaaatgactaaacatgcattaagaaaattagaattaatagcatgcccaagcgctggagcatgtggtggacaatttaccgctaatacaatggcatgtgtttctgaagcaattggtttagctttaccttattcagctggtactcctgcaccatacgagcagagagacaaatatgcattacaaagtggtaaggcagtaatgaatttattaaaaagaaatatcagaccaagacaaattgtaactcgaaaatcattagagaatgcagctacgattgttgctg

SEQ ID NO: 285724 - DNA, 880 bp, Unknown
  Bacterial polypeptide expressing nucleotide sequence isolated from the Sargasso Sea
aatgaaaaattttaataaaaaaaaattaccaagtagacatacatcgctgggtccagacaaggctccccaaaggtcattttactatgcaatgaatttaacagagaaggatgttgcgaaaccatttgtgggagtagtttcaacttggaatgaagctgcaccgtgcaatattgctcttatgagacaagctcaatcagttaaaaaaggagttaaatcttcgggaggaacaccaagagaattttgtacgattacggtaactgatggtatcgcaatgggacatgaagggatgaaatcttcattagtttcaagagatgtgattgcggactcaacagaattaaccgttcgaggtcattgctatgatgcattagtcggtgtagctgggtgtgataaatctttgccgggtttaatgatggcgatgcttagactaaatgttcctagtgtatttatttatggtggatcaatccttccaggtagattcaatggaaaagatgtaacagttttagatgtttttgaaggtgtaggaaaatattcctcaggcaaaatgacggaacatgctttgagaaaactagaattaaaagcttgtcctagtgctggtgcatgtggtggtcaatttaccgcaaatactatggcttgtgtatctgaagcaatcggattagctctcccttattctgcaggaacaccagctccatacgaacaaagggataggtatgctttacaaagtggtaaaacagtaatgaatttattaaaaaaaaatattagacctagagatatcgttacaagaaaatcattagaaaatgcagcaactatcgtagcagctaccggaggatctaataatgcagctttgcatttaccagcacttgcaaatgaaataggaattaaattt

SEQ ID NO: 285725 - DNA, 814 bp, Unknown
  Bacterial polypeptide expressing nucleotide sequence isolated from the Sargasso Sea
agtattgttactagctataaccgtaacttcccaaaaagaaatgacggatacgcttccacatttgcctttgtgacttcacccgaaactgttgttgctttgagtatcgccggaaaactcgattttgatcccgcagttgattctttaactacagaaaacggcgaagaggtaaagctttccgtggatgttggagaagaacttccgtctaagggtttcgactctggagaagaaggcttatttaaacctcctccatctgaaaattctcaaattgaaatttctatttcccaagaaagcgaaaggcttcaagctctcacgcccttcgctccttgggacgggaatgacttcgagggtctacctgttttgatgaaagcaaaaggtaaatgcactaccgatcacatttcaatggcaggttcttggttgaaatatagaggacatttggaaaatatttcagggaatctctatttaggagtagttaactcctttactggagaaattggaactggagtagatatcacagacaatcagataagacctttccctgaaatagcaaagcgctaccacgaagcaggaatcgagtgggtagcaattggcgatgaaaatattggtgaggggtcttccagggaacatgccgctatggaacccagatttagaggatgtcgtgtagttatagcacgttcatttgcgcgaattcacgaaaccaacttgaagaaacaaggaatcctacctttaactttcgccaatccaggcgactatgacttaatcgggcaggaagacagaatttcagtgatagatatcaaaaatatgagagcgaatgaac

SEQ ID NO: 285726 - DNA, 712 bp, Unknown
  Bacterial polypeptide expressing nucleotide sequence isolated from the Sargasso Sea
aatggcaaaatttaataaaaaaaaattaccaagtagacatacatcattaggaccagataaagctccacaaagatcattttattatgcgatgaatttaaccgaaaaagatgtcgctaaaccttttgttggtgttgtttctacatggaatgaagcagctccttgcaatatagcattaatgagacaagctcaatctgttaaaaaaggtgtaaaactttcaggaggtactccaagagagttttgtacaattacggttactgatggaattgccatgggtcatgaaggaatgaaatcttcacttgtatcgagagatgtaattgcagattcaaccgaactaactgtaagaggtcattgttatgatgctctagtaggagttgcaggttgtgataaatcattaccagggttaatgatggccatggttcgattaaatgtaccaagtgtttttatttatggtggatcaattcttccaggaagatttaatggaaaagatgtaaccgttgtcgatgtattcgaaggagttggcaaatattcatctggaaaaatgacagaacatgctttgagaaaattagagttagtagcttgtcctagtgcaggtgcctgtggaggacaatttactgcaaatacgatggcgtgtgtctctgaagccattggattagctttaccttattccgctggaacaccagcaccttatgaacaaagagataaatatgcttta

SEQ ID NO: 285727 - DNA, 437 bp, Unknown
  Bacterial polypeptide expressing nucleotide sequence isolated from the Sargasso Sea
tgagcaggatgctctagatgcgttattcaataacaagattgaaaaaggagatgttgttgtaattagaaacgaggggccaaaaggtggtccaggtatgagagaaatgcttcaaattacagctgcaataaaaggtgcaggtttaggaaaagatgtcctgttgattactgatggtcgattttctggtggaactactggtttatgtattggccacgtaacaccagaaagtttcgatctaggacctattgcaatatgtcaaaatggtgatctaattaatttgaatttatcaaaaagagagttgaacttggaattgacagaatctgaaattaaaaaaaggtttgagtcctataaacttcctgaaccaagatacaaatctggagttttaagtaaatactccaaattagtttcaggagctgattcaggagcggttacctcataaa

SEQ ID NO: 285728 - DNA, 196 bp, Unknown
  Bacterial polypeptide expressing nucleotide sequence isolated from the Sargasso Sea
atgcttcgctccgacgccgtcaccaaggggattcagcggtctcccaaccgcgccatgttgcgggccgtgggctttggagacagcgatttcggcaagcccatcctgggcatcgccaacggctacagcaccatcaccccctgcaatgtggggctgaacgacctggccaaacgagctgaggaagcggcccggcaggccg

SEQ ID NO: 285729 - DNA, 435 bp, Unknown
  Bacterial polypeptide expressing nucleotide sequence isolated from the Sargasso Sea
aatctggtgatgtaatagttataagatacgaaggtcctaaagggagtcctggtatgccagaaatgttatctactacaggagcaatttacggacaaggattaggagaaaaagttgctttaattaccgatggacgcttttccgggggaacgcatggtttttcaataggccatataggtccagaagctgcagtaggaggaccaataggtttgattaaaaacggagatgttatcgaaatagatgctgaaaagggaatcttaaaagttaatttgtctaaaaaagaattatccaaaagaaaaaagaaatggagaccaaaaaagatagaatacacttcaggaacattatggaagtattcaagatcagttggtccagcttttaaaggagctgttactcaccctggtgcagcaaaagaaaaaaaatgttatgctgacatataaa

SEQ ID NO: 285730 - DNA, 568 bp, Unknown
  Bacterial polypeptide expressing nucleotide sequence isolated from the Sargasso Sea
atggctaaatttaataaaaagaaacttccaagcagacatacatcattaggggcagacagagctccacacagatcgttttattatgcaatgggagaaactgaaaaagatgtagcaaaaccctttgttggtgtagtttcaacgtggaatgaggcagcaccttgtaatattgcgctaatgagacaggctcaatctgttaaaaaaggagttagagcaagtggtggaaccccaagagaattttgtacaattacagttactgatggtattgcaatgggtcatgaaggaatgaagtcctcattgatatctagagaagtaatcgctgactcagctgaacttacggttagaggtcactgttatgatgctttagttggtattgcgggatgtgataaatccttaccaggtttaatgatgtctatggttagattaaatgtaccaagcgtatttatatatggtggatcaatccttccaggcaaatataaaggaaaagacgtaacagttgtagatgtatttgaagcagttggaaaacattcaacaggtcaaatgtctgctgcagaacttagaaaattagaat

SEQ ID NO: 285731 - DNA, 310 bp, Unknown
  Bacterial polypeptide expressing nucleotide sequence isolated from the Sargasso Sea
catgggacttggtttaggagataaggttgcatttattactgatggaaggttttctggcggtactcatgggttcgttgttggacatatttctcctgaagctgccgatgggggtcttattgcattaattgaagatggagacagcatcttaattgattcaaatactgacaaattaacattaaaagttaatgaagatgagatagaaaaaagaaaatcaaattggaataatcctacaaaaactcctaaaaaaggagtcttatccaagtatgcaaaaagcgtacaatcagcaagcctaggagcaataaccgattaa

SEQ ID NO: 285732 - DNA, 757 bp, Unknown
  Bacterial polypeptide expressing nucleotide sequence isolated from the Sargasso Sea
cgcgcggtttgatccgccggcgccggacggcgacgtgattcacccggtttcggcaccctacaagccgacaggcggtcttcgtgtcctcggcggcaacctctcgcccgaattcagcgccgttctgaagcttgccggtgtcgagggcggtctggagaacaatatattcgccggaaccgcacggatcttcgacggcgagcagaagcttctcgagatgctcgacagcacgccggagaaattccaggacggcgacatgatcgttgttcgctatgaagggccggttggcggcccgggtatgccggaaatgctggattcgacttcgcggatcaccgccctgtgccgtgaacgcggcattgtcgtcggcctgatgaccgacggccgcttttcgggcgggtccgtcggtcttgtcatcggccatgtcgggcaggaggccgctgtcggcggcccgatcggccttctcgaggatggcgacgaggtgattgtcgatctgaacgacaacgagctgaactgcccgcagctagacgatccacaggtgcgtgccgcccgcaaggcacaatgggatgcggccgtcgaggcgaatggcggcacccatccgtcggtcggcgatgcgaatacacgtcttctcaacaggatgcggtgttccgcggtgtcggctgttcagggggcgggcatgcatcctggcgggtcgctgtttgttccggagccgcgcgcggcggtcgccacggatttcacgccggcgaaccggcaccgcgaaagctag

SEQ ID NO: 285733 - DNA, 861 bp, Unknown
  Bacterial polypeptide expressing nucleotide sequence isolated from the Sargasso Sea
tcagaagatccaagaaggataaaagaatttccagaggaattggtagattatcttagtaatctaataaataaagatattactccaagagatattgttacaaaagattctttaagaaatgcaataatagttgcaatgagtgttggaggatcaactaatgttatgctgcacgctccagaattagcaagggctgcagggtatgcaaattttaatagagatataatgagctctgaagaatttaactatttgtcagaaaaagttataccagttgtagttaatgctagaccctttggaaaatattctatggtggatattgatgacaaaggtggaatacaagtaataattaaaaatcttctagaggcaggtttacttaatggaaaaaccctaacttgtacgggagaaactcttgttgaacaagtagaaagattatccccacctgacccagatggtgaaattatttacaaaatcgaaaatccttttaaaaaaacaggtggtttaagattattaggcggtaatttatcccctgaattcagtgctattctcaaactagcgggtgttgagggtggccttgaaaatggggtttttaaaggaaatgcaaaagtttttgatggtgaacagagtttattaaatacactagataattcccccgaaagttttgctaattttgacatggtggttgttagatatgaaggtcctgtaggtggaccaggtatgccagaaatgttagactcgacgtctagaattaccacattatgtagagaaagaaatattattattggtttaatgactgatggaagattttctggaggttctgtaggtttagtaataggacatgtagggccagaagccgctataggaggacct

SEQ ID NO: 285734 - DNA, 631 bp, Unknown
  Bacterial polypeptide expressing nucleotide sequence isolated from the Sargasso Sea
aaaattagctggtgttgaaggtggactcgaaaataatgtctttgtagggacagcgagagtttttgatggcgaacaaggacttttatattctctagcaaacgaacccgaaatttttcaaaatggagacatgatcatagtgcggtacgaaggtccaagtggagctccgggcatgccggaaatgttggactctacttcgcgtattactacactttgtagggaaaataatatcgtcgttggattaatgactgatggccgtttctcaggtggatcagttggccttgtgattgggcatgttggcccagaggcggcacttggtggggaaatcgcacttatcgagaatggcgatgaaattattattgatctcaatttaaatgaaattaattgtacgcctttacaaaatgaagaaacattaaataagcggcgtaatttatggaaagagacagtagaagctaatgggggaactcacccgtcaataggtctagccgacacgcgacttttgaataggatgcgaagatcagcggtgtctgccgtttacggcgcaggcatgcacccggatagacagctatgggtaagtgaaccgcgtgatccggtaatgacagatttctcgccaacaaataaataccgtgactaa

SEQ ID NO: 285735 - DNA, 925 bp, Unknown
  Bacterial polypeptide expressing nucleotide sequence isolated from the Sargasso Sea
agggaagtgattgcagattcagttgagcttacaatgagaggtcactgttacgatgcactcgtaggtttagctggatgtgataaatcactaccaggcttaatgatggtaatgcttcgacttaatgttccttcagtttttatttatggggggtcaatactaccaggaaaatttaaaggtaaagatgtaacaatagtagacgtgttcgagggagtaggaaaatattccacgggaaacatgtctaaaaaagatttgctaaagttagaaagtgttgcttgcccttccgcagggtcttgcggaggccaatttactgcaaacacaatggcttgtgtatctgaagcaataggtctagcacttcctggatcagcaggcacaccagctgtttatgaaactagggataagtttgctgctttaagcggtcatgcagtaatgaatttattaaaaaaaaatataaggcctagagatattgtcactaaaaaatctttagaaaatgcagctgtagtagtagctgcttcaggaggatcaacaaatgctgctttacatttaccagctatagcaaatgaagctggaatcaaatttactttagaagatgttactaatatatctaaaaaaacaccttatatagcagatttaaaacctggcggtaaatatgttgctaaagatctttatgaaattggtggagttcctgtattaattaaagcattattagatggcggttatttacatgacgactgtatgacagtttcagggaaaactataggagaaaatcatagaaatgttgagttcccaaataatcaaaaaataatttacaaaacctctaaaccgttaagtccaagaggaggttttgttggtttaaaaggcaacttagcgcctgatggagcaattgttaaagttgctggcatgaatagaaaaaaattaaaggtaaagc

SEQ ID NO: 285736 - DNA, 322 bp, Unknown
  Bacterial polypeptide expressing nucleotide sequence isolated from the Sargasso Sea
aatgcgaaaatttgataaaaaaaaattaccaagtcgacacacatctttaggtgctgatagagctcctcatcgttctttctattatgcaatgggtgagacagaaaaagatgtgtcaaaaccttttgtgggagttgtatctacatggaatgaggcagctccttgcaatatagctttaatgagacaagctcaatcagttaaaaagggtgtaagagcatcaggcggaacacctagggaattctgcacaattactgttactgatggtatcgcaatgggtcatgagggaatgaaatcttcgttgatctcaagagaagtaatagcagat

SEQ ID NO: 285737 - DNA, 558 bp, Unknown
  Bacterial polypeptide expressing nucleotide sequence isolated from the Sargasso Sea
cgatacttcgcgggaacctatcacctgaaggctgcgttgttaagcttgcaggacatggtaggagattgcaccgaggtcctgccaaagtatttgagcgcgaggaagaatgtttttcagctgtgagaaatggagagatcgttgacggagatgtcgtagtaattcgttatgaaggcccagtcggtggtcctggtatgcgagagatgcttggcgtaaccgcagcaattcaaggtgcggggctgggtgatacggtggccttaatcactgatggtagattttcaggtgccacacatggctttatggtcggccacataactcctgaggctgctgttggtggcccaattggtttagtaaagaatggtgactatatagtcctagacgttgaaaatagagaattaaatttggaagtagattccgaggaactatcgcggcgtaaagctgaatggactgcccctgcgccaaaatataccactggagtattttcaaaatatgcaaaaagcgttgcttccgcgagcgaaggcgcgataactagcccaggtctgacgggaagtatctggtaag

SEQ ID NO: 285738 - DNA, 397 bp, Unknown
  Bacterial polypeptide expressing nucleotide sequence isolated from the Sargasso Sea
aatgtggaagtttaataaaaagaaattacctagtcgtcatacatctttaggcgctgatagagctccacatagatcattttattatgcaatgggcgaaactgaaaaagatgtctctaaaccatttattggtgttgtatcaacatggaatgaagcagctccttgtaacatagctttaatgagacaagctcagtcagttaaaaagggtgttagagcatctggaggaacgccaagagaattttgtacaattacagttactgatggtattgcaatgggtcacgaaggtatgaaatcttcgttaatctcaagagaagtaatagctgatagtgcagaactaactgtaagaggccattgttatgatgcattagtaggtattgcaggttgtgataaatcttgccag

SEQ ID NO: 285739 - DNA, 376 bp, Unknown
  Bacterial polypeptide expressing nucleotide sequence isolated from the Sargasso Sea
aatgcggaagtttaataagaagaaattacccagtagacacacatctttaggagctgatagggccccacatagatcattttactatgcaatgggtgaaactgagaaagatgtttcaaaaccctttgtaggcgttgtatctacatggaatgaggctgctccgtgtaatattgctttaatgagacaagcacaatcggttaagaagggtgtcagagcttttggtggaactccgagagaattttgtacaattacggttactgacggtattgctatgggtcatgaaggaatgaaatcttcattaatctctagagaagtaatagcagatagcgctgaattaactgttagaggtcattgttatgatgcattagtgggtatcgca

SEQ ID NO: 285740 - DNA, 528 bp, Unknown
  Bacterial polypeptide expressing nucleotide sequence isolated from the Sargasso Sea
tatgtcaaaaatatcagatgatgtaacaaaaggtgtggagaaagctgcagcaagagctatgctaagagctgtaggcctcgatgatgaggactttaataagtatcaagtaggaattgtttcggcaggaaatgaagttactccctgcaacttgactgggccagaactttctgagcatgcaaagaaaggtgttaattacaaagatgctgtaggtttaatattctctactatcgcagtctcagatggaatttctatgggccatgaaggcatgagagcttccttagtttctagggaagttattgcagattctgtagagctagttatgcacgctgaaagatttgatggaatggttaccattgctggatgtgacaaatctctacctggaatgttaatggcttctgctagagtcaacaggccatcaatttttctatatggaggaagtagtttacctgggaagcataagggaaaagatatttcgattgttgatgtttttgaagggattggttcagtaggtaaagggttgatgacaga

SEQ ID NO: 285741 - DNA, 625 bp, Unknown
  Bacterial polypeptide expressing nucleotide sequence isolated from the Sargasso Sea
aatgcggaaatttaataaaaaaaaattacctagtagacacacttcattaggtccagataaagcgccacaaagatctttttattatgcaatggatctaacagaaaaagatgtagcgaaaccttttgttggtgttgtttcaacctggaatgaggctgcgccatgtaacattaatttaatgaaacaagcccaatctgttaaaaaaggtgttcattcagcaggcggtacaccaagagaattttgtacaattaccgtaacagatggaattgcaatgggacacgaaggaatgaagtcgtcgttaatttctagagatgtaattgcagattcaacagaacttacagttagaggccactgttatgatgctttagtcggtttagctggttgtgataaatcattaccgggtcttatgatgtctatggttcgattaaatgtgccaagtgtgtttatttatggtggatcaatattaccaggaagatttaatggtaaggatgtaactgtagtagatgttttcgaaggcgttggaaaatatacatcaaaaaaaatgactgctcatgctttaagaaaacttgaattaaaagcatgtcctagcgcaggtgcttgtggtggacagtttactgcaaacacaatg

SEQ ID NO: 285742 - DNA, 496 bp, Unknown
  Bacterial polypeptide expressing nucleotide sequence isolated from the Sargasso Sea
aaagcaaagtgttttgattgtgaggaagatgcacttactgccgttcttaaaaatgaaatagtagctggagatgcagttattattcgctatgaaggcccaaaaggaggacctggtatgagagaaatgctttctactactggtgctatatacggtcaaggactaggagaaacagtagcgttaattacagacggaagattttctggaggaacaagaggtttttgtataggtcatgttggacctgaagctgcagtaggaggtatgattggattattaaaagatggagatgaaattattatagatgcaattaagggtgagataaatgtaaatttatctcaatcagaaattgataaaagaaaaaaagaatggaaaccaagaaaaacaaatcataattctggcactatatggaaatatgctcaaactgtagggcctgcttatgaaggagcagtaactcaaccgggagctaaagaagaaacgcatacctacgctgatatttaat

SEQ ID NO: 285743 - DNA, 483 bp, Unknown
  Bacterial polypeptide expressing nucleotide sequence isolated from the Sargasso Sea
aaggcccagcagttgttttcgataatgaatttgctgcaattgatgggattttagatggaacagtaaaaaaaggaaatgtaattgttattcgttttgaaggtcctaaaggaggtcctggaatgcctgaaatgttaaaaccgacttctgctgtaatgggagctggtttaggacaagatgttgctttaattactgatggaagattctctggaggttcgcatggttttgtagtgggtcatgtatctcccgaagctcaggaaggtggtgtcattggtttagttaaaaatggggatattattacgattgatgcggagaacaatgttatgaacgtggatgtttccgacgaagaattggaaaatagaagaaaggattggaaaccgaaagaattacctaaaagaggtgttttagccaaatatgctcgtcaagtaagcagtgcatctacaggagccttaacggatttttttcagttgaataaagtatcttaat

SEQ ID NO: 285744 - DNA, 439 bp, Unknown
  Bacterial polypeptide expressing nucleotide sequence isolated from the Sargasso Sea
tacaaagatggagacatcattataattagatatgagggaccaataggaggtcctggaatgagagaaatgcttcaaacaactgcagcaatctacggtcaagggaaaggggagaaagtagccctcattacagacggtaggttctctggggctactagaggcttttgcatcggtcatgtgggccctgaggcctccgtaggcggtcctatagcccttttaaggaatggggatgtcatcgatatagacgctaaaaagggcacaattaacgtaaggcttacaaagaaggaattaagtgcaagacgcaaaaaatggaaaccaagaaaagtgaattttggtaatggaacattatggaaatatgcacaaacggttggtcctgcttataaaggtgcaccaactcatccaggtggtaaaaacgaggttaggacgtacgctgatatttaat

SEQ ID NO: 285745 - DNA, 493 bp, Unknown
  Bacterial polypeptide expressing nucleotide sequence isolated from the Sargasso Sea
agctaagtgttttgattgtgaggaagatgcacttactgctgttcttaaaaatgaaatagtagctggagatgcagtaattattcgttacgaaggccctaaaggagggcctggtatgagagaaatgctttctactactggtgctatatatggacaaggtctaggagaaacagtagctttaattacagatggaagattttctggtgggacgagaggtttttgtataggtcatgttggaccagaagctgcggtaggaggtatgattggattattaaaagatggagatgaaattattatagatgcaattaagggtgaaataaatgtaaatttatctcaatcagaaattgataaaagaaaaaaagaatggaaaccaagaaaaacaaatcataattctggcactatatggaaatatgctcaaactgttggaccagcttatgaaggggcagtaacccaaccaggagctaaagaagaaactcacacctacgccgatatttaa

SEQ ID NO: 285746 - DNA, 610 bp, Unknown
  Bacterial polypeptide expressing nucleotide sequence isolated from the Sargasso Sea
ttatgatgcattagtaggattagcaggatgtgataaatcattaccaggattaatgatgtctatggttagacttaatgttccaagtgttttcatttatggaggttcaattttaccaggtagatttaatggtaaagatgtaaccgttgttgatgtaattgaaggtgttggcaaatatcattctggtaaaatgtcattacatgcacttagaaaattagaacttaaagcttgtccaagtgctggagcttgtggtggacaatttactgcaaatactatggcatgtgtatctgaagctattggattagctttaccttattcagcaggaaccccagcaccttataccaagagagacaaatatgctgttgatagcggtaaagcagttatgaatttattagcaaaaaatataagaccaagagatatagtaacaagaaaatctttagaaaatgctgctacaattgttgctgccacaggcggatcaacaaatgcagcactgcatcttccggcaattgctaatgaaataggaattaaattcgatttaatggatgtagcaaaaatttttaaaaaaactccttacttagcagacctaaaacctggtggaaaatatgttgctaaa

SEQ ID NO: 285747 - DNA, 405 bp, Unknown
  Bacterial polypeptide expressing nucleotide sequence isolated from the Sargasso Sea
aaggtcctaaaggtggaccgggtatgagagaaatgttgcaaactactgccgcaatttatggccaaggaatgggagaaaaagttgcacttataacggatggaagattttcaggagcaactagaggtttttgtattggacacgtgggtcccgaagcatctgtaggtggtcctataggattattaaaaaatggagatataattcatatagatgctaaaaaaggaataattaatgttaatctttcaaaaaaagaattattaaaaaggaagaaaaagtggaaacctaaaaaaattaattttggaaacggaacactatggaagtatgcacaaactgttggtccagcatatcttggtgcttcaacacatcctggcggtaaagaagaagtcaagtgttacgcagatatctaaa

SEQ ID NO: 285748 - DNA, 445 bp, Unknown
  Bacterial polypeptide expressing nucleotide sequence isolated from the Sargasso Sea
aatggcaaaatttaacaagaagaaacttccaagcagacatacatcgttaggagcagatagagctcctcatagatcattttattatgctatgggtgaaactgagaaagatgtagcaaaaccctttattggcgtggtttcaacatggaatgaggcagctccttgtaacatagcactaatgagacaagctcaatctgttaaaaaaggtgttagatcaaatggaggtactccaagagaattttgtaccatcactgttactgatggaattgcaatgggtcatgaaggaatgaaatcctctttaatatcaagagaagttattgcagattctgcagagttaacagtcagaggacactgttatgatgcattagttggtattgcaggatgtgataaatctttaccaggcttaatgatgtcgatggttagattaaatgttccaaggtgtatttat

SEQ ID NO: 285749 - DNA, 553 bp, Unknown
  Bacterial polypeptide expressing nucleotide sequence isolated from the Sargasso Sea
aatgcggaagtttgataagaaaaaattaccaagcagacatacatctttaggagctgatagagcgccacatagatctttttattacgcaatgggtgaaacagaaaaagacgtatcaaaaccatttgtaggcgttgtatcaacatggaatgaggctgctccttgcaatattgctctaatgagacaggctcaatcggttaaaaaaggtgttagagcttcaggtggtacacctagggagttttgtacaattactgtaacagacggtattgcaatgggtcatgaaggaatgaaatcttcattaatttctagagaagtaattgcagattctgcagaacttactgttagaggccactgttatgatgcattagtaggtatcgcaggttgtgataaatctttaccaggtttaatgatgtcgatggttagattaaatgtgccaagtgtatttatttatggaggttcaatccttccaggaaaatacaaaggtaaagatgtaactgttgttgatgtttttgaggctgtgggaaaacattcatcaggtcaaatgtcagcaaaagaa

SEQ ID NO: 285750 - DNA, 319 bp, Unknown
  Bacterial polypeptide expressing nucleotide sequence isolated from the Sargasso Sea
atggggaaaaaaagatcaatacaaagcggacatcgccgctattcaaagctcgttacggatacaaatgccagagctgcaagcagaggtatgctttatggagtgggatttaaaaaagatgattttaagaaatctcaaattggtatagcatctacatggggaaatgttacaccttgcaacatgcatattaatgatttagcagaacattcagcaagaggagtaaaaaaagctaagggtgtaccactaactttcggcacaattactgtgtcagatggaatttctatgggaactgaaggtatgaaatactctctagtttctagag

SEQ ID NO: 285751 - DNA, 443 bp, Unknown
  Bacterial polypeptide expressing nucleotide sequence isolated from the Sargasso Sea
tatgtcaaaaattgataaaaaaaaattaccaagccggcatacttcattaggacctgatagagctcctcatagatctttttattatgcaatgggagaaaccgaacaagatgtagccaaaccttttgtaggtgtagtttcaacttggaatgaagctgctccttgtaatactgctttaatgaggcaggctcagtcagtaaaaaaaggggtaaagcaatcaggcggaacgccaagagaattttgcacgattactgttactgatggtatcgctatgggtcatgaaggcatgaaatcatctttaatttctagagaggttatagctgactcagctgaactaactgttagaggtcattgctacgacgctctagtaggaattgcaggatgtgataaatctttaccaggttttatgatgtcgatgttgagattaaatgttcctagtgtattta

SEQ ID NO: 285752 - DNA, 462 bp, Unknown
  Bacterial polypeptide expressing nucleotide sequence isolated from the Sargasso Sea
aatgcggaagtttaataagaagaaattacccagcagacatacatctttaggtgctgatagagcaccacatagatcattttattatgcaatgggtgaaactgaaaaagacgtctccaaaccatttgtaggcgttgtatctacttggaatgaagctgctccgtgtaatattgcattaatgagacaagcgcaatcagttaaaaaaggtgtaagagcctttggtggaactccgagagaattttgtacaattacggttactgacggtattgctatgggtcatgaaggaatgaaatcttcattaatctctagagaagtaatagcagatagtgctgaacttactgttagaggtcattgttatgatgcattagtgggtattgcaggttgtgataaatctttaccaggcttgatgatgtcgatggttcgattaaatgttccaagtgtttttatttatggaggatcaatact

SEQ ID NO: 285753 - DNA, 905 bp, Unknown
  Bacterial polypeptide expressing nucleotide sequence isolated from the Sargasso Sea
aactaatcaaatcttaccaagagatatagttacaaaagaatctattagaaatgctataattgtttcaatggctataggtgggtcaactaatgtgatgctgcatgcgccagaaatttcaagagcggcaggatatagtaatttttcaaaagatataatgtccccatctgagtttaattatttatctgaaaaagttgtcccagtaatagttgatgctagaccatttggaaagttttcaatggttgatattgataaaaaaggtggaattgaagttatagtaaaagacttattaaatgctggactattaaatggaaatacaatgacttgcacaggagaaacactctacaaacaattaacaagattaaaaccaaaacaaccagatggtaaggtaatatattctgtaaaaaaaccttttaaaaatactggtggtttaaggattcttggcggtaacttatcacctgacaaaagtgctattttaaaacttgctggtgtagaagtaggtctagaaaaaaatatttttgtaggaaaagctaaagtttttgatggcgaacaaaaacttttagaaacgttagaaaaaaatccaagtaaatttaaaaataaagatattgttgttgttagattcgaaggacccgttggaggcccaggaatgcctgaaatgcttgattcaacttctaggattacaactctttgtagagaaaaaaatattgttgtagctttaattacagatggaagattttctggtggttcagttggacttgttattggtcatataggtcctgaagcagcacttggtggaccaattgccttaattaaaaatggagataaaattgagattgatcttaataaaaacaaaatcttttgtcatgagctagataattctaaaattttaaattcaagggaaaaggatt

SEQ ID NO: 285754 - DNA, 418 bp, Unknown
  Bacterial polypeptide expressing nucleotide sequence isolated from the Sargasso Sea
aatgtctaagggtaatagaaaatattcttcaaaaatagttgacggtgtcgagcaggctccttcaagagctatgttaagagctgtaggttttgaaaatgaagattttaataaaccacaagtaggagttgcttccacatggagtatggttactccttgcaatatgcatattgataagttagcagattccacagttaaaggtgtaaacgaatctggttctaaaggtgtcatttttaatacaattacagtttcagatggaatttcaatgggaactcaaggcatgagattttcgttagtttctcgcgaagtaatagctgattcgatagaaactgtagtaagtggtcaaggatttgatggcttggtgactatagggggatgtgataagaatatgcctgcctgcttaatggctatggctagattg

SEQ ID NO: 285755 - DNA, 723 bp, Unknown
  Bacterial polypeptide expressing nucleotide sequence isolated from the Sargasso Sea
tgcaagtccacctgcagaagatgatagacgaaacataatggtacttgaaacgggaaaagcatgtgcaaaattactacaattaggcataaaaccactagatattgtcacatttgaggcatttgagaattcaattacgatgctaaatgcggtaggaggttctacaaatggaattttacatttattggcaatggcaaatgaggcaggaattaatctaacatatgatgattttgaaagaattagaaaaaagacaccacatcttgcagatatgaaacctggaggaaattatgtaatgaatagtttagacaaaattggaggaattccattagttatgaaaaaattacttgataaaaatctgattcacggagattcattaactgtcactggtaaaaccatcaaagaaaatttagaagagttggcaatagtagaagttccagatcaacaaataatcaaaccagttgaacaacctatacatgaagttggaactgccgtaattctaaaaggaacgttggcaccagagggaggagtaatcaaaacggcaggagttgaaatgacagaatttacaggaacagcaaaagtttttgatagagaagaatacgcatttgaagcagtttctaaaggagagatagacgaaggagatgtcgtagttattagatatgaaggacctaaaggcggcccaggaatgagagagatgttgtctactactgcagcacttgtaggtcaagg

SEQ ID NO: 285756 - DNA, 614 bp, Unknown
  Bacterial polypeptide expressing nucleotide sequence isolated from the Sargasso Sea
tccaagtgtttttatatacggaggatcaattttaccaggaagattaaatggtaaagatataaccgttgtagatgtttttgaaggagttggaaagtattcttcaggaaaaatatcagaacacgcactaagaaaaatagaattaaaagcatgtccaactgctggtgcttgtggtggtcagtttactgctaatacaatggcatgtgtatcagaagcaatgggattagctttaccttattctgctggaactccagctccatttaatagaagagataaatacgctctaggtagtggaaaagcagtaatgaatttattagcaaaaaatattagaccaagagatattgtaacaaaaaaagctttagaaaatgctgcaacaattgttgctgcaacaggcggatcaacaaatgcggctttacacttaccggctattgcaaatgaaattggtattaaatttgatttaatggatgttgctaaaatatttaaaagaactccttatcttgcagatttaaaacctggtggaaaatacgtagcaaaagatatgtggaaagtcaggtggtgttccgaatgttacttaaaactcttatggatggtggatatattcacggaaattgcatgac

SEQ ID NO: 285757 - DNA, 772 bp, Unknown
  Bacterial polypeptide expressing nucleotide sequence isolated from the Sargasso Sea
gagtatctgatgtatcatctgcacgaaataggaggtcttcctaggtttatgaaaatgttggaaattaaaggtttacttcacttggattgtctaacagttactggaaagatgctaggtgaaaatttgaatgaggtttcatttaagcactatcgtgaggtcgaacatattattccttctaaaaaccctcaaagttcacacttgaaaatactctctggaaatctgtcacctaatggatgtgtagctaaaatatcagggaaagaaggagattattttcgaggtgaagctttggtttttgaatccgaggaacaatttatgggttatctaagccaaccagaaactattgcttattttcaagactcatgctctcacaaaaaagttatggttattagaaatcaaggtcctaagggaggtccaggtatgcccgaaatgctaaaacccacgtctgctatcattggaatgggtattcaagataaagtagctttaattacagatggtagattctcaggaggttcacatggttttatcattggtcatatatcacctgaagcatatttagggggacccatctctcaggtaaacaatggtgatataattacaattaactgtcaaacaaactcaattgattgggagtccaatttcaaagacccagaggcagtttttaatccaaatcccatcaaactattagagaataagaaaataaggagtgggtttctaaaaaaatatcaagtatcagtttctggatctgaagagggatgtgtgactgttaattaag

SEQ ID NO: 285758 - DNA, 395 bp, Unknown
  Bacterial polypeptide expressing nucleotide sequence isolated from the Sargasso Sea
tgtccgagttcaggagcctggtggtggacaatttacagcaaatactatggcatgtgtttcagaagcaattggactagcattaccttattcagcaggaacaccagctccttatgagcaaagagataagtacgcaatgttaagtggaaaagctgtaatgaacttgcttaagaaaaatatcagacctagagatatagttacaagaaaagctttagaaaatgcagctacaatagttgcagcaacaggtggttcaacaaacgcagcattacatttaccagcgattgcaaatgaagttggtattaaatttgatttaatggatgttgcaaaaatatttaaaaaaactccttatcttgctgaccttaaaccaggtggaagatatgttgcaaaagatatgtggc

SEQ ID NO: 285759 - DNA, 628 bp, Unknown
  Bacterial polypeptide expressing nucleotide sequence isolated from the Sargasso Sea
actgtaagaggacactgttatgatgctctagtcggtattgctggatgtgataaatcattaccaggattaatgatgtctatggttagattaaacgttccaagtgtttttatttatggaggatcaattcttccagggagatataaaggtaaagatgtaactgttgttgatgtatttgaagctgtaggaaagcattcatcaggtcaaatgtctgcagttgaacttagaaaactagaattagttgcttgtccaagtgctggtgcttgtggtggtcaatttacagcaaacactatggcatgtgtatctgaagcaattggtttagcacttccttattctgcaggaacaccagctccttatgaggaaagagataaatacgcaaaagaaagtggtaagacagttatgaacttacttcaaaaaggaattaaaccaagagacattgtaaccaaaaaagcattagagaatgctgctacaatagttgctgcaactggtggatctactaatgcaggattacatttgcctgctattgcaaatgaagcaggaattaaatttgatttaatggatgttgctaaaatttttaaaagaactccttatcttgcagatttaaaaccaggtggaaaatatgttgcaaaag

SEQ ID NO: 285760 - DNA, 517 bp, Unknown
  Bacterial polypeptide expressing nucleotide sequence isolated from the Sargasso Sea
atgaaaattaacaaaaataaattaccaagtcgtcacgtatcgatcggacctgagagagctccccacagatcatattattatgcaatgggtatgactgaagatgatataaacaaaccttttgtcggagtggtgtcaacttggaatgaggcagctccttgcaatattgcactaatgcgtcaagctcaatcggtaaaaaaaggtgttgctgaagctgagggtacaccacgagagttttgtacaattactgttacagatggaattgcaatgggtcaccaaggaatgaagtcttcattggtttcgcgcgaggttattgctgactcaacggagctaactgttagaggacattgctatgacgcaattgtaggtttggctggctgtgataaatcactaccaggcttaatgatggcaatgtgtagattgaatattccaagcgtattcatgtatggtggcagtattttacctggtaaatacaaaggaaaagacgttacagttgtggatgtttttgaagctgtcggaa

SEQ ID NO: 285761 - DNA, 453 bp, Unknown
  Bacterial polypeptide expressing nucleotide sequence isolated from the Sargasso Sea
tagaaaacaaaaattataacgatggtgatgtaattgttatacgttatgaaggtccaaaaggaggcccaggaatgcgagaaatgttatcaactactgcagctctttatggacagggaaaaggagataaggttgcattagttactgatggaagattttcaggcggaactagagggttttgtataggtcatgttggccccgaagctgctgatggcggaccgattgccctcataaaagatggagatataatatcaatagatgcggactcaggaactatagaagttgatttaactaaagaagaattatcaaaaagaaaaaaacaatgggttaaaccgaaaacagactataattctggtacattatggaaatactctcttcaagtaggtccagctagatatggtgcggtaacgcatccaggcgctaaagaagaaacccattgctacgctgatatataaa

SEQ ID NO: 285762 - DNA, 841 bp, Unknown
  Bacterial polypeptide expressing nucleotide sequence isolated from the Sargasso Sea
gaatttcctgatgaattaataaagatattaaataatttaattaataacgatattaaacctagagatatagtaactagagaatccattagaaatgcaattatagtatctatggctgtaggaggatctactaacgtaatgttacatgcaccagagctggcaagagcagctggctataaaagctttgctaatgatattatgagcccagatgaatttaatcatttatctgaaaaaattgtacctgttgttattaatgcaagaccatttggagaatattccatggttgatattgataataagggaggtattcaagtttttgtaaaagacttattagatgcaggattattaaacggtaatgttcttacctgtacaggcgaaagtttagagaagcaaattcaaagtttgaaaccagctaaaccagatggaaaagtaatttttagtgttgagagcccttttaaaccctctggaggtttaagagttttaggtggtaatttatccccagaatttagtgcagttttaaaattggctggtgttgagggaggtctagaaaataatatttttaaaggcaaggcaaaaatatttgatggtgagcaaaaactattaaagtcattagaagagacccctaaccaatttgaaaacttagatatgattattgtaagatatgaaggtcccgttggtgggcctggcatgcctgaaatgctcgattcaacatcaaggatcacaactctttgtagagaaaaaaatatagttgttggccttatgactgatggtaggttttctggtggctcagtaggtttagtgattggtcacgtaggacctgaagctgcaattggtggtcctattg

SEQ ID NO: 285763 - DNA, 742 bp, Unknown
  Bacterial polypeptide expressing nucleotide sequence isolated from the Sargasso Sea
ggcgcccggcggcggcgtggccaagatcacgggtaaggagggcgaaaccttcacgggcgtcgcaaaagtgtatgatagcgagccggcgatgctcgacggcattctgaagcgcgagatcaagtgcggccaggtcgtcattattcggtatgaggggcccaagggcgggcctggattaccagaaatgctcacaccgacttctgcgatcatgggcgccggcttaggggattgcgttgccttgctgacggacgggcgcttctcgggcggctcgcacgggttttgcatcggccacatcacgccggaggcccagatcggcgggcccattgcattaatagaggacggcgaccccatccagatcgacgcgcgcaacgacaagcgcacgatcaacgtcatgctgacggacgagcagtgggccgagcgcagggcgaagtggcggccgccgccgctacgggcgaaccagggcacgctctacaagtacatgtcggtcgtcaagacggcgtccgaaggctgcgtgaccgacgaacaagtcccggacacctcacctatctgggcccaggaggacgagggcggcgcggcctcgggcgcgacggcgccatcgttggaaaccggcccgatgaccatcgaagagctcaagacggagctgaaacgccgcggcgtcaagttctacgcgcgcgaccggaagcacgtgctccgggcgaagctggacgcgtgcttgagcgacgagagctgcgcgacgtcgcggtaa

SEQ ID NO: 285764 - DNA, 383 bp, Unknown
  Bacterial polypeptide expressing nucleotide sequence isolated from the Sargasso Sea
aatgcggaagtttaataagaagaaattacctagtagacacacatcattaggcgctgatagagcgccacatagatcattttattatgcaatgggtgaaactgagaaagatgtttcaaaaccttttgtaggcgttgtatctacatggaatgaggctgctccgtgtaatattgctctaatgagacaagcacaatcggttaagaagggtgttagagcttttggtggaacaccaagagaattttgtacaattacggttactgacggtattgctatgggtcatgaaggaatgaaatcttcattaatctctagagaagtaatagcagatagtgctgaattaactgttagaggtcattgttatgatgcattagtgggtatcgcaggttgtg

SEQ ID NO: 285765 - DNA, 487 bp, Unknown
  Bacterial polypeptide expressing nucleotide sequence isolated from the Sargasso Sea
atgaaatttgataaaaataaattaccaagtcgccatgtgtctgttggtccagaaagggctccacacagatcatattattatgcaatgggattggatgaaaatgatatagctaaaccattcgttggtgttgtatctacatggaacgaggctgccccttgtaatattgcactgatgagacaagctcagtcagttaaaaaaggtgtaacagaagcaaaaggtacacctagagaattttgcacaattacagtgacagatggaattgcgatgggtcatcaaggcatgaaatcttcattggtctcgagagaagttatagcagattccacagaattaaccgtcagaggacactgttatgatgcaattgttggtctcgcaggttgtgacaagtcacttcctggtctaatgatggcaatgtgccgtttaaatgttccaagtgtgtttatgtatggtggaagcattttgcctggaaaatacaaagggaaagatgtta

SEQ ID NO: 285766 - DNA, 557 bp, Unknown
  Bacterial polypeptide expressing nucleotide sequence isolated from the Sargasso Sea
taacgataaagggtatataatgtcaaaatttaataaaaaaaagctacctagtagacatacatctttaggagcagatagagctcctcacagatcattttattatgcaatgggtgaaactgaaaaggatgtgtcaaaaccttttgtgggtgttgtttcaacttggaatgaagctgctccatgcaatatagcgttaatgagacaagctcagtctgttaaaaaaggtgttagagctaatggaggaactcctagagaattttgtacgattacagttactgatggaattgcaatgggacatgaaggaatgaaatcttcattaatctcaagagaagtaattgcagactctgctgagctcactgttagaggtcattgttatgatgcattagttggtatagctggatgcgataaatctttaccaggattaatgatgtccatggttagattaaatgttccaagtgtatttatttatggcggatcaattcttccaggaagatataaaggcaaagatgtaactgttgttgatgtatttgaagcgagttggaaaacattcatcaggtaaa

SEQ ID NO: 285767 - DNA, 403 bp, Unknown
  Bacterial polypeptide expressing nucleotide sequence isolated from the Sargasso Sea
atgtctaagggtaatagaaaatattcttcaaaaatagttgacggtgtcgagcaggctccttcaagagctatgttaagagctgtaggttttgaaaatgaagattttaataaaccacaagtaggagttgcttccacatggagtatggttactccttgcaatatgcatattgataagttagcagattccacagttaaaggtgtaaacgaatctggttctaaaggtgtcatttttaatacaattacagtttcagatggaatttcaatgggaactcaaggcatgagattttcgttagtttctcgcgaagtaatagctgattcgatagaaactgtagtaagtggtcaaggatttgatggcttggtgactatagggagatgtgataagaatatgcctgcctgcttaatgg

SEQ ID NO: 285768 - DNA, 472 bp, Unknown
  Bacterial polypeptide expressing nucleotide sequence isolated from the Sargasso Sea
aatggctaaatttaataaaaagaaacttccaagcagacatacatcattaggagcagatagagctccacacagatcgttttattatgctatgggtgaaactgaaaaagatgtggctaaaccctttgttggcgtagtttctacatggaatgaagcagctccatgtaacatagcactaatgaggcaggctcaatcagttaaaaaaggagttagagccaatggtggaactccaagagaattttgtacaattactgttacagatggtatcgcaatgggtcatgaagggatgaaatcttcattgatatcaagagaagtaatagcagattctgctgaacttactgtaagaggccattgttatgatgctttagttggtattgcaggatgtgataaatctttaccaggtctaatgatgtctatggttagattaaatgtacccagtgtatttatatatgggtgggtcaaattcttccaggga

SEQ ID NO: 285769 - DNA, 316 bp, Unknown
  Bacterial polypeptide expressing nucleotide sequence isolated from the Sargasso Sea
tatgttgcgtggtgtgggttttacgactgaagatttttcaaagccatttgtaggtattgcctctactggagcaaaagttactccatgcaatatgcacataaataaattatcagaagtagttgaaagttctgtaaattcttctggaggaaaaggaattctttttaacacaatcaccgtttcagatggtatatcaatgggcactcaaggaatgaaatactctttgatttcaagagaggttatagctgattctattgagactgtggttggttgtcttgcttatgatggtctgatagctataggtggttgtgataaaaat

SEQ ID NO: 285770 - DNA, 538 bp, Unknown
  Bacterial polypeptide expressing nucleotide sequence isolated from the Sargasso Sea
atgcggaaatttaataagaaaaaactaccaagtagacatacgtctcttggtcctgatagagcccctcacagatcattctattatgctatgggtgaaacagaaaaagatgtttcaaaaccttttattggtgttgtctcaacttggaatgaagctgcaccttgtaacatagctctaatgagacaagctcaatcagttaaaaagggtgtaagagcctttggtggtacaccaagggaattttgcacaattacagtcactgacggtattgcaatgggtcacgaaggaatgaaatcttctttgatttcaagagaagtaatagcagacagcgctgaattaactgttagaggacattgttacgatgcattagtaggtatcgcaggttgcgataaatctttgccaggtttaatgatgtcgatggttagacttaacgttccaagtgtatttatttatggtggttcaatactaccaggaaaatataaaggcaaagatgtaactgtagttgatgtttttgaagctgttggaaaacactcatcaggacaaa

SEQ ID NO: 285771 - DNA, 727 bp, Unknown
  Bacterial polypeptide expressing nucleotide sequence isolated from the Sargasso Sea
aatgtctaaaattgataaaaaaaagctgccaagtcgccatacctctctaggtcccgatagagctccgcatagatctttttactatgctatgggagaaaccgaacaagatgttgaaaaaccatttgttggtgtagtttcaacttggaatgaggcagccccatgtaacacagcgctaatgaggcaagctcagtcagtgaaaaaaggtgtaaagaaagcaggtggaacgccaagagaattttgtacaattactgtaactgacggaatagcgatgggccacgagggaatgaagtcgtcattgatctcaagagaaattatagctgactcggctgaacttacagtaagaggacattgttatgatgcattagtgggtatcgcagggtgtgataaatctttaccagggttaatgatgtcaatgttgagattaaatgtgccaagtgtatttatctatggtggctctatacttcctggaaaatttaaaggcaaagatgtgacagttgttgatgtgtttgaagcagtaggaaaacactcttctggctcaatgacttccgaggagttaagagaattagaactagttgcttgtccaagcgctggtgcttgtggtggtcagttcactgcaaatacaatggcatgtgtatctgaagcgattggtttagctttaccttactctgctggaacaccagctccgtatgaagaacgagataagtatgctttgaaagcggagagagag

SEQ ID NO: 285772 - DNA, 394 bp, Unknown
  Bacterial polypeptide expressing nucleotide sequence isolated from the Sargasso Sea
aatgtctaaaattgataaaaaaaaactaccaagtcgccatacgtcattaggaccggatagagcccctcatagatctttttattatgcaatgggtgagacagaacaagatgtggcgaaaccatttgtgggcgtagtatcaacctggaatgaagctgcaccttgcaacactgccttaatgcgacaagctcaatcagttaaaaaaggagtaaaacaatttggtggaaccccaagagaattttgcacaataactgtgactgacggcattgccatgggtcacgaaggaatgaaatcatctctaatttcaagagaggtaatagcagactcagcagaattaactgttaggggccattgttatgatgctctggtgggaatagcaggatgtgataaatcatta

SEQ ID NO: 285773 - DNA, 618 bp, Unknown
  Bacterial polypeptide expressing nucleotide sequence isolated from the Sargasso Sea
caagctcaatcagttaaaaaaggagttaaacaatatggcggaacgccaagagagttctgcaccattactgtaactgacggtattgctatgggacatgagggtatgaaatcatctttaatttcaagagaagtaatagctgactcagccgaattgactgttagaggacattgttatgatgctttagttggaattgcgggatgtgacaaatctctaccaggtttgatgatgtcaatgttgagattaaatgttccaagtgtatttatatacggtggttctattctaccaggaaaatttaaaggtaaagatgttacagtagtcgacgttttcgaagctgttggtaaacattcttcaggtaaaatgtcctcagaagaattaagagagttagaattagtcgcttgtcctagtgcaggcgcttgcggaggacaatttacagcaaatactatggcatgcgtatcagaggcgattggactggctctaccatactcagctggaactccagcgccttatgaggagagggataaatacgcttttgaaagtggtcaagcagtaatgaatttattagaaaaaaaaattaaacctagagaaatagtaacaaagaaatctttagaaaatgctgca

SEQ ID NO: 285774 - DNA, 625 bp, Unknown
  Bacterial polypeptide expressing nucleotide sequence isolated from the Sargasso Sea
caaaaagtaatttatccagcaaataaacctattacaataacaggtggtgtagttggattgaaaggtaattttgctcctgacggcgcaatcgttaaagttgctggaatggataatttaaaatttacaggtcctgcaagatgttttgactgtgaagaagacgcttttattgctgtagaaaacaaaaattataacgatggtgatgtaattgttatacgttatgaaggtccaaaaggaggcccaggaatgcgagaaatgttatcaactactgcagctctttatgggcagggaaaaggagataaggttgcattagttactgatggaagattttcaggcggaactagagggttttgtataggccatgttggtcccgaagctgctgatggcggaccgattgccctcataaaagatggagatataatatcaatagatgcggacgcaggaactatagaagttgatttaaccaaagaagaattatcaaaaagaaagaaacaatgggttaaaccgaaaacagactataattctggtacattatggaaatactctcgtcaagtaggtccagctagatatggtgcggtaacgcatccaggcgctaaagaagaaacccattgttacgctgatatataaa

SEQ ID NO: 285775 - DNA, 730 bp, Unknown
  Bacterial polypeptide expressing nucleotide sequence isolated from the Sargasso Sea
tgtttcaacttggaatgaggctgcaccttgtaacattaatttaatgaaacaagcccaatttgtaaaacaaggtgtgaattcatcaggaggaacacctagagaattttgcacaataactgttactgatggtattgctatgggtcatgaaggaatgaaatcctcattgatttcaagagatgtaattgcagattctactgaattaactgtaagaggtcattgttatgatgctttagttggtttagctggctgtgataaatcattaccaggtctaatgatgtctatggttagattaaatattcctagtgtatttatttatggtggttcaatacttccaggtagatttgaaggtaaagatgtaactgttgttgatgtttttgaaggtgttggaaaatatacatcaaaaaaaatgacagctcatgctcttagaaaattagaattaaaagcttgccctagtgcaggtgcttgtggaggtcaatttactgcaaatacaatggcatgtgtttcagaagcaattggattagctctaccgtattcagcaggaactcctgcaccatataaagaaagacataagtacgcaattaatagcggcaaagctgtaatgaaacttttagaaaaaaatattagaccaagagatattgttacaagaaaagcattagaaaatgctgcaacagttgttgctgctacaggaggatctaataatgcaggcttacatttaccagctattgcaaat

SEQ ID NO: 285776 - DNA, 946 bp, Unknown
  Bacterial polypeptide expressing nucleotide sequence isolated from the Sargasso Sea
ataatatgggaagctagaaaattacatgcaaaaggagaaattaattatgatgaatttatggacatggctgcagcatctgcgccaagtgtaggtcattgtaatacaatgggaacagcatcatcaatgaactcaattgcggaagctcttggtatgtcgttaacaggtggtgcgattattccagcaccttataaggagagggaaaaaatttcttttaaaacaggaaaaagaatagttgatatggtgcatgaagatcttacaccttcaaaaattatgaccaaagaagcttttgaaaatgcaatttatgttgctagtgctattggtgcatcaagtaattgtcccccacatctaacagctatagcaaaacatatgggaattgattttggaatagataattgggaaaaacttggtcacaatattccattacttgttaattgtcagccagctggagaacatttaatggaaggtttttttaaagctggaggagttcctgcaataatgcaagagttacttaaaaataataaattacataaaaaagttatgacagtgactggtaaaacgcttgaagaaaatcttaaagtaaaaattaatgttgatgaaaatgttataaaatcatttaacaaccctttagttaaaaacgcaggtttcatagtaatgaaaagtaatttttttagttcagcagttatgaaaacgtcagtaattagttctgaatttagaaaaagatatttatctgatccaaaaaatccaaatgtatttcaagctaatgcagtagtatttgaaggaccagaagattatcatttaagaattaatgatgaaaatttaaatattgatgaaaattcaattttaatgattagaggatgtggacctgttggttatcctggctctggtgaagttgtaaatatgcaaccaccggacaaacttttaaaaaaaggcattaatacattaccca

SEQ ID NO: 285777 - DNA, 658 bp, Unknown
  Bacterial polypeptide expressing nucleotide sequence isolated from the Sargasso Sea
aatgaaaaaatttaataaaagaaaattacctagcagacacacaactttaggagcagataaagcaccacaaagatcattttattatgcaatgaaacttacagaaaaggatgttgctaagcctttcgttggtgtagtttcaacatggaatgaggcagctccatgcaacatagctttgatgagacaagcacaatctgttaaaaaaggtgtttatcaaagaggaggaacgcctagggaattttgtaccattactgtaacagatggtattgctatgggtcatgaaggaatgaaatcctcattaatttccagagatgttatagctgactcaactgaattaacagttagagggcattgttatgatgcactagttggtcttgctggatgtgataaatccttacctggtttaatgatggctatggttagattaaatgttccaagtgtttttatttatggtggatcaatactacccggtagatttaatggaaaggatgtgacagttgttgatgtatttgaaggtgttggaaaatattcatcaggtaaaatgactgctcatgctttaagaaagcttgaattaaaagcttgtcctagcgcaggtgcatgtggaggacaatttacagcaaatacaatggcatgtgtatctgaagctataggattagcatta

SEQ ID NO: 285778 - DNA, 791 bp, Unknown
  Bacterial polypeptide expressing nucleotide sequence isolated from the Sargasso Sea
tacaaaggtaaagatgttacagttgtagatgtttttgaagctgttggagaattttctgctggtaaaataagtgaagaagagctgcatgaattagagtgtgtagcatgtcctagcgctgggtcatgcggcggtcaattcaccgccaatactatggcatgtgtttctgaggcaataggtctagccttaccttattcagctggtcctcctgctccagatgaaggtagagataaatacgcattagaatctggaaaagccgttatggatttgctcgaaaataatattagaccaagggatattgttacaaaagaatcatttattaatgcagcagtggtagttgctgctactggaggatccacaaatggagcgcttcatttacctgctatggcaaacgaaattggcatagattttgatttatttgatgttgctgatatttttaaatcaactccatatatcgcagatttaaagcctggtggaaactacgttgcaaaagacatgcatgaagccggcggagttcctatgctgttaagaactcttttagatgagggttttataaatggagattgtttaacagttactggcaatacgcttgaagaaaatatatcggaagttgtttttgataatacacaaaaagtaatttatccagcaagcagtcctattacagaaactggcggtgttgttggtttaaaaggtaattttgcacctgacggagcaattgttaaggttgctggtatggaaaatttaacttttaaagggccagcaagatgttttgactgtgaagaagatgcttttac

SEQ ID NO: 285779 - DNA, 655 bp, Unknown
  Bacterial polypeptide expressing nucleotide sequence isolated from the Sargasso Sea
atgaaaaaatttaataagaaaaaattacccagtcgtcacactactttaggtccagagaaagcttttcaaagatctttttattatggtatgaatttgacagaaaaagatgtttccaaaccctttgtgggtgttgtgtcaacctggaatgaggctgctccatgcaacatagctttaatgagacaggcgcaatcagtaaaaaaaggagttaaattagctggcggtactccaagggaattctgtactattactgttactgatggaatagctatgggtcatgagggtatgaaatcatctttagtttcaagggatgtaattgcagactcaacagagctcacagtaaggggacattgttacgatgctttagttgggttggcaggttgtgataaatcattaccgggattaatgatggcaatggtaagattaaatgtgccgagtgtttttatctatggaggatcaatattacctggcagattaaatggaaaagatataacggttcaagatgttattgaaggtgttggcgaatattcatcaggaagaattagcgaacacgccttgagaaaattagaattaaaagcttgtccaagcgctggtgcttgtggtggacaatttacagcaaatactatggcatgcgtctcagaggcaattggatggctct

SEQ ID NO: 285780 - DNA, 177 bp, Unknown
  Bacterial polypeptide expressing nucleotide sequence isolated from the Sargasso Sea
taacagtatctgatggaatttctatgggaacaagcgggatgagatattctttagtttccagagaggtaattgctgattcaatagaaactgtcgttgggtgcgagggttttgatgggtttttgacgattggtggatgtgataaaaatatgccaggatgcgtcatagtgatggcttgat

SEQ ID NO: 285781 - DNA, 861 bp, Unknown
  Bacterial polypeptide expressing nucleotide sequence isolated from the Sargasso Sea
tcctcatagatcttactactatgcaatgggcttagatgaagatgatattgataaaccatttgttggtgttgcaacatgttggaatgaatctgctccatgtaatatttctcttatgagacaatcaaagagcgttaaagatggcgtttcaaaagaaggtggaacaccaagagaatttacaacgattactgtaactgatggaattgccatgggacatcaaggaatgaaatcatcacttgtgagtagagagataatttccgactcaattgaagtatcaatgagaggacattgttatgatgccttggttggtgttgcaggttgcgataagtctttacctggtatgatgatggcaatgctaagactaaatgtaccatcagtatttatttatggtggttcaattcttccaggaagttacaaaggaaaagatgttacagttgtagatgtttttgaggctgttggtgaattttctgctggtaaaataagtgaagaagagcttcatgaattagaatgcgtagcatgcccaagcgctggttcatgcggcggccaattcactgccaatactatggcatgtgtttctgaggcaataggtctagccttaccttattcagctggtcctcctgctccagatgaaggtagagataaatacgcattagaatctggaaaagccgttatggatttgctcgaaaataatattagaccaagggatattgttacaaaagaatcatttattaatgcagcagtggtagttgctgctactggaggatccacaaatggagcacttcatttacctgctatggcaaacgaaattggcatagattttgatttatttgatgttgctgatatttttaaatcaactccatatat

SEQ ID NO: 285782 - DNA, 460 bp, Unknown
  Bacterial polypeptide expressing nucleotide sequence isolated from the Sargasso Sea
aatgcggaagtttaataagaagaaattacccagcagacatacatctttaggtgcagatagagctccacatagatcattttactatgcaatgggagaaactgaaaaagatgtttctaaaccatttatcggtgttgtatcaacgtggaatgaggcagctccttgtaacattgccttaatgagacaagctcaatcagttaagaagggtgttagagcctctggtggaacacctagagaattttgtacaattactgttactgacggtatagcaatgggccatgaaggaatgaaatcgtctttaatttcaagagaagtcatagctgatagtgctgaattaactgtaagaggtcattgttatgatgcattagtaggtattgcaggttgtgataaatctttaccaggattaatgatgtccatggttagattaaatgtaccaagtgtatttatatatggcggctcaatc

SEQ ID NO: 285783 - DNA, 265 bp, Unknown
  Bacterial polypeptide expressing nucleotide sequence isolated from the Sargasso Sea
tatgaaatctctgctagataaaggtttattgcatggaaattgcatgacagtaacgggtaaaacaatatctgataatttggagctagttcaagattatccttcggaccaaaaaattatcaaagactttgataatccaataaaaaaatcaagtcatttagagattctatatggaaatctggctccagagggagcagttgcaaaaatatctggtaaagagggaactttatttacaggtaatgcaaaagttttgattcagaagagcttg

SEQ ID NO: 285784 - DNA, 613 bp, Unknown
  Bacterial polypeptide expressing nucleotide sequence isolated from the Sargasso Sea
atttcaagagatgtaattgcagattctaccgaattaactgtaagaggtcattgttatgatgctttagttggtttagcaggatgtgataaatctttaccaggactaatgatgtctatggtgagattaaatattcctagtgtatttatttatggaggttcaatacttccaggtagatttgaaggtaaggatgttactgttgttgatgtttttgaaggtgttggaaaatatacatctaaaaaaatgacagcccacgctcttagaaaattagaattaaaagcttgtcctagtgcaggtgcttgtggtggtcaatttactgcaaatacaatggcatgtgtttcagaagcaattggattagctttaccatattcagctggtactcctgctccttataaagaaagacacaagtacgcaattaatagcggtaaagctgtaatgaaacttttagaaaaaaatattagaccaagagatatcgttacaagaaaagcattagaaaatgctgcaacagttgttgctgcaactggaggatctactaatgcaggcttgcatttacctgcaattgcaaatgaaattggaattaaatttgatttaatggatgttgcaaaaatttttaaaa

SEQ ID NO: 285785 - DNA, 767 bp, Unknown
  Bacterial polypeptide expressing nucleotide sequence isolated from the Sargasso Sea
aatgagccacgaagagttcaaccatttatcgcaaaatgtgattcctgttgttgtgaatgcgcgtccatttgggaaatactcaatggtcgatattgacagtatgggtggtgtacaggttattgtaaaagacatgatagattccggcttgttaaatggagataccctgacttgcacatcagagacattaagtgaacaggtggcaagattaaaacccaagtcgccagatggagatgttatttattcaataaaagaaccatttaagaagaccggcggattgaggcttctcggaggtaatctatctcctgaaaatagttcaatcttaaaacttgcaggtgttgaaggtgggcttgaggataatgtatttcacggaaaagcaaaaacatttgatggggaacaaaaattattagatacccttgagaatgatccagactattttcaagacagagatatagtggttgttcgctacgaaggccctgttgggggtcctggaatgcctgaaatgttagactcaacatcacgaattacaaccttatgcagagataaaggtattgtaatcgcgttgatgactgatggacgtttttcaggaggttcagttggtttggttatcggtcatgttgggcccgaagcagccctaggcggtccaattgcacttattgaagatggtgaccaaattattgtgaatcttaacaataattccctttcctgtgtggagcttgaggatcattctatttataaaaagagaaaagatgagtgggataaaattgtac

SEQ ID NO: 285786 - DNA, 397 bp, Unknown
  Bacterial polypeptide expressing nucleotide sequence isolated from the Sargasso Sea
attaaaagcttgtccgagttcaggagcctgtggtggacaatttacagcaaatactatggcatgtgtttcagaagcaattggactagcattaccttattcagcaggaacaccagctccttatgagcaaagagataagtacgcaatgttaagtggaaaagctgtaatgaacttgcttaagaaaaatatcagacctagagatatagttacaagaaaagctttagaaaatgcagctacaatagttgcagcaacaggtggttcaacaaacgcagcattacatttaccagcgattgcaaatgaagttggtattaaatttgatttaatggatgttgcaaaaatatttaaaaaaactccttatcttgctgaccttaaaccacggtggaagatatgtgcaaaagat

SEQ ID NO: 285787 - DNA, 148 bp, Unknown
  Bacterial polypeptide expressing nucleotide sequence isolated from the Sargasso Sea
cctgccacgaattggtatgcttgccagtctgctctacaccacgagatccttcgtcatgcctgattaccgttcgaaaacctccaccttcggccgcaacatggccggcgcacgcgccctgtggcgcgccaccggcatgaacgacgaagac

SEQ ID NO: 285788 - DNA, 711 bp, Unknown
  Bacterial polypeptide expressing nucleotide sequence isolated from the Sargasso Sea
ctgtaaaaaaaccttataaagaaactggtggacttagacttttaggaggaaatttatctcctgaattcagctctatattaaaactagctggtgttgaaggaggtttagaaaataatgtatttattgggaaagcaagaatatttgatggtgaacaaaaacttctttggacattagaaaatgaaccagagagctttaacaataatgatatggttgtagttagatatgaagggccagttggtggacctggaatgccagaaatgctagattctacttcaagaattaccacattatgtagagaaagagaaataattgtagggttaatgactgatggacgtttttctggtggctctgttggtcttgttattggtcatgtcggtcctgaggcagccataggtggacctattgccctaattgaggatggagacgaaattatagttgatttgaataaaaatgagatcaattgttctcaattaaatgataataatactttcaagttaaggaaaagtaattgggaacaaatttttaattctaattgtggtacacacccgtctgtaggagatgctaacacaagattacttaatagaatgaggaattctgctgtttcagcgacttatggagccggaatgcatcctaatcgtgagttgtgggtacctaatcctagagatgtagaagtatcagggtttatacctaaaaatattcataaattataaa

SEQ ID NO: 285789 - DNA, 619 bp, Unknown
  Bacterial polypeptide expressing nucleotide sequence isolated from the Sargasso Sea
aatggcaaaatttaataaaaagaaacttccaagtagacatacatcattaggaccagatagagcaccgcatagatctttttactatgctatgggtgaaacagagaaagatgttttaaaaccctttgttggagtagtttcaacttggaatgaagcagcaccttgtaacattgcattaatgcgacaagcacaatctgtaaaaaaaggtgttagagcaaatggtggaacaccaagagaattttgtacaattactgttacagatggaattgcaatgggtcacgaaggaatgaaatcttcgttaatttcaagagaagttattgcagattcatctgaacttactgtcagaggtcattgttatgatgcattagtaggtattgcaggatgtgataaatctttaccaggtttaatgatgtcaatggttagacttaacgtaccaagtgtatttatttacggtggatctattcttccaggaacttataaaggtaaagatgtaacagttgttgatgtatttgaagccgttggaaaacattcatccggtcaaatgtctgcagccgagcttagaaaattagaattagttgcttgtccaagtgcaggtgcatgtggtggtcaatttacagcaaac

SEQ ID NO: 285790 - DNA, 671 bp, Unknown
  Bacterial polypeptide expressing nucleotide sequence isolated from the Sargasso Sea
aaataatttaattgatccagattgcattacagttactggaaaaactgttggagagaatcttgagaatatacaaattccaaaaaatcaagatgtcataagttttccagacaatccaatctcaaatgaaggtggtattgcagtactaaaaggttccttgagtccaaggggttcagttgtaaaaactgcaggaatcgatattaatacttttacaggacccgcaaatgtttttgactccgaacaagatgctctagatgctttgtttaataacaaaattaagaagggagaagttgtagttattcgcaatgaaggacctaagggtgggccaggaatgagagaaatgctacaaattactgcagcaatcaaaggcgcaggcctaggcaaggatgttttacttataactgatggtagattttctggaggtactactggtttgtgtattggccatgttgctccagaaagttacgacaaggggccgatttcaatatgtcaaaatggagatataatcactttggatatagaaaataggtctttaaatctagaaattgaaaaaaaagaatttgaggacagattaagtaaattaaaattgcctcctccaagatacaactcaggtgttctatacaaatattcaaagctagttagtggttctgatacaggtgctgttacaagttaat

SEQ ID NO: 285791 - DNA, 643 bp, Unknown
  Bacterial polypeptide expressing nucleotide sequence isolated from the Sargasso Sea
atgcggaagtttaataagaaaaaattaccaagtagacatacatctctgggagcagatagagctccacatagatctttttattatgcaatgggtgaaactgaaaaagatgtctccaaaccatttataggcgttgtttctacatggaatgaagcagcgccatgtaatattgctttaatgagacaagctcagtcagttaaaaagggtgtaagagcttcaggaggaactccaagagaattttgcacgattacggtcactgatggtattgcaatgggtcatgaaggaatgaagtcttcattgatctcaagagaagtaattgcagatagtgctgaattaacagtgagaggtcattgttacgatgcactagtaggtattgcaggttgtgataagtctttaccaggtttaatgatgtcaatggtacgattaaatgtaccgagtgtttttatttatggaggatcaatacttccaggaaaatataaaggtaaagatgtaactgtggtagatgtttttgaagctgttggaaaacattcatcaggtcaaatgtcagcaaaagaattaagaaaattagaattagttgcctgtcctacagctggagcttgtgggggacaatttactgcaaatacaatggcctgtgtatcagaggcaa

SEQ ID NO: 285792 - DNA, 844 bp, Unknown
  Bacterial polypeptide expressing nucleotide sequence isolated from the Sargasso Sea
ctgattgataaaaacataacacctagagatatagtcactagagagtctttaaggaatgcaattattgtcgctatggctgttggtggttcaactaatgtcttattgcatgctcctgaattggcaagagcagctggatataaggactttgccaatgaaataatgagccccaaagagtttaataatttgtctagaaatgtcattccggttgtcatagatgctcggccttttggacaatattcgatggtggatattgatgccaaaggcggtatgcaagtgattgttaaagaattaatggacgcaggactattaaatggtgagactttgacttgcacaggagagaccctgtctgaacaagtcgaaagactgaaccctcctacaccggatgaggatgtcatttatactgttcaaaaaccatataaagatacaggcggattacgtgttttgggtggaaatttgtctcccgaattcagcgctgtgctgaagttagctggcgttgaaggaggactggaaaataatatttttaagggtacagctaaggtttttgatggagaacaggaactattaaaagcattagattctcaggctgacatgttcgaaaattttgatatgatcgtggttcgctacgaggggccgtttggtgcgccaggtatgcctgaaatgctagactcgacctctcgaattaccgcgctttgtcgtgaaaaaaatatcgtagttggacttatgaccgatggtaggttttctggcggatcggttggtttggttattggtcacgtcggccctgaagcagccgcaggcggtgcaattgctttaatcgaaactggtgacgaaatagttgtagattgaa

SEQ ID NO: 285793 - DNA, 868 bp, Unknown
  Bacterial polypeptide expressing nucleotide sequence isolated from the Sargasso Sea
aactaacgtaatgcttcatgcaccggagttagctagagctgcgggatataaaagttttagtgaagatattatgtctccagacgaatttaactatttatccgaaaaagttgttcctgttttagttgatgcaagaccatttggtaaatactcaatggttgatatcgacaatgaaggcggtgttcaggtttttataaaggatttattaaattcaggcttgttgaatggcaatactttaacatgtactggtgaaaccttagctgaacaagttgatcgattagctcctaaggaacctgatggaagagttatatatcctgtaaaaaaaccttataaagaaactggtggtcttagacttttaggaggaaatttatctcctgaattcagttctatcttaaaactagctggtgttgaaggtggtttagaaaataatgtttttattggtaaagccagaatatttgatggtgaacaaaaacttctatggacattagaaaatgaaccagaaagctttaacaataatgatatggttgtagttagatatgaaggaccagttggtgggcctggaatgccagaaatgcttgattctacctctagaataaccactttgtgtagagaaagagaaataattgtagggttaatgactgatggacgtttttcaggtggctctgttggactagtgattggtcatgttggtcctgaggcagccataggtggacctattgccctaattgaagatggagatgaaattatagttgatttgaataaaaatgagatcaattgttctcaattaaatgatattaatactttccaattaagaaaaagtaattgggaaaaaatcatcaattcaaatgctggcacacatccatctgtagga

SEQ ID NO: 285794 - DNA, 733 bp, Unknown
  Bacterial polypeptide expressing nucleotide sequence isolated from the Sargasso Sea
aatgcggaaatttaataaaaataaactaccaagtagacatacatcattaggtccagatagagcccctcatagatctttttactatgcaatgggtgaaactgaaaaagatgtttcaaaaccttttgtaggagttgtatccacttggaatgaggctgctccttgtaatattgctttaatgaggcaagctcagtcagttaaaaagggtgtaagagcttcaggaggaactccaagagaattttgtacgattactgttactgatggcatcgcaatgggtcatgaaggaatgaagtcttcattgatctcaagagaagtaattgcagatagtgctgaattaactgtgagaggtcattgttacgatgcattagtgggtatcgcaggttgtgataaatctttaccaggtttaatgatgtccatggtaagattaaatgtaccgagtgttttcatttatggtggatcaattcttccaggaaaatataaaggtaaagatgtaacagtcgttgatgtttttgaagctgttggaaaacattcatcaggacagatgtcagcaaaagaactgagaaaattagaattagttgcatgcccttctgctggtgcttgtggtggtcaatttacagccaatacaatggcctgcgtttcagaagcaattggattagcattaccttattcagcaggcactcctgctccatatgaagaaagagacaagtatgcaaaagcaagtggaagaatggttatg

SEQ ID NO: 285795 - DNA, 864 bp, Unknown
  Bacterial polypeptide expressing nucleotide sequence isolated from the Sargasso Sea
tcaataaatgccgcacttcatcttccagcaattgcaaatgaagcaggtttgaaattcacactaagagatgttgtagagatttataattcaacgccatatataggggatatgcaaccaggtggtaagtatgttgctaaagacttatatgatgtaggaggagttcctatagtaataaaatccttattagatggaggatatataaatggcgattgtttaactgttacaggcaaaacaattgcagagaaccataaagaagttatttttccaaccaatcaagatgtagtttacaaatgtgaaaatccaattagtaataatagttctgttgttggtttgtggggcaatcttgcgccagatggatgtatctcaaaaattgctggtttaactaatctcacttttaagggtaaggctaaatgttttgattcagaagaagaggctttaactgctgtacttaaaaatgaaattaaagcaggtgatgctctgattattagatatgaaggcccaataggaggacctggtatgagagaaatgctttcaacaactggtgcaatttatggacaaggtctaggtgaaacagttgcattaattacagatggtagattttctggtggaacaagaggattttgtataggtcatgttggcccagaagctgcagttggaggaatgattggtttattaaaagatggagacgaaatcataattgatgcaattaaaggtgaaattaatgtttcattaaccgaagatgaaatatcaaaaagaaaaaaagaatggaagcctagaaaaacaaatcataattctggaacgatttggaaatatgcacagactgttggaccggctaatgaaggggctgttacacaacctggcgca

SEQ ID NO: 285796 - DNA, 487 bp, Unknown
  Bacterial polypeptide expressing nucleotide sequence isolated from the Sargasso Sea
tgttttgactgtgaagaagatgcattaacagctgttttaaaaaatgaaataaaagctggggatgctgtcattattcgatatgaaggaccaaagggaggtcctgggatgagagaaatgttatctactacaggggctatttatgggcaaggattgggtgaaacagtagccttaattactgatggtcgtttttcaggaggcacaagaggattttgtataggccacgtaggtcctgaagctgctgtaggcggtatgattggtttactaaaagatggagatgaaattgttattgatgcgataaaaggtgagataaatgtaattttatctcaggatgaaattgatcaaagaaaaaaagattggaaacctagaaaaactaatcataattcaggatctatatggaaatatgcacaaactgtaggtccagcttatgaaggtgccgtaactcaaccaggcgctaaagatgaaacccatacctacgcagatatctaat

SEQ ID NO: 285797 - DNA, 723 bp, Unknown
  Bacterial polypeptide expressing nucleotide sequence isolated from the Sargasso Sea
aatgaaaaattttaataaaaaaaaattacctagcagacatacatcattgggaccagataaagctcctcaaagatcattttattatgcaatgaatttgaaagaaaaagatgtagctaaaccttttgtaggagttgtatcaacatggaacgaagcagcaccatgcaacattgcactaatgagacaagcgcagtctgtcaaaaagggagttaaatcttcaggaggaacaccaagagaattttgcacgattacagtaacagatggtattgcaatgggacatgagggaatgaaatcttcacttgtatctagagatgttatcgctgattcaaccgagttaacagttaggggtcattgttatgatgcattagtaggtgtagccggatgtgataaatctttaccaggtttgatgatggcaatgcttagattaaatgttcccagtgtttttatttatggtggttcaattcttccaggtagatttaatggaaaagatgtaaccgtgttagatgtttttgaaggcgttggaaaatattcctcaggtaaaatgaccgaacatgctttaagaaaattagaactgaaagcttgtccaagtgctggtgcttgtggaggacaatttactgcaaatactatggcatgtgtgtctgaagctatcggattagcattaccttattctgcaggaactccagcaccttatggtcagagagataaatatgccttacaaagtggtaa

SEQ ID NO: 285798 - DNA, 401 bp, Unknown
  Bacterial polypeptide expressing nucleotide sequence isolated from the Sargasso Sea
tatgtcaaaaataaataaaaaaagattaccaagtcgtcatacatccttaggtccagatagagccccacatcgttccttttattacgcaatgggtgaaactgagcaagacgtagccaaaccttttgtaggtgttgtatcaacttggaatgaagcggcaccatgtaatacagctttaatgagacaagctcaatcagtaaaaaaaggggtgaaagaaaatggtggaacgccaagagagttttgcacaatcacagtgactgatggtattgccatggggcatgaggggatgaagtcgtcacttatctcaagagaaataatagcagactcagcagaattaacagtcagaggacattgttatgatgctctagttggtatagcgggatgtgataaatccttaccagggt

SEQ ID NO: 285799 - DNA, 748 bp, Unknown
  Bacterial polypeptide expressing nucleotide sequence isolated from the Sargasso Sea
atgaaatttaataaatcaaaattaccaagtagacatgtatcagttggtgttaagagcgctggtcaccgctcaatgtattatgctatgggtttaaaaaaagaagatattgaaaaaccttttattggtgttgcgactacatggaacgaagcggctccttgtaatataactctttcgcgacaagcgcagtcagttaaaaaaggagttaaattagcagggggaactcctagagaatttacaactattacggtaactgatggaattgcaatgggtcatgcgggaatgaaatcttcattaattagcagagaggtaatcgctgattcagtcgagttgactatgaggggacattgttatgatgcacttgtgggtttagctggatgtgataaatcgttgccaggcctcatgatggttatggtccgactaaatgtaccttcagtttttatttatggaggttccatattaccgggaaatttcaaaggcaaggatgtaacaatcgccgatgtatttgagggaataggaaaacattccactggtgaaatgagcaaaaaagatttatttaaattagaatcaatagcatgtccttcaggcggatcatgcggcggtcaatttaccgccaacaccatggcttgcgtttctgaagcgataggtctggcattacctggctcagcaggtacacccgcagtttatgaggaacgtgatagattttctgtcaaaagtggtaaagcagtgatgaatttgttacaaaaaaaga

SEQ ID NO: 285800 - DNA, 592 bp, Unknown
  Bacterial polypeptide expressing nucleotide sequence isolated from the Sargasso Sea
atgtctaaaattgataaaaaaaaactacccagtcgtcatacttctttaggcccagatagagctccacatagatctttttactatgcaatgggagaaaccgaacaagatgtggcgaagccttttgtaggagtagtatccacttggaacgaagctgcaccttgcaacacagctttaatgcgacaggcacagtcagttaaaaaaggagtaaaagagtctggcggaacgccaagagaattttgcactataactgtaacagatggtattgccatgggtcatgaaggtatgaaatcatctttaatttcaagagaagtcatagctgactcagcagaactgacggtgagaggacattgttatgatgcattagttggtatcgctggatgtgataaatctcttccaggcttgatgatgtctatgttgagattgaatgtacctagtgtgtttatttacggtggatcaattttgccgggaaaatttaaaggaaaagacgttacagttgtagatgtgtttgaagcggtaggtaaacattcctcaggcaaaatgtcttctgaagaattaagagaattagaattagtagcttgtccaagtgcaggag

SEQ ID NO: 285801 - DNA, 757 bp, Unknown
  Bacterial polypeptide expressing nucleotide sequence isolated from the Sargasso Sea
aatgaaaaaatttaataaaaaaaaattacccagtcgtcacacaactttaggcccagagaaagcttttcaaagatctttttattatggtatgaatttaacagaaaaagatgtttctaaacctttcgttggtgttgtatcaacctggaatgaagctgctccatgcaacatagctttaatgaggcaggcgcagtcagtaaaaaaaggagttaaacttgctggcggtactccaagggaattctgtactattactgttactgatggaatagctatgggtcatgaaggtatgaaatcatctttagtttcaagagatgtaattgcagattcaacagagctgacagttaggggacattgttatgatgctttagttggtttggcaggttgcgataaatcattaccgggattaatgatggcaatggtaagattaaatgtacctagcgtttttatttatggaggatcaattttaccaggtagattaaatggaaaagatataactgttcaagatgttattgaaggtgttggcgaatattcatctggaagaattactcaacacgctttaagaaaattagaattaaaagcctgtcctagtgctggtgcttgtggtggacaatttacagcaaatactatggcatgcgtctcagaggcaattggattggctctaccttattctgctggaacacctgctccatatcagaaaagagataaatatgcatttgatagtgggaagatggttatgaatttgttgagaaaaaaaattaga

SEQ ID NO: 285802 - DNA, 640 bp, Unknown
  Bacterial polypeptide expressing nucleotide sequence isolated from the Sargasso Sea
aatgaaaaaatttaacaaaagaaaattacctagtagacatacaaccttaggtcctgacaaagcatttcaaagatctttttattatgcaatggatttaaccgaaaaagatgttgcaaaaccttttgtcggcgtcgtttcaacctggaacgaagcagctccatgcaatattgctttaatgagacaagctcagtctgtcaaaaaaggagtttatcaatcaggtggcacaccaagagaattttgtacaataacagtaactgacggcatagcaatgggtcacgagggaatgaaatcatctttaatttcaagagatgtgatagcagattctactgaattaacagttagaggacattgttatgatgcattagttggattggcaggatgtgataaatcattaccaggattaatgatgtctatggttagacttaatgttccaagtgttttcatttatggtggttcaattttgccaggtagatttaatggtaaagatgtaaccgttgttgatgtaattgaaggtgttggcaaatatcattctggtaaaatgtcattgcatgcacttagaaaattagaacttaaagcttgtccaagtgctggagcttgtggtgggacatttactgcaaatactatgggcatgtgtgtctga

SEQ ID NO: 285803 - DNA, 722 bp, Unknown
  Bacterial polypeptide expressing nucleotide sequence isolated from the Sargasso Sea
aatgaataaatttaataaaaaaaagttaccaagtagacatacatctttaggcgcagataaagctccacaaagatctttttattatgcgatgggggaaactgagaaagacgtagcaaagccttttgttggtgttgtttctacctggaatgaagctgccccatgtaatattgcgctaatgagacaagctcaatcagttaaaaagggggttaaattttctggtggtacgccaagagagttttgtactattactgttactgatggtatcgccatgggacatgagggaatgaaatcttccttggtatcaagagatgttattgcagactcaactgaattaactgttaggggccactgttatgatgcattagttggagttgctggatgtgataaatctttaccaggcttaatgatggcaatgcttagacttaatgtaccaagtgtattcatatatggcggatcgattcttccaggtagatataatggaaaagatgtaacagttttagatgtattcgagggagtgggaaaatactcttcaggtaaaatgagcgagcatgctttgagaaaactggagttaaaagcttgtcctagtgccggagcgtgcggtggacaatttactgcaaacactatggcatgcgtatctgaagctattggtttagctttaccttattctgctggaacacctgcaccatacggacagcgggacaaatatgctttacaaagtggta

SEQ ID NO: 285804 - DNA, 711 bp, Unknown
  Bacterial polypeptide expressing nucleotide sequence isolated from the Sargasso Sea
tatgaaatttaataaaaataaattgccaagtcgtcacgtttcggttggaccggaaagagccccgcatcgatcatattattatgctatgggtatgaacgaaaatgacattaataagccatttgtaggcgtagtttctacatggaatgaggctgcaccctgtaacatagcactaatgcgtcaagcacaatcagttaaaaaaggagtcaccgaggcagagggaactccacgcgaattttgcacaattacagtaacggatggtattgctatgggtcatcaaggtatgaagtcatcattagtttcgcgtgaagtaatagcagattctactgagctgactgtaagaggccattgctatgatgcaattgttggattagctggctgcgataaatcgcttccaggcttaatgatggcaatgtgcagattaaatgtgccaagtgtttttatgtatgggggaagcatattacctggaaagtataaaggtaaagatgtaacagtagttgatgtattcgaggcagttggcaaattttcatctggaaacgccactgaagaagaactacacgaacttgagtgtgttgcctgtccaagcgcaggcgcttgtggtggtcaatttacagctaataccatggcgtgtgtttcagaagcaattggactagcgcttccatattcctcaggtgcgcctgctccgtatgaagaaagagataaatacgcatatga

SEQ ID NO: 285805 - DNA, 496 bp, Unknown
  Bacterial polypeptide expressing nucleotide sequence isolated from the Sargasso Sea
aatggtcgataaaagtaaattaccaagcaggcatgtatctgtaggccctaaaagtgctcctcatagagctttttactatgctatgggaatttcagaggaacaaataaatcaaccttttgttggtgttgtaactacctggaatgagtctgcaccttgtaatatttcactttctcgtcaagcacaatcagctaaaaaaggtgtttgggatgctaaaggtactccaagagaatttactaccattactgtaacagatggtattgccatggggcatgagggaatgaaatcatctttaacaagtagagagattatagctgactctactgaactttctgtaagagggcattgttatgatgccctagttggtttagctggatgtgataagtctttacctggattgatgatggcaatgcttcggcttaatgtgccctctgtattcatgtatggtggatctatattaccgggagtgtacaaagatagagatgtaacgattgtcgat

SEQ ID NO: 285806 - DNA, 298 bp, Unknown
  Bacterial polypeptide expressing nucleotide sequence isolated from the Sargasso Sea
atgcttcgtggtgttggctttgagagtgaggatttttcaaagccatttgttggaatcgcatccacaggtgcaaaagtaacaccatgtaacatgcatataaacaaattatctgaggtcgtagaagattccgttaatttatctggtggtaaaggagtgctttttaatacgataactgtctctgatggtatatctatgggaactcaaggaatgaaatattctcttgtatcaagagaagtaattgcagattcaattgaaactgtagttggctgcttaggatatgacggacttattgcaattg

SEQ ID NO: 285807 - DNA, 942 bp, Unknown
  Bacterial polypeptide expressing nucleotide sequence isolated from the Sargasso Sea
aatgaataaatttgataaaaaaaaattgccaagtagacatacatccgtaggcgcagacaaagctcctcaaagatctttttattatgcaatgggagaaactgagaaagatgtggcaaaaccttttgttggagttgtatctacatggaatgaagctgccccatgtaatattgcattaatgagacaagctcagtcagtcaaaaaaggtgttaaattatctggaggtacacctagggagttttgtactattaccgttacagacggcatcgccatgggacatgaaggaatgaaatcttctttagtatccagagatgttattgctgactcaacagaattaaccgttaggggccattgttatgatgcattagtaggtgttgctggatgtgataaatctttaccaggcttaatgatggcaatgcttagacttaatgtgccaagtgtatttatatatggcggatcgattcttccgggtaggtataatggaaaagatgtaactgttttagatgtatttgagggagtgggaaaatattcttcaggtaaaatgagcgaacatgctttgagaaaactcgaattaaaagcttgtcctagcgctggagcatgtggtggacaatttactgcaaacactatggcatgtgtatctgaggctattggtctagctttaccttactctgcaggaacaccagcaccatacggacaacgagacaaatatgctttacaaagtggtaaggcggttatgaatttgttaaaaaaaaatatcagaccgagagatattgtttcaagaaaatctttggagaatgcagcaaccatagttgctgctacaggaggctcaaccaatgcagcactgcacttaccagcattagcaaatgaaataggtatcaaatttgatttaatggatgttgcaaaaatttttagaaaaacaccttatcttgcagatttaaaacctgg

SEQ ID NO: 285808 - DNA, 691 bp, Unknown
  Bacterial polypeptide expressing nucleotide sequence isolated from the Sargasso Sea
atggctaaatttaacaaaaagaaacttccaagcagacatacatcattaggtgcagatagagctccacacagatcgttttattatgctatgggagaaactgagaaagatgtagcaaaaccttttgttggtgtggtttctacatggaatgaggccgctccatgtaacatagctttaatgaggcaggctcaatcagttaaaaaaggagttagagctaacggtggaactccaagagaattttgtacaattacagttacagacggtattgcaatgggccatgagggcatgaagtcttcattaatatctagagaagtaatcgctgactcagcagaacttactgtaagaggtcattgttatgatgctttagtagggattgcaggatgtgataaatccttaccaggtctaatgatgtctatggttaggttaaatgtaccaagtgtatttatatatggtggatcaattcttccagggagatacaaaggaaaagacgtgacagtggtagatgtatttgaagcagttggaaaacattcatctggtcaaatgtcagctgcagaactcagaaaattagaattagttgcttgtcctagtgcaggtgcttgtggaggtcaatttactgcaaatacaatggcatgtgtatctgaagctattggattagcacttccttattcagcaggaacaccagctccttatgaag

SEQ ID NO: 285809 - DNA, 567 bp, Unknown
  Bacterial polypeptide expressing nucleotide sequence isolated from the Sargasso Sea
aatggctaaatttaacaaaaagaaacttccaagcagacacacatcattaggagcagatagagctccacatagatcgttttattatgcaatgggagaaactgagaaagatgtagcaaaaccctttgttggtgtcgtttctacatggaatgaggcagctccttgtaacattgccctaatgagacaggctcaatcagttaagaaaggagttagagcaaatggtggaactccaagagaattttgtacgattactgttacagatggtattgcaatgggtcatgaaggaatgaagtcttcattgatatctagagaagtaatagcagattctgctgaacttacggttagaggccattgttatgatgctttagtaggtattgcaggatgtgataaatctttaccaggtttaatgatgtctatggttagattaaatgtaccaagtgtatttatatatggtggatcaatccttccaggcaaatataaaggaaaagacgtaacagttgtagatgtatttgaggcagttggaaaacattcaacaggtcaaatgtctgctgcagaacttagaaaattaga

SEQ ID NO: 285810 - DNA, 520 bp, Unknown
  Bacterial polypeptide expressing nucleotide sequence isolated from the Sargasso Sea
tatggaaaatttaatttttaaagggccagcaagatgttttgactgtgaagaagatgcttttactgcggtagaaaataaaaaatacaacgatggagatgttatcgttatacgttatgaaggtcccaaaggaggacctggaatgagagagatgttatctacaactgcagctctttatggacagggtaaaggtgataaagttgcattagttactgacggaagattttcaggcggtactagaggtttttgtataggtcatgttggaccggaagcagcggatggtggacccatagcacttattaaagatggcgatatagtatctatagacgcaaatgaaggaactatagatgttgatttatctgaagatgagttagagtctagaaaaaaacaatggattaaacctaaaacagattacaattctggtacattatggaagtattccaatcaagttggtccagcaagatatggggctgtaactcatcctggtgcaaaagaagagacgcattgttacgcagatatttag

SEQ ID NO: 285811 - DNA, 790 bp, Unknown
  Bacterial polypeptide expressing nucleotide sequence isolated from the Sargasso Sea
atgaaaaaatttaataagaaaaaattaccaagtagacacacaacaataggtgcagataaagcccctcaaagatcattttattacgcaatggatttaacagaaaaagatgtagcaaaaccatttgttggtgttgtttcaacatggaatgaagcagctccatgtaacataaatttaatgaaacaagctcaatcagttaaaaaaggagttaaagcttcaggtggaactccaagagagttttgtaccattacagtaactgatggtattgcgatgggtcatgaaggaatgaagtcatcattaatatcaagagatgtgatagcagactcaactgaacttacggttagaggacattgttatgatgcattagttggattagcgggctgtgataaatcattacctggtttaatgatgtcgatggttcgtttaaatattccaagtgtatttatatatggtggatcaattctccctgggagatttaatggaaaagatgtaactgttgtagatgtatttgagggagttggaaaatatacatcaaaaaaaatgacagctcatgcattaagaaaattagaattaaaagcatgtccaagtgcaggtgcttgtggtggacaatttactgcaaatacaatggcatgtgtttctgaagcaataggattagctttacctttctcagcaggaacaccagcgccatatttagaaagaaataaatatgcaatagacagtggtaaagctgtaatgaatttattagcaaaaaatattagacctagagacatagtaacaagaaaagctttagaaa

SEQ ID NO: 285812 - DNA, 640 bp, Unknown
  Bacterial polypeptide expressing nucleotide sequence isolated from the Sargasso Sea
aatgcggaaatttaataaaaaaaaattacctagtagacatacttctttaggtccagataaagctccacaaagatctttttattatgcaatggatttaacagaaaaagatgtagcaaaaccatttgttggcgttgtttcaacctggaatgaggcagccccttgtaacattaatttaatgaaacaggcccaatctgttaaaaaaggtgttcatgcagcaggtggtacaccaagagaattttgtacaattacagtaacagatggaattgcaatggggcacgaaggaatgaagtcttcgttaatttcaagggatgttatagcagattcaactgaacttacagttagaggccactgttatgatgccttagttggtttagctggctgtgataaatcattaccaggccttatgatgtctatggttcgattaaatgtcccaagtgtgtttatttatggtggatcaatattaccaggaagatttaatggtaaggatgtaactgtagtagatgtttttgaaggtgttggaaaatatacatcaaaaaaaatgactgctcatgctttaagaaaacttgaattaaaagcatgtcctagtgcaggtgcttgtggtggacagtttactgcaaacacaatggcctgtgttcagaag

SEQ ID NO: 285813 - DNA, 465 bp, Unknown
  Bacterial polypeptide expressing nucleotide sequence isolated from the Sargasso Sea
ttagaggtagtgctaggccatttaattcagaagaggaagctatggaagcaattcttggtggtcatattaaagaaggtgatgtagtcattattagatatgaaggaccccagggaggacctgggatgagagagatgttaagccctacatctgcaatcatgggtaggggtttaggtgaaaaagtagcatttttgacagatgggaggttctctggtggaactcatggatttgtagtcggacatataactccagaagctcatttaggtggtcctttggcattagtagagaagggggatcagatagaaatagatgcagataaaaatgagattaatattttagtagacgaaaaagaattatcagagagaaaaaagaattggaagccattaagcaaagacgaagagaaaggagttctttctaagtatgcagattctgtggcttcagcttctaaaggtgcagtcacaacttaaa

SEQ ID NO: 285814 - DNA, 365 bp, Unknown
  Bacterial polypeptide expressing nucleotide sequence isolated from the Sargasso Sea
aatggctaaatttaacaaaaagaaacttccaagcagacatacatcattaggagcagatagagctccacacagatcattttattatgcaatgggagaaactgagaaagatgtagcaaaaccctttgttggtgtcgtttctacatggaatgaggcagctccttgcaacattgccctaatgagacaagctcaatcagttaaaaaaggggttagagctaatggtggaactccaagagaattttgtacaattacagttacagacggtattgcaatgggccatgagggaatgaagtcttcattaatatctagagaagtaatcgctgactcagcagaacttactgtaagaggtcattgttatgatgctttag

SEQ ID NO: 285815 - DNA, 458 bp, Unknown
  Bacterial polypeptide expressing nucleotide sequence isolated from the Sargasso Sea
gaatgcaaaggttttttattttgaggaagatggcatggcagcgattcttgagaaaaaagttaaagagggtgacgttgttgttattagatttgagggcccaaaaggcggccctggaatgagagaaatgcttaaacccacttctgcaattatgggacaagggctaggagataaagttgcatttataactgatggcagattctctggtgggacccatggtttcgtggttgggcatattagtcctgaggctgagatgggtggacctattgctctaattgaagatggagatgaaatcacgattgatgctaatgcagatattttatctcttaatatttctgacgatgaaatgaaaagaagattagaaaactggaaaaatccaaattcgtccccaaaaagtggagtgttggcaaaatacaaaaaaactgttcagtcagcatcaaagggcgctattactgactaat

SEQ ID NO: 285816 - DNA, 386 bp, Unknown
  Bacterial polypeptide expressing nucleotide sequence isolated from the Sargasso Sea
tgttattgtaataaggtatgagggacccaaaaggtgggcctggaatgcgagaaatgttaaaccaacatctgcaattatgggattaggtttaggagaaaaagttgcatttattactgatggtagattttctggaggaactcatggctttgtggtagggcatatttctcctgaagctgcagatggaggtttgatcgctatgattgaagacggggataagattttaatagatgcagaaaatgatcagttaatcctaaaggtggatgatgaagagattaatagaagagaatctaagtggaaaaacccaatcaaaagacctaaaaaaggcgtacttgctaagtatgcaaaaagtgtaaaatcagctagcttaggagccataacagattaag

SEQ ID NO: 285817 - DNA, 439 bp, Unknown
  Bacterial polypeptide expressing nucleotide sequence isolated from the Sargasso Sea
atgacaaaatttaacaagaagaaacttccaagcagacatacatcgttaggagcagatagagctcctcatagatcattttattatgctatgggtgaaactgagaaagatgtagcaaaaccctttattggcgtggtttcaacatggaatgaggcagctccttgtaacatagcactaatgagacaagctcaatctgttaaaaaaggtgttagatcaaatggaggtactccaagagaattttgtaccatcactgttactgatggaattgctatgggtcatgaaggaatgaaatcctctttaatatcaagagaagttattgcagattctgcagagttaacagtcagaggacactgttatgatgcattagttggtattgcaggatgtgataaatctttaccaggcttaatgatgtcgatggttagattaaatgttccaagtgtat

SEQ ID NO: 285818 - DNA, 403 bp, Unknown
  Bacterial polypeptide expressing nucleotide sequence isolated from the Sargasso Sea
aatgcttagaggtgttggttttgaaacagccgatttctcaaaaccactagttggcattgcatcgacttggtcaaaagttacaccctgtaatatgcatatcaatgaattggctgatctcgttgaaagctcaatagatgcatccggatgcaaaggagttctttttaatactattacagtatctgatgggatatctatgggtacacaaggtatgaaattttcattagtttccagggaagttattgcagattcaattgaaactgttgttggatgccttggttatgatggagttatttgcatcggtgggtgtgataagaatatgcctggagcacttatgggtttgggcagactagatagacccctcatttttatttatggaggatccatttcggccagttctataaat

SEQ ID NO: 285819 - DNA, 1476 bp, Unknown
  Bacterial polypeptide expressing nucleotide sequence isolated from the Sargasso Sea
ggtcggaattgacgccctgcaatgcgcactttcgcgaactcgccgaatacgtcaagaaaggtgtctacgaagcgggcggattcccgctggaatttccggtcatgtcgttgggcgaatcgaatttgcgccccaccgccatgctgtttcgcaacctcgcgtcaatggacgtcgaggagtcgattcgcggcaatccgatcgacggcgtgatcctgctctgcggttgtgacaagaccacgcccgcgctgctgatgggcgcggcctcgtgcgatcttcccgcgctggccgtctcgggcggcccgatgctgaacggccgttaccgtggtgaaaccatcggctcgggcacgggcgtctggcagatgtcggaacaggtgcgcgctggcacgctcgacatggcgcagttcatcgaggcggaaagctgcatgaaccgttcgcgcggtcactgcatgaccatgggcacggcttcgaccatggcctccatggtcgaagcgctgggcatgggcttgccgcacaacgccgcgattcccgccgtcgacgcgcgccgccaggtgctggcgcatatggctgggcgccgcatcgtcgaaatggttcgtgaggatctgacaatgagcaagatcctcacgcgtgaggcgttcgaaaatgcgatccgcgtcaatgcggcgatcggcgggtcgaccaacgccgtggtgcatctgctcgcgattgccgggcgtatcggcgtcgatctgaagctggaagactgggaacgcggctccgacgttccctgtctcgtgaacctgcagccgtccggcgagttcttgatggaagacttctattacgccggtggcttgccggcagtgctgcgcgaactcggtgaagcgcaactgctgcatcgcgatgccttgacggtcaatggccgcagcatctgggagaacgtcagccatgccgaatgcttcgaccgcaaagtcatctttccggtggccgcgccgttcaaacccaaggcagggattgctgtactgaaaggcaatctcgccgtggacggcgcagtcattaaaccttcggctgctacgcctgcactgctgcagcatcgcggccgcgcggtggtgttcgagaacgtcgaagacctgcatgcgcgaatcaacgacgaaaatctcgatatcgacgccagttgcgtgatggtgctcaaaggcgcgggaccgaagggctatccgggcttcgccgaggtcgggaacatgccgctgcccaccaaggttctgaagcagggcattacggacatggtgcgcatttccgacggtcgcatgagcggcacggcatacggcgcggtcgtgctgcatgtggcgcctgaagcggcggccggcggcacgctggcgctggttcgcgacggcgacatgatcgaactcgacgtcgccgggcggcgcctgcatctggatgtcgacgacgcggaactggcacgccgccgcgcggaatggcaagcaccaacaccgcccgcgcgcggctaaa

SEQ ID NO: 285820 - DNA, 1332 bp, Unknown
  Bacterial polypeptide expressing nucleotide sequence isolated from the Sargasso Sea
aatgagattagtacaacctgagtacactgtagcgacatctgatggtataagaaatggtaccaaagagatgcgttattctttaattggaagagaagtaactaatgatacattatgcgaacatttaagcgcttcgggtttagaaggtacaattgctgttgttgcctgtgacaaaccacctgttggaacattgtctgcaattttagagcacaatagacctgctattataatgtctgacggtccaataagacctggaattgattcagttactaatgaaccattggacatcatttcgagttatcaaattgcaggtagtgaagatgaagaactgaaaagaagaattgcatgcgaagcttgtcctggttatggaagttgtggtgggatgtttacttataatactatgcagacgtttattggtgttgtaggcatgcaacctttacatatggtttcaccaccttcagacgataaaagaaggttagatgtatttcctgatcaacttattacttatttagataatatggttaaaaaagatattaagccaagggatattgttacgagagactctataaggaatgctctaatagtagcaatgtctataggaggatcaactaacgtcatgcttcatgcaccagagttagctagagctgcaggatataaaagttttagtgaagatattatgtctccagacgaatttaactatttatccgaaaaggtagttcctgttttagttgatgctagaccatttggtaaatactcaatggttgatatcgataatcaaggtggtgttcaggtttttataagggatttattaaacacaggcttgttgaacggcaatactttaacgtgtacaggtgaaactttagctgaacaagttgatcgattagctcctaaagaacctgacggaagagtaatatatcctgtaaaaaaaccttataaagaaactgggggacttagacttttaggaggtaatttatctcctgaattcagttctatcttaaaactagctggtgtcgaaggtggtttagaaaataatgtttttattgggaaagctagaatatttgatggagaacaaaaacttctttggaccctagaaaatgaaccagacagctttaacaataatgatatggttgtagttaggtatgaaggacctgttggtggacctggtatgccagaaatgctagattccacctcaagaattacaactttgtgcagagaaagaaatataattgtaggattaatgactgatggacgtttctctggtggttctgttggtctcgtcattggtcatgttggtccagaggcggctataggtggacctattgccctaatagagga

SEQ ID NO: 285821 - DNA, 491 bp, Unknown
  Bacterial polypeptide expressing nucleotide sequence isolated from the Sargasso Sea
aatgtcagataataaaaaaagaaaatattcatcaattatagttgatggagtcgaacaagccccttctcgagctatgctaagggctgtaggttttgaagaggaagatttttctaaacctcaagtaggtatagcttctacatggagtatggttactccatgtaatatgcatatagataaattagctcaagaatctgctaggggagctgatgaatctggttcaaaatctattattttcaataccattactatttccgatggtatctcaatgggaacaaaaggaatgcgttattcattagtttctagagaggttattgctgactctattgaaacagttgtagcgggacaattatttgatggtttagttgctattggtgggtgcgataagaatatgcctggttgcatgatggctatagccaggcttaataggcctgctatatttgtttatggtggaagtattaaaccaggagaaaatagaacagatgttgtctctg

SEQ ID NO: 285822 - DNA, 484 bp, Unknown
  Bacterial polypeptide expressing nucleotide sequence isolated from the Sargasso Sea
tttgataaatgaagagtctgcatataaagcggtaataaacagaaaatacaaagatggagacatcattataattagatatgagggaccaataggaggtcctggaatgagagaaatgcttcaaacaactgcagcaatctacggtcagggaaaaggggagaaagtagctcttattacggacggtaggttctctggggctactagaggcttttgtatcggtcatgtgggccctgaggcctccctaggcggtcctatagcccttttaaggaacggggatatcatcgatatagacgctaaaaaaggcacaattaacgtaaggcttacaaagaaggaattaagtgcaagacgaaaaaaatggaaaccaagaaaagtgaattttggtaatggtacattatggaaatatgctcaaactgttggaccagcttataaaggtgcaccaactcatccgggtggtaaaaacgaggttagaacgtacgctgatatttaa

SEQ ID NO: 285823 - DNA, 337 bp, Unknown
  Bacterial polypeptide expressing nucleotide sequence isolated from the Sargasso Sea
gatgaaaatttcaagcagaaatgttgtcgaaggtaccgcacgagctccacatcgtgcaatgtacaaagcaatgggactcacaaatgaagatttaagcaaatcatttgtcggagtatgccatacaggtaatgaagcaacaccttgtaacatccatcttccaaatctcgcacaacaagcaaaacaaggagttactgaaggaggtgcaaccccaagagagtttagtacaattgcagttagtgatggaattgcaatgggtcatgaaggaatgaaatcttctttaatcagtagagaagtaattgcagattcaattgaactaatggtaagagctcatcaatac

SEQ ID NO: 285824 - DNA, 343 bp, Unknown
  Bacterial polypeptide expressing nucleotide sequence isolated from the Sargasso Sea
atgagagaaatgctaaaacctacttctgcaatcatgggattaggactaggagataaaataggatttattacagacggaagattttcaggtggcacccatggttttgtagttggacatgtttctccagaagcagctgagggtggtttaatagcattagttgaagacggagatactatacttattgatgcagaaagtgatcaacttgttctaaaagttgatgacgatgaaatcaaaagaagacaatcaatttggaaaaatccaaacagtaaaccaaaaaaaggagtacttgctaagtatgctggaagtgtaaaatctgcgagcctgggagctataactgattaaa

SEQ ID NO: 285825 - DNA, 754 bp, Unknown
  Bacterial polypeptide expressing nucleotide sequence isolated from the Sargasso Sea
aatggcaaagtttaacaaaaaaaaattaccaagtagacatacatctttaggtccagataaagcgccacaaagatccttttattatgcaatgaatttaactgaaaaagatgttgcaaaaccatttgtaggagtggtttcaacttggaatgaagcggcaccttgtaatatagcattaatgagacaagcacagtcagttaaaaaaggtgttagtctttcaggtggtacaccaagggagttttgtacaattacggttactgacggtattgctatgggtcatgagggaatgaaatcttcacttatttcaagagatgtaattgcagattcaactgaactaacagtaagaggacattgttatgatgctctagttggagttgcaggttgtgataaatctttaccaggattaatgatggcaatggttcggctaaatgttccaagtgtttttatatatggtggttcaatacttccgggtagatttaatggaaaagatgtaactgtagtagatgtatttgaaggtgttggaaaatattcttcaggaaaaatgactaaacatgcattaagaaaactagaattaatagcatgtccaagtgctggtgcatgtggtgggcaatttactgcaaatacgatggcatgtgtttctgaagcaataggtttagctttaccttattcagctggaactcctgcaccttacgagcagagagacaaatatgcattacaaagtggtaaggcagtaatgaatttattaaaaagaaatatc

SEQ ID NO: 285826 - DNA, 607 bp, Unknown
  Bacterial polypeptide expressing nucleotide sequence isolated from the Sargasso Sea
cattacagcatatcctaatgaccaaacaatcattcgatctcttgattcgcctattaaagatacaagccatcttagagttttatatggcaacttagcccctgaaggagcagtagcaaaaattacaggaaaggagggcattacttttactggccctgcaaaagtttttgattctgaggaagagggtatggaagctattcaaggacaaaagattcaaaaaggtgatgtcatagttatccgttttgaagggcctaaaggtggaccaggaatgcgagagatgttgaaaccaacctctgccattatggggcaaggattgggagatgaagtcgcttttattactgatggtagattttcaggaggaactcatggttttgttgtgggtcatattactcccgaagcttatgtaggaggacctctagcaatccttgaaaatggagacgaaatcacaatcgatgctcaatcaaatactctgagtgtagctttgtcagagaaggaaataactcatcgaatgaacaatttaaagatcaccaaaaagattccaactaaaggagttttgtctaagtactcaaaaagtgtacaatcagcatccctcggagctattaccgactga

SEQ ID NO: 285827 - DNA, 661 bp, Unknown
  Bacterial polypeptide expressing nucleotide sequence isolated from the Sargasso Sea
aatgtctaaggacaagagaaaatattcttcaaagatagtagatggagttgaacaggctccatcaagagccatgttaagagctgtcggtttcggggatgaagattttaaaaaaccacaagtaggaattgcttccacttggagtatggtcactccttgtaatatgcacattgataaattagcaaattctgtggttaaaggcgtaaatgaatctggttctaaagcagttatttttaatacaatcactgtttcagatggaatttcgatggggactcaaggcatgaggttttcgttagtttctcgtgaagtaattgctgattcgattgaaactgtagtgagcggtcaaggctttgatggcttagtaactctaggaggctgtgataagaacatgcctgcatgtttaatggctatggcaagattaaatagaccttcagtttttgtttatggaggtagcattaaaccgggaaaaggaagaactgatgttatatctgtttttgaagccgttggaaaacattcagaaggacaaatttctgatattgaattattagatattgaatcaagtgcaattcctggtccaggttcatgtggaggaatgtacacagcaaatactatggcttcggcaatagaagctatgggtatgagtctaccaaaccagttctgcaca

SEQ ID NO: 285828 - DNA, 715 bp, Unknown
  Bacterial polypeptide expressing nucleotide sequence isolated from the Sargasso Sea
atggaagataaaggatcaaatagaaaatctaatttaccaagtagatatgttagcgttggacctaagagtgctcctcatagatcttattactatgctatgggtttaaaggagcatgaaatttaccaaccttttgttggtgtcgtgagtacttggaatgagtctgctccttgtaacattacactacaagatcaggcgcaacatgtaaaaacaggtgttaaagatgctggaggcactcctagagaatttgccacaattacggtaactgatggaattgcaatgggccatgaagcaatgaaatcgtcacttattagcagagagattattgctgactcaattgagttatcagttcgaggtcattgctatgatgcaatagtcggtttagcaggatgtgataaatctcttcctggtttaatgatggccatggttagattaaatgttccttcagtatttatctatggaggatcaattctaccaggtaaatataaaggtaaagatgttacagttatagatgtttttgaagcagttggaaaacatgctgctggaacaattagtgatcaagatttaaaagatattgaacaagttgcttgtccatcagctggatcatgtggaggtcaatttacagctaatacaatggcttgtatatctgaagctattggtttagcacttacaaattctgctatgcctcctgcagttaatacagacgaaagaaagtcct

SEQ ID NO: 285829 - DNA, 1720 bp, Unknown
  Bacterial polypeptide expressing nucleotide sequence isolated from the Sargasso Sea
aatgaagaattcaaatacagttttgatcgacaaaaatcctggtcgaaattctcaaacttacggtattgcaagagaattaggtactgatttgggactcattcacgaaccatccgtcggggtggttgggaataagggtgactctcaatgttacattggtgtttctcaaaaggttgagattattcatgatgctctcaaggatagggtgggcagtaaacctgggcaattaccaatgagactgatccaaccagagtttactgttgctacctctgatgggattaggaatggcacaaaagagatgcgatattctttaattggtagagaggttacaaacgatagtctgtcagagcatctcagcgctactggacttgagggcgttattgcagttgttgcatgcgacaagcctcctgtaagtactctagctgctattttagaacataatagacctgcaattttaatgtctgatggttccataagacctggtattgactcggaaactggggaaagtatcgacttaattacagcttaccaaatggctggcagtgatgatgaaaaattaaagagtagaattgcaaaagaagcgtgtcctggttatggaagttgtggcggtatgtttacttacaacactatgcaaacttttattggtgttgttggaatgcagccgttgcatatgatctcacctgcatctgaagatgaaagacgcgttgaagaatttcctgctgaattggtggactatttagctaacctgattgataaaaacatagcacctagagatatcgttactagagagtctttaagaaatgcaattattgtagctatggctgttggtggctcaactaatgtcttattgcacgctcctgaattggcaagagcagctgggtataaagactttgccaatgaaataatgagccccgaagagtttaataatttgtctagaaatgttattccggttgtcatagatgctcggccttttggacaatattcgatggtggatattgatgccaaaggcggtatgcaagtgatagttaaagaactaatggacgctggattgttaaatggtgacacattgacttgcacaggagagaccctgtctgaacaagtcaaacgactgaaccctcctacaccggatgaggatgtaatttatactgttcaaaaaccatataaagagacaggcggactgcgcgttttaggtggaaatttgtcacctgaatttagtgctgtactaaagttagctggcgttgaaggaggactggaaaataacatctttcaaggtaaggctaaggtttttgatggagaacaggaactattgaaggcattagattctcaggctgatatgttcgaaaactttgatatgattgtggtacgttacgaagggccgtttggtgcgccaggtatgcctgaaatgctagactcgacctctagaattactgcgttatgtcgtgagaaaaatattgtagttgggctcatgactgatggcaggttttctggtgggtcggtcggtttggttattggtcacgtgggccccgaagcagctgcaggcggtgccattgctttaatcgaaactggtgatgaaatagttgtagatttaaataaaaatgagttgaattgtactcaacttcagcaggaagaaacgagacttgagcgtgagacactttggaaagatcttgttgcagaaaatgatggcttgcacccatcggtggagatgctgatacccgtttcttaa

SEQ ID NO: 285830 - DNA, 1177 bp, Unknown
  Bacterial polypeptide expressing nucleotide sequence isolated from the Sargasso Sea
cattggtgttttaggcatgcaaccattgcatatggttttccagcatccgaagactaccgaaggataaaagattttcccaatgaattaattaagtttcttagaaaattaattgaaaaaaacattacaccaagggatattgtaactaaagattctataaaaaatgctttgatagtttcaatggctttagggggctccacaaatgtcatgttgcatgcaccagaaatttctagggcagcaggctataaagatttttcagaggaaataatgagtccagaagaatttaaccatttatcaaaaaatgtaatacctgttttagttaatgcaagaccatttggtaaattttcaatggttgatatagataaagagggtggattacaggtaattgtgaaagaattactagatgcagaccttttaaaaggtaataccttaacttgcacatgtgagactttaaaagaacaagttgagagacttcaacccaaaaaacctgatggagatgttatatatactttaaaaaaacccttcaaaaaaacaggaggattaagaattttaggtggaaatctatcacctgattttagtgcaatattgaaattagctggtgttgaaggcggattagaaaacaatcttttcaaaggtaatgctagggtttttgatggagaatataatttacttgaaacactcgaaaatgaacccaattcattcaaagacaaagatatgattgttgttagatatgaaggtcctgtaggaggccctggaatgccggagatgttagattcaacttcaagaataacaactctctgtagacaaaagaaaatcaccttaggtctaatgactgatggaagattttctggaggttctgtaggactagtaataggacatgttgggccagaagcagctgttggaggtccaataggattgattaaaaatggagataaaataattgtagatttaaatgaaaacaaaattgaatgtgaacaacttaaagataactctgtttataaaaaaagaaaaaatgaatgggataatttgaaaaataaaaacaatggacttcatccttcaattggtgaagctaatactcgactacttaatagaatgaggttaaccgctgttcctgcatatcaaggagctggtatgcatccaaataagaaactttgggttaaagaaccaagagaggtataaa

SEQ ID NO: 285831 - DNA, 871 bp, Unknown
  Bacterial polypeptide expressing nucleotide sequence isolated from the Sargasso Sea
ttgttatgatgcattagtaggattagcaggatgtgataaatcattaccaggattaatgatgtctatggttagacttaatgttccaagtgttttcatttatggaggttcaattttaccaggtagatttaatggtaaagatgtaaccgttgttgatgtaattgaaggtgttggaaaatatcattctggtaaaatgtcattacatgcacttagaaaattagaacttaaagcttgtccaagtgctggagcttgtggtggacaatttactgcaaatactatggcatgtgtatctgaagctattggattagctttaccttattcagcaggaaccccagcaccttataccaagagagacaaatatgcagttgatagcggtaaagcagttatgaatttattagcaaaaaatataagaccaagagatatagtaacaagaaaatctttagaaaatgctgctacaattgttgctgccacaggcggatcaacaaatgcagcactgcatcttccagcaattgctaatgaaataggaattaaattcgatttaatggatgtagcaaaaatttttaaaaaaactccttacttagcagacctaaaacctggtggaaaatatgttgctaaagatatgtggcttgctggaggtgtacctatgttgcttaaaacattatacgaaggtggatttatacatggcgattgcatgactgttacaggaaaatcaatgaaagaaaatttaaaaaaagttaaatttaatccaaatcaaaaagttatgagaagttataataaaccattatcacctgatggtggagtagtagggttaaaaggaaatttagcaccagatggtggtattgtaaaaattgcaggacttaaaaaacttcaattt

SEQ ID NO: 285832 - DNA, 816 bp, Unknown
  Bacterial polypeptide expressing nucleotide sequence isolated from the Sargasso Sea
tgtagggtgcttaggctacgatggagtagtagcgattggtgggtgtgacaagaatatgccaggagctttaataggcttggcaagattaaatagaccttcaatatttatttatggtggctctattcaacctagttccataaatactgattatgttactgtttgtgaaaaagttggtgaatatgcaaaaggtagtctcagcgaggaagatcttatagcatttgagaaagtttcagttaaaggtcctgggtcttgtggtggcatgtataccgctaataccatggcatcaagcatcgaggctttagggatgagtttgcctgggagcagcagtcaagatgcagtttcaaataataaaaaacaagattgtaaggatgccggagctgctattaaaaacttactagaccttgatatcaagcctagtgatatcatgacaaaaaaggcttttgagaattcaatagcagttgtgattgccttagggggatcaacaaatgcagtgctgcatctaattgctatggctcactctattggtgttgatcttgatttagatgattttacgcgcattggaaaagtcactcctgttttggctgacattaagccttttggagtgcacttcatgtcagaacttaatgccattggtggaattgcccctatgatgaagttgatgcttgaaaaagggttgctgcatggagattgcctaactgttactggcaaaactgtccaagaaaatcttcaagaggtgttgccgtatcccgatggtcaaaaaattattctaccaatattagagccagttaaagagtctagccatttaagagtgcttta

SEQ ID NO: 285833 - DNA, 649 bp, Unknown
  Bacterial polypeptide expressing nucleotide sequence isolated from the Sargasso Sea
gttactggaaagacaattgaagaaaatctttcaaaaattaaatcacctgatcttaaatctactgatataattttccccctaagtaatccgattaaagaatctggtcatatccaaattctcaaaggaaatttagctgaacaaggatgtgttgcaaaaataacaggtaaagagggattgaaattttcaggtccagctaaagtctttgatagtgagtttgaatgtttaactgctatttcagaatcaaaggttaacaaaggagaagttgttgtaattagatatgaaggacccaaaggaggtcctggcatgccagaaatgttaaagcctacttctgcaattatgggagcaggtcttggtaaagatgttgcattaattactgatggaagattttcgggaggtactcatggctttgttgttggtcatattgtacctgaagcctatgacggaggagtaattgcaattgttgaaaatggcgatatgattactatagattctgagaataatcaaatatttgtagatatttcagatgatgaaataaaaaatagaattaaaaattggtctaaacctgatttaaaaattaaaaaaggaattttgtataaatatgttaaatcagtttcaaatgcatcaagtgggtgtgtaactgatgaataaa

SEQ ID NO: 285834 - DNA, 912 bp, Unknown
  Bacterial polypeptide expressing nucleotide sequence isolated from the Sargasso Sea
tatgagaaaatattcttcaaaacttgttgatgggaaagacagagctccaagtagatcgatgcttagagcggtcggttttaatgacaaagattttttaaaaccacaagttggtatagcctctacttggagtatggttactccatgtaacatgcatataaatgatctagctaaggttgcaaccaaagcgattgattctaatggaggaaaagctgtaaacttcaacacaataacaatatcagatggtatctcaatgggttcagatgggatgagatattcacttgtttctagggaaattatatcagattctattgaggctgttgttgcaggcgaagggcttgatggcttcattagctttggaggctgcgataaaaacatgccggcttgtgtcatggccatgcttagattaaatcgaccatcagtatttgtctatggtggcacaatacttccaggtacacatcgaaataaaaaaattgatattgtttctgtctttgaagctgtcggtaaaaatgcaaatggtgatatggatgataaagaactaatgcagatagaaaaaaaagctattccaggcccaggatcttgtggaggtatgtatactgcaaacactatggcatgtgctatagaagctatgggcctttcattaactaacagttctgcacaaacagcaatttcaaaatcaaaatctacagataccaagaatgcttccatagctcttatgagctgtataaaaaaagatctaaaaccaagagatatagtcacaaagaaatcattagaaaatgcaatcacgattgttatggcccttggcggttctactaatgctgttttacaccttcttgctattgcaaaagaagctaaattaaatctttctctaagagacttggaaagaatgggtaaaaaaacactgtttctgcagat

SEQ ID NO: 285835 - DNA, 670 bp, Unknown
  Bacterial polypeptide expressing nucleotide sequence isolated from the Sargasso Sea
tatgactgcaacaaagaaaactggagaatcgggacatcgccgttactcaaagctggtaaccgatacaaatgcacgtgctgccagcaggggcatgctttatggtgttggattcaaaaaaggggattttcataaatctcaagttggtattgcctctacatggggaacagtaactccatgcaatatgcacataaatgacttggcagagcatgcagcgagaggtgtacgcaaagcaagagggatgcctttgacttttggaacaattactgtttcagacggcatttctatgggtacagaagggatgaaatattcgcttgtttcccgtgaagtgatcgctgattcgattgaaacggtagttggatgtcaaagttatgacggaattgtcacaattggcggttgtgataaaaatatgcccggatgtatgattgccattgcacgcttaaatcgccctgctgtttttgtatatggaggaacaatacttccaggaactcacaagggcaaggatgttgatattgtatctatttttgaggcagtgggcaaacaggcagctggcacaattacacaggatgaacttgaagaagtcgaatcatgtgctatccctggtgcgggttcatgtggaggaatgtacacagcaaatacaatggcctctgcaatcgaagctctgggaatgagt

SEQ ID NO: 285836 - DNA, 827 bp, Unknown
  Bacterial polypeptide expressing nucleotide sequence isolated from the Sargasso Sea
tatgcttagagcagtaggttttgaatctgaagatttcaataaaccgcaggttggtattgcttcaacttggagtatggttacaccttgcaatatgcatatcaatcaactagctgaatctgccgcgagtggagctgacttagttggatctaaatcagttatatttaatacaatcactgtctctgatggcatatcaatgggtactaagggcatgaggtattcacttatttcaagagaagttatagcagattccatagaaacagtagttggcggtcaaggcttcgatggattaattacgattggtggatgtgacaagaatatgccagcatgtgtaatggctatggcacggttaaatagaccttcgatttttgtttacggaggtagtatcaaaccaggatctaatcgaaccgacgttgtgtcagtttttgaggcggtaggaaaacactctgaaggagctatttctgatattgaattattagatatcgagtcaactgcaattcctggtcctggttcttgcggaggaatgtatacagcaaataccatggcttcagctattgaagctttaggtatgagtcttcctaatagctcagctcaagaggcagtttcttcaagtaaactaaaagattcttcagatgcgggtgaatcaatcatgaatttaatttctttagatttaaagccacgcgatattatgactaagcaggcatttgaaaacgcaattgccgttgtaatagcccttgggggatctactaatgctgtattacatttattggcgattgcccatgaagcaaaaataaatctatctttaaatgattttgaaagaattggtaaaa

SEQ ID NO: 285837 - DNA, 857 bp, Unknown
  Bacterial polypeptide expressing nucleotide sequence isolated from the Sargasso Sea
ggtattgcacatcttagctattgcgaatactgcaggaatagatatcaacattaatgattttgagagaatcagacaaaaagtacccgttatttgtgaccttaaacctagtggtaaatatgtgacggtggatcttcataaggcaggtgggattccacaagtaatgaaaatacttttaaatgcaggattaattcatggtgattgcaaaaacattgaaggcaaaaccatctcagaatacttacagaatattccagataagcctccaacgaatcaaaatgttataagagacatagatgaccctctttataaaaaaggacatctagctatattaaaaggcaacttagcgagcgaaggttctgtagccaaaattagcggagtaaaaaaccctgtattaactggtcccgcaaagatttttgaaagtgaagaggattgtttaaaatcgatattaaataacgatatcaaagctggtgatgttgttgttattagaaacgaaggtcctgtaggaggtccaggcatgagagaaatgttagctccaacatctgcgattgttggtcaagggctaggagagaaggtggctttaattaccgatggcagatttagcgggggtacctatggtcttgttgtgggtcacatagctccagaggctgctgtaggaggaaatattgctctaataaaacaaggtgatttaattacagtagatgctgtaaaacaactaattgaagttgatttatctgacgaagaattagaaaaaagaaaaaaagattgggtaaaacctattcaaaaatacaaaagaggaattctttcaaaatattcgagaatcgtaagcacatcaagtttaggggctgttactgatttataaa

SEQ ID NO: 285838 - DNA, 990 bp, Unknown
  Bacterial polypeptide expressing nucleotide sequence isolated from the Sargasso Sea
caccatgcaatatgcatatagacaagcttgcggaacaggtcaatcgagcaacagacagcgctggaggtaaaggaattatctataacgccattacgatttccgatgggatttctatgggcacagaaggcatgaaatactctcttgtatcaagagaagtaatagcggacagtgttgagacagtctcaggttgcatggggcatgatgccatcatcgcaatcggtggttgtgacaaaaatatgcccggcctgatgatgggattatccaggttaaaccgcccatcgatatttgtgtacggtggcactatacaacccggccctaatcatacgaatatcatttctgtctttgaagcagtcggagcccactcggctggttctatttcagatattcaactcaagcaaatcgaagataccgcaatccccggaccgggctcgtgcggcggaatgtacacagcgaataccatggcttcggctatagaggcgttgggtatgagcttacccaatagctcagctcaagatgcaatttctcaagcaaaagttgatgactgcgttaactcaggggaagctataatgaacctagttgagcatgatataaaaccctctgacataatgactcgacctgcttttgaaaatgctattaaggttataattgccctaggtggatccactaatgcggttttacacttgctcgcgatggctcacaccatgaatgttaaactagagcttgatgatttcacccgtattggtaaaacaattccgatggttgcggacctaaaacctagcggcaaatatctcatgtcggaattaattaaaataggcggaattcagcctttgatgaaagaaatgctagaggctgaaatgctggatggcagttgcctgacggtaacaggcaagacactgaaggagaatcttgctaatgttaaggcttacccaagcgatcaagacatcatcagaaacttcaacaacccaataaagaaggactctcacctgtagt

SEQ ID NO: 285839 - DNA, 520 bp, Unknown
  Bacterial polypeptide expressing nucleotide sequence isolated from the Sargasso Sea
aaatttagctaaagatggggcagttgcaaaaattacaggcaaagaaggaacatcttttgagggaaaagcaagagtcttcaattcagaagaagagggcgttgaagcgattttatctaattcaatagaagatggcgatgttattgtaataaggtatgagggacccaaaggtgggcctggaatgcgagaaatgttaaaaccaacatctgcaattatgggattaggtttaggagaaaaagttgcatttattactgatggtaggttttctggaggaactcatggctttgtggtcgggcatatttctcctgaagctgcagatggaggcttgatcgctatgattgaagacggggataagattttaatagacgcagaaaatgatcagttaattctaaaggtggatgatgaagagattaatagaagagaatctaactggaaaaatcctatcaaaaaacccaaaaaaggtgtgcttgctaaatatgcaaaaagtgtaaaatcagcaagcttaggagccataacagattaa

SEQ ID NO: 285840 - DNA, 859 bp, Unknown
  Bacterial polypeptide expressing nucleotide sequence isolated from the Sargasso Sea
ttctgcacgattactgttacagatggtattgccatgggtcatgagggaatgaaatcatcacttatttctagagaggtaattgctgattcagctgagctgacagtaagaggacattgttatgatgcattagttgggatcgcaggatgtgacaaatcattaccaggtttgatgatgtcgatgctaagattaaatgttccaagtgtgtttatatatggtggatcaattttgccaggaaaatttaaaggaaaagatgttacagttgttgatgttttcgaagcagtagggaaacactcttcaggcaagatgtcctcagaggagttaagagaattggagttagttgcatgcccaagtgctggtgcttgcggtggtcaatttacagctaatacaatggcttgtgtatcagaggctataggattagcattaccttattcagccggtacaccggcaccatacgaagagagagataaattcgcatttgagagcggtcaagctgttatgaatttattagaaaaaaaaattaaacctagagaaatagtaacaaaaaaatctcttgaaaatgctgcaacgattgttgctgccacaggaggctcgactaatgcagctctacatttaccagcattagcgaatgaaataggagttaaatttgatttaatggatgtggctaaaatatttaaaaaaacaccttaccttgctgatttaaaacctggcgggcaatacgttgctaaggacatgtgggaagctggaggtgttccaatgctcctaaagactttacttgatggaggatatattcatggagaatgtcttactgttacaggtaaaacaatgaaagaaaatttgaaaaatattaaatttaataaag

SEQ ID NO: 285841 - DNA, 1017 bp, Unknown
  Bacterial polypeptide expressing nucleotide sequence isolated from the Sargasso Sea
atggctgctgaagatcttgaaaaagaactaagtgcagataaaagtgctgaaatattagtctcggcaatagaaaaagatataagacctttagatctaatgactaagaaagcatttgaaaatgcaatatcagtaattatggcaattggaggatcaacaaatgcggtattgcacattttagccattgcaaatactgcagggatagatatcaacattaatgattttgagagaatcagacaaaaagtccccgttatttgtgaccttaaaccgagtggtaaatatgtgacggtggatcttcataatgcaggtgggattccacaggtaatgaaaatacttttgaatgcaggattaattcatggcgattgcaaaaacattgaagggaaaactatttcagaatacttacagaatattccagataagcctccaacaaatcaaaatgtcataagagacatagatgaccctctttataaaaaaggacacctagcgatattaaaaggtaacttagcgagcgaaggctccgtagccaaaattagcggagtaaaaaaccctgtattaacaggtccagcaaagatttttgaaagtgaagaggattgtttagaatcgatattaaataatgatatcaaagctggtgatgttgttgttataagaaacgaagggcctgtaggaggaccaggtatgagagagatgttagctcctacatctgcaattgttggtcaaggcctaggagagaaagtagctttaattaccgatggcagatttagtgggggtacttatggtctagttgtaggtcacatagccccagaggctgctgttggcggaaatattgctctaataagacaaggtgatttaattactgtagatgctgtaaaacaactaattgaagttgatctatctgacgaagaattagaaaaaagaaaaaaagattgggtaaaacctaccccaaaatacaaaagagggatactttcaaaatattcgagaatagtaagcacatcaagtttaggtgctgttactgatttatag

SEQ ID NO: 285842 - DNA, 722 bp, Unknown
  Bacterial polypeptide expressing nucleotide sequence isolated from the Sargasso Sea
actgaataaagttggcggaattcagccactaatgaaaatgttactcgatgcaaacttacttcatggcgactgtttaacagtttcaggaaaaactatttcagaaaatctttcagaagttgatccatatccagataatcagacaattattagagaaatatctaatcctatcaaaagtagtagtcatttgcgtattctttatggcaatttggctcctgaaggagcagtagctaagattacaggaaatgaagggctaaaattcactggcacggctaaagtatttgactctgaagaagacggaaataaggcaattcaaaataacctaattaatgaaggagatgtggttgttataagatatgagggaccaaaaggaggccctggcatgagagaaatgctaaaacctacctctgcaataatgggacagggcttaggcgataaggtcgcatttattaccgatggaagattttctggcggaactcatggctttgttgttggacatatttctccagaagcatatgttggcggacccatcggagttattgaaaatggagacaaaataacaattgatgctgagacaaactcaatttctatcgatatatctgatgaggagctccaaaaaagattagatagctttaaaccaaataaagagcttcctaaaaaaggcgtcttatcaaaatactcaaaaagtgtacaatctgcatccctaggagctattactgattaat

SEQ ID NO: 285843 - DNA, 505 bp, Unknown
  Bacterial polypeptide expressing nucleotide sequence isolated from the Sargasso Sea
atgaataaactcagatcatctgcaataacccaaggtgtgcaaagatcccctaacagatcgatgttaagagctgttggatttaatgatgaagattttaataaacctattattggagttgcaaatggatacagcaccataacaccatgcaatatgggtttaaataagttagctctaaaagctgaagagtcaataaaaagatcaggtgggatgcctcagatgtttgggactataacagtaagtgatggcatttctatgggaacagagggcatgaaatattccctagtttcaagagaagttattgctgattcaattgaaacagcatgcaatgctcagagtatggatggagtacttgctataggtggatgtgataaaaatatgcctggtgccatgattgcgattgcaagaatgaatattccctcaattttcatttatggagggacaataaagcctgggaaattgcatggagaagatcttactgttgttagtgcatttgaagctgttggac

SEQ ID NO: 285844 - DNA, 674 bp, Unknown
  Bacterial polypeptide expressing nucleotide sequence isolated from the Sargasso Sea
attaattcatggagattgcaaaaatattgaagggaaaactatctcagaatactacagaaatattccagataagcctccaacaaatcaaaatgtcataagagacatagataaccctctttatcaaaagggacatctagcgatattaaaaggtaacttagcgagcgaaggttctgtagctaaaattagcggagtaaaaaaccctgtattgactggtccagcaaagatttttgaaagtgaagaggattgtttaaaatcgatattgaacaatgatatcaaagctggtgatgtcgttgttattagaaacgaagggcctgtaggaggaccaggtatgagagagatgttagctccaacatctgcaattgttggtcaaggcctcggagagaaggtagctttaattaccgatggcagatttagcgggggtacttatggtctggttgtgggtcatatagccccagaggctgctgttggtggaaatattgctctaataaaacaaggtgatttaattacagttgatgctgtaaagcaacttattgaagttgatttatctgacgaagaattagaaaaaagaagaaaggattgggtaaagcctaaaccaaaatacaaaagagggatactttcaaaatattcgaaaatcgtaagcacatcaagtttaggggctgttactgatttataga

SEQ ID NO: 285845 - DNA, 515 bp, Unknown
  Bacterial polypeptide expressing nucleotide sequence isolated from the Sargasso Sea
ctataaaggaaaagatatatcaattgttgatgtttttgaaggtattggggcatatgaaaaaggaatgattacaaaagaagatttatatgaaatagagtgtgctgcatgccctggtgttggatcatgtgccgggatgtttacagctaacacaatggcgtccgttggtgaggcgattggaatgagcttacctggtacagcatcaatacctgctgaagacagcagacttcgagttgcagctgaagaatcaggaaaacaattaaattatttactaaaacacgacatcaaaccaagagacattatgacaaatgaggctttcaaaaatgcaattactactgtgttagctttaggaggaagtacaaacgctgttcttcatttacttgcaattgcacatgagtcaaaagtgtctctaagtttggagacgtttgatgaactcagtagaaatgtacctcatcttgcagatatgaaaccgtttgggaaatttcatatggttgacttggataaaattgggggagtcc

SEQ ID NO: 285846 - DNA, 937 bp, Unknown
  Bacterial polypeptide expressing nucleotide sequence isolated from the Sargasso Sea
cacaggggtaaaagataccgactttggtaaacctattattgccgttgtgaactccttcacccagtttgtgcctggccatgtgcatttacgcgacttaggcaaactggtggctgaagctattgaagaagcaggtggtatcgccaaagaatttaataccatcgccatagatgacggcatcgccatgggccacggcggtatgctgtatagcctgccgtcccgcgaaatcatcgccgactcggtggaatatatggtcaacggccactgcgccgacgctatggtctgtatttccaactgcgacaaaatcacccctggcatgttaatggcagcactacgcctgaatatcccagcaatttttgtctcgggtggccctatggaagcaggcaaaaccaaactgtcggaccaaattattaagctggatttagtcgacgctatggtgtcggccgctaaccctaatgtcagcgatgcagacagcgaaaaaattgaacgtagcgcttgcccaacctgtggttcctgctctggtatgtttaccgccaactcgatgaactgcttggttgaggccttgggtttaggccagccgggcaatggctctatgttggcgactcacagcgatcgtaaagcgctgtttatcagtgcgggccagcgcattatggacttatgtaaccgctggtataaacagaacgacgccagcgctttgccacgtaatatcgctaataaaaccgcctttgaaaacgccatgatgctggatatcgccatgggtggttccaccaacacagtgctgcatttattggccgctgctattgaagccgaagtcgattttggcatgagcgacatagacaggttatcgcgcatagtgccgcacttatccaaagtggcaccgagcacgcaaaaataccatatggaagacgtacaccgcgccggtggcgtaattgccattctg

SEQ ID NO: 285847 - DNA, 919 bp, Unknown
  Bacterial polypeptide expressing nucleotide sequence isolated from the Sargasso Sea
gaattttgtacaattactgtaacagatggaattgcaatgggtcatgaaggaatgaaatcatctttaatttcaagagatgtaattgcagactcaacagaacttacagttagaggtcattgttatgatgcattagttggattagctggatgtgataaatcattaccaggtttaatgatggctatggttagattaaatgttccaagtgtttttatttatggtggttctattttaccaggcagatttgaaggtaaagatgtaactgtagttgatgtatttgaaggtgttggaaaatatacttcaaaaaaaatgacagctcatgcattaagaaaattagaacttaaagcttgtccaagtgctggagcatgtggtggtcaatttacagctaatacaatggcatgtgtttcagaggcaattggcttagcattacctttttctgctggtacaccagcgccttatgctgaaagaaataaatatgctattgatagtggaaaagctgtcatgcatttattagcaaaaaatattagaccaagagatattgtaacaagaaaatctttagaaaacgcagcaacaattgttgcagcaacaggcggatcaacaaatgcaggtttacacttaccagctatagcaaatgaaataggaattaaatttgatttaatggatgttgcaaaaatatttaggaaaactccttatcttgctgatttaaaacctggtggaaaatatgttgcaaaagatatgtgggaagcaggaggagttccaatgttattaaagacattaatggatggtggctacattcatggagactgtatgacagttacaggtaaaacaatgagagaaaatttaaaaaatgtaaaatttagagaaaatcaaaaagtaatgagatcttataaaaatccaatttcaccaacaggaggagtagtgg

SEQ ID NO: 285848 - DNA, 1006 bp, Unknown
  Bacterial polypeptide expressing nucleotide sequence isolated from the Sargasso Sea
atttactgctaacactatggcttgtgtatcagaggcgattggattggcattgccttactcttcaggcacacctgctccatacttagatagagataaatacgcattagaaagtggtatgcaggttatgagattattgaaagataaaattagaccaagagatatcgtaacattagactctttaaaaaatgctgctgttattgttgctgctactggtggatcaacaaatgcagcattgcatcttccggcaattgcaaatgagtgtggtataaagtttgatttattagatgtagcaaaaatttttaaacaaacaccttacctagcggacttaaaacccggtggtaaatatgttgctaaagatatgtttgaagcaggtggtgtaccaatgttattaaaaacattactcgatggtggttacattaatggtaaatgcttaacagtcacaggtaacacaatggaagaaaatttgaaaaatataaagtttaacaaagaccaaaaagttatgagaagttatgacaaccctattacaaaaacaggtggtgttataggtttaaaaggcaatttagctagcgaaggtgcgattgtaaaagttgcgggtttaaaaaaattaaaatttgtaggaaaagcaaaatgttatgacagtgaagaagaggcatttgaagctgtgaagaataaaaaatataaagaaggcgacgtcattgtgatacgctacgaaggacctaaaggcggtcctgggatgcgagaaatgctttcaacaactgctgcgatttacggacaaggaatgggagaaaaggttgctctaataacagacggtagattttccggcgctacaagaggtttctgcgtgggtcatgtgggaccagaagcgtatgttggtggcatgattggtttattaaatgatggcgataaaattataatagatgccgagaatggatctataaatgttgaaatagatgacaatgaaattgaaaaaagaaaaaagattggaagaagaaagagccaaatttga

SEQ ID NO: 285849 - DNA, 853 bp, Unknown
  Bacterial polypeptide expressing nucleotide sequence isolated from the Sargasso Sea
cacttgatcgctatggcgcactccgtcggcatcacgttgactctcgatgacttccaagccgtctccgataagacgccgttcatcgccgatttgaagccgtccggtaagtacgtcatggaggacgtccacaaggttggcggcaccccagcggtgttgaagtatttgatgtccgaaggcatgatcgatggatcttgcatgaccgtcaccggtaagacgctcgccgaaaacctcgccatgtgcccggagttgaccgcgggtcaggatgtcatccttccggtgagcactcctatcaagaagactggtcacttgcagtgcttgtacggtaacatcgctcaagaaggttccgtcgcgaagatcacgggtaaggagggtctttacttcaagggtttcgcgaagtgctacgatagcgaagaagacatgctcgccgcgctctctgaagatccggaatctttcaagggcagcgtcatcgtcattcgctacgaaggtccgaagggtggtccgggtatgccggagatgctcaccccgacgtccgcgatcatgggcgctggtctcggtaatgactgcgccttaatcaccgatggtcgattctcgggtggttcgcacggtttcgtcatcggtcatgtcacaccggaggctcaagtcggcggtaacatcggtttgctcaaggatggcgacatcatcgaaatcgacgccgaagctcgcacgatcaacgcgccggatgtgaacgatgccgaatgggagaagcgtcgcgccgggtggaaggcgccgccgttggaggccacctctggtacgctttacaagtacaccaagctcgtcgccagcgcgtctcaaggttgcatcaccgacttgtaat

SEQ ID NO: 285850 - DNA, 763 bp, Unknown
  Bacterial polypeptide expressing nucleotide sequence isolated from the Sargasso Sea
atgaataaactcagatcatctgcaataacccaaggtgtgcaaagatcccctaacagatcgatgttaagagctgttggatttaatgatgaagattttaataaacctattattggagttgcgaatggatacagcaccataacaccttgcaatatgggtttaaataagttagctctaaaagctgaagagtcaataaaaagatcaggtgggatgcctcagatgtttgggactataacagtaagtgatgggatttctatgggaacagagggcatgaaatattccctagtttcaagagaagttattgctgattcaattgaaacagcatgcaatgctcagagtatggatggagtacttgctataggtggatgtgataaaaatatgccgggtgccatgattgcgattgcaagaatgaatattccctcaattttcatttatggagggacaataaaacctgggaaattgcatggagaagatcttactgttgttagtgcatttgaagctgttggacaattaacatcaggcaaaattaatgaagaaaggctaatccaagttgagaaaaattgtattcctggtgctggtagctgtggaggaatgtttacagctaatacaatgtctgcggttattgaagtattagggttaagtcttcctcacagctccactatggctgctgaagatcttgaaaaagaactaagtgcagataaaagtgctgagatattagtctctgcaatagaaaaagacataagacctcttgacctaatgactaaga

SEQ ID NO: 285851 - DNA, 842 bp, Unknown
  Bacterial polypeptide expressing nucleotide sequence isolated from the Sargasso Sea
gatgatgtctatgttgagattgaatgtacctagtgtattcatttacggcggatcaattttaccaggaaaatttaaaggaaaagatgttacagttgtagatgtttttgaagctgtaggtaagcattcttcaggtaaaatgtcttctgaagaattaagagaattagaattagtagcatgtccgagtgccggagcctgtggaggtcaatttacagctaacactatggcttgtgtatcagaagcgataggtttggctttaccttattcggctggaacgccagctccttatgaggaaagagataaatatgcttatgaaagtggtcaagcagttatgaatttattagaaaaaaaaataaaaccaagagaaatagtcactaaaaaatctttagaaaacgcagcaactattgtggctgcaactggaggctcaaccaatgcagctcttcatttgcccgcacttgctaatgagataggagtaaaatttgatctaatggacgttgcaaaaatatttaaaaaaactccttatcttgctgatttaaaacctggtggaaaatatgttgcaaaagacatgtgggaagctggaggcgttccaatgcttcttaagactttgtttgatggtggatatatacacggcgattgcctaacagtcacgggcaaaacaatgaaagaaaatttaaaagatattaaatttaacaagaatcaaaaagttttgagagagtataacaaacccttatcaccagatggtggcgtagttggattgaaaggaaatttggctcctgaaggcgcgattgtaaaaatagctggtttaaaaaaattacaattttctgggatagcacgatggttttgac

SEQ ID NO: 285852 - DNA, 284 bp, Unknown
  Bacterial polypeptide expressing nucleotide sequence isolated from the Sargasso Sea
ttctggtctctcaattgggcacgtctcgcctgaggccgccgctggaggaacaattggcctggttcgagacggtgacgttattcagatagacattccgaaccgctcgatccatcttcaggtagacgatgacctgctcgccgagcgaagaaagtttcaggatgaggtgggttggaaaccagaaatgcaacgcccgcgaaaggtctctgctgccctcaaggcctacggcttaatgacgactagcgccgataagggcgcagtccgtgatttgagtgcgttcttataag

SEQ ID NO: 285853 - DNA, 815 bp, Unknown
  Bacterial polypeptide expressing nucleotide sequence isolated from the Sargasso Sea
aggtgttggcaaatattcaacaggaaatatgtcaaagaaggaattgctaaaattagaaagcgtagcctgtccatctagtggatcttgtggaggtcagtttacagctaatacaatggcctgtgtatctgaagcaataggtttagctttaccaggttcagcaggcacaccagctgtttatgaaacacgagataaatttgcagtttcaagcggtcatgcagtcatgaatttgttaaaaaaaaatattagaccaagagacattgtaacaaaaaaatctttagaaaatgcagctgttgttgtagctgcttcaggtggatctacaaatgctgctttacatttgcctgccatagcaaatgaagcaggaattaaatttactctagaagatgtaacaaatatttcaagaaaaactccatatatagctgatttaaaacctggaggaaaatatgtagcaaaagatttatatgaaataggtggagttcctattttaattaaagccttattagaaggaggttacttacacgaagattgtatgacagtttctggaaaaactattggagaaaatcataaaaatataacttttccatccaatcaaaagattatttataaaacttccaaacctataagtcctagcggaggttttgttggtttaaaaggaaatctcgctccagaaggtgctattgtcaaagtcgctggaatgaaaagaagaatatttaaaggaaaggctaaatgttttgatggagaaaaattagctcttcaagccgtgctaaaaagaaaaataaaacctggagatgttattgttattagatatgaaggtccta

SEQ ID NO: 285854 - DNA, 469 bp, Unknown
  Bacterial polypeptide expressing nucleotide sequence isolated from the Sargasso Sea
gtcctgcagagtttttgatggtgaatatgcagccaatgatggaataaaaaaaggaagtgtaaagaagggagatgttgttgtaattaggtatgaaggaccaaaaggggggccaggtatgcctgagatgttaaaaccaacatctgctcttatgggagctggacttggaaaagatgtcgctttaattacggatggtcgtttttctggaggtactcacggatttgttgttggacatgttgttcctgaagctcaagaaggaggccctatagctttaattaatgatggagatattatatccatcgatgcagaaaagaatttaattgatgtcaatttatcaaaaagtgaacttgaatctagaaggaaaaaatgggttaaaccaccaaataaattttctatgggaataatggtaaaatatgtcaataatgtttccaatgcttctgaaggatgtgttacagataaaattaatgaatga

SEQ ID NO: 285855 - DNA, 965 bp, Unknown
  Bacterial polypeptide expressing nucleotide sequence isolated from the Sargasso Sea
gaaggaagttagcgctgaaaaaagtgctgaaatattagttgatgcaattagaaaagatattcgacctttaactctcatgactaaagaatcatttgagaatgcaatatctgtcattatggcaattggaggttcaactaatgccgttctccatatattagcaatagcaaatacagcaggtatagatatcaatattgatgatttcgaaagaataagacaaaaagtacctgtaatttgcgacttaaaacccagcggtaaatacgtaacagtcgatcttcataaagcaggtggaatcccacaagttatgaaaatacttctaaacgcaggtttgataaatggtaattgtagaaacatagagggtaaaacaatatttgaatccttaaaagatattccaaataaacctccagagaatcaggatgtcattcgagatattgataatccgctttataaaaaaggtcacttagcgattctaaaaggtaacttagcctcggaaggttgtgtagccaaaattagtggaataaagaatcctgtattaaaaggacctgctcgcatctttgagagtgaggaggattgtctcaaatcaattttgaataatgatattaaagctggtaatgttgttgttataagaaatgaaggtcctgtgggcggaccagggatgagagaaatgttggcaccaacatccgcaattgttggtcaaggacttggagaaaaagtagctctaataactgatggtagatttagtggaggtacctatggcctagttgttggccatattgcaccagaggcagcagttggaggaaatatagcgttaataaaagaaggcgatttaataactgttgatgcgacaaaccaattaatcgaagttgaactatctgatgaggaattagaaatgagaagaattaactgggaaaagcctagtaaaaaatataaaaagggagtgctttctaaatattcaagaattagttagc

SEQ ID NO: 285856 - DNA, 988 bp, Unknown
  Bacterial polypeptide expressing nucleotide sequence isolated from the Sargasso Sea
cgacaaagttagcgatgctgataccgacgaaattgagcgctcagcctgccctacctgcggctcatgttcagggatgttcaccgcgaactccatgaactgcttaacagaagcgttgggtttatccttgccgggcaatggttcaatgctggctactcacgccgaccgtgagggcttattcaaacaggcgggtaaacaaattgttgagctgtgtaagcgttactacggcgacgatgatgaaagtgtgttgcctcgcaatatcgccaactttaaggctttcgaaaatgccatgagcctggatattgccatgggtgggtcgaccaataccatcttgcacttgttagcggcagctatggaaggcgaagtgccatttactatggcagacatcgacagattgtcgcgcaaagtgcctcacctatgtaaagtggcgccttctaccccgaagtaccatatggaagatgttcatcgagcgggtggcgtgttgggcattttaaacgagctgaacaaggcgggcctactcaataccgatgttaaccatgttttaggaaagccgcttaccgacgttatcagcgagtgggacatcactaaccctgaaaacgaagacgctattaccttttatcgcgcgggtcctgcgggtattcgtactaccaaagcatttagccaagattgtcgctgggacgaagctgatgacgaccgcgaaaatggctgtattcgctctatcgagcatgcgtttagtcaagaaggtggtctagcggtgctttacggtaatgtggctgaagatggttgcattgtgaaaaccgctggtgtggatgagtctattttaaaattcaacggtactgcgcgaatttacgaaagccaagatgatgcagtggcaggcattttaggtaatgaagttaaagccggcgacgtggtatttattcgctatgaaggacctcgcggcggccctggtatgcaagaaatgctctacccaacgtcgtacctaaagtcgaag

SEQ ID NO: 285857 - DNA, 892 bp, Unknown
  Bacterial polypeptide expressing nucleotide sequence isolated from the Sargasso Sea
ggagcaggaaaggcagtaagtaatttaattaatcttgatctcaagcctagagatattatgacaaaagaagctttcgaaaatgcgatatctatggtcattgcacttggcggatccaccaatgccgtattgcatctcattgctatagcgcatgaggcgaagatagatatttctttggatgactttgagagattaggcaagagaattcctgtattagctgacctaaagccaagtggaaattacttaatgtctgaacttattgagattggaggcattgtccctttgatgcgaaagttacttgagaaacaactgttacacggagatcaaatgacagttacgggtaaaacactagaagaaaatcttagtgactcttcaaattatccagaaggccaagaaataattaaggatttcaacagtccaattaagaaagatagtcatctacgtattctttatggcaatttagctcctgaaggagctgtggcaaaaatctctggaaaagaaggacttacatttgatggcaaagcaagagtatttgattccgaagaaactgctatggaaggaatactgaaagggcaaataaatgaaggtgatgtactaataataagatatgaaggtcctaaaggagggcctggtatgagagaaatgttaggacctacttctgcaataatgggaaaagggttaggagataaagtcgcatttctaactgatggtagattttctggtggaactcatggatttgttgtcggtcatatttctccagaagcatacgaaggagggcctttagcattagtaagggatggagattctataaaaattgatgcaaggtctaaccagattaatgtctctattacggatgaagaaataaaagaaagaagagaatcttggaaacttccaa

SEQ ID NO: 285858 - DNA, 943 bp, Unknown
  Bacterial polypeptide expressing nucleotide sequence isolated from the Sargasso Sea
gtttctagagaagtaattgctgattcagttgaattggtaatgcatgcagaaagatttgatggaatggtgacaattgcaggatgtgacaaatctcttccaggaatgttaatggctgcaggaagaattaatcgtccagcaatatttctatatggtggaagtagtttgcctggagtttacaacggaaaagatatatcaatagttgatgtatttgagggtattggtgcttttgaaaaaggaatcatctcagaagaagaactttacaaaattgagtgtgcggcttgtccaggagtagggtcgtgcgcaggaatgtttactgctaacacaatggcttcagttggtgaagcaataggaatgagtttacctggtaccgctgctattccagctgaggatgcaaagttacgagatgctgctgttgaatctggaaagcagctcaattatttattaaaaaataatataaaacctagtgatatcatgactcatgatgcatttactaatgctatcacaaccgtacttgctctcggtggaagcacaaatgccgtacttcacttattagctattgcacatgaaacaggtgttgaactatcgatcgataaatttgaccaacttagtagaaacgttcctcacttagctgatatgaaaccatttggaaaatatcatatggttaatttgaatgaaataggaggagttcctgttatttcaaaaatacttcttgaaaacaaattaattaatccggattgcatgacagttactggacaaactattggtgagaatcttgaaaaagtacaaattcctaaaaaccaaaatgtcattagttttccggacaatcctatatcaaatgagggtggcattgcagtccttaaaggttcattaagtccaaatggatcagtggtaaaaactgcaggaatagatattaatactttctctggacccgcaaaaatgtttt

SEQ ID NO: 285859 - DNA, 932 bp, Unknown
  Bacterial polypeptide expressing nucleotide sequence isolated from the Sargasso Sea
agcgccatatttagaaagaaataaatatgcaatagacagtggtaaagctgtaatgaatttattagcaaaaaatattagacctagagacatagtaacaagaaaagctcttgaaaatgcagcaacaattgttgcagcaacaggtggatcaacaaatgcaggtttacacttgccagctattgcaaatgaaattggaattaaatttgatttaatggatgttgcaaaaatatttaagaaaactccttatcttgcagatttaaaacctggtggaaaatatgttgcaaaagatatgtgggaagcaggaggagttccaatgttattaaaaacacttatggatggtggctacattcacggagactgtatgacagttacaggtaaaacaatgagagaaaatttaaaaaatgttaaatttagaactaatcaaaaagtaatgagatcttataaaaatccaatttcaccaacaggaggagttgttggattaaaaggaaatttggctccagaaggtggaattgtaaaaatagctggtttgaaaaaattacaatttacaggaagagcaagatgttttgataatgaagagtctgcttacaaagcagtaataaacagaaaatacaaagatggagacatcattataattagatatgaaggacctataggaggtcctggaatgagagaaatgcttcaaacaactgcagcaatatacggtcagggaaaaggggagaaagtagcccttataacagatggtaggttctctggggctactagaggcttttgtatcggtcatgtgggccctgaggcctccgtaggcggtcctatagcccttttaaggaatggggatatcatcgatatagacgctaaaaagggcacaattaacgtaagacttacaaagaaggaattaagtgcaagacgtaaaaaatggaaaccgagaaaagtgaatt

SEQ ID NO: 285860 - DNA, 983 bp, Unknown
  Bacterial polypeptide expressing nucleotide sequence isolated from the Sargasso Sea
catggtccgactaaatgttccagtgtttttatttatggcgggtcaatattaccaggaagatataacggaaaagatataacagtcgtagatgtttttgaaggcgttggtaaatattcatcaggaaaaatttcagcaaaagatcttagaaaattagaattaaaagcatgcccaagtgcaggtgcttgtggtggacaatttacagcaaatactatggcatgtgtatctgaagctataggtttagctttaccttattctgctggaactcctgcaccctacgaagaaagagataaatatgcttaccaaagcggtaaagctgtaatgaatttattaaaaaagaatattagaccaagagatattgtaacaagaaaatctttagaaaatgcagcaaccattgttgcggctactggtggatctactaatgctgcgttgcatttacctgcattagcaaatgaaattggaattaaatttgatttaatggatgttgcaaaaatatttaaaaaaactccatacttagcagatttgaaacctggtggaaaatatgttgctaaagatatgtggatggcaggtggtgtgccaatgcttttaaaaactctttacgatggaggttttattcatggaaactgtatgacagttacaggcaaaaccatgaaagaaaatttaaaaaatgttaaatttaatttaaaacaaaaagttttaagaaaatataataatccattgtcacctgatggaggtgttgttgggcttaaaggtaatttagcaccagatggtgcaatagttaaagttgctggattaaaaagattacagtttactggcagagctcgatgctttgatactgaagaagctgcatacagtgctgtgaagaataaaaaatataaagacggtgatataattataattcgttatgaaggacctaaaggcggaccaggaatgagagaaatgctttccacaacaggtgcaatttatggacagggaaaaggagaaaa

SEQ ID NO: 285861 - DNA, 775 bp, Unknown
  Bacterial polypeptide expressing nucleotide sequence isolated from the Sargasso Sea
aaaatagtagcaaaagatatgtggaaagctggtggcgttccaatgttactaaagactttattagatggtggttatatacacggcaattgcttgactgtaactggtaaaactatgaaagaaaatttaaaaaaagttaaatttaatgaaaaacaaaaagtaatgagaaaatatgatagacctctatccaaagatgggggtgtagttggattgaagggaaatcttgcaccacagggcgctattgtaaaggttgctggattaaaaaaacttaaattcactggtcgtgccagatgttttgacacagaagagtcggcatataaagctgtattaaaaagaaagtatagagatggagatattatagttataagatacgagggacccaaaggcgggcctggtatgcgagagatgcttcaaacgaccggagcaatttatggacagggtaaaggggaaaaagttgctttaattacagatggaagattttctggagcaaccagaggtttctgtattggacatgttggacctgaagcttctgttggcggccccattgctttattaaaaaatggagacacaattactatagatgcaaaaaaaggaacaattaacgttcatctttcaaaaaaagagttggttaaaagaagaaaaaaatggaaaccaaaaaaattaaattttggaaacggaacattatggaagtatgcacaaacagttggacctgcatatttgggcgcctctacccatcctggcggcaaaaatgaaattaagtgttatgctgacatttaaa

SEQ ID NO: 285862 - DNA, 841 bp, Unknown
  Bacterial polypeptide expressing nucleotide sequence isolated from the Sargasso Sea
tttttgagctgttggaaacattcttcaggtcaaatgtcagcaaaagaattaagaaaattagaattagttgcatgtccgaccgctggtgcttgtgggggacaatttacagctaatactatggcctgtgtatcagaggcaattggtttagcattaccttattcagcaggtacacctgctccatacgaagaaagagataaatatgcaaaagcaagtggccgaatggtaatggaattattggcaaaaaaaattaaaccaagagatattgttacaagaaaagcattagaaaatgctgcaacaatagttgctgcaactggaggttcaactaatgctgcattacacttaccagcaatagctaatgaagctggaataaaatttgatttaatggatgttgcaaagatatttaaaagaacaccttatcttgctgatttaaaaccaggtggaaagtatgttgcaaaagatatgtggttagcaggtggtgtacctatgcttttaaaaactttatatgatggtggttatattcatggtgactgtatgacagttacaggcaaaaaaatgaaagaaaatttaaagggaattaaatttaatccaaaacaaaaagttttaagagcttataacagaccattatcaccagatggtggtgttgtaggattaaaaggtaatctagctccagaaggtgcaattgtaaaaattgcaggtttaaagaaattacaatttactggaaaagcaagatgctttgataatgaagaaagtgcaatgaaagctgttcaaagtagaaaatataaagatggtgatgtaattattattagatacgaaggaccagtagggggaccaggtatgagag

SEQ ID NO: 285863 - DNA, 334 bp, Unknown
  Bacterial polypeptide expressing nucleotide sequence isolated from the Sargasso Sea
agcccccgaaggagcaattgttaaagttgcaggtttaaagaaacttcaatttacaggtagagcaagatgttttgatacagaagagtctgcttataaagctgttaagcaaaaaaaatataaagatggtgatataattataatacgatatgagggaccaaaaggaggtcctggtatgagagaaatgcttcaaacaactggagccatctatggacaaggaaaaggagaaaaagttgctctcataactgatggtagattttctggagcaacaagaggattttgtattggacacgttggacctcgaagcatctgtaggtggaccaatagctttacttag

SEQ ID NO: 285864 - DNA, 988 bp, Unknown
  Bacterial polypeptide expressing nucleotide sequence isolated from the Sargasso Sea
gatcacgacgatgatagagtattgccgcgcaatattgccagtttttcctcatttgagaatgctatgacgctcgatattgcaatgggtggatcaacaaataccatcctccatttgcttgcggccgcacgagaagcggaaattgatttcacaatggccgacattgatcgtttatcacgagatgttccgacgctttgcaaggttgcgccgtccagtgattatcatatggaagatgtgcatcgggcaggcggggttatggcaattctgggagaattggcacgcgctggcaaactacatcttgaagggtctaccgtttattctgatacctttggagatgcgattgaagcttttgatattgttcgaaacaccgaagcatctctgcatgagttttacagggcggctcctggcggggtagcgacacaaaccgcttttagccagaaccgccactatgcggaactggacctcgaccgtgaacagggctgtataagaagcttggaaaatgcttactctactgatggcggactggcagttttatttggcaaccttgctcctgacggagcaattgtaaaaaccgcgggtgttgatgaagaaatcctcacctttactggtcctgcacgggtttacgaaagccaggatgcggcctgtgttggtatattgggggatgaagtcaaagcaggggaggtggttgttatccgctatgagggcccaaagggaggccctggcatgcaagaaatgctctatccaaccagttatctaaaaggaaagggtttgggtaaagcctgcgcgctactcaccgatggccgcttttcaggaggtacaagcggtctctccattggtcacgcaagccctgaagccgcgaatgggtcaattatggctctcgtggaaaccggagatattatcgaaattgatatcccgaaccgaaccttgaatctgaaagttgatgacgacactctggcaaggcggcgaacggatgaggaagctagagggccca

SEQ ID NO: 285865 - DNA, 892 bp, Unknown
  Bacterial polypeptide expressing nucleotide sequence isolated from the Sargasso Sea
gagttaacagttgtagatgtttacgaagctgtcggctcatacgatgcaggaaagatttctgcagaagagttagaaaatattgaaaatgtagcatgtccaaatgccggttcatgtggaggcatgtttactgcaaatacaatggcatccatatctgaagcaataggattatctttaccaggaagtgcaagtccacctgcagaagatgatagacgaaacaagatggtacttgaaacgggaaaagcatgtgcaaaattactacaattaggcataaaaccgctagatattgtcacatttgaggcatttgagaattcaattacgatgctaaatgcggtaggaggttctacaaatggaattttacatttattggcaatggcaaatgaagcaggaattaatctaacatatgatgattttgaaagaattagaaaaaagacaccacatcttgcagatatgaaacctggaggaaattatgtaatgaatagtttagacaaaattggaggaattccattggttatgaaaaaattacttgataaaaatctgattcatggagattcattgacagttacgggtaaaaccatcaaagaaaatttagaagagttagcaatagtagaagttccagatcaacaaataatcaaaccagtggaacaacccatacatgaagttggaactgctgtaattctaaaaggaacattggcaccagagggaggagtaatcaaaacggcaggagttgaaatgacagaatttacaggaacagcaaaagtttttgatagagaagaatacgcatttgaagcagtttctaaaggagagatagacgaaggagatgtcgtagttattagatatgaaggacctaaaggcggtccaggaatgagagagatgttgtctactactgcagcac

SEQ ID NO: 285866 - DNA, 999 bp, Unknown
  Bacterial polypeptide expressing nucleotide sequence isolated from the Sargasso Sea
agacattgagttgcaggaagttgaagctaccgctatacccgggccagggtcatgcggcggcatgtataccgcctacaccatggcgtcatcgatggaagccctgggcctgtctttacccaatagctctgcacaaaacgcggttagcgaagccaaactacaggacagtttcaacgctggggcagctgtacgccatctgattaaactgggaatcaaacccagtgacatcctgtgcagagaagcattcgaaaacgcgataacactcaccatcgcattggaggggtctacgaacgcagtactacacctgttagctatagcgcatgctgcgcaaatccccctgactctggacgatttcagccgaattggtgggcgcgtgcccgttctcgctgatatgcgcccagcaggtcactacgccatgagcgagcttatagaaattggtggcatccaaccgcttatgaagactttactcgctgaaggtttgatccacggcgattgcttaacggtgaccggaaaaaccttagcagaaaatttgatgaatgtgcctgactatccggccacacaaaaaataatccgtccacttagtaatccaatcaagaaagacagtcacttagtcatactgaggggcaacctcgcaccagaaggtgctgttgcaaaaatcaccggtcatgagggtctaacgtttacgggcacagctcgctgctttcatggcgaagaagccgctatggcagcaattatggacggcaccgtagataaaggtgatgtggtaatcgtacgctatgagggaccaaagggaggcccgggaatgcgagaaatgctcagcccaaccagcgccattaacggccgcggactctccgaacacgtcgcactattgacggacggtcgtttttctgggggtttccatggattcgtaatcggccatgtaacacccgaggctcatttgggcgggcccatagcactagtacacgacggagacacggttacagtcgatgccgaacagtgcac

SEQ ID NO: 285867 - DNA, 742 bp, Unknown
  Bacterial polypeptide expressing nucleotide sequence isolated from the Sargasso Sea
cggtgttcctatgttactaaaaacacttatggatggtggatatattcacggcaattgtataacagttacaggcaaaactatgaaagagaatttaaaaaatgttaagtttaattctaatcaaaaagtaatgagaaaatataacaatccattatctccagacggaggtgtagttggaatgaaaggaaacttagctcccgaaggtgcaattgttaaagttgctggattaaaaaaattacaatttactggaagagcgcgatgttttgatactgaagaagcagcttacaaagctgttaaaaatagaaaatataaagatggtgatattataattattagatacgagggtccaaaaggtggacccggtatgagagaaatgcttcaaacaacaggagtaatctacggacaaggaaaaggagaaaaagttgcacttataaccgatggaagattttctggggcgacgagaggattttgtattggtcatgttgggccagaggcatttgtaggtggaccgatagctttacttagaaatggagatataattgatttggatgctaagaaaggaacaattaatgttcgtttatctaaaaaagaattagctaaaagaagaaaaagatggaaaccaaagaaaattaactttggaaatggaacactttggaaatatgcacaaactgtaggcccagcttatttaggtgccccgactcatccaggtggcaaaaacgaagtaagaacatacgcagatatttaa

SEQ ID NO: 285868 - DNA, 875 bp, Unknown
  Bacterial polypeptide expressing nucleotide sequence isolated from the Sargasso Sea
tgggcttgatttcggcatggatgacatagatcgcctatcaagaagggttcctaacttatgtaaagttgccccaagtagtaactttcatatggaagatgtgcacagagcaggaggaataatggccatcctgggagaactagagagagcaaaattgctgaattctgataacaaaacagtccactcagaaacaatgcttgatgctattcagaaatgggatatcaataggaaaccttcaaatgaagtcaaagaattctattcggcagcacctggcatgattccaactactcaaccattctcgcaaaataaaagatactcagaattggatgtggatcgtcagaatggttgtattagagattctgataatgcccatagtcaagatggaggcttagcagtactaaaagggaacattgcatctgatggatgcattgtaaaaactgcgggtgtcgatgaaaaaattctaacctttagtggacctgcaaaagtttttgaaagtcaagatgatgcggtggaagcaatccttggagaccagattgtagctggagatgtggttgttattcgctatgaaggaccaaagggagggcctggcatgcaagaaatgctttatccaaccagttatttaaaagcaaaaggactaggtgaaaagtgtgcactgatcaccgatggtagattctcaggaggaacgtctggcttatccattggacatatttctcctgaggctgcatcaaaaggctatattgcgcttatcaaagatggtgacatcattaatatcgacataccaaaaagatccattgatgttgatctcttagatgaagaattggaaatcagaaaaaaagaaatgacttctcttggaaaaaagagcgtggaagcctcataaa

SEQ ID NO: 285869 - DNA, 703 bp, Unknown
  Bacterial polypeptide expressing nucleotide sequence isolated from the Sargasso Sea
tatggttaaattttctgatgacgtaacacaaggagttgaaaaatctgctgcacgagcgatgcttagagccgtaggtttgcaagacgatgacttcaataagtttcaagttggaattgtctctgctggaaatgaagttactccatgtaatcttactggaccagaattatcaattcacgcaaaagagggagtaaatggtactgattcagctggattgattttttctacaatagctgtttcagatggaatatcaatggggcatgagggcatgagggcttcattggtttcaagggaggttattgcagattctgtagagctggttatgcatgcagaaaggttcgatggaatggtaacaattgcaggatgcgataaatcactaccaggaatgttgatggcatcagcaagaataaatagaccagcaatttttttatacggtggaagtagccttccgggagtctacaaaggaaaagatatatctattgtggatgtttttgagggaattggtgctttcgaaaaggggataataagcgaagaagagttgtatgaaatagaatgtaatgcctgtccaggacaaggctcttgtgcagggatgtttacagctaacacaatggcttctgtaggagaggctattgggatgagtttacctggcactgcttcaatcccagctgaggatcaaaggttaagaacagcagcaaaagagtcaggt

SEQ ID NO: 285870 - DNA, 763 bp, Unknown
  Bacterial polypeptide expressing nucleotide sequence isolated from the Sargasso Sea
atgagccttccaggaacagcttctatacaagctgaagataagagattgagaaaagcagctaaggaaacaggagatcagctaaattatttgttaaaaaatgatttaaaacctagagatataatgactagagaagcttttcataatgcgataactacagtcttgtctcttgggggaagtacaaatgcagtattacacttgctggctattgcttatgaagcaaaagttgatttgactatcgatgtatttgatgaacttgcaagagaagtcccacatcttgcagatatgaaaccatttggaaaataccatatggttgacctcgataagatcggcggagtccctgttgtatcaaaaatacttcttgagaataaattaatagatccaaattgtatgacggtgactggaaaaacagttggagaaaatttagagaatattgaagtacctaaagatcaagatgttgtttattttccggaaaatccaatttctaaagagggaggtttagcaatattaagaggatctctgtcacctaatggatcagttgtaaaggttgcaggtatagaaattgatacatttaaaggaccagcaaatgtttttgacagcgagcaagaagcattggatgctctttttaataataaaattaagaaaggagaggttgttgtaattagaaatgaagggccaaaaggtgggcctggaatgagagagatgttacaaataactgccgcgatgaaaggagcaggtctaggtaaagatgtattacttattacag

SEQ ID NO: 285871 - DNA, 940 bp, Unknown
  Bacterial polypeptide expressing nucleotide sequence isolated from the Sargasso Sea
tctaaaaggtttataatgaaaaaatttaatagaaaaaaattaccaagtagacatacaacaataggtgctgataaagctcctcaaagatcattttattatgcaatggatttaacagaaaaggatgttgctaagccatttgttggagttgtctctacatggaatgaagctgctccatgtaacattaatttaatgaaacaagcgcaatcggtcaaaaaaggtgttcaagcaaccggtggaacaccaagagaattttgtactattacagtaacagatggaattgcaatgggtcatgaaggaatgaaatcgtcattaatatcaagagatgtaattgcagactcaacagaacttacggttagaggtcattgttatgatgcattagttggattagctggatgtgataaatcattaccaggtttaatgatggcaatggttagactaaatgttccgagtgtttttatttatggtggttctattttaccaggtagatttgaaggtaaagatgtaacagtagttgatgtatttgaaggtgttggaaaatatacatcaaaaaaaatgacagctcatgcattaagaaaattagaattaaaagcatgtccaagtgcaggtgcttgtggtggacaatttactgcaaacacaatggcatgtgtttcagaagcaataggattagctttacctttctcagcaggaacaccagcgccatatttagaaagaaataaatatgcaatagacagcggtaaagctgtaatgaatttattagcaaaaaatattagacctagagacatagtaacaagaaaagctctcgaaaatgcagcaacaattgttgcagcaacaggtggatcaacaaatgcaggtttacacttaccagctattgcaaatgaaattggaattaaatttgatttaatggatgttgcaaaaatattaagaaaactccttatctgca

SEQ ID NO: 285872 - DNA, 661 bp, Unknown
  Bacterial polypeptide expressing nucleotide sequence isolated from the Sargasso Sea
gaaagaaaatttaaaaaaagttaaatttaaagataaacagaaagttatgagaaaatatgataacccgctatcaaatgatgggggagttgtaggattaaaaggtaatcttgcaccagatggagcaattgtaaaagttgcaggattaaaaaaacttcaatttactggaagagcaagatgttttgatactgaagagtctgcttataaggcagtattaaaaagaaaatacaaagatggtgatattatagttattagatatgaaggcccaaaaggagggccgggtatgagagagatgctccagactacaggagctatctatggtcaaggtaaaggtgaaaaagttgcattaataacagatggaagattctctggagcaactagaggtttttgtatcggtcatgtaggcccggaagcatcagtaggcggtccaataggattattaaaaaatggagacataattcatatagacgccaaaaaaggaacgatcaatgtgaatctatcaagaaaagaattgtctaaaagaaagaaaaagtggaaacctaaaaaaattaattttggaaatggaacgctttggaagtatgctcaaacagttggacctgcttatcttggtgcctcaactcatcccggaggaaaaaaagaagttaagtgttacgctgatatttag

SEQ ID NO: 285873 - DNA, 838 bp, Unknown
  Bacterial polypeptide expressing nucleotide sequence isolated from the Sargasso Sea
gcaaaggttaccccttgtaatatgcatataaatgaattatctgagattgttgaaaagtcagtcaatgcatctggaggaaaaggaatattatttaatacaataactgtatccgatggtatatctatgggaacacagggaatgaaatattctttaatatcaagagaagtaattgcagattctatagaaactgttgttgcatgtttggggtatgacgcgcttataactgttggtggttgtgataaaaacatgccaggatgccttatatcgatggcaagattagatagaccatcaatatttatatatggcggatcaataaaaccaagtgaagaaaatactgattatgttacggtatcagaaaaagttggagaatactcaaagggaaaaatttcagaaaaagaattaattcattttgaagaaatttcagtcaaaggacctggttcatgtggaggaatgtatactgcaaatactatggcatctgctatagaagccttaggaatgagtctgcctggaagcagcagtcaagatgcagtttcaaaatctaaagagcaagattgcctagatgcaggctctgcggtaatgaatcttttaaaacatgacatcaagccgtcagatattatgaccaaagaagcatttgaaaatgctattacgattgttgttgctttaggtggatcgactaatgctgtgcttcatttattagcaattgctcattcaattggcgtcaatctttcactagatgacttcacagtaattggcaaaagagttccagtgttagctgatctaaaaccttttggaaataagtttatgtctgatttaaattctagtggaggaattcagccat

SEQ ID NO: 285874 - DNA, 857 bp, Unknown
  Bacterial polypeptide expressing nucleotide sequence isolated from the Sargasso Sea
agaggccactgttatgatgcattagttggtttagcgggatgtgataaatctctccctggtctaatgatgtctatggtgcgtttaaatattccaagcgtttttatttatggtggttcaattttaccaggaagatttaatggcaaagacgtaacagtagttgatgtatttgaaggtgtgggaaaatatacttcaaaaaaaatgactgctcatgcgttaagaaaacttgaacttaaagcctgtccaagcgctggagcttgtggtggtcaatttactgctaatacaatggcatgtgtttcagaagctattggattagctttaccatactcagctggaacaccagcaccttatacctcaagaaataaatatgcagttgatagtggtaaagctgtgatgaatttattagcaaaaaatataaggcctagagatattgttactagaaaatctttagaaaatgccgcgacaattgttgcagcaactggaggatcaacaaatgcaggattgcacttaccagctatagcaaatgaaattggaattaaatttgatttaatggatgtcgctaaaatatttaaaaaaactccctatctagctgatttaaaacctggtggaaaatatgttgcaaaagatatgtggaaagcgggtggcgttcctatgttattaaaaactttaatggatggaggatacattcatggagactgcatgactgttactggaaaaactatgcgagaaaatttaaaaaatgttaagtttaaaacaaatcaaaaagtaatgagaaaatacagtaatcccattactccaacaggtggtgttgtgggattaaaaggaaatcttgctccagagggtggaattgtaaaaatagc

SEQ ID NO: 285875 - DNA, 568 bp, Unknown
  Bacterial polypeptide expressing nucleotide sequence isolated from the Sargasso Sea
tttaaaaggtaatttagctccagaaggtggaatagtcaaaattgcaggacttaaaaaattacaatttactggaagagcaagatgttttgataatgaggaaagcgcaatgaaagcagttcaaagtagaaaatataaagatggtgatgtaattattattagatacgaaggcccggttggtggaccaggtatgagagaaatgctttcaacaactggtgcaatttatggtcaaggaaaaggagaaaaagttgctttaataactgatggaagattttcaggagcaacgagaggcttttgtgtaggccacgttggaccagaggctgctttaggtggaccgattgctcttttacgtaatggcgatgttattgatatagatgctaaaaaaggaacgattaatgttcgattaactaaatctcaattagcttcaagaagacgaaaatggaaggctagaaaatctgattttggatcaggaacactttggaaatatgctcaaactgttggaccagcatttttaggagcaccaactcatccaggtaagaaaaaagaagttaaggattactcaaaaatttga

SEQ ID NO: 285876 - DNA, 839 bp, Unknown
  Bacterial polypeptide expressing nucleotide sequence isolated from the Sargasso Sea
gttagcaaatgagattggaattaaatttgatttaatggatgttgcaaacatatttaaaaaaacaccttatctagcagacctaaaaccaggtggaaaatatgttgcaaaagatatgtggaaagctggcggtgttccaatgttattaaagacactcatggatggtggttatatccatggagattgcatgactgttactggaaaaactatgagacaaaatttaaaaaatgttaaatttaatctaaaacaaaaagttatgcgtaaatatactaatcctttgtcacctgatggaggtgtagtaggacttaaaggtaatttagctccagaaggagcgattgtaaaaattgcaggtctaaaaaaattacagttcactggaagagcaagatgttttgatacagaagagtctgcatataaagctgttaaaaataaaaaatataaagatggtgatattataattattagatacgaaggaccgaaaggtggaccaggcatgagggaaatgcttcaaacaactggagcgatttacggccaaggcaaaggggaaaaagtagctttaataacagatggaaggttctcaggtgctacgagaggattttgtataggtcatgtaggaccagaagcatcagtaggtggaccaatagcattacttcgaaatggagatataattgatttagatgcaaaaaaaggaattattaacgttcgcctatcaaagaaagaattagctaaaagaagaaaaaaatggagacctaagaaaataaattttggcaatggtacactttggaaatatgctcaaactgtaggaccagcttatttaggtgcacctacacatcctggtggtaaaa

SEQ ID NO: 285877 - DNA, 819 bp, Unknown
  Bacterial polypeptide expressing nucleotide sequence isolated from the Sargasso Sea
aaaatttaaaggaaaagatgttacagttgtagatgtgtttgaggcagtaggtaaacattcctcaggcaaaatttcttctgaagaattaagagaattagaattagtagcttgtccaagtgctggggcatgtggaggtcaatttacagcaaacacaatggcatgtgtatcggaagcgataggattagctttaccttattcagctgggacgccagcaccttacgaggaaagagataaatacgcttacgaaagtggtcaagcggttatgaatttattagaaaaaaaaattaaaccaagagaaatagttactaaaaaatctctagaaaacgcagcaactattgtggctgcaactggaggttccactaatgcagcccttcatttacctgcactagctaatgagataggactaaaatttgatttaatggacgttgcaaaaatatttaaaaaaactccttatcttgctgatttaaaacctgggggaaaatatgttgcgaaagacatgtgggaagctggaggtgttccaatgcttcttaagactttgtttgatggtgggtatatccatggtgattgtttaacagtcacaggcaaaacaatgagagaaaatttaaaagatattaaattcaacaagaatcaaaaagttttgagagaatataataaacctttatcaccagatggtggcgtagttggattgaaaggaaatttggctcccgaaggtgcaattgtaaaaatagcaggtttaaaaaaattacaattttctggaacggcacgatgttttgacaacgaggaagatgcaatgaaagctgttcaaacaaaaaaatataa

SEQ ID NO: 285878 - DNA, 865 bp, Unknown
  Bacterial polypeptide expressing nucleotide sequence isolated from the Sargasso Sea
tatggtggatctattcttccaggtagatttaatggaaaagacgtaactgttgttgatgttttcgaaggtgtaggcaaatactcgtctggaaaaatgacagaacatgctttacgtaaattagaattaaaggcttgcccaagtgccggtgcatgcggaggtcaatttactgctaacacgatggcatgtgtttcagaagcaattggattagcccttccgtattctgcaggcacaccagctccatatcaacaaagagataaatacgcattacaaagtggcaaagctgtaatgaatttattaaagaaaaatattagacctagagatattgttaccaggaagtctttggaaaacgcagcaacaatagtagcagcaactggcggatctactaatgcagctttacatttgccagctcttgcaaacgaaataggaattaaatttgatttaatggacgttgctaaaatttttaaaaaaacaccttatcttgcggatttaaaacctggtggaaaatatgttgctaaagatatgtggaaagcaggcggagtaccaatgctattgaaaactttattagacggaggttttattcatggcaactgtttaactgttaccggtaaaactatgaaggaaaatttgaaaaaagttaaatttaacgaaaagcaaaaagttatgcgaaaatacaatagaccattgtcaaatgatggtggtgtagttggattaaaaggaaatcttgcaccacaaggagcaatagtaaaagttgcaggattaaaaaaacttcaatttactggtagagcaagatgttttgacactgaagagtctgcatataaagccgtattaaaaagaaaatataaagatggagatattatagttataa

SEQ ID NO: 285879 - DNA, 601 bp, Unknown
  Bacterial polypeptide expressing nucleotide sequence isolated from the Sargasso Sea
atgaccgttactggaaagactatagaagaaaatcttaaagatgttgagtttaatgaaaatcaaaaagttattagaccttacaacaaacctctaagcccaacaggtggtgttgttggattaaaaggtaatcttgctccagacggggcaattgtaaaagttgctggattagaaaatactttttttgaaggatatgcaaggtgttttgattgcgaagaagatgcctttgagtgtgtatctaaaaaaggctatgaaaatggagaggtaatagttattcgttatgagggtcctaaaggtggcccaggcatgagagaaatgctttcaactactgcagctctctcgggtcaggatgttggcggaaaagttgcgctaattactgacggaagatttagtggaggaacaagaggattatgtgttgggcatgttggacctgaggcggcaacaggtggtccaattgctttaattaaggatggggataaaataacaattgatggtgaaaaaggtattcttaatgtagatttatctgatgaagaattagaagaaagaagaaaactttggaagccaagaggtacagattataatagcggaacattatggaaatatt

SEQ ID NO: 285880 - DNA, 804 bp, Unknown
  Bacterial polypeptide expressing nucleotide sequence isolated from the Sargasso Sea
ctcaataaatgcatctggtggcaaaggtgttttatttaatacaattactgtttctgatggcatttcaatgggaacgcaaggaatgaaatactctcttgtttctagagaagttattgctgactcaattgaaactgttgtaggttgcctaggatatgatggattaattgcaattggtggatgtgataagaacatgcctggatgtcttattggtatggcaagattaaatagaccgtcaatatttatttatggtggatctataaaaccaagtaatgagaatacggactatgtaaccgtctcagaaaaagttggagaattctcaaagggctctataaatgaagatgagctaattcattatgaaaagatatcagttgatggaccaggctcatgtggcggaatgtatacagcaaatacaatggcatccgctatagaagcattaggaatgagtttgccaggtagcagtagccaagatgcaacatctaaatcaaagaacgctgattgtgtgaatgctggatcggcaatcatgaatttactagataaagatattaaaccttctgacattatgacaagagaagcatttgaaaatgctataactgttgtaatagctctaggaggatcaacaaatgccgttcttcatttactggccatggctcattcaattggagttgaactttgcttagatgactttacttcaatcggagagaaaacacctgtattagccgacctaaagccctttggaaaacactatatgtctgagcttaatgcaaatggaggaattcagcccttaatgaaaactcttttagacaa

SEQ ID NO: 285881 - DNA, 787 bp, Unknown
  Bacterial polypeptide expressing nucleotide sequence isolated from the Sargasso Sea
gtaacgccttgtaatatgcatattgatcaactcgctaaacatacggatgttggagtgactgatggtggcggtaaaggggttatttttaatacgattactatttctgacggtatttcaatgggtaccgaaggtatgaaatattcacttgtatctcgtgaagtaatcgcagattctatcgaaactgtagtggggtgtcagggatttgatggattagtagcaataggtggctgcgataagaatatgcctggatgtttgattggtatgattcgattagatcgtccttctgtatttgtatacggaggtactattttaccaggctgtcataaagaacaagatgtggacattgtctctgttttcgaagctgtaggtgctcatgcaaataacaaaattgatgacgcagaacttaaagccatcgaatcttgtgctattcctggaccaggttcttgtggtggaatgtatacagcaaataccatggctagtgctattgaagcacttggaatgagcttaccaaacagctctgctcaagccgctatatcaactgacaaagctgctgattgtgaacaggctggtaaagcagtattgcacttgatcgaaaaaaatatcaaaccatccgatatcttaaccaaacagtcctttgaaaatgcaattaccgttattactgcactgggaggatcaacaaatgcggtactacacttattagccattgcgcactcggttggtatcgagttatcacttgaagattttacacgtattggcaacaaaacccctgttatagctgatttaaaac

SEQ ID NO: 285882 - DNA, 844 bp, Unknown
  Bacterial polypeptide expressing nucleotide sequence isolated from the Sargasso Sea
acagaacaagatgttgctaaaccttttgttggtgttgtttcaacttggaacgaagcagctccttgtaatacagctttaatgagacaggcacaatcggttaaaaaaggagttaaacagtttggaggaacaccaagagaattctgtacaataacagtcactgatgggatagctatgggtcacgagggaatgaaatcatctttaatttcaagagagattatagcagactctgccgaattaactgttaggggacattgttacgacgctttagttggtattgctggatgcgataaatccttaccaggtttaatgatgtctatgttgagattaaatgttccaagtgtttttatttatggcggttcaattttaccaggtaaatataaaggtaaagatgtaactgttgttgatgtatttgaagcagtaggaaaacattcttctggctcaatgtcatctaaagaacttagagaattagaattagttgcttgccctagtgctggcgcttgtggaggtcagtttacagctaacaccatggcatgtgtttctgaagctataggactagcattaccttactcagcaggaaccccagctccatatgaagaaagagacaagtatgcctttgaaagtggtaaaacagttatgaatctattagaaaaaaatataaaaccaagaagtatagtaacaaaggagtctttagaaaatgctgcaacaattgttgctgctaccggaggttcaactaatgcagctcttcatttaccagctctagctaatgaaataggagttaaatttgatttgatggatgtagcaaaaatatttaaaaaaactccttatcttgcagatctaaaacctg

SEQ ID NO: 285883 - DNA, 935 bp, Unknown
  Bacterial polypeptide expressing nucleotide sequence isolated from the Sargasso Sea
ttttttcataccgcaagttggtattgcttctacatggagtcaagttaccccttgtaacatgcatattgataaacttgcgcttaaagtcagcaagtctctttctaaacataatgtcaagccagttatatttaacagcatcacaatttctgatggaatttctatgggcactgagggaatgaaatattctttggtttcaagagaagttattgctgattctattgagaccgttgttgggtgtgagggttttgatggattagttacaattggtggttgtgataagaatatgcctggatgcttgattgcaatgtcaagattaaatagaccttctgtatttatttatggtggaacaataatgccaggaaaacacaacaataaaaatatcgatattgtttctgtttttgaagctgttggagaattttcaaaaggacgtatttcaaaaaaagaattaactaatattgagactaaagcaattccaggtccaggttcttgtggaggtatgtatacagcaaatactatggcatcggctattgaagccctcggcatgagcttaccaggaagttcgtcgcaagcagctatttctaaacaaaaaatgctagattgtgagaacgcaagcaaggctttggcaaatttaatcaaaaaagatattaagccttcagatattatgactaaaaaagcattttataacgcaattacaattgtaattgctcttggtggttcaactaatgcagttttacatataatagctatggcgaaagcgatgaatatcaacattaatcttaatgacttttctaaaataggaaaaaaagttccagttcttgccgatctaaggcctagtgggaaatatatgatgtcagaattagtgaatataggtggtattcaacctcttatgaagtatttacttaaatacggacttttaaatggcgattgcttaacgg

SEQ ID NO: 285884 - DNA, 766 bp, Unknown
  Bacterial polypeptide expressing nucleotide sequence isolated from the Sargasso Sea
gcgaaggatgtatatgaagctggtggagtaccaataataatcaaaactctttatgaaggcggttttatacatggggattgcttaaccgttacaggaaaatcaattaaagaaaacttagcttcaatagaatttaataaagatcaaaaggtaattaggccatatgacaatcctctttcacctacaggcggtgttgtgggattaaaaggaaacttggcgccagagggcgcaattgtcaaagttgctggaatggaaaacctaaaatttactggggtcgctagatgttttgattgtgaggaagatgcttttaagtgtgtaaagaatgaagattataaagaaggtgacgtttttgtaattagatatgaaggtccaagaggaggacctggaatgagagaaatgttggctacaactgcagccatatatggccaaggaatgggagataaagttgcattaattactgatggacgttttagtggtgcgactaggggattttgcgtcggtcacgtctcacctgaagcagctgtctgcggtccaatagctcttattgaagatggagatcgaataatgcttgatgcagaaaatggccaaatatctctagatgttagagaaagtgtgttagaagagagaaaaaagtactggaaaaagccaaaaactgattttaattctggaacaatatggaaatatagcaggacggttggttctgctgtcaatggtgccgtaactcaccctggagctgaggaagaaacccatgtttatgcagatatatagg

SEQ ID NO: 285885 - DNA, 433 bp, Unknown
  Bacterial polypeptide expressing nucleotide sequence isolated from the Sargasso Sea
agcaggagatgtaatagttattaggtatgaaggaccaaaaggcggaccaggaatgagagaaatgcttgccacaactgcagcaatatatggacaaggtatgggagaaaaagttgctttaattacggatggaagattttctggtgctacgagaggcttgtgtgttggtcacataagtccagaagcaatggtattaggaccaattgctcttatagagaatggagatcaaatattaattgatgctaaagaggggttaataaaattaaatgttgctgaaaagacattaaaagctagaaaaaattccattcttaaaagagaaaacaattttggatctggtgcattatggaaattttctcaaacagtcggttctgcaagatttggtgcagtaacgcatcctggtgcaaaaaaagaaacaaaaaattattcagatatctaa

SEQ ID NO: 285886 - DNA, 877 bp, Unknown
  Bacterial polypeptide expressing nucleotide sequence isolated from the Sargasso Sea
aaaaatattagacctagagacatagtaacaagaaaagctctcgaaaatgcagcaacaattgttgcagcaacaggcggatcaacaaatgcaggattgcacttaccagctatcgcaaatgaaattggaattaaatttgatttaatggatgttgcaaaaatatttaagaaaaccccttatcttgcagatttaaaaccaggtggaaaatatgttgcaaaagatatgtgggaagcaggaggagttccaatgttgttgaaaactcttatggatggtggctacattcatggagactgtatgacagttacaggcaaaaccatgagagaaaatttaaaaaatgttaaatttagagaaaatcaaaaagtaatgagatcttataaaaatccaatttcaccaacaggaggagttgttggattaaaaggaaatttagctccagaaggtggaattgtaaaaatagcaggtttgaaaaaattacaatttacaggaagagctagatgttttgataatgaagagtctgcttacaaagcagtaataaacagaaaatacaaagatggagacatcattataattagatatgagggaccaataggaggtcctggtatgagagaaatgcttcaaacaactgcagcaatctacggtcaaggaaaaggggagaaagtagccctcatcacagacggtaggttctctggggctaccagaggcttttgtatcggtcatgtgggccctgaggcctccgtaggcggtcctatagcccttttaaggaatggggatatcatcgatatagatgctaaaaagggcacaattaacgtaagacttacaaagaaggaattaagtgcaagacgtaaaaaatggaaaccaagaaaagtgaattttggtaatggta

SEQ ID NO: 285887 - DNA, 844 bp, Unknown
  Bacterial polypeptide expressing nucleotide sequence isolated from the Sargasso Sea
aaaaaattgccaagcagacatacatctctaggtgcagataaagctccacaaagatctttttattatgctatgggagaaactgaaaaagatgtagcaaaaccttttgttggtgttgtttctacatggaacgaagctgctccttgtaatattgcattaatgagacaagctcagtcagtaaaaaaaggggttaagttttctggcggtacgcctagagagttttgtactattaccgttactgatggtatcgcaatgggacatgaaggaatgaagtcttccttggtatctagagatgttattgctgactcaacagaattaaccgttagaggccattgttatgatgcattagtgggagttgctggttgtgataaatctttaccaggcttaatgatggccatgcttaggttaaatgttccgagcgtattcatttatggtggatcaattctaccaggtagattcaatggtaaagacgtaactgttttggatgtctttgaaggtgtaggaaaatattcctcaggtcaaataagtgaacatgctttaaggaaattagaattaaaggcttgtccaagtgcaggcgcatgtggtggacaatttactgcaaatactatggcctgcgtatcagaagcaattggcttggctttaccatactcagcaggtacaccagcaccttatgatcaaagagataaatatgcattacaaagcggcaaagctgttatgaatctattaaaaaaaaatattagaccaagagacattgttactagaaaatctttagaaaatgcagcgactattgttgctgctaccggaggttcaacaaatgctgcattacatttaccaagcacttgctaac

SEQ ID NO: 285888 - DNA, 559 bp, Unknown
  Bacterial polypeptide expressing nucleotide sequence isolated from the Sargasso Sea
tataaaaaaggacatctagctattctcaaagggaatttagctagcgaaggaagtgtcgcaaaaatcagtggtgttaagactcctgttttaactggtcctgcaagagtattcaagagtgaagaagaatgtttagcagctattcttgacaacaaagtcaacgccggagacgtagtagtcgttagatatgaaggtcctgtaggtggcccaggcatgagagaaatgttatcacctacttctgcaattgtaggtcaaggcttacgagaaaaagttgcactaattactgatggtagatttagtggaggatcatatggactagtagttggccatgttgcaccagaagccgcagtaggaggaacaattggattggtagaggaaggcgacagtattactgttgacgctaataaattactaattcaattaaatgtacatgaagaagaattaacgagaagaaaagaaaaatggaaaaagcctaagcctcgctacaagacaggcattcttggaaagtactccagattattaagttcatcaagccaaggagctaccactgatcaagtctaag

SEQ ID NO: 285889 - DNA, 955 bp, Unknown
  Bacterial polypeptide expressing nucleotide sequence isolated from the Sargasso Sea
atgcttcgaggtgtaggatttacatctgaggactttacaaagccatttgttggaatggcatcaactggagccaaagttacaccatgtaatatgcatatcaatcaattatcagaattggtagaaggctcaataaatgcatctggtggcaaaggtgttttatttaatacaattactgtttctgatggcatttcaatgggaacgcaaggaatgaaatattctcttgtttctagagaagttattgctgactcaattgaaactgttgtaggttgcctaggatatgatggattaattgcaattggtggatgtgataagaacatgcctggatgtcttataggtatggcaagattaaatagaccgtcaatatttatttatggcggatctataaaaccaagcaatgagaatacggactatgtgaccgtctcagaaaaagttggagaattctcaaagggctctataaatgaagatgagctaattcattatgaaaagatctcagttgatggaccaggctcatgtggcggaatgtatacagcaaatacaatggcatctgctatagaagcattaggaatgagtttgccaggtagcagtagccaagatgcaacatctaaatcaaagaatgctgattgtgtaaacgctggatcggcaatcatgaatttactagataaagatattaaaccttctgacattatgacaagagaagcatttgaaaatgcaataactgttgtaatagctctaggaggatcaacaaatgccgttcttcatttattggccatggctcattcaattggagttgaactttgcttagatgactttacttcaatcggaaagaaaacacctgtattagccgacctaaagccctttggaaaacactatatgtctgagctaaatgcaaatggaggaattcagcccttaatgaaaactcttttagacaaaggacttcttcatggtcaatgtatga

SEQ ID NO: 285890 - DNA, 931 bp, Unknown
  Bacterial polypeptide expressing nucleotide sequence isolated from the Sargasso Sea
gcaaatactatggcctgtgtatctgaagctattgttttagcattaccgtactctgctggaacaccagcgccatatgaagagagagataaatatgcaaaagcaagtgggcgaatggttatggaattgctagcaaagaaaattaaacctagagatattgttacaagaaaagctttagaaaatgccgcaacaattgttgctgcaacaggtggatcaaccaatgccggtttacatctaccagcaatagcaaatgaagctggtattaaatttgatttaatggatgtagcaaaaatatttaaaagaactccatatcttgctgacttaaaaccaggtggaaaatacgttgctaaagatatgtggttagcaggtggagtaccaatgcttttaaaaactctttatgaaggtggatatattcatggggattgtatgacagttactggtaaaacaatgaaagaaaatttaaagggaattaaatttaacccaaaacaaaaagtaatgagatcttttaaaaatccattatctccaacaggtggtgtagttggtttaaaaggtaacttagctcctgagggaggaattgttaaaattgctggacttaaaaaattacaatttactggaagagcaagatgttttgataatgaagaaagtgcaatgaaagctgttcaaagtagaaaatataaagacggtgatgttattattatcagatatgaaggacccgttggtggaccaggtatgagagaaatgctttcaacaacaggtgcaatttatggtcaaggtaaaggagaaaaagttgctttaataactgatggacgtttctctggagcaactcgtggattttgtgtaggtcacgtaggacctgaggctgcattaggtggtcctatcgcacttttacagaatggagatattattgatattgatgccaaggaagggaacaatt

SEQ ID NO: 285891 - DNA, 829 bp, Unknown
  Bacterial polypeptide expressing nucleotide sequence isolated from the Sargasso Sea
gctaacaccatggcttcagccattgaagcaatgggttttgcacttccttacaattcatcaaatcctgcaacatctgaagaaaagaaatcagattctaaaaaggcaggaaatgcagtggttaatcttttaaaaattgacttaaaacccttagatattatttctaaaaaatctcttgaaaatgcaatgactttaataaccgcattaggaggatcaaccaatgctgtcctacatatactagcaatagcccatactgctggaattgattttaatttaaaagactttcaaaacataagcaataaaacaccatttctagctgatttgaaaccaagtggaaaatatctaatggaagatgttcacaaagttggaggaacaccagcagtattaaaatatttattcgaaaaggggttaatccatggggattgcatgaccataaccggaaaaacacttgctgaaaatctcaaagatgttccttcattaacaccaaaccagaaaatcattaagcctttagaaaacccaataaaacagacggggcacatcagaataatgtatggcaatttagcatcagaaggttccgtagcaaaaataacaggaaaagaagggttaatatttaagggaaaagcaaaagtatttgaaggagaatatgaagcaaacgatggaataaaaaatggtttagtaaaaaaaggagatgttgtagtcataagatacgaaggcccaaagggagggccaggaatgccagaaatgcttaaaccaactgccgcaattatgggagctggactaggtaaagatgttgcattaataacagacggaagattttctggtgaacgcacgg

SEQ ID NO: 285892 - DNA, 718 bp, Unknown
  Bacterial polypeptide expressing nucleotide sequence isolated from the Sargasso Sea
tctgaaggagctatatctgatattgaattattagatattgagtcaactgcaatacctggtcctggttcttgcggaggaatgtatacagcaaatactatggcttcagctattgaagctttaggtatgagtcttcccaatagctcagctcaagaggcagtttcttcaagtaaactaaaagattcttcagatgcgggcgaatctatcatgaatttaatttctttagatttaaagccacgcgatattatgactaagcaggcttttgaaaacgcaattgctgtcgtaatagcccttggaggatctactaatgcagtattacatttattggcgatcgcccatgaagcaaaaataaatctatctttaaatgactttgaaagaattggtaaaagaacacccgtcttggcagatttaagaccaagcgggaattatctgatgtccgagttgattgaaattggcggtattgtacctctgatgaagagtatgctcgaaaaaggcttaattgatggaaatcaaatgacagttacgggaaaaacacttgaagaaaatctttgtgaatatgatcattacccaaaagatcaaaaaataattacatcaacagataaacctataaaaacagatagtcatttaagaattttgtatggaaatttagctccatctggtgcagttgccaaaatttcaggtaaggaaggtttaagtttccaaggaaaagcaaaagtctata

SEQ ID NO: 285893 - DNA, 681 bp, Unknown
  Bacterial polypeptide expressing nucleotide sequence isolated from the Sargasso Sea
tttgagaattgggtacaaatccccagttcttgcggatttaaaaccaagtgggaagtatttaatgacagattttgtcaagattggcgggttaccgccattgatgaaaatgcttctggatgcaggactacttcatggagactgcatgactgttacaggaaaaacagtacgtgataatctgaaaaacgttaagccttatgaagaaggccaggagattgtaaaatcacttgatgatccgataagaaaaactggtcacctagtgattctgcggggaaatcttgctgctgaaggagcagtagcaaaaatatccgggaaggaaggagaatttttcaggggaactgctagagtatttaattctgaggaagaagccctcatgcgaattctggacggtactgtagttaaaggagatgtgattgtaattaggtatgaaggtcccaaaggaggtccaggcatgcgtgaaatgctctcgccaacctcagccataatgggaagagggcttggtaatgatgtagctcttattaccgatgggaggttttcaggtggttctcatggtttcgtgatagggcacataaccccagaagcttttgatggaggtttgcttggtatggttgaaaatggtgataacattacaattgatattactaaacgaaccatagatctagaagtttcggaacatgaaattaa

SEQ ID NO: 285894 - DNA, 675 bp, Unknown
  Bacterial polypeptide expressing nucleotide sequence isolated from the Sargasso Sea
tatttcatggcgattgtttgaccgttacgggaacaactttacgagaaaatttggaaaatgtaaaaaattttaaaccagatcaagatatagttcattcttttgaagatcctattaagaaaacaggacatctagttgttctcagagggaatcttgctattggtggagcagtagctaaaatttcaggcaaagagggtgaatatttcaagggagtagcacgtgtttttaattcagaagaagaagcgttagaaaaaattttagatggaactgtaattaagggagatgtaattgttattcgttatgaaggtccaaaaggtggtccaggtatgagagaaatgctttctcctacttctgcaattatgggtagaggactaggaaaagatgttgccttaataacagatggtcgtttttctggtggatctcacggttttgtaattggccatattactccggaggcacaggaaggaggtttattagctattgtcgaaaatggagatcaaatcacaattgatatcacagaacgaactatagaactagaattgtctgaagatttagttaaaacccgaaaagaaaatttaatactaccaaccacaaaatatagacgaggagttctagcaaaatattcaaaaacagttagttccgcttctttaggagcggttacagatctagatatgtaaa

SEQ ID NO: 285895 - DNA, 768 bp, Unknown
  Bacterial polypeptide expressing nucleotide sequence isolated from the Sargasso Sea
agtaactagaaaatcattagaaaatgctgcaacaattgttgctgctacaggtggatccacaaatgcaggtttacatttacctgccattgcaaatgaaattggaattaaatttgatttaatggatgtggcaaaaatatttaaaagaactccttacttggcagatctaaaaccaggtggaagatatgtagcaaaagatatgtggttagctggaggtgttccaatgttattaaaaactcttatggacggtggtttcatccatggtgattgcatgacggttactggaaaaactatgaaggaaaatttgaaaaatattaaatttaaaataaaccaaaaagtaatgagaaagtacaataatcctttatctaaaactggaggtgttgttggattaaaaggaaatttagcacctgagggtggaatagttaaaatagctggattaaataaattacaattcactggaaaagcaagatgttttaatacagaagaagatgcatacaaagctgttaaaagcagaaaatataaagatggcgatatcattattattagatacgaaggacccaaaggaggtcctggtatgagagagatgctccaaacaacagctgcaatatatggacaaggaaaaggagagaaggttgctcttataaccgatggtaggttttctggagccactagaggcttctgtataggccatgtgggtcccgaggcttctgtaggtggtccaatagcacttttaaggaatggtgacgtgattgatattgatgctaaaaaagg

SEQ ID NO: 285896 - DNA, 706 bp, Unknown
  Bacterial polypeptide expressing nucleotide sequence isolated from the Sargasso Sea
gcttagaggggttggttttacttcacatgattttacaatacctcatgtcggtatagcttctacttggtcaaaagttactccttgcaatatgcatattaataaattggcatcaattgtggaggaatctatcaatgaccaagactgtaaaggagtattatttaacacaattactgtttccgatggtatttcgatgggaaccgagggaatgaagtactcactagtatctcgagaagttattgctgactctatagagactgtcgttggatgccttggttacgatggtgtaattgcaataggtggatgtgacaaaaatatgccaggcgcaataattggtctggcacgattaaatagaccatctatttttatttacggtggttcaattatgccaagtgagataaatactgattatgtatctgtcttggaaaagactggagaatttgctaagggagacatttctgaagaagagcttattaagattgaagaaatctcagttaaagggcctggttcatgcggaggaatgtacacagctaataccatggcatcagcgattgaggcattagggatgagtttaccggggagtagtagtcaagatgcagtatccaaggccaaggagaatgattgcgtcagatcaggaagtgcgataaagactcttttagataaaaatattgtcccaaaagatattatgacaaaacatgcatttgagaat

SEQ ID NO: 285897 - DNA, 898 bp, Unknown
  Bacterial polypeptide expressing nucleotide sequence isolated from the Sargasso Sea
gctgttgaaaaacattcatcaggtcaaatgtcagcaaaagaactaagaaaattagaattagttgcttgtccaaccgcaggtgcttgtggcggacaatttacagctaatactatggcctgtgtatcagaagcaattggtttagcattaccttattcagcgggaacaccagctccttatgaagaaagagataaatatgcaaaagcaagtggtcaaatggtaatggaattacttgctaaaaaaattaaaccaagagatatcgttacaagaaaagcattagaaaatgctgcaacaatagttgctgcaacaggtggttcaacaaacgctgctttacacttaccagcaatcgcaaatgaagcagggataaaatttgatttaatggatgttgcaaaaatatttaaaaaaacaccttatcttgcagatttaaaaccaggtggaaaatatgttgcaaaagatatgtggttagcaggtggagtgcctatgcttttaaaaactctttatgatggtgggtatattcatggagattgcatgacagttacaggtaaaacaatgaaagaaaatttaaaaggaattaaatttaatccaaaacaaaaagttttaagagcttacgacagacctttatcaccagatggaggagttgttggattaaaaggtaatttagctccagaaggtgggattgttaaaattgctggacttaaaaaattacaattcactggaagagcaagatgttttgataatgaagaaagcgcaatgagagcagttcaaagtagaaaatataaagatggtgacgtaattattattagatatgaaggacctgttggcggaccaggtatgagagaaatgctttctacaaccaggtgctatttatggacaaggaaaaggggaaaaggttgctttaatt

SEQ ID NO: 285898 - DNA, 862 bp, Unknown
  Bacterial polypeptide expressing nucleotide sequence isolated from the Sargasso Sea
gatagggctccgcataggtctttttattatgccatgggagaaaccgaacaagatgttgctaaacctttcgtaggtgttgtttcaacgtggaacgaagcagctccttgtaacactgctttaatgagacaagctcaatcagttaaaaaaggagttaaaaaatacggtggaacgcccagagaattttgcacaataacagttactgatggtatagctatgggccatgaaggaatgaaatcatctttgatttcaagagaggttatagctgactctgctgaattaactgttaggggacattgttacgatgctttagtcggtattgctggatgtgataaatcattgccaggattaatgatgtctatgttaagattaaatgttcctagcgtttttatatatggcggttcaattttaccaggtaagtataaaggtaaagatgtaactgttgtagatgtattcgaagctgttggaaaacattcttcaggatcaatgtcatctgaagaactcagagaattagaattagttgcttgtcctagtgcaggtgcttgtgggggtcaatttacagctaatactatggcatgtgtttctgaagctataggtttagccttaccttactctgctggaactccggctccatatgaggagagagataaatatgcttttgatagcggtcaaacagtaatgaatttattagaaaaaaatataaagcctagagatatagtaacaaaaaaatctttagaaaatgcagcaaccattgtagccgctactggtggatcaactaacgctgctctgcatttacctgccttagcaaatgaaataggagttaaatttgatttaatggacgttgcaaaaatatttaaaaaaacac

SEQ ID NO: 285899 - DNA, 853 bp, Unknown
  Bacterial polypeptide expressing nucleotide sequence isolated from the Sargasso Sea
tggtattaaatttgatctaatggatgttgcaaaaatttttaaaaaaactccctatcttgcagatttaaaacctggtggaagatatgttgcaaaagatatgtggaaagcaggcggagttccgatgttacttaaaacacttatggatggtggttatattcatggcgattgcatgactgttacgggtaaaactatgaaagaaaatttaaaaaatgttaagtttaatttaaaacaaaaagttatgagaaaatacaataaccctttatccccagatggaggagttgttggaatgaaaggaaatttagctccagaaggtgcaattgtaaaagttgctggtttaaagaagttacaatttaccggtaaagcaagatgttttgatacagaagaagcagcatataaagctgtaaaaaataaaaaatataaagatggtgatatcataattattagatacgaaggacctaaaggtggtcctggaatgagagaaatgcttcaaacaacaggagctatctatggtcaaggaaaaggtgagaaagttgctcttattacagatggaagattttctggagcaactagaggattttgcattggacacgttggtccagaagcatctgtaggaggaccaatagctttacttaggaatggagatataattgatttagatgctaaaaaaggaattattaatgttcgtttatctaaaaaggaattagctaaaagaagaaagaaatggaaaccaaggaaaattaattttggtaatggaacgctttggaaatacgctcaaactgttggaccagcctatttaggcgctccaactcatccaggtggaaaaaacgaagtaaaaacttacgctgatatttaa

SEQ ID NO: 285900 - DNA, 938 bp, Unknown
  Bacterial polypeptide expressing nucleotide sequence isolated from the Sargasso Sea
atgtcagcacatgcactgagaaaactagaacttaaggcttgcccaagtgctggagcttgtggaggacaatttacagcaaatactatggcatgtgtctctgaggcaataggattagcattaccatattcagctggaacaccagcaccatacacacaaagagattcttatgctttaaaaagtggtaaggcagtaatgaatttattggcaaaaaatatcagaccaagagacattgttacaaaaaaatctttagaaaacgctgcaacaattgttgctgcaacaggtggatcaactaatgcagctctacatttacctgcacttgcaaatgaagcaggaattaaatttgatttaatggatgttgcgagaatatttaagaaaacaccttatcttgcagatttaaaacctggtggaaaatatgttgcaaaagatatgtggaaagcaggtggagttccaatgcttttaaaaactttattagatggtggttacatacatggagattgtatgacagttacaggtaaaacaatgagacaaaatttaaaaaacgttaagtttaataaaaatcaaaaagttatgagaacacataaccaaccattgtcacctgatggaggtgttgttggtttaaaaggaaatttagcacccgatggagcaattgttaaagttgctggattaaagaaattacaattcacaggtaaagcaagatgctttgatacagaagaggctgcttataaagcagttaaaaacaaaaagtataaagacggtgatattattattattagatacgaaggaccaaagggtggacctggtatgagagaaatgcttcaaacaacaggagcaatttacggacaaggtaaaggagaaaaagttgcacttataacagatggaagattttctggagctacaagaggattttgtataggccatgttggtcctgaagcttctgt

SEQ ID NO: 285901 - DNA, 754 bp, Unknown
  Bacterial polypeptide expressing nucleotide sequence isolated from the Sargasso Sea
aaaaatgattgtataaatgcaggaaaagccgttattgaacttattaacaaaaatataaaacccttagatatccttacaaaaaaagcttttgaaaatgcaatcactgttattacagcgctaggagggtccacaaacgccgttcttcatctcatagccatggcacattcggctggagttgagttaacacttaatgattttacaagaataggaaaaaaagttcctgtattagcagatttaaaaccaagtggaaaatatacaatgtcaaaacttgttgaaattggaggtatcgcacctcttatgaaacaacttttaaatgaaggccttttacatggtgattgtttaacagttaccggaaaaacactagaagaaaatcttaaaaatattgatccctatccaactgggcaggatattataaaacccctttcaaaccccattaaaaaagatggtcatttagtaatttgttacggaaacatagcgcctaaaggtagcgttgcaaaaataacaggaaaagaaggactttcatttactggaaaagcacgtgtttttaacgctgaagaagaagctcttaaaagaatcttggatgacacaataaaaaaaggagatgtcattgtcattagatatgaaggtccaaaaggaggacctggtatgagagaaatgttatcccctacttcagcagtaatgggaaaaggattaggccaagaagttgcattgataacagatggaaggttttcaggtggtacacatgggtttgttg

SEQ ID NO: 285902 - DNA, 805 bp, Unknown
  Bacterial polypeptide expressing nucleotide sequence isolated from the Sargasso Sea
ccctactgtctttgtatcaggcggtccgatggaggcgggaaccaataaaaaaggtgaaaaagttgacctagtttcagtttttgaaggtgttggtaagtttaaaactggaagtattgatgaggatgatttaaaagatcttgaagaaaatgggtgtcctacttgcggttcttgttcagggatgtttacggctaattcaatgaactgcttattagaggttcttggtctagcgcttcctggcaatggtacaatattagcaacagatccatccagactagaacttgttaaacaagctggcaaagcgattattgatcttgtccaaatggatttaaagccacgagatattgtaaataatgattcaattagaaatgcgtttgccttagatatggcaatggggggaagtacgaatacagtgcttcacacacttgctgcatccatagaggcaggcctgtcttttgatatggaagagatcaatgaaattagtcgtaggacaccttacctgtgcaaagttagccctgctactccgaacgttcatatggaggatgtattaaaagctggtggtatatctgctattttaatggagttatcaaaacaaagtggacttttaaaacttgatcgacccactgtgctgggagtgacattgggagagtcaattgcaagtgctaaaaattataacaaagatataattagatcagttgatgaccctttttctaaggaaggtggtttagctgttctttttggaaatatagcacctcatggatccatagtaaaaaccgcagcagtaaataaaagaaatgttagttcatga

SEQ ID NO: 285903 - DNA, 855 bp, Unknown
  Bacterial polypeptide expressing nucleotide sequence isolated from the Sargasso Sea
gatgggtcatgacggaatgctttatagccttccaagcagagatttaattgcagatagcgttgaatatatgtgtaacgcgcattgcgttgatgctctaatatgtatttcaaattgtgataagataactcccggaatgctaatggcaggtctaaggctaaacattcctttcgttctggtttctggtggcccgatggaggctggtagaattttaaaaggaaaaagttttaggcgaactgaccccatagaagcatatgtgtctgctatgacaccaaattataatcaaacggatgctatggaaatagaagctgaagcctgcccaacttgtggttcttgtgcaggaatgtttacggcgaattcaatgaattgtcttgctgaagctattggattggctctgccaggaaatggatctcttcttgcaactcatgttggtcgaaaacagttatttgtggatgctggaaaaaagatagtttcgatagcgagaaaatactatttcgaaaaagacaattctgtgttgccacgaaacatagccacaaaaccagcatttgaaaatgctatgaaagtagatatagcaatgggcggatcaacaaataccattttacatttattagctatggcccaagaagccaacatagattttgatatgagagatatggataagatatcaagacagatccctcacatatgcaaactttctccagctaaccaagattactatatggaagacgttcatcgagcaggaggcattatgggaattttaggggaattggatcgcgggaatttaattgatacaagcgtaaatacaatcgcaggagaaaatctaaagaaagttctgcttaaatgggattacttaaacag

SEQ ID NO: 285904 - DNA, 727 bp, Unknown
  Bacterial polypeptide expressing nucleotide sequence isolated from the Sargasso Sea
tatgtcagaactaaatgcaaacggagggattcaaccactgatgaagagtctgcttgataaaggattacttcacggaaaatgcattaccgtaaccggaaacactctagaagaaaaccttcaagatataaagccttatgataataacgaaattattaaatcatttgaagatcctattaaaaaagatagtcatttaagaatactatatggaaatctagctaaagatggagctgttgcgaagataacaggaaaagaaggtacttcttttgaaggaaaggctaaagtttttaattctgaggaagaaggagttgaggctatattgtcaaataagatcattgaaggtgatgttgttgttataaggtatgagggaccaaaaggtggcccaggtatgcgagagatgctaaagccaacttctgcaattatggggctaggactaggaaataaaattgcttttataactgatggtagattttcaggaggaacccatgggtttgttgttggtcatgtttctccagaagcggcagatggtggacttattgcactaatagaagatggagatactattttaattgatgctgataatgatcaattgattttaaaagtagatgtggatgaaattgttaaaaggaaatctaattggaagaatccaatagaaggcccaaaaaaaggtgttctttctaaatatgctgaaagcgtaaagtctgcgagcttgggagcaataactgattaa

SEQ ID NO: 285905 - DNA, 508 bp, Unknown
  Bacterial polypeptide expressing nucleotide sequence isolated from the Sargasso Sea
ggttcagttgcaaagattactggaaaggaaggattagttttttcaggtccagcaaaagtatataatagtgaatttgaaacgatagatgcaatccaaaattcaaaagttaaaaaaggtgaagtagtagttattagatacgaaggtcctaaaggtggtccaggaatgcctgaaatgcttaagccaacatcagctataatgggggcaggtttaggtaaggatgttgctttaattacagatggaagattctctggaggaactcatggctttgtagttgggcatatcgttccagaggcttttgaaggaggaacgattgcattagtagaagatggagatattataacaattgattcaaaaaataacgttattagtgttgatatttcagataatgaaatagaggaaagaagaaaaaaatggaaaaaaccagatttaaaaataaatcaaggaattctgtataaatatgttaaatcagtttcaagtgcatctaagggatgtgtaacagacgagtaaa

SEQ ID NO: 285906 - DNA, 886 bp, Unknown
  Bacterial polypeptide expressing nucleotide sequence isolated from the Sargasso Sea
gcttgtgggggtcaatttactgcaaatacaatggcatgtgtttcagaagcaattggattagctttactttattcagctggaactcctgctccttataaagaaagacataagtacgcaatcaatagcggtaaagctgtaatgaaacttttagaaaaaaatattagaccaagagacatcgttacaagaaaagctttagaaaatgctgctacagttgttgctgcaactggaggatctactaatgcaggtttacacttaccagcgattgcaaatgaaattggaattaaatttgatttaatggatgttgcaaaaatttttaaaagaactccttatcttgctgatttaaaaccaggtggaaaatatgttgctaaagatatgtgggaagcaggtggggttccaatgcttttaaaaactctttacgatgggggatatatccatggggattgtatgaccgttacaggaaagacaatgaaagagaatttaaaaaatgtgaaatttaatccaaaacaaaaagtaatgagaagttataaaaatccaattacaccaactggtggggttgttggattaagaggtaatttagctccagaaggtggaattgttaaaattgccggtttgaaaaaattacaattcactggaagagcaagatgttttgactctgaagaaaaagcttacaaagctgtaaaagaaagaaaatacaaagacggtgatataattataattagatatgaaggtccaaagggtggtccaggaatgagagaaatgctacagacaacggcagcaatctatggtcaaggaaaaggggagaaagtagcccttataacggacggtaggttctctggggctaccagaggcttctgtattggtcatgtgggtcctgaggcctctatag

SEQ ID NO: 285907 - DNA, 682 bp, Unknown
  Bacterial polypeptide expressing nucleotide sequence isolated from the Sargasso Sea
gatgaacattccctccgtctttgtttacggcggcacgatcaagccaggcaaactcggggggtgtgacctcacggtggtgagcgccttcgaggccgtcggtcagctgaccagcggcaagatcgatgaggcgcagctgacggcggttgagaaaaatgcctgccctggcgctggcagttgcggcggcatgttcaccgccaacacgatgagtgccgccatcgaaacgatgggattgagccttcccttcagctccacgatggcggcggaagatgaggagaaagccgacagtgccgcgcggtcagccgaggtgcttgtggacgcggtgaacgccaacatccgtcccctcgacctgctgaccaaagaagccttcgagaacgccatcagcgtgatcatggcggtgggcggctccaccaatgctgtgctgcacctgctggcgatcgcccgcacggcgggagtggatctgaccattgatgatttcgaacgcattcggcagcgcgtgccggtgatctgcgatctcaagcccagcggccgctacgtcacggtggatctccacaacgccgggggcattcctcaggtgatgaaactgttgctggatgcaggccttctgcatggggattgccgcacggttgaagggaaaagcctgaaggagttgcttgcggccgtgccatccgagccgccggcgggg

SEQ ID NO: 285908 - DNA, 679 bp, Unknown
  Bacterial polypeptide expressing nucleotide sequence isolated from the Sargasso Sea
tatgtataacaaattcagtcgtgtagtaacaaaagatgactctcagccagctgctcaagctatgctgcatgccattggtttatctgaagaagactttgataaaccatttattggcatcgcaagcactggctatgaaggtaacccttgtaacatgcatttaaatgatctatcagttaagattaaaaaaagtatttctgcctctgaatatgttggattaatattcaatacaataggggtaagtgatggtatttctatgggaacttttggcatgagatattctcttccatctagagatattattgctgattccatggaaactgttgttcaagctatgtcttatgatggtctagtaactgtcgttggttgtgataaaaacatgcccggtgcattgatggctatgttaaggcttgataggccaagtatacttgtctacggaggaacaattgactcaggctgttataacaacaaagaattagacgttgtttcagcatttgaagcttggggtgagaaggtatcaggtaagatagatgataaagaatataagagtgtaattaaaaatgcatgtcctggtgcaggagcatgtggtggaatgtatactgccaatactatggcatcagcaattgaagctctgggtatgtctcttccctataattcatcaaatcccgcaataagtaagaaa

SEQ ID NO: 285909 - DNA, 913 bp, Unknown
  Bacterial polypeptide expressing nucleotide sequence isolated from the Sargasso Sea
gtttcagatgataaagtgcgtgactgctttcaagcgggtgaaacagtcttacgtttgatagaaaaaaatatttgtccactagacattcttaccagagaagcatttgaaaactcgattactgttgtgatggcactgggtggatctacaaatgcggttttacatctgcttgccatggctaatgcggctaaaataaacttagaattggacgattttttgagaattggtaacaaggcccctgttcttacagatttaaaaccaagcgggaagtatttaatgacagattttgtcaagattggtgggttaccgccattgatgaaaatgctactggatgcaggactacttcatggagactgcatgactgttacaggaaaaacagtacgtgaaaatctgaaaaacgttaagccttatgaagaaggtcaggagattgtaaaatcacttgatgatccgataagaaaaactggtcacctagtgattctgcgtgggaatctagctgctgaaggagcagtagcaaaaatatccggaaaagaaggggagtttttcaggggaactgcgcgagtattcaattccgaggaagaagccctgattcgaattctggacggtactgtagttaaaggagatgtgattgtaattaggtatgaaggtcccaagggaggtccgggtatgcgtgaaatgctttcgccaacctcagccataatgggaagagggcttggtaatgatgtggctcttattactgatggtaggttttcaggtggttctcatggtttcgttatagggcacataactcctgaagcttttgaaggaggtttgctgggtatagttgaaaatggtgataacattacaattgatattactaaacgcaccatagatctagaagtttcggaacatgaaattaaaaggagacaagataactgga

SEQ ID NO: 285910 - DNA, 892 bp, Unknown
  Bacterial polypeptide expressing nucleotide sequence isolated from the Sargasso Sea
tatgctatatccggttggtttttcagaagatgattttaagaaacctcagataggtattgcttcaacctggagcatgatcactccctgcaatatgcatatcaatgagttagccgatcaggcagaaataggtgcaaatgaagcaggcggcaaagcagtacaattcaatacgatcaccgtttctgacggtatttcaatgggaacaccgggcatgcggtattccctggtgtcgcgagaagttatcgcagattcaatcgaaaccgtcgtggccgctcaagggttcgatggatttgtcgcaataggcggctgcgacaaaaacatgccagcgtgcggaatagccatggcacgcctcaaccgaccgagcgtttttgtttacgggggtacaatacttcccggcaaagagagaagagatatcgtctctgtgtttgaggcagttggaggacatgctgcgggaagcgtttctgatatagagctaaaagaagtcgagtcaacggccatacctggtccgggatcctgcggcggaatgtacactgcaaacacaatggcctcggcgatggaagctctagggctttctctaccaaatagttcagcccaaaacgcggtcagcgaagaaaaaaaaatcgatagcaggaatgctggaatcgcagtacgtaatctcatcagattaggtgttaagcctagtgatatcctatgtaaagaatctttcgagaatgccatcacagtgtctattgcgcttgaaggatcaacgaatgctgtcctacaccttttagggattgcccatgccgctggtatcaagctagaactcgacgattttagtagaataggtgcgcgcgtacccgttctcgcggatatgcgtccggctggccagtatgctatgagcgagttgattgaatag

SEQ ID NO: 285911 - DNA, 757 bp, Unknown
  Bacterial polypeptide expressing nucleotide sequence isolated from the Sargasso Sea
tatgtggctagcaggtggtgtaccaatgttattaagaacattgttagacggtggatatatccatggtgactgtatgactgttacagggaaaactatgagacaaaatcttaaaaatatcaaatttaatccaaaacaaaaagttatgagaaaatataacaatccactttcaaacgatggtggtgttgtaggtttaaaaggaaatcttgcaccagaaggagcaattgtaaaagttgctggattaaaaaaattacaatttacaggaaaagcaagatgttttgatacagaagagtctgcttataaagctgttaagaataaaaaatataaagatggagacataattattattagatacgaaggtccaagaggtggtcctggtatgagagaaatgttacagacaactggtgcaatttacggtcaaggaaaaggagagaaggtagcacttattacagatggtagattttcaggtgcaacaagaggtttttgtattggtcacgtaggtccagaagcatctgttggaggaccaattgcattacttagaaacggagacgtaatagacattgatgctaaaaaaggaactatcaatgttagattgtctaaaaaagaattgcaaaaaagacgtaaaaaatggagacctaaaaagattaactttggtaatggaactctttggaagtatgcacaaactgttggtccagcatatttaggagcaccaacacatcctggtggtaaaaacgaggttaaagtatacgctgatatttaa

SEQ ID NO: 285912 - DNA, 810 bp, Unknown
  Bacterial polypeptide expressing nucleotide sequence isolated from the Sargasso Sea
ggattgagcttgccttacagctccaccatggcggcggaagatcccgagaaggctgacagtgctgctcgctcagcagaggttttggttgaggcaattgccgccaacattcgccccctggatttgctgacccgcgaggcctttgaaaatgccatcagcgtgatcatggcggtgggcggctcgaccaatgccgttctgcatctgttggctattgctcggactgctggcgttcccctatcgattgacgatttcgaaacgattcgccaacgggtgccggtgatctgtgatctcaaacccagcggccgcttcgtcaccgttgatcttcacgaagctggcggcattccccaggtcatgaaactgctgctggacggcgggttacttcacggtgattgccgaaccgtggaaggcaagacgctccgcgaggtgctggctgatatcccctcatctccaccggctgatcaagacgtcattcgccccctgagcaatcctctttatgccaagggtcacctcgccgtgctgaaaggcaacctggccagtgaaggtgctgtcgccaaaatcagtggcgttaaaacaccggttcttacaggcccggcaaaagtctttgagagtgaagaggaatgcctacaagcgatcttggcaaacaagatccaagccggagatgtggtggttgtgcgcaatgaaggtcccgtcggtggcccagggatgcgcgaaatgttggccccaacggcagcgatcgttggcgagggccttggagacaaggtggctttaatcaccgatggtcgctttagcggtggcacctatggactcgttgtt

SEQ ID NO: 285913 - DNA, 760 bp, Unknown
  Bacterial polypeptide expressing nucleotide sequence isolated from the Sargasso Sea
taagatagttcctggcatgcttatggcatcacttcgagtaaatattcctactgtatttgtatcaggtggcccaatggaggcagggaccaataaaaaaggtgaaaaagttgacctggtttcagtttttgaaggtgttggtaagtttaaaactggcagtattgataaggatgatttaaaagatcttgaagaaaatgggtgtcccacgtgcggttcttgctcaggtatgtttacggctaattcaatgaactgtttattagaggtactaggacttgctctgcctgggaatggtacaatactagcaacagatccatcgagattagatcttgttaagcaagctggcaaagcgattattgatcttgttgataaagatttaaaaccacgagatattgtaaataatgattcaattagaaatgcatttgccttagatatggcaatggggggcagtacgaatacagttcttcatactcttgctgcatccatagaggcaggcctgtcctttgatatgaaagagattaatgaaattagtcgtaaaacaccttacctgtgtaaagttagccctgcaactccaaatgttcacatggaggatgtgttaaaagctggcggtatatctgctattctaatggagctatcaaaacaaaatggacttttaaaacttgatcgacccactgtgctgggagtaaccttgggagagtcaatttcaggtgctaaaaattataacaaagatataattagatcagttgatgaccctttttcaaaggaa

SEQ ID NO: 285914 - DNA, 964 bp, Unknown
  Bacterial polypeptide expressing nucleotide sequence isolated from the Sargasso Sea
accagataaagctccacaaagatctttctattatgcaatgaatctaacagaaaaagatgtagcaaaaccatttgttggtgttgtttctacatggaatgaagctgctccatgtaatattaatttaatgaaacaggctcaatcagttaaaaaaggtgtacatttatctggcgggactccaagagaattttgcactatcactgtaacagatggtattgcaatgggacatgaaggaatgaaatcttctttaatttcaagagatataattgcagattctacagaacttactgtaagaggtcattgttacgatgctttagttggtttggctggatgtgataaatcattaccaggtcttatgatgtctatggttcgcttgaatgttccgagtgtatttatttatggtggatcaattttaccaggaagatttaatggtaaagatgtaactgttgtagatgtttttgaaggtgttggaaaatatacatcaaagaaaatgactgctcatgctttaagaaaacttgaattaaaagcgtgccctagtgctggagcttgtggcggccaatttactgctaatacaatggcatgcgtttccgaagcaattggcttagctttaccttattctgcaggaacaccagctccatataatgaacgaaataaatatgcactagaaagtggtaaagctgtaatgaatctgctagcaaaaaatattagaccaagagatattgtaactaggaaatcattagaaaatgcagctacaatagttgctgcaactggaggatctacaaatgctggtttacatttacctgctatagcaaatgaaattggtatcaagtttgatttaatggatgtagcaaaaatttttaaaagaacaccttacttagcagatttaaaacctggcggaaaatatgtagcgaaagatatgtgggaagccggtggtgttccaatgttactaaaaactttaatggatggc

SEQ ID NO: 285915 - DNA, 929 bp, Unknown
  Bacterial polypeptide expressing nucleotide sequence isolated from the Sargasso Sea
aatgcggaaatttaataagaaaaaattaccaagtagacatacatccttaggaccagatagggctcctcatagatctttttattatgcaatgggagaaacagaaaaggatgttgctaaaccttttattggggttgtatcaacatggaacgaggcagctccttgtaatatagccttaatgagacaagcccagtctgttaaaaaaggtgtaagagcatcaggtggaacgccaagagagttttgtacaattacagtcactgacggtattgctatgggtcatgaaggaatgaaatcctcattgatatcaagagaagttatcgcagacagtgctgaattgactgtaagaggtcattgttatgatgcattagtaggtattgcaggatgtgataagtctttaccaggtttgatgatgtcaatggttagattaaacgttccaagtgtgtttatttatggtggttcaatattaccaggcaaatacaaaggtaaagacgtgactgttgttgatgtttttgaagcagttggaaaacactcttcaggacaaatgtctgcaaaggaactaagaaaattagaattagttgcatgtccaacagcaggtgcttgtggcggacaatttactgcaaacactatggcctgtgtatctgaagcgattggcctggcactaccttattcagctggaacaccagcaccatacgaagaaagagataaatatgcaaaagcaagtggtcgaatggttatggaattattagctaaaaaaattaaaccaagagatattgttacaagaaaagctttagaaaacgctgcaacaattgttgctgcaacgggtggatcaactaatgcaggtttacatttacctgcgatagcaaatgaagctggtattaaatttgatttaatggatgttgcaaaaatatttaaaagaactccatatcttgctg

SEQ ID NO: 285916 - DNA, 886 bp, Unknown
  Bacterial polypeptide expressing nucleotide sequence isolated from the Sargasso Sea
gttggtgttgtttcaacatggaatgaagccgctccttgtaacataaatttaatgaagcaagctcaatcagttaaaaaaggagttaaagcttcaggcggaactccaagagaattttgtactattacagtaactgatggtattgcgatgggtcatgaaggaatgaagtcatctttaatttcaagagatgtaatagcagactcaactgaacttacggttagaggacattgttatgatgcattagttggattagcgggctgtgataaatcattaccaggtttaatgatgtcgatggttcgtttaaatattccaagtgtatttatatatggtggatcaattctacctggaagatttaatggaaaagatgtaactgttgtagatgtatttgaaggtgttggaaaatatacatcaaaaaaaatgacagctcatgcattaagaaaattagaattaaaagcatgtccaagcgcaggtgcttgtggtggacaatttactgcaaatacaatggcatgtgtctctgaagcaataggactagctttaccattctcagcaggaacgccagcaccatatttagaaagaaataaatatgcaatagacagcggtaaagctgtaatgaatttattagcaaaaaatattagacctagagacatagtaacaagaaaagctcttgaaaatgcagcaacaatcgttgcagcaacaggtggatcaacaaatgcaggtttacacttaccagctatcgcaaatgaaattggaattaaatttgatttaatggatgttgcaaaaatatttaagaaaactccttatcttgcagatttaaaaccaggtggaaaatatgttgcaaaagatatgtgggaagcaggaggagttccaatgttattaaaaactctaatgg

SEQ ID NO: 285917 - DNA, 861 bp, Unknown
  Bacterial polypeptide expressing nucleotide sequence isolated from the Sargasso Sea
agagatatagtacaaagaaaagctttagaaaatgctgcaacagttgttgctgcaactggtggttctacaaatgcaggattacatttacctgctattgcaaatgaagcaggaattaaatttgatttaatggatgttgctaaaatttttaaaagaacaccttatcttgcagatttaaaaccaggtggaaaatatgttgcaaaagatatgtggctagcaggtggtgttccaatgttattaaaaaccttatatgaaggtggatatattcatggtgactgcatgacggttactggaaaaactatgaaggaaaatttaaaaggtattaaatttaatccaagacaaaaagtaatgagatcttataaaaatccgttatcaccaacaggaggtgttgttggattaaaaggaaacctagcaccagaaggtgcaattgttaaagttgctggactaaaaaaattacaatttacaggtaaagcaagatgctttgaaaatgaggaaagtgcaatgaaagctgttcaaagcaaaaagtataacgatggtgatgtaattataattagatacgaaggacctgttggaggtccaggtatgagagaaatgttatcgacaacaagtgcaatttatggacagggaaaaggggagaaagtagcccttattactgacggtaggttctctggtgctacaagaggcttttgtgtgggtcatgtgggccctgaggccgctctagggggtcctataggccttttacgtacaggagatatcatcgatattgatgccaaaaaaggaactatcaatgtaagactttctaaaaaagaattagctgcaagaaaaagaaaatggaaggctagaaaatcagattttggatcaggt

SEQ ID NO: 285918 - DNA, 792 bp, Unknown
  Bacterial polypeptide expressing nucleotide sequence isolated from the Sargasso Sea
tatgacaataaattctaaagatatttccttattaaagcataagtctgctgctatcagtttaggtcctgatagggctccggctagatctatgttgagagctgttgggttaggggatgatgatatggaaaaaccatttgtcgcaattgctaatttggctagtgacgtgactccttgtaatgtacatttaactcgaatagctgataaagctaaacagggtttatgggatgccaatgctgtgccatttatgtttggaactattactataagtgacggtatctctatggggacagagggtatgaaagggtccttagtcagcagagaagttattgcggattcgattgaaacggtatgttttactgagggaatggatggattattaatcgtagcagcctgtgataaaaatatgcctggtgcaatgatgtcgatggctcgtttaaatatcccttcagtttttgtttatggaggagctatattgcctggatcgtacaaaggtgaggatattaacatacaagatatgtttgaagcagtaggagcctattctaaatgccagatgtctttagaagaattgattgatatggagcgtgtggcatgccctggagaaggagcttgttcaggcatgtttactgctaatactatggcttcagcgatagaagcgatggggatgtctgtaccgggagcagcttctataccagctgtagatgataggaatttaagtgttgctgaacaggcaggtaaacatatttacacaatgcttgaaaagggtgttaagcctagagatattatgactcgaaa

SEQ ID NO: 285919 - DNA, 643 bp, Unknown
  Bacterial polypeptide expressing nucleotide sequence isolated from the Sargasso Sea
actgctttttccaatagagcaagatgtaatctatcctgttaccaatcctttgtccaaaactggaggtgtagtaggtttaaagggtaacttagcacctaaaggagcaattgttaaagttgcaggaatgaaaaatcttacttttactggtccagctagagtttttgaatgtgaagatgattgttttaaagccgtgcaaaatagagaatataaaactggtgaagtattagtaattaggtatgagggcccaaagggaggtccgggtatgagagaaatgcttgctactactgctgcgttatatggacaaggtgttggagaagaagtagcgctaattactgatggtagattttctggaggtacaagaggtttttgcgtagggcatgttggaccagaggctgctactggtggaccaatagctctattagtagatggagatataattacaattgatgcaaatttgggtttacttgatgttgatttaaatgagcaagaacttgagaaacgaaaatcaaattggaaaccaaaaactacaaattatcaaactggtgcattatggaaatattcacaagaagttagtgatgcagagaagggggctgtgacccacccaggtgctaaatctgaaactcatatatatgctgatctatag

SEQ ID NO: 285920 - DNA, 844 bp, Unknown
  Bacterial polypeptide expressing nucleotide sequence isolated from the Sargasso Sea
aaaactacccagcagacatacttctctgggggcagatcgagctccacatagatccttttattatgcaatgggagaaactgaaaaagacgtctccaaaccatttgtaggagtagtatcgacatggaatgaagctgctccatgtaatattgctttaatgcgacaagcacaatcagtcaaaaaaggtgttagatcctcaggaggaactccaagagaattttgtacaattaccgtgacagatggtattgcaatgggtcatgaaggaatgaaatcttcattgatttctagagaagtaattgcagattcagcagaactcactgttagaggacattgttatgatgctttagtaggtattgctggttgtgataaatctttaccaggtttaatgatgtcaatggttagattgaatgttccaagtgtctttatctatggtggatcgatacttccaggaagatataaaggtaaagatgtaacagttgtagatgtttttgaagcagttggaaaacattcatcaggacaaatgtcagcaaaagaattgagaaaattagaattagttgcatgcccaacagcaggagcatgtggaggccaatttactgctaatactatggcctgtgtatcagaggcaattggtttagcattgccttactcagctggaaccccagctccatatgaagagagagataaatatgcaaaagcaagtggtcgaatggtaatggagttgttagctaaaaaaattaaaccaagagatattgttacaagaaaatcattagaaaatgctgcaacaattgttgctgctactggaggttcaactaatgcagcactacatttaccagcgattgcaaatgaa

SEQ ID NO: 285921 - DNA, 519 bp, Unknown
  Bacterial polypeptide expressing nucleotide sequence isolated from the Sargasso Sea
taaaaaaattacaatttacaggaagagccagatgttttgatactgaagaagctgcatacaaggcagttaaaaatagaaaatataaagacggtgatataattataattagatatgaaggacctaaaggtggtccgggaatgagagaaatgcttcagacaacagcagcaatttatggacaaggaaaaggggagaaggttgctttaattactgatggaaggttctcaggagccacgagaggcttttgtataggccatgttggaccagaggcctctgtgggtggtcctatagctcttttaagaaatggagacatcattgatattgacgcaaaaaaaggaacaataaatgttagattgtcaaaacaagaattatctaaaagacgtaaaaaatggaaacctaaaaaaataaactttggtagcggaacactttggaaatatgcacagacagtaggtccggcttataaaggtgcaccaacacatcctggtggtaaaaatgaggttaaagtttacgctgatatctaat

SEQ ID NO: 285922 - DNA, 499 bp, Unknown
  Bacterial polypeptide expressing nucleotide sequence isolated from the Sargasso Sea
tttaaaaagactccttatttagcagatttaaaaccaggggggcaatatgttgcgaaagatgtctatgaggctggaggtgttccaataataattaagactttatttgaaggcggatacatacacggagattgtctaacagtaacagggagaacgattgcagaaaatctcaaaaatgttgaatttaataacgaccaaaaagtgataaggccatatagcgatcctttgtcaccaacaggcggtgtagttggcttaaaaggcaacttggctcctgagggagcaattgtgaaagtagctggaatggaaaatttaaaattttcaggaaaagctatttgttttgattgtgaagaagacgcatttgagtgtgtcaaaaatggcaattttaaagaaggggatgtatttgtaatacgctatgaaggacctaggggcggtcctggaatgagagaaatgcttgcaacaacagccgcgatttatggccaaggaatgggtgataaagttgctc

SEQ ID NO: 285923 - DNA, 340 bp, Unknown
  Bacterial polypeptide expressing nucleotide sequence isolated from the Sargasso Sea
ggtaaaagctgcgcgctgatcaccgatggccgtttctctggtggtacctcaggtttgtctattggccacgtgtcgccggaagcagccagtggcggcgctattgcgctggttgaggaaggcgatcgcatcgagattgatataccgaatcgcaaaattggcattgccgttagcgatgacgagttagcagcaaggcgcgcagcaatggatgccaaaggtaagcaaggctggaaacctttgaaccgccagcgcgtggtaagtgcagcactgaaagcctacgcgttactggctagcagtgccgataagggcgcggtgcgggatttgtcgaaacttgaagagtgac

SEQ ID NO: 285924 - DNA, 404 bp, Unknown
  Bacterial polypeptide expressing nucleotide sequence isolated from the Sargasso Sea
ggccaggacgtgatccgccccatcagcaaccccatgtacgcgcagggtcacctggcgatcctgaagggcaacctgagccccgaggggtcggtggcgaagatcactggcctgaagaaccccgtcatcaccggtccggcccgcgtgtttgacgatgaacagtcggcgctggaagccatcctcgcaggcaagatcaaggccggtgacgtgatggtgctgcgctacctgggccccaagggcggccccggcatgcccgagatgttggcacccaccggcgcgctgatcggcgcgggcctgggcgagagcgtgggcctgatcaccgacggccgcttctccggcggcacctggggcatggtggtgggccacgtggcgcccgaggccgccgcgggcggcaccatcgcttttgt

SEQ ID NO: 285925 - DNA, 918 bp, Unknown
  Bacterial polypeptide expressing nucleotide sequence isolated from the Sargasso Sea
ctaatagctttgaaagaagttcagtttgtaggaccggggtcttgtggaggtatgtacacagcaaacaccatggcatcaagcatgaaagcattgggaatgagtttgccaggaagcagcagtcaggatgcagtgtctgaggataaaaaagtagattgccagaatgctggggaggctataaaacatttacttgatcttgacttaaaaccaagtgatatcatgacaaaaaaggcttttgaaaattctatagcagttgtaattgcgcttggaggatcaacaaatgctgttttgcatcttatagcaattgctcattgcataggcattgacttggacctagatgattttactaggattggaaaagtgactcccgtattagcagacatcaaaccttttggtgatcactttatgtctcaattaaacgaaataggtggaattactccaatgatgaaaactatgcttgaaaataagcttttgcatggagattgcatgaccgttacaggtaaaacattagaagaaaatctcgaggatgtagatccatatcctagcaatcaaaagattatcatgccgttgaataatcccgtaaaggattcaagtcacttaagagtgctatatggaaatttagctccagaaggagcagtagcaaaaattactggcaaagaagggactgtttttactggcaatgctagagtctttaattctgaggaagctggaatgaaagcaattcttgataagaagatcaaagacggggatgttgttgttataaggtttgagggtccccgaggtggtccgggcatgagagaaatgcttaaaccaacatctgcaatcatgggacagggtttgggagatagggttgcttttattactgatggaagattttcaggcggcactcatggttttgtagttggtcacataagtcctgaa

SEQ ID NO: 285926 - DNA, 939 bp, Unknown
  Bacterial polypeptide expressing nucleotide sequence isolated from the Sargasso Sea
gttgtatgaaatagaatgtaatgcctgtccaggacaaggctcttgcgcagggatgtttacagctaacacaatggcttctgtaggagaggctattgggatgagtttacctggcactgcttcaattccagctgaggatcaaaggttaagaacagcagcaaaagagtcaggttcgcaattaaattatctattgaaagaagatataaaaccaagagacatcatgaccttagaggcttttaaaaatgcaattacaacggtattagcccttggaggcagcacaaacgcagtattgcatttgttagctatatcctatgaagcaaaaattaatcttgacctaaatacttttgatgagctaggtaaatcagttccacatcttgcagatatgaaaccgtttggaaaatatcacatggttgatttagataaaattgggggagttccagtagtatccaaaatccttcttgaaaataaactcatagatcctgattgcctgacagttacaggaaaaactgttggtgaaaacttagaaaatattgaaattccaaaaagtcaagatgtagtttcgttcccagacaatccaatttcaaaagaaggaggaatagctatcttgaatggaacactttcaccaaacggatcggttgtaaagacagcgggtattgatgtgaatgaattttctggccccgcaaatgtttttgaaagtgaacaggatgctctagatgcgttattcaataacaagattgaaaaaggagatgtcgttgtaattagaaacgaaggcccaaaaggtggtccaggtatgagagaaatgcttcaaattacagctgcaataaaaggtgcaggtttaggaaaagatgtcctgttgattactgatggtcgattttcgggtggaactactggtttatgtattggccacgtaacaccagaaagtttcgatctaggtcctatttg

SEQ ID NO: 285927 - DNA, 703 bp, Unknown
  Bacterial polypeptide expressing nucleotide sequence isolated from the Sargasso Sea
gtagcaaaaatttttaaaaaaacgccatatcttgctgatttaaaacctggcggaaagtatgttgcaaaagatatgtggttggctgggggcgttcctatgttgttaaaaacacttcatgatggtggtttcattcatggtgactgtatgactgtaactggaaaaactatgaaagaaaatttaaagaatgttaaatttaatgtaaaacaaaaagttcttagaaaatacaataatccattatctttagatgggggtgtagttggactgaaaggtaatttagctccagaaggcggaatagttaaaattgcaggattaaaaaaattacaatttactggaatagctagatgttttgataatgaagaaagtgcttatttagcagttaagaaaaaaaaatataaagatggagatataattattattagatatgaaggaccgataggcggaccgggaatgagagagatgctttcaacaactgcagcaatttatggtcaagggaaaggagaaaaagttgcattaattactgatggtcgtttctctggagcaactagaggtttttgtgtaggtcatgtaggtcctgaagctgccataggtggtccgatagctttactacgcaatggagatgttattgatattgatgctaaaaaaggaaccattaatgttagactttccaataaaaaactggcagcaaggcgaaaaaattggaaac

SEQ ID NO: 285928 - DNA, 745 bp, Unknown
  Bacterial polypeptide expressing nucleotide sequence isolated from the Sargasso Sea
aaaatatcagaacacgcactaagaaaaatagagttaaaagcatgtccaactgctggtgcttgtggtggtcagtttactgctaatacaatggcatgtgtatcagaagcgatgggattagctttaccttattctgctggaactccagctccatttaatagaagagataaatatgctttagctagtggaaaagctgtaatgaatttattagcaaaaaatattagaccaagagatattgtaacaaagaaagctttagaaaatgctgcaacaattgttgctgcaacaggaggatcaacaaatgctgctttacacttaccagctattgcaaatgaaattggtattaaatttgatttaatggatgttgctaaaatatttaaaagaactccttatcttgcagatttaaaacctggtggaaaatacgtagcaaaagatatgtggaaagcaggtggagttcctatgttgcttaaaactcttatggatggtggatatatacacggtaattgcatgacggttacaggcaaaactatgaaagagaatttaaaaaacgttaagtttaattctaagcaaaaagttatgagaaaatataataatcctttatctaaagatggaggcgttgttggaatgaaaggaaacttagctccagaaggtgcaattgttaaagttgctggtttaaaaagattacaatttactggaagagcaagatgttttgatactgaagaagcagcttacaaagctgttaaaaaataga

SEQ ID NO: 285929 - DNA, 760 bp, Unknown
  Bacterial polypeptide expressing nucleotide sequence isolated from the Sargasso Sea
gtacgattaaacgttccaagtgtatttatttatggtggatcaatactaccaggaaaatacaaaggtaaagatgtgactgttgtagatgtttttgaagctgttggaaaacattcatcaggacaaatgtctgctaaagagctaagaaaattagaattagttgcatgtccaacagcaggagcttgtgggggacaatttaccgctaacactatggcctgcgtatctgaagcgattggtttagcactaccttattcagctggaacaccagctccatacgaagaacgagacaagtatgcaaaagcaagtggccgaatggtaatggaattattagcaaaaaaaattaaaccgagagatatcgttacaagaaaagcattagagaatgctgcaacaatagttgctgcaacaggtggatcaactaatgctgcattacatttaccagctatcgcaaatgaagcaggaattaaatttgatttaatggatgttgcaaaaatatttaaaagaacaccttatcttgctgatttaaaaccaggtggaaaatatgttgcaaaagatatgtggttagcaggtggtgtaccgatgcttttaaaaactctttatgatggtggatatattcatggagattgcatgaccgttacaggtaaaactatgaaagaaaatttaaaaggtattaaatttaatccaaaacaaaaagttttaagagcttataacagaccattatcaccagatggtggtgttgtaggattaaaaggtaatttagctcctg

SEQ ID NO: 285930 - DNA, 696 bp, Unknown
  Bacterial polypeptide expressing nucleotide sequence isolated from the Sargasso Sea
gaaactgagaaagatgtagcaaaaccatttgttggtgtggtttctacctggaatgaggcagctccatgtaatattgctctaatgagacaggcacaatcagttaaaaaaggagttagagctactggtggtacaccaagagaattttgtacaattactgtcacagatggtattgccatgggccatgaaggaatgaaatcttcattgatatccagagaagtaattgcagattctgctgaacttacggttagaggtcattgttatgatgcgttagttggtattgcaggatgtgataaatctttaccaggtctaatgatgtcaatggtaagacttaatgtaccaagtgtatttatatatggtggatcaattcttccaggtagatataaaggaaaagacgtaacagttgtagatgtatttgaggctgttgggaaacattcaactggtcaaatgtcagctgcagaactaagaaaattagaattagttgcatgcccaagcgcaggtgcttgtggtggacaattcacggcaaatacaatggcatgtgtatcagaagcaattggattagcattaccttattcagcaggaacaccagccccatatgaagaaagagataaatacgcaaaagctagtggtaaaacggttatgaaccttttgaaaaaaggaattaaaccaagagatattgtaactaaaaaagctttagaa

SEQ ID NO: 285931 - DNA, 823 bp, Unknown
  Bacterial polypeptide expressing nucleotide sequence isolated from the Sargasso Sea
atgaagcagaaagttaatttaactatcgatgattttgatatgttaagtcgcgacacaccttatcttactgatttaaaaccaggtggcaaatatgttatgtcagatatggataggtcaggcggagttcaagttgttttaaaagaattgcttgatgcagggttgattcatggtaacgaaatgactataaacggtaaaacgataggagagaatctcgaaaatgttaagactaggcctgacaataaagtcatattttcggtgccaaatgcgaaaagctcaacaggtgggctagcaatattgaaaggaaatctagctcctgaaggcgccgttatgaaagtttcaggaacttctcatcataaacacgaaggacctgctaaagtttacgatggagaaagagctgcttttgaagctgtaacaaatggagatgtagttgatggagatgtagttattatccgttatgaaggtcctaagggtgggccgggtatgcaagaaatgttggctgttactggggcagttatgggtgctgggttgggtgaatctactttattgattactgatggaaggttttcgggcgctaccagaggacctatgattggacatgttgctccagaagcggctgttgggggtccgattgctttagtacaggaaggcgacatcatatctatggatgttaattctagacagctagatgttaaaatatctaaagaagaacttgagtctagagaaaaagcttggaaacctagagaaccaaattataaaaaaggtgttttggcaaaatattctaaacttgtttcttctgcatcaattggtgctgtgactaattaaa

SEQ ID NO: 285932 - DNA, 899 bp, Unknown
  Bacterial polypeptide expressing nucleotide sequence isolated from the Sargasso Sea
ttacgaggaagagataagtatgcaaaagaaagtggtaaaatggttatgaaccttttacagaaaaaaattaagccaagagatatcgttacaagaaaagccttagaaaatgctgcaacaattgttgctgcaactggtggatctacaaatgcaggtcttcatttaccagctatcgctaatgaagcagggattaaatttgatttaatggatgttgctaaaatatttaaaagaacaccttatcttgctgatttaaaacctggggggaaatacgttgcaaaagatatgtggctagcaggtggtgttccaatgttattaaaaactttatatgagggtggatatattcatggagactgtatgactgttacaggtaaaactatgaaagaaaatttaaaaaatattaaatttaatcctaaacaaaaagtaatgagatcttacaaagatccaatatctccaacaggtggtgttgttggattaaaaggaaacttagctccagaaggagcaattgttaaagttgcaggacttaaaaaattacaatttactggaaaagcaagatgttttgataatgaagaaagcgctatgaaagctgttcaaagcagaaagtacaatgatggtgatgtaattattatcagatacgaaggaccagttggaggtcctggtatgagagaaatgctatctacaaccggtgcaatttatggtcagggaaaaggggagaaagtagcccttataactgatggaaggttctctggtgctacaagaggcttttgtgttggtcacgtaggccctgaggccgctctagggggtcctataggactattaaagaacggagatattattgatattgacgccaaaaaaggaactatcaatgtaagactttctaaaaaggaactggcatcaagaagaag

SEQ ID NO: 285933 - DNA, 815 bp, Unknown
  Bacterial polypeptide expressing nucleotide sequence isolated from the Sargasso Sea
gaacaagttgcttgcccatctgctggatcgtgtggaggtcagtttacagcaaatacgatggcatgtatttcagaagcagttggtttagctctaacaaattcagctatgcctccagcagtaaatactgaagaaagaaaagcttatggtgaaaagagtggcaaagctataatgaatttattagaaaagaatataagaccaagggatatagtaactattgattcattagtaaacgctgcaagagtagttgcagctactggaggctcaactaatgcagcactccatcttcctgcaatagctaatgaagcgggtttaaaatttacattaagagatgttgtagaaatttataattcgactccttatatcggagatatgcaacctggtggaaagtacgttgctaaagatttatatgatgtaggaggtgttccagttgttataaaatctttattagatggtggttatataaacggagactgtataactgttacaggaaaaacaatagctgaaaaccataaagaagtaatatttcctacaaatcaagatgttgtttataaatgtgataatccaattagtgaaaatagttcagtcgtagggttgtggggtaatcttgcaccagatggatgtatatcaaaaatagcaggtttaaaaaatttaacttttaaaggaaaagctaaatgttttgactcagaagaagatgctttaaccgcagttttaaaaaatgaaattaaagcaggagatgcggtaataattagatatgaaggtcctaaaggaggaccaggtatgcgtgaaatgctttcacaacaggtgcaatatatggg

SEQ ID NO: 285934 - DNA, 847 bp, Unknown
  Bacterial polypeptide expressing nucleotide sequence isolated from the Sargasso Sea
aaattcgatcttatggatgttgcaaaaatttttaaaaaaactccttatcttgctgatttaaaaccaggtggaaaatacgttgcaaaagatatgtggaaagcagggggagttccaatgttgttaaaaactcttatggatggtggatacatacatggtgattgtatgactgttacaggtaagacgttaaaagaaaatttaaaaaatgttaaatttaataaaaatcaaaaagttatgagaaaatacgataacccattatctcctgatggtggtgttgttggtttaaaaggtaatctagctccagagggagctattgtaaaagttgctggtttaaagaagttacaatttactggaagagcaagatgttttgatacagaagaagctgcttataaagctgttaaaaataaaaaatataaagatggtgatataataataattagatatgaaggtccaaaaggtggacctggcatgagagaaatgcttcaaacaacaggtgctatttacggacaagggaagggcgaaaaagtagctcttataactgatggaagattttcaggagcaacgagaggtttttgtataggacatgtcggtcctgaagcatctgtaggtggacctatcgctttacttaagaatggtgacataattgatttagatgcaaaaaaaggaactattaatgttcgtttatctaaaaaagaattagctgctagaaaaaagaagtggaaaccaaaaaaaataaattttggtaatggcacactttggaaatatgctcaaacggtaggcccagcttacttaggtgcacccacacatcctggtggtaaaaatgaagttaaggtttacgccgatatttaat

SEQ ID NO: 285935 - DNA, 832 bp, Unknown
  Bacterial polypeptide expressing nucleotide sequence isolated from the Sargasso Sea
gctgcaccatgcaatatagccttaatgaggcaagcacaatccgttaaaaagggagttaaaagcaacggtggaaccccaagagaattttgtacaattacagttactgacggaattgcaatgggtcacgagggcatgaaatcatcattaatttcaagagatgtaattgcagattcaaccgagttgacagtaagaggtcattgttatgatgcattggttggtgttgcaggatgtgataagtcattaccgggcttaatgatggcgatggttagattgaatgtaccaagcgtttttatttacggtggatcaattttaccaggaagattgaacggtaaagatgtaactgtagttgatgtatttgaaggtgtaggaaaatactcttcaggtaaaatgtcagcacacgcattaagaaaacttgaattaaaagcttgtccaagttcaggagcctgtggtggacaatttacagcaaatactatggcatgtgtttcagaagcaattggtcttgcattaccttattctgcaggaacacctgccccttatgagcaaagagataagtacgcaatgttaagtggaaaagctgtaatgaatttgcttaagaaaaatataagacctagagatatagttacaagaaaagctttagaaaatgcagctacaatagttgctgcaacaggtggctcaacaaacgcagcattacatttaccagcaattgctaacgaggttggtattaaatttgatttaatggatgttgcaaaaatatttaaaaaaactccttatcttgctgatcttaaaccaggtggaaaatatgttgctaaagatatgtgggcaagctggtggg

SEQ ID NO: 285936 - DNA, 694 bp, Unknown
  Bacterial polypeptide expressing nucleotide sequence isolated from the Sargasso Sea
atggttagattaaacgttccaagtgtatttatttatgggggatcaatacttccaggaaaatataagggcaaagatgttacggttgttgatgtgttcgaggctgttggaaaacattcatcaggacaaatgtctgcaaaagaattaagaaaattagaattagttgcatgtcctacagctggagcttgtggaggtcaattcacagctaacactatggcatgtgtgtcggaggcaattggtttagctttaccttattcagcaggaactccagcaccatatgaagaaagagataaatatgcaaaagcaagtgggagaatggtaatggaattattagctaaaagaattaaaccaagagatattgttacaagaaaagcattagaaaatgctgcaacaattgttgctgcaactggtggttcaacaaatgcagcattacatttaccagcaattgcaaatgaagccgggataaaatttgatttaatggatgttgcaaagatatttaaaaaaacaccttatcttgcagatttaaaaccaggtggaaaatatgttgctaaagatatgtggttagcaggtggtgtaccaatgttattaaaaactttatatgacggtggttatattcatggtgattgtatgactgttacaggtaagacaatgaaagaaaatttaaggggaattaaatttaatccaaaacaaaaagttt

SEQ ID NO: 285937 - DNA, 951 bp, Unknown
  Bacterial polypeptide expressing nucleotide sequence isolated from the Sargasso Sea
ataaaggctctaatattaaatccagattacctagcaggcatgttagtgttggccaaaaaagtgcccctcatagatctatgtattatgcgatgggaatgactgaagagcaaatttatcaaccttttgttggtgttgccactacttggaatgaatctgcgccatgtaacattactttaggaaggcaggctcaggctgtaaaaaagggagtaagtaaacttaatggaactcctcgtgaatttactactataactgtaactgatggaattgccatgggtcacgaagcaatgaaagcttctttagtaagtcgagaggttattgctgactctgtagaattatcagttagaggtcactgttatgatggtattgttggacttgctggctgcgacaaatcacttcctggactgatgatggctatggtcagacttaacataccctcagtttttatttatggtggttctatattaccaggaaattataaaggtaaagatttaacaataattgatgtttttgaagcagttggtaaacatgcatcaggtgaaatagatgaaagtgagctaaaaaatattgaaaaagtagcatgtcctaccgctggttcttgtggtggtcaatttacagcaaatacaatggcatgcatatcagaggcacttggattagctttaactaactctgctatgacaccagcaacttatgaagagagagataattacggatttgagagtggtaaagctgtaatgagtcttatagaaaataatattagaccaagagatatagttactttggaatctttaaaaaatgcagcagtcgttgttgctgctactggtggatctactaatgcagcattacatcttccggcgattgcgaatgaagctggtataaaatttactttaagtgatgttgtagaaatttatcaatcaactccctacattggtgatatgtccccctggtggtaag

SEQ ID NO: 285938 - DNA, 677 bp, Unknown
  Bacterial polypeptide expressing nucleotide sequence isolated from the Sargasso Sea
gagttgcttcattggtgaatgtatgactgtgacaggaaaaacagttcgtgaaaatctggaaaacgttaaaccttatgaagatggacagaagatagtacaatcactagatgatccggtaagaaagactggtcatcttgtgattcttcgaggtaatcttgctgctgacggtgcagtcgcaaaaatatccgggaaagaaggcgaattcttcaagggaactgcaagagtttttaattccgaggaagaggcactgaatagtattttagatggtactgtagttaaaggagatgtaattgtaatcagatatgaaggtccaagaggtggccctggtatgcgtgaaatgctttcgccaacatcagcaataatgggaaggggtcttgggaacgatgtagccctgattactgatgggaggttttccgggggttctcatggtttcgttatagggcatattactccagaggcttttgaaggaggtttgttaggcatagttgaaaatggtgataagattaaaattgatattacaaaacgcaccatagatctggaattaccggaaaacgaaattaaaaggagacaagatcgttgggttcgtccgcaggctcgttatactagaggagtacttgcaaaatacgcaaaatcagttagttcagcttcaaagggagcagtaacagatttggtttaat

SEQ ID NO: 285939 - DNA, 900 bp, Unknown
  Bacterial polypeptide expressing nucleotide sequence isolated from the Sargasso Sea
ttgtggtggtcaatttactgcaaatactatggcctgtgtttcagaagcaattggcttagcattaccttattcagcaggaactcctgctccttatgaagaaagagataaatatgcgaaattaagcggtaaaatggtaatggaattattagctaaaaaaattaaaccaagagatattgttacaagaaaagctttagaaaatgctgcaacaatagttgctgcaacagggggatcaacaaacgcaggattacatttacctgcaattgctaatgaagcaggaattaaatttgatttaatggatgttgcaaaaatatttaaaagaactccatatcttgctgatttaaaaccaggtggaaaatatgttgctaaagatatgtggttagctggtggtgttccaatgttattaaaaactctttatgaaggtggttttattcatggtgactgtatgacagttacaggtaaaactatgaaagaaaatttaaagaaaattaaatttaatccaaaacaaaaagtaatgagatcttataaaaatcctttatcaccaacgggtggtgtagttggattaaaaggaaatttagctccagatggaggaattgttaaaattgcaggacttaaaaaattacagtttactggtagggcaagatgtttcgataatgaagaaagtgcaatgaaagcagttcaaagtaaaaaatataaagacggtgatgtaattattattcgatacgaaggaccagtaggtggaccaggaatgagagagatgctttcaacaactggtgctatttatggtcaaggtaaaggcgaaaaagttgctttaattaccgatggaagattttcaggagcaacaagaggattttgtgttggtcacgtaggtccagaggcagcttttggaggacctatagctct

SEQ ID NO: 285940 - DNA, 827 bp, Unknown
  Bacterial polypeptide expressing nucleotide sequence isolated from the Sargasso Sea
tgcaacggtcagagcatggatggtgttctggcggtgggtggctgcgacaagaacatgcccggcgccatgctggcgatggcgcggatgaacatccccgccgtgtttgtgtacggcggcacgatcaagccgggcaaactcggcggctgtgacctcaccgtggtcagcgcctttgaggcggtgggtcagctcaccagcggcaacatcgacgaagaacagctcacggctgtggaaaagaacgcctgtccgggggccggcagttgcggcgggatgttcaccgccaacaccatgagtgccgccattgaaacgatgggcttgagcctgccctacagctcaacgatggcggcggaggacgaagagaaagccgacagtgcagcgcgatccgccgaagtgttggtggatgcggtgaaggccaacatccgcccgctggatctgctcaccaacgacgccttcgagaacgccatcagcgtgatcatggcggtgggtggatccaccaatgccgtgttgcatctgctggcgatcgcccgcaccgcgggggtgtccctcagcatcgatgacttcgaacggattcgtcagcgggtgccggtgatctgtgacctcaaaccaagcggccgttacgtgacggtggatctgcacaacgccggtggcatcccccaggtgatgaaactgctgctcgatgctgggctgctgcacggagattgccggacggttgaggggaaaagcctgcgtgacctgctggcggatgttccctctcagcctccagcggatcaggacgtcatcaggcctctgagcaatcctctttacgccaaaggccacctggcgatcctcaa

SEQ ID NO: 285941 - DNA, 699 bp, Unknown
  Bacterial polypeptide expressing nucleotide sequence isolated from the Sargasso Sea
tgatgaaaatgttactagacgcgggtctgctccatggggactgcatgacagtgacgggtaaaacgctgaaacaaaatctgaaaggagttaggacatactcgaagaagcagaaaataattcgacctctaaaagatccggtaaaagccactggacatctcgtcatactcaaaggaaacttggctcgtgacggtgctgttgcaaaaatctccgggaaggaaggagaagtttttcaaggcagtgccagggtttttgaatctgaggaagaagccctgcagaaaattctggatggaacggttcagaaaggggatgtgatcgtgatacgttacgaaggtccaaaggggagtccgggaatgcgggaaatgctctctccaaccggcgcgatcatgggacgaggacttggacaggatgttgcgctgatcaccgatggccgattttcaggaggttcccatggttttgtaattggtcacatcaccccggaagcctatgaggggggggtcattgctgtggttcgtaacggggacccgatcaccatcaatgccaaaaaaagattaatcaacctggatctgcccgaagaggaaatcacaaaacggctggaaaagtggaaacagccaaaaccgagattcatccgcggtgttctctcaaaatatgcggaatcggtgagttctgcgtctctcggtgcagtaaccgaccggaattgat

SEQ ID NO: 285942 - DNA, 964 bp, Unknown
  Bacterial polypeptide expressing nucleotide sequence isolated from the Sargasso Sea
aagaaactaccaagtagacatacatcactaggtccagatagggcacctcatcgatctttttactatgcaatgggagagactgaaaaagatgtatcaaaaccatttataggcgttgtatccacatggaacgaagctgccccttgtaatatagctttaatgagacaggctcaatcagttaagaaaggagtaagagcttcaggaggtactccaagggaattttgtacaattacagttactgatggtattgctatgggacatgaaggaatgaaatcctcattgatctcaagagaagtaatagctgatagtgctgaattgactgttagaggtcattgttatgatgctttagtaggaatcgcaggttgtgataaatctttaccaggtttaatgatgtcaatggttagattaaacgtaccaagtgtatttatttatggaggatcaattcttccaggaaaatataaaggcaaagatgtaactgttgtagatgtttttgaagctgtcggaaaacattcatcaggccaaatgtctgcaaaagaattgagaaaattagaattagttgcatgtcctacagctggagcttgtggtggtcaatttacagccaacacaatggcctgtgtttcagaagcaattgggttagcattaccttattctgcaggaacaccagctccatatgaggaaagagataaatatgcaaaagccagcggtcgaatggtaatggaattattagctaaaaaaattaaaccaagagatattgttacgagaaaagcattagaaaatgctgcaactattgttgctgcaacaggtggttcaacaaatgctgcattacatttacctgctattgctaatgaagctggaattaaatttgatttaatggatgttgcaaaaatatttaaaagaacaccttatttagcagatttaaaaccaggtggaaaatatgttgcaaaagatatgtggtggcaggaggtgt

SEQ ID NO: 285943 - DNA, 717 bp, Unknown
  Bacterial polypeptide expressing nucleotide sequence isolated from the Sargasso Sea
cggcaaacccatcatcgccgttgccaactcctttacccagtttgtgcccgggcacgttcacctgaaagacctgggccagctggtttgccgcgagatcgaagcggccggcggtgttgccaaagagttcaacaccattgctgtggatgatggtatcgccatggggcacgatggcatgctttactccctgccgtcgcgggaaatcatcgccgactcggtggaatacatggtcaacgcccactgcgccgatgcgctggtgtgcatctccaattgcgacaagattaccccgggtatgctaatggccgccatgcgcctgaacattcccaccatttttgtttccggcggcccgatggaagccggaaaaaccaagctatctgaacacaagctcgacctggtggatgccatggtcatcgccgccgatccaacggcgaccgatgagatggtcgaggaatacgaacgcagcgcttgccccacgtgcggttcctgctccggcatgttcaccgccaattccatgaactgcctgaccgaagccatcggcctggccctgcccggtaacggctctatgctggccacccacgccgaccgggaacagctgttcctgaaagccggtcgccagattgtggagaatgccagacgctattacgagcagaacgatgccagcgttctgccgcgcagcatcgcctccgtggaagcattcgagaacgccatgaccatggacat

SEQ ID NO: 285944 - DNA, 696 bp, Unknown
  Bacterial polypeptide expressing nucleotide sequence isolated from the Sargasso Sea
gatgaaaaaaaaatattcatcagctgttacaagtggtctagacaaagctccaaatagagctatgttaagagctgtcggcttcactaacccggattttgataaacctatgattggtgtagcttcaacttgggctatggtcacaccgtgcaacatgcatataaataagttagccgaatttgcttccaaaggtgctaatagaaatggtggcaagtcgattatctttaatacaattactgtatccgacgggatatcaatgggtactccgggtatgaaatattctcttatttcaagggaagttatcgctgactcaatagaaacagtaactgtagctgaaggctttgatggaataataactataggtggctgtgacaagaatatgcctggctgcttaattgctatgggacgattgaatagaccttccatttttgtttatggaggatcgatattaccagggatttataaaaaaaaacctgttgatgtagtttctgtttttgaagctgttggctcatactcaaataaaactatatctaaagaagaattattaaaaattgaggaatgtgctatccctgggcccggttcttgtggtggtatgtatacagccaatacaatggcatcagccattgaagccttaggaatgagtttgcctggcagttcaactcaaattgctgtttcaaaaaagaaagaatatgattgtat

SEQ ID NO: 285945 - DNA, 904 bp, Unknown
  Bacterial polypeptide expressing nucleotide sequence isolated from the Sargasso Sea
atgcggaagtttaataaaaaaaaattaccgagtagacacacatctttaggtcctgatagagctccacatagatctttttattatgcaatgggtgagaccgaaaaagatgtctccaaaccatttgtaggggttgtatcaacatggaatgaagcagcgccatgtaatattgcattaatgagacaagctcagtcagttaaaaagggtgtaagggcctcaggaggaactccaagagaattttgtacaattacagttacggatggaattgctatgggtcatgagggaatgaaatcctcgttaatctcaagagaagtaattgcagatagtgctgaattaacagtaagaggtcattgttacgatgcattagtaggtatcgcaggttgtgataagtctttaccaggtttaatgatgtcaatggtacgattaaatgtaccaagtgtttttatttatggtggatcaatacttccaggaaaatataaaggtaaagacgtaactgtggtagatgtttttgaagctgttgggaaacattcatcaggtcaaatgtcagcaaaagagttaagaaaattagaattagttgcatgtcctacagctggagcttgtgggggacaatttactgcaaacactatggcgtgtgtatcagaggcaattggtttagcattaccttattctgcgggaacaccagcgccatatgaagaaagagataaatatgcaaaagcaagtggaagaatggtaatggaattattagccaaaaaaattaaaccaagagatattgttacaagaaaagcattagaaaatgctgcaacgattgttgctgcaacaggtggttcaacaaatgctgctttacacttaccagctattgcaaatgaagctggaatcatatttgatttaatggatgtgcaaaaatatt

SEQ ID NO: 285946 - DNA, 676 bp, Unknown
  Bacterial polypeptide expressing nucleotide sequence isolated from the Sargasso Sea
gatgaccacgctcaatcgttacagtgcaaggatcacacaaccccgcgcccaaggcgcatcgcaggccatgttattggggaccggcttgactcctgaagacctgagcaagccgcaggtaggcatagcgagcatgtggtacgaagggaatacctgcaatatgcaccttgatacactcgcagctgctgtgcgagatggtgttgttgaaagcggtctggttgggatgcggtttaacaccattggtgtgagtgatggaatttcaatgggaacagatgggatgagctactcattaccatctcgagacatcattgctgactcaattgaaattgtcatgcaggcccaatggtatgacggactggttgcaattcctggatgtgacaagaatatgcccggatgcctcatcgctatgggtcgactgaatcgccctgccctgatggtgtatggcggtacgatcaaaccagggcatctcgatgatgggacgtcactcgatatcgtttcggcgttccagtgttatggggagtatgtggccggccgtatcgatgacagcaggcgttcggatatcgtgcagcgtgcatgcccgggtgcaggtgcgtgtggtgggatgtatacggcaaatacaatggcaacagccattgaagcaatggggatggcgcttcccgatactgcatccattcccgcc

SEQ ID NO: 285947 - DNA, 802 bp, Unknown
  Bacterial polypeptide expressing nucleotide sequence isolated from the Sargasso Sea
agactcaactgaacttacggttagaggacattgttatgatgcattagttggattagcgggctgtgataaatcattacctggtttaatgatgtcgatggttcgtttaaatattccaagcgtatttatatatggtggatcaattctccctgggagatttaatggaaaagatgtaactgttgtagatgtatttgagggagttggaaaatatacatcaaaaaaaatgacagctcatgcattaagaaaattagaattaaaagcatgtccaagtgcaggtgcttgtggtggacaatttactgcaaatacaatggcatgtgtttctgaagcaataggattagctttacctttctcagcaggaacaccagcgccatatttagaaagaaataaatatgcaatagacagtggtaaagctgtaatgaatttattagcaaaaaatattagacctagagacatagtaacaagaaaagctttagaaaatgcagcaacaattgttgcagcaacaggtggatcaacaaacgcaggattgcacttaccagctatcgcaaatgaaattggaattaaatttgatttaatggatgttgcaaaaatatttaggaaaactccttatcttgctgatttaaaacctggtggaaaatatgttgcaaaagatatgtgggaagcaggaggagttccaatgttattaaaaactctaatggatggtggttatattcatggtgattgtatgacagttacaggtaaaacaatgagagaaaatttaaaaaatgtaaaatttagagaaaatcaaaaagtaatgagatcttataaa

SEQ ID NO: 285948 - DNA, 682 bp, Unknown
  Bacterial polypeptide expressing nucleotide sequence isolated from the Sargasso Sea
aatgcttagaggcgttggctttgaaacatctgatttctcaaaatcattagtcgggattgcgtcaacttggtcaaaagttactccgtgtaatatgcatattaatgagttggctgatcttgttgagagttcaatagattcatccggttgcaaaggagttctttttaatactattactgtatctgacggaatctcaatgggtacacaaggtatgaaattttcattagtttcaagagaagttattgcagattcaattgaaacagttgttgggtgccttggctatgatggagttattgcaatcggtggatgtgataagaatatgcctggagcacttatgggattagcaagattggatagaccttcaattttcatttatggaggatccattcggccaagttcaataaatacagactatgtcacagtttcagaaaaagtgggcgagtatgcaaaaggagatataactaaagatgaactaatagctattgaagaagtttcagttgtgggaccaggatcttgtgggggcatgtataccgcaaataccatggcatcaagcattgaagctttgggaatgagtttaccaggaagtagcagtcaggatgcagtgtctgatgataaaaaattggattgccagaatgctggagaagcgataaaacatttacttgatcttgacttaaaaccaagtgat

SEQ ID NO: 285949 - DNA, 802 bp, Unknown
  Bacterial polypeptide expressing nucleotide sequence isolated from the Sargasso Sea
aaaatatttaaaagaactccttatcttgcagatttaaaacctggtggaaagtatgtagctaaagatatgtggaaagctggtggtgttccaatgttacttaaaacacttatggatggaggttatattcatggtaactgcatgactgttacaggaaaaacaatgagagaaaatttaaaaaatgttaagtttaataataaacagaaggttatgcgtaaatacaataatccgttatcacctgatggtggagtagttggtatgaaaggaaacttagcacctgaaggcgctatagtgaaagttgctggtttaaaaaaattacagtttactggaagagcaagatgttttgatacagaagaggcagcttataaagctgttaaaaatagaaaatataaagacggtgatattattattataagatacgaaggtccaaaaggtggcccaggtatgagagaaatgctgcagacgaccggggcaatatacggacaaggcaaaggagaaaaagttgcacttataactgacggaagattttcaggagcaactcgaggattttgtattggtcatgttggacctgaagcttcagtaggaggtccaattgcattacttagaaatggagatatcattgacttagacgctaaaaaaggaactattaatgttcgtttatccaaaaaagaattgtcaaagagaagaaaaaaatggaaacctaagaaaattaactttggtaatggaactctttggaagtatgcacaaactgttggtccagcttacttaggtgcacctacgcatccaggtgtaaaaaagaaggaaa

SEQ ID NO: 285950 - DNA, 781 bp, Unknown
  Bacterial polypeptide expressing nucleotide sequence isolated from the Sargasso Sea
tggaggtcaatatgttgcaaaggatgtttatgaagcaggaggagttccaattataattaaaactttatatgagggtggttacattcatggtgaatgtctgacagttactggaaacacaatttctgaaaatttaaaatcagttgagtttaacaaaaatcaaaaagttattcgaccatacgatgaacccttaagcataacgggaggtgttgtaggtttaaagggaaatttagcacctgaaggtgcaattgtaaaagttgcaggaatggagaatttaaagtttaagggaaatgctaagtgttttgactgtgaggaagatgcatttgagtgtgtaaaaaatgaaaactacaaagaaggagatgtttttgttatacgctatgaaggcccaagaggaggtccaggtatgagagaaatgttagctacgactgcagcaatttatggtcaaggaatgggtgataaagttgcacttattacagacgggcgcttcagtggcgccacaagaggattttgcgttggacacatctctcctgaagcagctgtctgcggcccaattgcacttgtagaggacggcgatgaaatcatacttgatgctgaaaatggggaaatttcaattaatgtttcaatggaaacgttagaaatgagaaaaaagtcatggaaagagcgaaaaacagactttaattctggaactctttggaaatacagtcaaactgtgggctctgcagtaaagggtgcagtaactcatcctggagccgaaaaagaaactcacgtatatagcgatatttga

SEQ ID NO: 285951 - DNA, 646 bp, Unknown
  Bacterial polypeptide expressing nucleotide sequence isolated from the Sargasso Sea
accatttttgtctcaggtggaccaatggaggcaggcaaaggtttagtaaaaggccaagaggcgagcctggatttagttgatgccatggtacttgctgcagatccaagtgtctccgatgaagatgttgcaaaagttgagagatccgcttgtcccacttgtggttcatgctctggcatgttcactgccaattctatgaattgcttggttgaggctctaggactcgcacttccagggaatggaagtgtgcttgcaacacatattgatcgtaaagagcttttcttaagagctgggaaaattattgttgagttgaccaaacaatactatgaaaaagatgatgaaagtgttcttccaagaaatattgcaaatctagaatcatttgaaaatgccatgaccttggatattgctatgggaggttctacaaatactgtgttacatatacttgctgcagcaaaagaagctgggcttaatttcggcatggatgacatagatcgcctatcaagaagggttcctaacttatgtaaagttgccccaagtagtaactttcatatggaagatgtgcacagagcaggaggaataatggccatcctgggagaactagagaaagcaaaattgctgaattctgataacaaaacagtccactcagaaa

SEQ ID NO: 285952 - DNA, 890 bp, Unknown
  Bacterial polypeptide expressing nucleotide sequence isolated from the Sargasso Sea
tgctataacagttgtaattgctcttggaggatcgacaaatgcagttcttcatttattggctatggctcattctattggagttaatctgtgtttagatgattttacaaaaatcggtaagaaaacacctgttttggctgatcttaaaccatttggaaaacactatatgtcagaactaaacgcaaacggagggattcaaccattgatgaagaatctgcttgatagaggattacttcatggaaaatgcatgactgtgaccggaaacactctagaagaaaaccttcaagctataaagccttatgaaaataacgaaattattaaatcttttgaagatcctatcaaagaagatagtcatttaagaatactatatggaaatctagctgaggatggagctgttgcaaagataactggaaaagaaggcacttcttttgaaggaaaggcgaaagtttttaattctgaagaggaaggagttgaggctatattatcaaataagatcattgagggtgatgttgttgttataaggtatgagggaccaaaaggtggtccgggtatgcgagagatgctcaagccaacttctgcaattatgggcctaggactaggaaataaaattgcctttataacagatggtagattttcaggaggaactcatggttttgttgttggtcatgtttctccagaagctgcagatggcggacttatagcgttaatagaagatggagatactattttaattgatgctgataatgatcaattgatcttaaaagtagatgtggatgaaattgctaaaaggaaatctaattggaagaatccaatagaaggccccaaaaaaggtgttctttctaaatatgccgaaagcgtaaagtctgcaagtttgggagcaataactgattaaa

SEQ ID NO: 285953 - DNA, 334 bp, Unknown
  Bacterial polypeptide expressing nucleotide sequence isolated from the Sargasso Sea
atgcttagatcaaatgcaataacacagggtattcaacgatcaccaaaccgagcaatgcttagagctgttgggtttgatgataatgattttaataagccaatcattggaatcgctaatgggcacagcacaataaccccatgcaatatgggattaatggatttagctaatagagcagagtcagcgttaaaagaggctggtgcaatgcctcaaactttcggaaccataactgttagtgacggcatttccatgggaacagaagggatgaaatactcattagtttcaagagaagttattgcagattcaatcgagacggcttgcaatgctcaaagccatg

SEQ ID NO: 285954 - DNA, 660 bp, Unknown
  Bacterial polypeptide expressing nucleotide sequence isolated from the Sargasso Sea
aggaaaatttaaaaaatgttaaatttaaaacaaaccaaaaagtaatgagaaaatataataatcctttatcaaaaactggtggtgttgttggattaaaaggaaatttagcaccagaaggtggaatagtaaaaattgcaggattaaagaaattacaattcactggaaaagcaagatgttttaatacagaagaagatgcgtacaaagcagtcaaaaatagaaaatataaagatggcgacatcattataattagatacgaaggacctaaaggaggccctggtatgagagagatgcttcaaacgacagcagcaatatacggacaaggaaaaggggaaaaagttgcacttataactgatggaaggttctcaggcgcgactagaggcttttgcataggtcatgtgggtccagaggcctctgtaggcggtcctatagcccttttaaggaacggagatgttattgatattgatgctcaaaaaggaactattaatgtcagactttctaaaaaagaattaagtgctagaagaaaaaaatggaaaccaaagaaaatgaattttggcaatggtacattatggaaatatgctcaaacagttggtccagcttacaaaggggccccaacacatccaggtggaaaaaacgaggttagaacttacgctgatatttaat

SEQ ID NO: 285955 - DNA, 783 bp, Unknown
  Bacterial polypeptide expressing nucleotide sequence isolated from the Sargasso Sea
caatcggaaagaaaacacctgtattagccaacctaaaaccctttggaaaacactatatgtctgagcttaatgcaaatggaggaattcagcccttaatgaaaactcttttagataaaggacttcttcatggtcaatgtatgacagttacaggcaataccttagaagaaaatttaaaagacataaaagcatataagacgagtgaaataattaaagattttaataatccaatcaaaaaagatagtcatcttagaattttatacggtaaccttgctaaagatggcgcggttgcaaaaattacaggtaaagaagggacatcttttgaaggaaaagcaaaagtatttaattcagaagaagagggcgtgagtgcgattttatcaaatcagattaatgatggtgatgtaatcgtaataaggtatgagggtccaaagggtgggcctggcatgagagaaatgctaaaacctacttctgcaatcatgggactaggactaggagataaaataggatttattacagacggaagattttcaggtggcacccatggttttgtagttggacatgtttctccagaagcagctgagggtggtttaatagcattagttgaagacggagatactatacttattgatgcagaaagtgatcagcttgttctaaaagttgatgatgatgaaattaaaagaagacaatcaatttggaaaaatccaaatagtaaaccaaaaaaaggagtacttgctaagtatgctgagagcgttaaatctgcaagcctgggagctataactgattaaa

SEQ ID NO: 285956 - DNA, 942 bp, Unknown
  Bacterial polypeptide expressing nucleotide sequence isolated from the Sargasso Sea
cgaattgactgtaagaggtcattgttatgatgcgttagtgggtatcgcaggttgtgataagtctttaccaggtttaatgatgtcaatggtaagattaaatgtaccaagtgtatttatttatggaggatccattctaccaggtacatacaaaggtaaagacgtgactgttgtagatgtttttgaagctgttggaaaacattcatctggtcaaatgtcagcaaaagaattgagaaaattagaattagttgcatgtcctacagctggagcttgcggtggtcaatttacagctaacactatggcatgtgtatcagaagcaattggtttagcattaccttattcagcaggaacacctgctccatatgaagaaagagacaagtatgcaaaagcaagcggaagaatggtaatggaattactagctaaaaaaattaaaccaagagacattgtaacaagaaaagctttagaaaatgctgcaacaattgttgctgcaactggtggctcaacaaatgcagctttgcatttaccagctattgcaaatgaagctggaattaaatttgatttaatggatgtggcaaaaatatttaaaagaaccccttatcttgcagatttaaaaccaggtggaaaatatgttgcaaaagatatgtggttagcaggtggagtaccaatgcttttaaaaacactttatgatggtggttatattcacggtgactgtatgacagttacaggaaaaacaatgaaagaaaatttaaaaggaattaaatttaatccaaagcaaaaagttttaagagcttataacagaccattgtcacctgatggaggtgttgtaggattaaaaggtaatttagctcctgaaggtgcaatagtaaaaattgcggggttaaagaaattacaatttactggaaaaagcagatgttttgataatgaagaaagcgcaatgaaagctgt

SEQ ID NO: 285957 - DNA, 901 bp, Unknown
  Bacterial polypeptide expressing nucleotide sequence isolated from the Sargasso Sea
tgttggtgtgtaagcacttggaatgaatcagctcctgcaacatttactcttcaagatcaagcgcaacatgtgaagacaggtgtcaaagatgcaggaggaacaccaagagaatttacaactataacagtaacagatggaattgctatgggtcatgaggcaatgaaatcctctcttattagcagagaggttattgcagactctattgaattatctgtaagaggtcactgttatgacgcaatagttggacttgctggctgtgataaatctttaccaggtttaatgatggctatggttagattaaatgtaccatctgtatttatttatggtggctcaatcttaccaggaaaatacaaaggcaaagatgttactgttattgatgtttttgaagcagtgggaaaacatgctgcaggaactatctcagatcaagatttaaaagatattgaacaagttgcctgtccatctgccggatcttgtggaggtcaatttacagcaaatacaatggcatgtatttcagaagcagttggtttagctcttacaaattcatcaatgccgccagcagtcaatactgaagaaagaaaagcatatggtgaaaagagtggtaaagctataatgaatttattagaaaaaaatataagaccaagagatatagtaactattgattcattagttaatgctgcaagagttgttgcagccactggaggctcaactaatgcagcacttcatcttcctgcgatagctaatgaagcaggtctaaaattcacattaagagacgttgtagaaatttataattcaactccttatatcggagacatgcaacctggtggaaagtatgttgctaaagatttgtatgacgtaggaggtgtaccagttgtcattaaatctttattggatggcggttaca

SEQ ID NO: 285958 - DNA, 577 bp, Unknown
  Bacterial polypeptide expressing nucleotide sequence isolated from the Sargasso Sea
agttgtaggcttgaaaggcaacttggcacctgatggagcgatagtaaaagttgcaggaatggaaaatcttaagttcaaaggcaaagcaatttgctttgactgcgaagaagatgcctttgaatgtgtaaaaaataataattacagcgaaggcgatgtatttgttattcgttacgaagggcccaaaggaggtccaggcatgagagaaatgttgtcaacaacagccgcaatatatggacaaggcatgggcgataaagtagcgcttataactgacggtcgctttagtggagcaacaagaggattttgcgttgggcatgtgtcgccagaagccgcagtttgtggaacaattgcattggttcaagatggcgacgaaataatattagatgctgaaataggagaaattcagctcaatgtgccagaaaatgttctggaagaaagaaaaagtaagtggaaagagagagtaactgatttcaactcgggaactctatggaaatactcaaagacagtagggtccgcctcatcgggagctgttacccatccaggagcaaaggaagaaacgcacacttacgccgatatttaa

SEQ ID NO: 285959 - DNA, 469 bp, Unknown
  Bacterial polypeptide expressing nucleotide sequence isolated from the Sargasso Sea
acgcttgaaggaacagcacgtgtatttgaatctgaagaagatgccttagaaaaaatactgaatggaaccgttataaaaggagacgttattgttattcgttatgaagggcctaaaggaggtccaggtatgcgagaaatgctatcaccaacctcggctgtaatgggaaaaggcttaggaaaagatgtagctttaattacagatggccgtttttctggtgggtctcatggctttgttgttggacatataaccccagaagcctacgaaggtggcctacttgccattgttcaagatggcgaccccatcatcattgatgcaacaacaaaagaaattaatttatgtattgatgaaaacgaaatcaaaaaacgtcaagcaacatggacgcaacccaaaccccgttatagaaaaggggtattagctaaatacgctaaatgcgttcagtcggcttctcttggagctattactgactaaa

SEQ ID NO: 285960 - DNA, 896 bp, Unknown
  Bacterial polypeptide expressing nucleotide sequence isolated from the Sargasso Sea
tccttgtacataaatttaatgaaacaagctcaatcagttaaaaaaggggttaaagcttcaggcggaactccaagagagttttgtactattacagtaactgatggtattgcgatgggtcatgaaggaatgaaatcgtcattaatatcaagagatgtgatagcagactcaaccgaacttacagttagaggacattgttatgatgcattagttggattagcaggctgtgataaatcattacctggtttaatgatgtcgatggttcgtttaaatattccaagcgtatttatatatggtggatcaattctccctgggagatttaatggaaaagatgtaactgttgtagatgtatttgaaggtgttggaaaatatacgtcaaaaaaaatgacagctcatgcattaagaaaattagaattaaaagcatgtccaagcgcaggtgcttgtggcggacaatttactgcaaacacaatggcatgtgtttctgaagcaataggattagctttacctttctcagcaggaacgccagcgccatatttagaaagaaataaatatgcaatagacagcggtaaagctgtaatgaatttattagcaaaaaatattagacctagagacatagtaacaagaaaagctttagaaaatgcagcaacaattgttgcagcaacaggtggatcaacaaatgcaggtttacacttaccagctatagcgaatgaaattggaattaaatttgatttaatggatgttgcaaaaatatttaagaaaactccttatcttgcagatttaaaacctggtggaaaatatgttgcaaaagatatgtgggaagcaggaggagttccaatgttattaaagacattaatggatggtggctacattcatggtgattgtatgacagttacaggtaa

SEQ ID NO: 285961 - DNA, 836 bp, Unknown
  Bacterial polypeptide expressing nucleotide sequence isolated from the Sargasso Sea
tactccaagagaattttgtacaattacagtaaccgacggtattgcaatggggcatgaaggaatgaaatcttcattaatttcaagagatgtaattgcagattcaactgaattaacagttagaggacattgttacgatgcattagttggtgttgctggttgtgataaatctttgccaggtctaatgatggcaatggtaaggttaaacgtaccaagtgtttttatctatggtggatcaattctaccaggaagattaaatggtaaagatataactgttgtagatgtttttgaaggtgttggaaagtattcttcagggaaaatatcagaacacgcactaagaaaaatagagttaaaagcatgtccaactgccggtgcttgtggtggtcagtttactgctaatacaatggcatgcgtatctgaagcaatgggattagctttgccttattctgctggaactccagctccattcaatagaagagataaatatgctttagctagtggaaaagcggtaatgaatttattagcaaaaaatattagaccaagagatattgtaacaaagaaagctttagaaaatgctgcaacaattgttgctgcaacaggaggatcaacaaatgctgctttacacttaccagctattgcaaatgaaattggtattaaatttgatttaatggatgttgctagaatatttaaaagaactccttatcttgcagatttaaaacctggtggaaaatatgttgcaaaagatatgtggaaagcaggtggagttcctatgttacttaaaacttttatggatggtggatatatacacggtaattgcatgacagttacaggcaaaacta

SEQ ID NO: 285962 - DNA, 653 bp, Unknown
  Bacterial polypeptide expressing nucleotide sequence isolated from the Sargasso Sea
ttgtttaactgtaactggaaaaactattaaagaaaatttaaaaaatgttgaatcttttgatttcaatcaagatataatcaggccaatagataatccaatcaaaacatcaggtcacatacgtatattgtacggaaatctagcatctgaaggttctgttgcaaagattactggtaaggaaggtgtagtatttaaaggaaaagcaaatgtatttaactgtgaagatgatgctaatgatgcaataaagagtaattcaataagtaagggtgatgtcatagtaataagatatgaggggcctgtgggtggtcctggtatgcctgagatgcttaaaccaacatcagcaattatgggtgctggcttaggaaatgatgtagcactaattactgacggtaggttttccggtggaacacatggatttgttgtcggtcatatttcaccagaagcagctaaaggtggggtactggctcttgtgaaaaacggagatgaaattgtgattgatgcagaaaaaaatgaaattaatgttaatattgataaaaaagaacttataattagaaaaaaactatgggttaagccagatttaaaatttaaatccggaattttgtataaatattctaaacttgtttcaagtgcatccagtggttgtgtaacagattaaa

SEQ ID NO: 285963 - DNA, 829 bp, Unknown
  Bacterial polypeptide expressing nucleotide sequence isolated from the Sargasso Sea
atcgaaaatgcgatcgccgttatcatggccaccggaggatcgacaaacgcagtccttcattttttagcgatagcaaacgcggcagaggttcgatggaacattgatgatttcgaacgagtaaggagaaaagtcccggtaatttgtgatctaaaaccatcaggacaatatgtcactaccgatttacataaggcaggcggcatacctaaagttatgaaaatcttatttgacgagggtctgatttatggtgattgtatgacagttaccggaaaaactgtagaggaaactctagtggacattgactcaaaaaatactgaggatcgcatcataagaaactttaatgaaccactttacaaagagggacatttggcgattttgaaaggtaatttagccgtcgatggttgtgtggccaaaatttctggagtaaagaatccttacatcgatggaccagctcgggttttcgactccgaagaactagctatggaagcaatcataaagcgacagataaaagccggagatgtggtcgtaattcgttatgagggcccaaaaggcgggccagggatgagagagatgttagcgcctacctcagccctagttggtcaaggtttgggagaaagcgttgcactgatcactgacggaaggttttcaggaggaacctggggaatggtggtgggccacatctgcccggaagcatatgtaggaggtaacattgcttttataaaggatggtgaccgcatagttattgacgcccatcagaaaactatcaacgtaaagttatcagaaaaagaaattgatgcgagaaaagtttattggcatcctccacaaaaaaaat

SEQ ID NO: 285964 - DNA, 787 bp, Unknown
  Bacterial polypeptide expressing nucleotide sequence isolated from the Sargasso Sea
aatgcctgattaccgctcgaaaacatccacccacggccgcaacatggccggtgcgcgcgcgctgtggcgtgccacggggatgaaagatgacgacttcaaaaagccgatcatcgcgattgccaactcgttcacccagttcgtgcctggccatgtccacctcaaggacctgggccaactggtcgcccgcgagatcgaacgcgccggtggcgtggcaaaggaattcaacaccattgccgtggatgacggcatcgccatgggtcatgacggcatgctgtattccctgccgagccgcgagatcatcgccgactccgtggagtacatggtcaacgcccactgcgccgacgccatcgtgtgcatttccaactgcgacaagatcacccccggcatgttgatggctgccttgcgcctgaacatcccggtgatcttcgtctccggcggcccgatggaagccggcaagaccaagctcgcctcccacggcctcgacctggtcgacgccatggtgatcgccgccgattccagcgcttctgacgagaaggtcgcggaatacgagcgcagcgcctgcccgacctgcggttcgtgctccggcatgttcaccgccaactcgatgaactgcctggtggaagccctgggtctcgccttgccgggcaacggttccacactggccactcacggcgaccgcgagcagttgttcctgcaggccggccgcaccatcgtcgagctgtgcaagcgttactacggcgagaacgatgagtcggtgttgccgcgcaatatcgccaactttcagggc

SEQ ID NO: 285965 - DNA, 646 bp, Unknown
  Bacterial polypeptide expressing nucleotide sequence isolated from the Sargasso Sea
atgaataaacttagatcatctgcaataacccaaggtgtgcaaagatcccctaacagatcgatgttaagagctgttggatttaatgatgaagattttaataaacctattattggaattgcgaatggatacagcaccataacaccatgcaatataggtttaaataagctagctctcaaagctgaagagtcagtaaaaagatcaggtgggatgcctcagatgtttggaactataacagtaagtgacggcatttctatgggaacagagggcatgaaatattccctagtttcaagagaagttattgctgattcaattgaaacagcatgcaatgctcagagcatggatggagtgcttgctataggtggatgtgataaaaatatgcctggtgccatgatagcgattgcaagaatgaatattccctcaattttcatttatggcgggacaataaaacctggaaagttacatggagaagatcttactgttgttagtgcatttgaagctgttgggcaattaacatcaggcaaaattaatgaggaaaggctaatccaagttgagaaaaattgtattcctggtgctggtagttgtggagggatgtttacagctaatacaatgtctgcagttattgaagtattggggttaagtcttcctc

SEQ ID NO: 285966 - DNA, 843 bp, Unknown
  Bacterial polypeptide expressing nucleotide sequence isolated from the Sargasso Sea
atgctggccatggcacggatgaatattccgtcggtcttcgtctacggcggcacgatcaagcccggcaagcttggcggctgtgatctcacggtggtgagcgcttttgaagccgtcggccagctgaccagcggcaaaatcgatgaagcgcagctcaccgcggttgagaaaaatgcctgcccgggtgctggaagttgcggcggcatgttcaccgccaacacgatgagtgccgccatcgaaacaatggggctcagcctcccctacagctccacgatggcagcggaggacgaggaaaaagccgacagtgcagcacgctccgctgaggtgctggtcgaggcggtgaaagccaatattcgccccctcgatctgctcaccaaagaagcgtttgaaaacgccatcagcgtgatcatggcggtaggtggctccaccaatgcggtgctccacctgctagccattgcccgcactgccggcgtcgacctgagcatcgacgacttcgagcgaatccgtcagcgggtgccggtgatctgcgatctcaagcccagcggtcgctacgtaaccgttgatctgcacaatgccggcggtatcccccaggtgatgaagcttttgctcgatgccggattactccacggtaactgtcgcacggtggaagggaaaagcctgaaggagcttctggcggacgttccaggagaaccacccaccgggcaagacgtgatccgtccactaagcgaccccatgtacgccaagggacatctggcgatccttaagggcaacctggcgatagaaggcagtgtggccaagatcagcggtgtaaaaacgcctgtgctcactgggccggcccgggttttc

SEQ ID NO: 285967 - DNA, 637 bp, Unknown
  Bacterial polypeptide expressing nucleotide sequence isolated from the Sargasso Sea
accatctcagaatacttacaaaatattccagataagcctccatcaaatcaaaatgtcataagagacattgatgaccctctttataaaaaaggacatctagcgatattaaaaggtaacttagcgagcgaaggttctgtagccaaaattagcggagtaaaaaaccctgtattaacaggtcccgcaaaaatttttgaaagtgaagaagaatgtttaaaatcgatattaaataatgatattaaagctggtgatgttgttgttattagaaacgaaggccctgtaggaggcccaggcatgagagaaatgttagctccaacatctgcgattgttggtcaagggctaggagagaaggtggctttaattaccgatggcagatttagcggtggtacttatggtcttgttgtgggtcacatagctccagaggctgctgtaggaggaaatattgctctaataaaacaaggtgatttaattacggtagatgctgtaaaacaactaattgaagttgatttatctgacgaagaattagaaaaaagaaaaaaagattgggtaaaacctactcaaaaatacaaaagaggaattctttcaaaatattcgagaatcgtaagcacatcaagtttaggggctgttactgatttataaa

SEQ ID NO: 285968 - DNA, 922 bp, Unknown
  Bacterial polypeptide expressing nucleotide sequence isolated from the Sargasso Sea
atctgtaacgataaagggtatataatggctaaatttaataaaaagaaacttccaagtagacatacatcattaggaccagatagagcaccgcatagatctttttattatgcaatgggtgaaactgaaaaagatgtagcaaaaccctttgttggagtagtttcaacttggaatgaggcagcaccttgcaacattgcattaatgagacaagcacaatcagtaaaaaaaggtgttagagcaaatggtgggacaccaagagaattttgtacaattactgtaacagatggtatcgcaatgggtcatgaagggatgaaatcttcattgatatcaagagaagtaatcgctgattcagcagaacttacagttagaggtcattgttatgatgctttagtaggtattgcaggatgtgataaatctttacccggtctaatgatgtcaatggttagacttaatgttccaagtgtatttatttatgggggatctattcttccaggaacttataaaggtaaagatgtaacagtcgttgatgtatttgaagctgttggaaaacattcatcaggtcaaatgtctgcttctgaacttagaaaattagaattagttgcttgtccaagtgcaggtgcatgtggtggtcaatttactgcaaacacaatggcatgtgtatctgaagctataggtttagcattaccttattcagctggaacaccagctccatatgaagaaagagataaatatgcaaaagctagcggtaaaatggttatgaaccttttacagaaaaaaataaaaccaagagatattgttacaagaaaagctttagaaaacgctgcaacaattgttgctgcaacaggtggatctaccaatgcaggtttgcatttaccagctattgcaaatgaagcaggaattaaatttgacttaatggatgtgcaaa

SEQ ID NO: 285969 - DNA, 925 bp, Unknown
  Bacterial polypeptide expressing nucleotide sequence isolated from the Sargasso Sea
gtttaatacaattggtgtcgatgatggaattgctatgggtcacattggcatgcgctattctttagctagccgtgaactcatcgcagacagtgtcgaaacagtagctgaatcacatcgtttggatggtttggtatgtatttctaattgtgataaaattgttccgggtatgcttatggccgctttgcgagtcaatattccgaccatatttgtttctggtggacctatgaaagcaggcgttaaccagcagggtcaaaaggtagatctaatttctgtatttgaaggtgtgggaaaattcaaagctggtagtattgatgaaatagcattaaatgatctggaaaaaaatggttgtcccacctgcggttcctgctctggtatgtttacagcaaattcaatgaattgtcttatggaagcactgggacttgcactgccaggtaatggaaccattttggccgtggaccccgctcggttagacctggtagataaaacagggaaagcgattatggatctagtaaagaataatttaaagccccgtgatattgtgaaccagaaaacaatcctaaacgcatttgcgcttgatatggccatgggtggcagcaccaatactgtcctacatactctggcagcagcaattgaagccggattgaatttcaatttagaggaattgaattctctcagccgcaaaacaccatatctctgcaaggttagtccggcaactccagatgtacatatggaagatgtgtttgatgcgggtggtatctcagttattctcaaagaattatctaaaaaggagggcttactcgatctaaatcgtcccactgtttcaggtcaaacattgggggaaaatattgcgaatgctagaaataataattctaaggttattcggtctgttgataatccattttccgaagaaggtggactagcagtg

SEQ ID NO: 285970 - DNA, 1072 bp, Unknown
  Bacterial polypeptide expressing nucleotide sequence isolated from the Sargasso Sea
atgcatgcccaggttcggggtgcgtgcggtgggatgtataccgcaaacacgatggcaacagccattgaagcgatggggatggcgcttccagatacggcatctataccagctgaagatgaagcaaaaatcgctgagtgccgtcgagctggtgctgcactgcttcatctgttggaactggacatcaagccgcgggacatcatgactagggcagccttcgagaacgccatggtcgttatcatggcgctaggtggttcaacaaatgctgtgcttcatctgattgcgatggctcggagtgttggtgtcacacttgagcccgatgactttcaggcagtctcgcggcgtattccctaccttgctgacttgaaaccaagtggaaagttcgtccaggaggatctgcattcgattggtggcacgagtggcctcatgaaatatctccttgacaagggccttcttgaaggagactgccttacggtgactggaaaaaccttggctgaaaatcttgctggcagtaaaggtttggctgagggtcaaaggattattcaaccggttgaagatcctattaaaccaactggtcacataacgatacttactggcaatcttgctcctgggactgctgttgcgaagattaccggaaaggagggatctcggttctctggcccggcaagagtattcgatagtgaggaggatatgctgacggcgttagagaacggtggtattcaccgtggagacgtggttattattcgctacgaaggcccgaagggaggtcccggaatgcctgagatgttaacgccgacatcggcgttaatgggagctggtttgggggccgatgtcgcactaattaccgatggcagattttctggtgggtcgcatggctttattgttggtcacgttgtaccagaagcgtttgacggggggccaattgctcttgttgagaacggtgatgtcatcaccattgatgctgagaaggcagccatcgacgtagatgtgagtgcgactgaacttgcggaccgaaagagtcgttggcaacaaccttctccaaaatctgaccgcggaatctggcaaaatatattcg

SEQ ID NO: 285971 - DNA, 908 bp, Unknown
  Bacterial polypeptide expressing nucleotide sequence isolated from the Sargasso Sea
gatgactgaagaagatgttagagagttggaatgtgttgcttgtccttcagctggctcttgtggaggccaatttactgcaaataccatggctacagtatcagaagctattggtttagcaattcctggttcagctggtgctccagcaccatatgagtcaagagatgaatatgcatacaaatcgggtatagaagtaatgaatcttgttgagaataatctcaggcctagagatatagtaactattaaatctttagagaatgctgcaacagtagttgccgcttctggaggttctacaaatgctgctttacacttacctgcaattgcaaatgaagctggtatagattttgaccttcatgatgtagctaaaatttttaagaagactccttatattgcagatttaaaaccaggaggaaaatatgtagctaaggatatgtttgaagttggtggtgttccaattttaatgaaaactttgttagatggagggtatttacatggagattgtattacagtaaccggaaagacaattgaagaaaatttgaagggtgtagtttttccaaataatcaagatgttatttatccagttagtaaaccaatatcccctacagggggagtagtaggattaaaaggtaatttagcacctaaaggagcaattgtaaaagtagcaggaatgcgaaacttaatctttactggaccagcgagagtttttgattctgaggatgattgttttcaagcagttcaagaaaaaaaatataaattaggagaggtattagtaattagatatgaggggccaaagggtggtccggggatgcgtgaaatgcttgcaacaactgcagccttatatggacaaggtgttggtgaggaagttgcactaataaccgatggaaggttttctggaggtactagaggtttct

SEQ ID NO: 285972 - DNA, 745 bp, Unknown
  Bacterial polypeptide expressing nucleotide sequence isolated from the Sargasso Sea
gggatccgtcagcgcgtgccggtgatctgtgacctcaagccgagcggccgctacgtgacggtggatctccacaacgctggcgggatcccccaggtgatgaaactgctgctcgacgctgggctgctgcatggcgattgccgcaccgttgagggcaaaagcctgcgtgaggtgctggcggatgtgccctctgtgccaccggcggatcaagacgtgatccgtccactgagcaatcccctttacgccaaaggccacctggcgatcctcaagggcaacctggccagtgagggcagtgtcgccaagatcagcggcgtcaagacgccggtgctcactggccccgcccgggtgtttgagagcgaggaagactgccttgccgccatccttgatcaacggatcaaggccggcgatgtggtggtagtgcgcaacgaggggcctgtgggcggtccgggcatgcgcgaaatgctggctcccacctccgccatcgtcgggcaaggcctgggcgacaaggtggctctgatcaccgatggccgcttcagcggcggcacctatggcctggtggtcggtcacgttgcccccgaagccgctgtcggcggaaccatcggcctggtgcaggaaggcgacagcatcaccgtggatgctgaccagttgctgctgcaactcaacgtggatgaggctgaactcgctcgacgccgggaagcctggagcaagccggaaccccgctaccgcactgggattctgggcaagtacg

SEQ ID NO: 285973 - DNA, 948 bp, Unknown
  Bacterial polypeptide expressing nucleotide sequence isolated from the Sargasso Sea
tatgcttatgggagaaactgagaaagatgtatcaaaaccctttgttggtgtggtttccacatggaatgaggcagctccttgcaatattgccctaatgagacaagctcaatcagttaaaaaaggagttagagctaatggtggaactccaagagaattttgcacaattaccgttactgatggtatcgcaatgggtcatgaaggaatgaaatcttcattgatatctagagaagtaattgcagactcagcagaacttactgtcagaggtcactgttatgatgcattagtagggattgcgggatgtgataaatcattaccaggtctaatgatgtctatggttagattaaatgtaccaagtgtatttatatatggcggatcaatccttccaggtaaatataaaggaaaagacgtaacagttgtagatgtatttgaggcggttggaaaacattcaacaggtcaaatgtctgctgcagaacttagaaaattagaattagttgcttgtcctagtgcaggtgcttgtggaggacaattcacagcaaatacaatggcatgtgtatctgaagcaattgggttagcattaccttattcagcaggaacaccagcaccatatgaagaaagagataaatacgcaaaagctagtggtaaaacggttatgaaccttttgaaaaaaggaattaaaccaagagatatagttactagaaaagcattagaaaatgctgcaacagttgttgctgcaactggtggatcaacaaatgcaggattacatttacctgctattgcgaacgaagcaggaattaaatttgacttaatggatgttgctaaaattttcaaaagaacaccttatcttgcagatttaaaaccaggtggaaaatatgttgcaaaagatatgtgggtagcaggtggtgttcaaatgttattaaaaactttgtatgaaggtggatatattcatgg

SEQ ID NO: 285974 - DNA, 775 bp, Unknown
  Bacterial polypeptide expressing nucleotide sequence isolated from the Sargasso Sea
gatgaactccttttttggcaatttaaaaccaagtggaaaatatttaatggaagatcttcatgaaattggtggagtcccagctgttatgaagtttatgatggataatggtttactacatgaagattgtttaactgtaactggaaaaactattaaagaaaatttaaaaaatattgaatcttttgatttcaatcaagatataatcaggccaatagataatccaatcaaagcatcaggtcacatacgtatattgtacggaaatctagcatctgaaggttctgttgcaaagattactggaaaggaaggtctagtatttaaaggaaaagcaaatgtatttaattgtgaagatgatgctaatgatgcaataaagagtaattcaataagtaagggtgatgttatagtaataagatatgaggggcctgtgggtggtcctggtatgcctgagatgcttaaaccaacatcagcaattatgggtgctggcttaggaaatgatgtagcactaattactgacggtaggttttccgggggaacacatggatttgttgttggtcatatttcaccagaagcagctaaaggtggggtactggctcttgtgaaaaacggggatgaaattgttattgatgcagaaaaaaatgaaattaatgttaatattaacaaaaaagaacttgaaattagaaaaaaactatgggttaagccagatttaaaatttaaatccggaattttgtataaatattctaaacttgtttcaagtgcatccagtggttgtgtaacagattaa

SEQ ID NO: 285975 - DNA, 660 bp, Unknown
  Bacterial polypeptide expressing nucleotide sequence isolated from the Sargasso Sea
gagattgtcttacggtgacagggaaaaccctggcagagaatctggcaggtagtaaggggctggctgagggccagaaaataattcaaccggtcgaaaacccaatcaagccaactgggcacataactattttgactggcaaccttgcccctggtaccgctgtagcgaaaatcactggaaaagaaggttcgcgtttctcaggtccggcaaaagtattcgacagtgaagaagagatgctcgctgctttggaaagcggtggtatccatcgtggggatgtcgtcatcattcgctatgaaggcccgaaaggtgggccgggaatgccggagatgttaacgccgacgtcggctttgatgggcgctggcctgggtgccgatgtggcccttattaccgatggcagattttcgggcggatcacacggatttattgttgggcatgttgtccctgaagcgtttgatggtgggccgattgcacttgttcatgatggtgacgtcatcacaatggacgcggagaaggcgacaattgacgtcgatgtgagtgaggttgagcttgcggagcgaaagagccgttgggagcagccaaaccccaaatgtgatcgtggaatcttggcaaaatatattcgatgtgttgcgccagcctcacagggatgtgttactgacgaatagc

SEQ ID NO: 285976 - DNA, 814 bp, Unknown
  Bacterial polypeptide expressing nucleotide sequence isolated from the Sargasso Sea
tgccgcagtagttgttgctgcatctggaggatctacgaatgctgctttacatcttcccgcgattgcaaatgaagcaggaattaagtttacattagaagatgttactaatatttccaaaaagactccatacattgctgatctcaagccaggaggaaaatatgtagcaaaagatctttatgaaataggaggagttcctgtattaataaaagcattattggatggaggttttttgcatgaagattgtatgacagtttctggaaaaactattgctgaaaatcacaaacatgttgtttttccaaccaatcaaacagttatatacaaaacttctaaacctttaagtccaagagggggatttgttggattgaaaggaaatttagctcccgaaggagcaattgtaaaagttgctggaatgaaaagaagaaaatttattggaaaagcaaaatgttttgatggtgaacctgcagctttagatgctgttcttaatagaaagattaaatcaggtgatgttattgtaattcgatacgaagggccaagaggaagcccaggtatgccagaaatgttatctacgacaggagcaatatacggacaaggtcttggtgaagaagtagctttaattacagatggtcgtttttctggaggaacgcatggtttttcaatcggacatgttggcccagaggcagcatcaggaggaccaatagccttaattaaaaatggtgatgttattgagattgatgcagataaaggctctttaaaagttaatttatctaaagcggagtttaatcagaggaagaaaaaatggaaaccaaaaaaatag

SEQ ID NO: 285977 - DNA, 744 bp, Unknown
  Bacterial polypeptide expressing nucleotide sequence isolated from the Sargasso Sea
gatggaaaaagttgcttgccccggagaaggtgcatgttcaggaatgtttacagctaatacaatggcatcagctatagaagctatgggaatggctatacctggggcgtcatctatacctgcagttgatcccagaaatgaagaagtagcacttaaatctggagagtatttgttagatttgttaaaaaatgatataaaaccccgagacattatgacaaaaaatgcttttgaaaatgctataacagctgttttagctatgggtggatcaactaatgcagttttacatttattagcaatggcgcatgaatctgaggttgatttagatattgaagattttaatagattaagtgataagactccttatataactgatcttaggccaggtgggaaatatgttatgagtgatgttgataaatccggaggagtgccagttattctgaaagaattacttgatgccgggttacttcatggtgatgaattgacaataaccggtaaaactatggccgaaaatttatctgaggtaaccactaagccagatagtaaagttatttatcctcatacatctccaagaagtgatactggcggtctaattatacttaaaggtaatctagctccagaaggcgctgtatttaaggttgcagggacaaaacatgtagaacataaaggaccagcaaaagtatacaatggagaaagagaagcatttaatgcaatcacttcaggtgaagttgtcgatggagatgttgttat

SEQ ID NO: 285978 - DNA, 451 bp, Unknown
  Bacterial polypeptide expressing nucleotide sequence isolated from the Sargasso Sea
aaaaatagaaaatataaagacggtgatattataattattagatatgaaggtccaaaaggtggacctggtatgagggaaatgcttcaaacaactggagcaatttatggtcaaggtaaaggagaaaaagttgcacttataacagatggaagattttctggggctacaagaggtttttgtattggacatgttggaccagaagcatcagtaggtggaccaatagctttacttagaaacggagacataattgatttagatgcgaagaaggggacaattaatgttcgtttaactaaaaaagaattagctaagagaagaaagaaatggaaaccaaagaaaattaactttggaaatggaacactttggaaatatgcacaaactgttggaccagcctatttaggcgctccaactcatccaggtggtaaaaacgaagtaaaaacttacgcagatatttaat

SEQ ID NO: 285979 - DNA, 897 bp, Unknown
  Bacterial polypeptide expressing nucleotide sequence isolated from the Sargasso Sea
taccgttactgacggtattgcaatggggcatgaaggaatgaagtcttcattgatatctagagaagtaatcgctgactcagcagaacttactgtcagaggtcactgttatgatgctttagttggtattgctggatgtgataaatctttaccaggtctaatgatgtctatggttagattaaatgtaccaagtgtatttatatatggtggatcaatccttccaggcaaatataaaggaaaagacgtaacagttgtggatgtatttgaggcagttggaaaacattcaacaggtcaaatgtctgctgcagaacttagaaaattagaattagttgcatgcccaagtgcaggtgcttgtggagggcaatttactgcaaatactatggcatgtgtatctgaagcaattggattagcacttccttattcagcaggaacaccagctccatatgaagaaagagataaatacgcaaaagctagtggtaaaacggttatgaacctcttgaaaaaaggaattaaacctagagatattgttacaagaaaagctttagaaaatgctgcaacagttgttgctgcaactggtggttctacaaatgcaggattgcatttacctgctattgctaatgaagctggaataaaatttgatttaatggacgttgctaaaattttcaaaagaacaccttatcttgcagatttaaaaccaggcggaaaatatgttgctaaagatatgtggttagcgggtggtgttccaatgttattaaaaactttatatgaaggtggatatattcatggtgactgcatgacagttactggaaaaacaataaagggaaatttaaaaggaattaaatttaatccaaaacaaaaagtaatgagatcttataaaaatccgttatcaccaacaggagg

SEQ ID NO: 285980 - DNA, 793 bp, Unknown
  Bacterial polypeptide expressing nucleotide sequence isolated from the Sargasso Sea
agtaggtattgcaggttgtgataaatctttaccaggtttaatgatgtcaatggttagattaaacgtaccaagtgtttttatttatggaggatcaatacttccaggtaaatataaaggtaaagatgtaactgttgttgatgtttttgaggctgttggaaaacattcatcaggtcaaatgtctgcagaagaattaagaaaattggagttagtcgcatgtcctacagctggagcttgtggtggccaatttactgcaaatacaatggcctgtgtatcagaggctatcggtttagctttaccttattcagcaggaacacctgcaccatatgaagaaagagataaatatgcaaaagcaagtggtagaatggtaatggaattattagctaaaagaattaaaccaagagatattgtaacaagaaaatcattagaaaacgcagcaactatagttgctgcgacaggcggctcaactaatgcagccttacacttgccagcaattgcaaatgaagcaggaattaaatttgatttaatggatgttgcaaaaatttttaaaaaaacaccttatcttgcagatttaaaaccaggtggaaaatatgttgccaaagatatgtggttggcaggtggtgtaccaatgctgctgaagactctttctgacggtggttacattcatggagactgcatgacagtcacaggtaagacaatgaaagaaaatcttaaaggaattaaatttaatccaaaacaaaaagttttaagagcttataataaacccctatcaccagatggtggtgttgtaggacta

SEQ ID NO: 285981 - DNA, 598 bp, Unknown
  Bacterial polypeptide expressing nucleotide sequence isolated from the Sargasso Sea
cctttatcaccagatggaggtgttgttggaatgaaaggaaacttagcaccagaaggagctattgttaaagttgcaggattaaaaagattacaatttacaggtcgagcaagatgttttgatactgaagaggcagcttataaagctgttaaaaatagaaagtataaggatggtgatattataattattagatatgaaggacctaagggtggtcctggtatgagagaaatgcttcaaacaacaggagcaatttacggtcaaggcaaaggtgaaaaagttgcacttataacagatggaagattttctggagctacaagaggattttgtataggtcatgttggtcctgaggcatctgtaggtggtccgatagccttattaagaaatggtgacataattgatttggatgcaaaaaaaggaactataaatgtaagattatccaaaaaagaattagctaagagaagaaagaaatggaaaccaaagaaaattaactttggaaatggaacactttggaaatatgcacaaactgttggtccagcttatttaggcgctccaacacatccaggtggtaaaaacgaagtaaaaacttacgcagatatttaat

SEQ ID NO: 285982 - DNA, 786 bp, Unknown
  Bacterial polypeptide expressing nucleotide sequence isolated from the Sargasso Sea
gttagcgatgctgatactgatgaaattgagcgctctgcctgccctacctgcggctcatgttcagggatgttcactgcgaactccatgaactgtctaaccgaagcgttaggtttatccttgccgggcaacggctctatgctggctacccacgccgaccgtgaaggcttgtttaagcaggccggaaagcagattgttgagctttgtaagcgttactacggcgatgatgatgaaagcgtattgccacgcaatatcgccaactttaaagctttcgaaaacgccatgagcctagacattgctatgggcggctcaaccaatactattctgcatttgctagcagcagcaatggaaggtgaagtgcctttcactatggatgatatcgaccgtttgtctcgcaaagtgcctcacctttgtaaagtggcgccttctacgccgaaatatcacatggaagatgtacaccgagcgggtggcgttttaggtatcttaaacgaacttaataaagcgggtttgctgaacaccgatgttaaccatgttttaggtaaaccgcttactgacgttattagcgagtgggatatcactaatccagaaaataaagacgcaattactttctatcgtgcgggccctgcgggtattcgtacaactaaagcctttagccaagattgtcgctgggatgaagctgatgatgaccgcgaaaacggctgtatccgttccatcgagaatgcgtttagccaagaaggcggcctagcggtgctttatggcaacttagcagaagatggctgtattgttaaa

SEQ ID NO: 285983 - DNA, 190 bp, Unknown
  Bacterial polypeptide expressing nucleotide sequence isolated from the Sargasso Sea
acgcaaagcacaagggatgcctttgacatttggaacaattacagtttcagacggaatttcaatgggtaccgaagggatgaaatattcgcttgtttctcgtgaagtgattgctgattcgattgaaacggtagtaggatgtcaaagctatgacggaatagttaccattggcggttgcgataaaaatatgcct

SEQ ID NO: 285984 - DNA, 847 bp, Unknown
  Bacterial polypeptide expressing nucleotide sequence isolated from the Sargasso Sea
tgtaaattcatcaggaggtactcctagagaattttgtacaataactgttactgatggtattgctatgggtcatgaaggaatgaaatcctcattgatttcaagagatgtaattgcagactctactgaattaaccgtaagaggtcattgttatgatgctttagttggtttagctggatgtgataaatccttaccaggtcttatgatgtctatggtgagattaaatattcctagtgtatttatttatggtggatcaatacttccaggtagatttgaaggtaaagatgtaactgttgttgatgtttttgaaggtgttggaaaatatacatcaaaaaaaatgacagctcatgctcttagaaaattagaattaaaagcttgcccaagtgcaggtgcttgtggtggtcaatttactgcaaacacgatggcatgtgtttcagaagcaattggattagctttaccatattcagcaggaactcccgctccttacaaagagagacataagtatgccattaatagcggtaaagcggtgatgaaacttttagaaaaaaatattagaccaagagatattgttacaagaaaagcattagaaaatgctgcaacagttgttgctgcaacaggaggatctactaatgcaggtttacatttaccagcaattgcaaatgaaattggtattaaatttgatttaatggatgttgctaaaatttttaaaagaactccttatcttgctgatttaaaacctggtggaaaatatgttgctaaagacatgtgggaagcaggtggggttccaatgcttttaaaaactctttacgatggtggatatatacatggagattgtatgactgttacagga

SEQ ID NO: 285985 - DNA, 799 bp, Unknown
  Bacterial polypeptide expressing nucleotide sequence isolated from the Sargasso Sea
agagatgttatagcagactcaactgaactaacagtaagaggtcattgttatgatgctttagttggtttagctggatgtgataagtcactacctggattaatgatgtcgatggttagattaaacataccaagtgtttttatatatggtggatcaattcttccaggaagatttaatggaaaagatgtaactgtggttgatgtttttgagggggttggaaaatatacttcaaaaaaaatgactgctcatgcattaagaaaattagaattaaaagcttgtccatctgcaggtgcgtgtggtggtcaatttactgcaaatacaatggcatgtgtatcagaagcgattggacttgcattaccatattcagcaggaacaccagcgccttataaagaaagagataaatatgctgtagatagtggtaaagctgtaatgaatttattagcgaaaaatattagaccaagagatattgtaacaagaaagtctttagaaaatgctgcaacgattgttgctgcaactggtggatctactaatgctggattacatttaccagcaatagcaaatgaaattggaattaaatttgatttgatggatgttgcaaaaatttttaaaaaaactccttatcttgcagatttaaaaccaggtggaaaatatgttgcaaaagatatgtggttagcaggtggtgtaccaatgttattaaaaactttatacgatggtggttttatacatggtgactgtatgactgttactgggaaaacaatgaaagaaaatttaaaaaatgttaaatttaatccaaatcaaaaag

SEQ ID NO: 285986 - DNA, 961 bp, Unknown
  Bacterial polypeptide expressing nucleotide sequence isolated from the Sargasso Sea
aaaaagaaacttccaagcagacatacatcactaggtgcagatagagctccacatagatcgttttattatgctatgggagaaactgagaaagatgtagcaaagccctttgttggtgtcgtttccacatggaatgaggcagctccttgtaatattgccctaatgagacaagctcagtcagttaaaaaaggagttagagctaatggtggaactccaagagaattttgtaccattactgtaactgacggtatcgcaatggggcatgaaggaatgaagtcttcattgatatccagagaagtaattgcagactcagctgaactgacagttagaggtcattgttatgatgctttagttggtattgcaggatgtgataaatctttaccaggtctaatgatgtctatggttagattaaatgtaccaagtgtatttatatatggcggatcaattctcccaggtagatataaaggaaaagacgtaacagtagtagatgtatttgaagcggttggtaaacattcatctggccaaatgtcagcagcagaacttagaaaattagaattagttgcttgtccaagtgcaggtgcttgcggaggtcaatttacagcaaatacaatggcatgtgtgtctgaagctataggattagctttaccttattcagccggaacaccagctccatatgaagaaagagataaatacgcaaaagctagcggtaaaatggttatgaaccttttgaaaaaaggaattaaaccaagagacattgtaactaaaaaagctttagaaaatgctgcaacagttgttgctgcaactggtggatccactaatgcaggattacatttacctgctattgcaaatgaagcaggaattaaatttgatttaatggatgttgctaaaatttttaaaagaacaccttatcttgcagatttaaaacccaggaggaaaaatatgttgcaaaagatatatgtggtta

SEQ ID NO: 285987 - DNA, 607 bp, Unknown
  Bacterial polypeptide expressing nucleotide sequence isolated from the Sargasso Sea
gaacacgcttatagcgctgacggtggcttggctgttctctacggcaatttggctgaggatgggtgtgtcgtcaaaacagccggagtggacgaagcaaatctggtctttacaggaagagcacatgttgtcgagagccaagatgaagctgtcgaccatattttaaatgacaaagtcactgaggggtccgtagtagtcgttcgatacgaaggtcctagaggggggcctggaatgcaagaaatgttgtacccaacgtcgtatctcaaatcaaaaggccttggcaaagcgtgcgcgcttctgactgacgggcgcttttcaggtggcacctctggtctttcaattgggcacgtctcgcctgaagctgccgctggaggaacaatcggcctggttcgagatggcgacattatccagatagatatcccgaaccgctcgattcatcttcaggtcgacgacgaccttctcgctgagagaagaaagtttcaggacgagttgggttggaaaccagaaatgcaacgcccacgaaaggtgtccgctgctcttaaggcgtacggcttgatggcgactagtgccgacaagggcgcagtccgcgatttaagcgcattcttataag

SEQ ID NO: 285988 - DNA, 814 bp, Unknown
  Bacterial polypeptide expressing nucleotide sequence isolated from the Sargasso Sea
atgcggaaatattcttctcaaatagttgatggaaaggacagatcacccagcaggtcaatgcttagagcagttggctttaaagataaagattttaagttacctcaaattggtgttgcttccacgtggagcatggtaactccatgtaatatgcatatagatgagttagcaaaattatctgcaaaagcattagataaaaatggtggtaaatctattatattcaatacaatcactatatctgatggtatatctatgggcactgaaggtatgaaatattctctagtctctcgtgaagttatagctgactcaattgaaactgtcatggggtgtgagggtctagatggtttaatcgctattggtggttgtgataaaaatatgcctgcatgtataatagcaatggcaagactaaacagaccctcgatttttatttatggagggacaattttaccaggtgttcataaatctaaaaaaattgatatcgtatcagtatttgaggctgttggtaaaaatgcaaataatgaaatatcaaatcaagagttaacacaaattgaaaaaaaagctatccctggtcctggatcatgtggaggcatgtatacagcaaatactatggcttgtgcgatagaagcgctagggatgagtctaactaatagctcagctcaagcagctatatcatctgaaaaaaaaatagattgccgagaatctgccaaagcactaatgcgatgtgttagaaaggatataaagcctagagacatcattaataaaaagtctattgaaaatgccataacagtagttatggctcttggaggctccacaaatg

SEQ ID NO: 285989 - DNA, 585 bp, Unknown
  Bacterial polypeptide expressing nucleotide sequence isolated from the Sargasso Sea
atgtcataagagacatagatgaccctctttataaaaaaggacatctagcgatattaaaaggtaacttagcgagagaaggttctgtagccaaaattagcggagtaaaaaaccctgtattaacaggtcctgcaaagatttttgaaagtgaagaggattgtttaaaatcgatactaaataacgatatcaaagctggtgatgttgttgttattagaaacgaaggtcctgtaggaggtccaggcatgagagaaatgctagctccaacatctgcgattgttggtcaagggttaggagagaaggtggctttaattaccgatggcagatttagcgggggtacctatggtcttgttgtgggtcacattgctccagaggctgctgtaggaggaaatattgctctaataaaacaaggtgatttaattacagtagatgctgtaaaacaactaattgaagttgatttatctgacgaagaattagaaaaaagaaaaaaagattgggtaaaacctattcaaaaatacaaaagaggaattctttcaaaatattcgagaatagtaagcacatcaagtttaggggctgttactgatttataaa

SEQ ID NO: 285990 - DNA, 792 bp, Unknown
  Bacterial polypeptide expressing nucleotide sequence isolated from the Sargasso Sea
tgctgtggatgatggtatcgccatggggcacggtggcatgctgtattcactgccgtcccgcgagctgattgctgactccgttgagtacatggttaacgcccactgcgccgatgcgatggtctgcatctctaactgcgacaaaatcactcctgggatgttaatggcctctttgcgcctgaatattccggtgatctttgtttccggcggtccgatggaagccgggaaaaccaagctctctgaccaaattattaagctcgacttggttgatgccatgattcagggcgctgacccgaaagtatctgactcgcagagcgagcaggtagaacgttctgcttgcccaacctgcggctcctgctccggcatgttcaccgccaactcgatgaactgcctgaccgaagcgctgggcctgtcgcagccgggtaacggttcgctgttggcgactcacgccgaccgtaaaacgctgttccttaacgcgggtaaacgcatcgtcgagctgaccaaacgctattacgagcaggatgatgactccgccctgccgcgcaacattgccagcaaggcggcgtttgagaatgccatgacgctggatatcgccatgggcggctccaccaacaccgttctgcacctgctggcagccgcacaggaagcagaaatcgacttcaccatgagtgatatcgacaagctgtcccgcaaagtcccacagctgtgtaaagtggcgccgagcacgcagaaataccatatggaagatgtgcaccgcgcaggcggcgtactgggtattttaggcgaactggatcg

SEQ ID NO: 285991 - DNA, 667 bp, Unknown
  Bacterial polypeptide expressing nucleotide sequence isolated from the Sargasso Sea
catgggtgaatgtaaaaacattgaaggcaaaaccatctcagaatacttacagaatgttccagataagcctccaacaaatcaaaatgttataagagccatagatgaccctatttataaaaaaggacatctagcaattttaaaaggaaacttagcaagcgaaggttctgtagcaaaaattagcggagtaaaaaacccagtattaacaggaccagcaaagatttttgaaagtgaagaggattgtttaaaatcgatattaaataacgatatcaaagctggtgatgttgttgttattagaaacgaaggtcctgtaggaggtccaggcatgagagaaatgttagccccaacatctgcaattgttggtcaagggcttggggagaaagtagctttaattaccgatggcagatttagcggtggtacctatggtctggttgtgggtcacatagctccagaggctgctgttggcggaaatatagctctaataaaacaaggtgatttaattactgtagatgctgtaaaaaaactaattgaagttgatttatctgaagaagaattagaaaaaagaaaaaaagattgggtaaaacctacacaaaaatacaaaagaggaattctttcaaaatattcgagaatagtaagcacatcaagtttaggggcagttactgatttataa

SEQ ID NO: 285992 - DNA, 879 bp, Unknown
  Bacterial polypeptide expressing nucleotide sequence isolated from the Sargasso Sea
aatgaataaatttaataaaaagaaattaccaagcagacatacatctcttggacctgataaagctccacaaagatcattttactacgctatgaatcttaccgaaaaagatgtagcaaaaccttttgtaggtgtggtttcaacatggaatgaagcagcgccttgtaatatcgcgcttatgaggcaagctcaatctgttaaaaaaggtgtaaaaaaaaagggtggcactcctagagaattttgtacaataactgttaccgatggtattgcaatggggcacgagggtatgaagtcttcattagtttcaagagatataattgcagactccacagaacttactgttagaggtcattgttatgatgctctagttggagttgcaggatgtgataaatcattaccaggtttaatgatggctatggttagattgaacgttccaagtgtatttatttatggtggctcaatacttccaggtagatttaacggtaaagatgtaaccgtagttgacgtttttgaaggagtaggaaaatattcttcaggtaaaatgacagcacacgcattaagaaaattagaacttagagcatgcccaagtgctggtgcttgtggaggtcaatttaccgctaatacaatggcctgtgtttccgaagcaattggtttagctttaccatattcagcaggaacacctgcaccatatgaacaaagagatagatatgcattattaagtggtgaagcagttatgaatttattaaaaaaaaacataagaccaagagacatcgttacaaaaaaagcattagaaaatgcggcaacaatagtagctgcaacaggtggatcaacaaatgctgctttacatttaccagcgattgcaaacgaagttggaattaaatt

SEQ ID NO: 285993 - DNA, 868 bp, Unknown
  Bacterial polypeptide expressing nucleotide sequence isolated from the Sargasso Sea
gcaatgggtcatgaaggaatgaaatcttcattgatatctagagaagtaatagctgactcagctgaacttacggttagaggacattgttatgatgctttagtgggtattgcaggatgtgataaatcattgccaggtttaatgatgtctatggttagattaaatgtaccaagtgtatttatatatggtggatcaattcttcctggtagatataaaggtaaagatgtaacggtagttgatgtatttgaagcagttggaaaacattcatctggtcaaatgtctgctgcagaactcagaaaattagaattagttgcttgtccaagtgcaggtgcttgtggtggacaatttactgcaaacacaatggcatgtgtatctgaagctataggattagctcttccttattctgctggtacaccagctccatatgaagaaagagataaatacgcgaaagctagtggtaaaatggtaatgaaccttttgaaaaagggaattaagccaagagacattgttacaaaaaaagctttagaaaatgccgcaacagttgttgctgcaacaggtggatctacaaatgcaggattacatttaccagctattgcgaatgaagcaggaattaaattcgatttaatggatgttgctagaatttttaaaagaacaccttatcttgcagatttaaaacccggtggaaaatatgttgctaaagatatgtggttagcaggtggtgttccaatgttattaaaaactttatatgaaggtggatatattcatggtgattgcataacggttactggaaaaactatgaaggaaaatttaaagagtattaaatttaatcctaaacaacaagtaatgagatcatataaaaatccattatcac

SEQ ID NO: 285994 - DNA, 586 bp, Unknown
  Bacterial polypeptide expressing nucleotide sequence isolated from the Sargasso Sea
tgacggaggtgttgtaggattaaaaggtaatcttgcaccagatggagcaattgtaaaagttgcaggattaaaaaaacttcaatttactggaagagcaagatgttttgatactgaggagtcagcgtataaagcagttttaaaaagaaaatatagagatggagatattatagttataagatacgaaggtccaaaaggaggtccgggaatgagagaaatgcttcaaacaacaggagcaatttacggacaaggtaaaggtgaaaaagttgcattaataactgatggaagattctcaggtgcaacaagaggtttttgtattggacatgtaggacctgaggcatcaataggtggaccaattggtttattaaaaaatggtgacattatccatattgatgcgaaaaaaggaacaattaacgtaaatcttacgaaaaaagaattggctaagagaaaaagaaagtggaaaccaaaaaaaattaacttcggaaatggaacactttggaaatatgcgcaaactgttggtcctgcatatctaggagcatctacacacccgggtggaaaaaatgaagttaagtgctacgctgatatttaa

SEQ ID NO: 285995 - DNA, 391 bp, Unknown
  Bacterial polypeptide expressing nucleotide sequence isolated from the Sargasso Sea
catgcttcgctccgacgccgtcaccaaggggattcagcggtctcccaaccgcgccatgttgcgggccgttggctttggagacagtgacttcggcaagcccatcctgggcattgccaacggctacagcaccatcaccccctgcaatgtggggctgaacgacctggccaaaagggctgaggaagctgcccggcaggccggaggcatgccgcagatgttcgggaccatcaccgtgagtgatggaatttccatgggcaccgaagggatgaagtactccctggtgagccgtgaagttattgctgacgccatcgaaacggcctgcaacggccagagcatggatggggtgctggcagtcggtggctgcgacaaaaacatgcctggcgccatgcttgcc

SEQ ID NO: 285996 - DNA, 819 bp, Unknown
  Bacterial polypeptide expressing nucleotide sequence isolated from the Sargasso Sea
tatgcaatggacttaacagagaaagatgtcgcaaaaccgtttgttggagtagtttcaacttggaatgaggcagcaccatgtaatatcgctttaatgaggcaggcacaatctgttaaaaaaggagttaaaagcaacggtggaactcctagagaattttgtacaattactgttactgatggaattgcaatgggccatgaaggtatgaaatcatcattaatttcaagagacgtaattgcagactcaacagagttaactgtaagaggtcattgttatgatgcattagttggtgttgcaggatgtgataagtcgttaccaggtttaatgatggcgatggttagattgaatgtaccaagcgttttcatttacgggggatctattttgcctggaagatttaatggcaaagatgtaactgtagttgatgtatttgaaggtgtaggaaaatactcttcaggtaaaatgtcagcacacgcattaagaaaacttgaattaaaggcttgtccaagttcaggagcctgtggtggacaatttacagcaaatactatggcatgtgtttcagaggcaattggacttgcattaccttattctgcaggaacacctgctccttatgagcaaagagataagtacgcaatgttaagcggaaaagctgtaatgaatttacttaagaaaaatataagaccaagagatatagttacaagaaaagctttagaaaatgctgctacaatagttgcagcaacaggcggatcaacaaatgcagctttacatttaccagcaattgcaaatgaagtaggtattaaatttgatttaatggatgttgcaaaa

SEQ ID NO: 285997 - DNA, 592 bp, Unknown
  Bacterial polypeptide expressing nucleotide sequence isolated from the Sargasso Sea
gatgaaaaaaaaaccaattaggagtggacatcgtcgatattctaaacttgttacagaaacaaatgctagagcagcaagtagggggatgctttatggtgttgggtttaaaaaagatgattttaagaaatcacaagttggtatagcttccacatggggaaatgttacaccttgtaacatgcatattaatgatttagccgaacacacagctagaggtgtaagaaaggctcggggaatgcctttaatatttggtacgattacagtttctgatgggatttcaatgggtactcaaggtatgaaatattcacttgtctcgagagaagttattgctgattctattgaaactgttgttggttgtcagtgctacgacgggctggtagcaattggtggttgtgataaaaatatgccaggatgtttgattgcgatagcacgtttaaatagaccagcagtttttgtatacggcggaactattttaccaggaaaatataaaggaaatgatgttgatattgtatctatttttgaagctgtgggaaaagaagctgcaggtaaaatttcacaaagtgaactggaagaagtagagtcttgtgcaattcct

SEQ ID NO: 285998 - DNA, 747 bp, Unknown
  Bacterial polypeptide expressing nucleotide sequence isolated from the Sargasso Sea
gcagaacttactgttagaggccattgttatgatgctttagtaggtattgcaggttgtgacaaatctttaccaggtttgatgatgtctatggtgcgcttaaacgttccgagtgtttttatttacggcggatcaatacttccaggaagatataaaggaaaagatgtaactgttgtagatgtttttgaggctgttggaaaacattcttcagggcaaatgtctgcaaaagaattaagaaaattagaattagttgcatgtccaagtgcaggtgcttgcggtggtcagttcactgcaaatacaatggcctgtgtatcagaagcaattggtttagctctaccttattctgcaggaacaccagctccttatgaggaaagagataaatatgcaaagaatagtggtaaaatggtaatggaattattagcaaaaaaaattaaaccaagagatattgttacgaaaaaagcattagaaaatgccgcaacgattgttgctgcaacgggaggttcaactaatgcagcattacacttgccagctattgcaaatgaagcaggaattaaatttgatttaatggatgttgcaaaaatatttaaaaaaactccttatcttgctgatttaaaaccaggtggaaaatatgttgcaaaagacatgtggttagcaggtggtgtaccaatgttattaaaaactctttacgatggcggttatattcatggtgaatgtatgacagttactggaaagacaatgaaagaaaattta

SEQ ID NO: 285999 - DNA, 932 bp, Unknown
  Bacterial polypeptide expressing nucleotide sequence isolated from the Sargasso Sea
ggtcattgttatgatgctttagttggtatcgcagggtgtgataaatccttaccaggtctaatgatgtctatggttagattgaatgtaccgagtgtatttatatatggtggatcaatccttccaggcaaatatagaggaaaagacgtaacagttgtagatgtatttgaggcggttggaaaacattcaacaggtcaaatgtctgctgcagaacttagaaaattagaattagttgcttgtcctagtgcaggtgcttgtggaggtcaatttactgcaaatactatggcatgtgtatctgaagcaattggattagcgttaccttattcagcaggaacaccagctccatatgaagaaagagataaatacgcaaaagctagtggtaaaacagttatgaaccttttgaaaaaaggaattaaaccaagagacattgttacaagaaaagctttagaaaatgccgcaactgttgttgctgcaacaggtggttctacaaatgcaggtttacacttacctgctattgcaaatgaagcaggaattaaatttgacttaatggatgttgctaaaatatttaaaagaaccccttatcttgcagatttaaaaccaggtggaaaatatgtagcaaaagatatgtggttagcaggtggtgttccaatgttattaaaaactttatatgaaggtggatatattcatggtgactgcatgacagttactgggaaaactatgaaggaaaatttaaaaggaattaaatttaatccaaaacaaaaagtaatgagatcttataaaaatccattatcaacaacaggaggtgttgttggattgaaaggaaatttagcaccagaaggagcaattgttaaagttgcaggacttaaaaaattacaatttactggaaaagcaagatgctttgaaaatgaggaaagtgcaatgaaagctgttcaaag

SEQ ID NO: 286000 - DNA, 640 bp, Unknown
  Bacterial polypeptide expressing nucleotide sequence isolated from the Sargasso Sea
caaaaccatctcagaatacttacagaatattccagataagcctccaacaaatcaaaatgtcataagagacatagataaccctctttataaaaaaggacacctagcaatattaaaaggtaacttagcgagcgaaggttctgtagccaaaattagcggagtaaaaaaccctgtattaacaggtccagcaaagatttttgaaagtgaagaggattgtttaaaatcgatattaaataatgatatcaaggctggcgatgttgttgttattagaaacgaaggtcctgtaggaggaccaggtatgagagagatgctagctcctacatctgcaattgttggtcaaggactcggggagaaggtagctttaattaccgatggcagatttagtggtggtacttatggtcttgttgtgggccacatagctccagaggctgctgttggcggaaatattgctctaataaaagaaggtgatttaattactgtagatgctgtaaaacaactaattgaagttaatttatctgacgaagaattagaaaaaagaaaaaaagattgggtaaagcctacaccaaaatacaaaagaggaatactttcaaaatattcgaaaatcgtaagtacatcaagtttaggggctgttactgatttatag

SEQ ID NO: 286001 - DNA, 847 bp, Unknown
  Bacterial polypeptide expressing nucleotide sequence isolated from the Sargasso Sea
aatgaattaacagaaaaagatgtagcgaaaccttttgttggtgttgtttcaacttggaatgaagcagctccttgcaatatagctttaatgagacaagctcaatcagttaaaaaaggtgttcaattatcaggaggtacaccaagagaattttgcacaattacagtaacagatggtattgcaatgggtcatgaaggaatgaaatcttcattaatttcaagagatgtaattgctgactcaactgaattaacagttagaggacattgttatgatgctctagtaggagttgcaggatgtgataaatcattgcctggtttaatgatggcaatggttagattaaatgttccaagtgtatttatatatggcggatctattctcccaggtagattaaatggaaaagatattaccgtagtcgacgtatttgagggagttggaaaatattcttctggaaaaatctcagaacacgcacttagaaaattagaattaaaagcatgtccaactgctggtgcttgtggtggtcagtttactgctaatacaatggcatgtgtatcagaggcaataggacttgctttaccttattcagctggaactccagctccatttaatagaagagataaatacgctttagctagtggaaaagcagtaatgaatttattagcaaaaaatattagaccaagagatattgtaacgaaaaaagctttagaaaatgctgcaacaattgttgctgcaacaggaggatcaacaaatgctgctttacacttaccagctattgcaaatgaaattggtattaaatttgatttaatggatgttgctaaaatatttaaaagaactccttatcttgcagatttaa

SEQ ID NO: 286002 - DNA, 805 bp, Unknown
  Bacterial polypeptide expressing nucleotide sequence isolated from the Sargasso Sea
atttatatatggtggatcaattctacctgggagatttaatgggaaagatgtaactgttgtagatgtatttgaaggtgttggaaaatatacatcaaaaaaaatgacagctcatgctttaagaaaattagaattaaaagcatgtccaagtgcaggtgcttgtggtggacaatttactgcaaacacaatggcatgtgtttcagaagcaataggattagctttacctttctcagcagggacgccagcgccatatttagaaagaaataaatatgcaatagacagcggtaaagctgtaatgaatttattagcaaagaatattagacctagagacatagtaacaagaaaagctcttgaaaatgcagcaacaattgttgcagcaacaggtggatcaacaaatgcaggtttacacttgccagctattgcaaatgaaattggaattaaatttgatttaatggatgttgcaaaaatatttaagaaaactccttatcttgcagatttaaaacctggtggaaagtatgttgcaaaagatatgtgggaagcaggaggagttccaatgttattaaaaactcttatggatggtggctacattcacggagactgtatgacagttacaggtaaaacaatgagagaaaatttaaaaaatgtcaaatttagaactaatcaaaaagtaatgagatcctataaaaatccaatttcaccaacaggaggagttgttggattaaaaggaaatttagctccagaaggtggaattgtaaaaatagctggtttaaaaaaattacaatttacaggaagagctagatgttttgat

SEQ ID NO: 286003 - DNA, 832 bp, Unknown
  Bacterial polypeptide expressing nucleotide sequence isolated from the Sargasso Sea
caattatcaggaggtacaccaagagaattttgcacaattacagtaacagatggtattgcaatgggtcatgaaggaatgaaatcttcattaatttcaagagatgtaattgctgactcaactgaattaacagttagaggacattgttatgatgctctagtaggagttgcaggatgtgataaatcattgcctggtttaatgatggcaatggttagattaaatgttccaagtgtatttatatatggcggatctattctcccaggtagattaaatggaaaagatattaccgtagtcgacgtatttgagggagttggaaaatattcttctggaaaaatctcagaacacgcacttagaaaattagaattaaaagcatgtccaacagctggtgcttgtggtggtcagtttactgctaatacaatggcatgtgtatcagaagcaatgggattagccttaccttattctgctggaactccagctccattcaatagaagagataaatatgctttagccagtggaaaagctgtaatgaatttattagcaaaaaatattagaccaagagatattgtaacaaaaaaagcattagaaaatgctgcaacaattgttgctgcaacaggtggatcgacaaatgctgctttacacttaccagctattgcaaatgaaattggtattaaatttgatttaatggatgttgctaaaatatttaaaagaactccttatcttgcagatttaaaacctggtggaaaatatgtagcaaaagacatgtggaaagcaggtggtgttcatatgttacttaaaactcttatggatggtggatatattcacggaaattgtatga

SEQ ID NO: 286004 - DNA, 718 bp, Unknown
  Bacterial polypeptide expressing nucleotide sequence isolated from the Sargasso Sea
gcagatttaaaaccaggtggaaaatatgttgcaaaagatatgtggttagcaggtggtgttccaatgttattaaaaactttatatgaaggtggatatattcatggtgattgcatgacggttactggaaaaactatgaaggaaaatttaaaaggaattaaatttaatccaaaacaaaaagtaatgagatcttataaaaatccattatcacaaacaggtggcgttgttggattaaaaggaaacttagcaccagaaggtgcaattgttaaagttgcaggacttaaaaaattacaatttactggaaaagcaagatgctttgaaaatgaggaaagtgcaatgaaagctgttcaaagcaaaaagtataatgatggtgatgtaattataattagatacgaaggacctgttggaggtccagggatgagagaaatgttatctacaacaagtgcaatctatggacagggaaaaggggagaaagtagcccttattacagacggtaggttctctggagcaacaagaggcttttgtgtgggtcacgtgggccctgaggccgctctagggggtcctataggccttttacgtacaggagatatcattgatatcgatgccaaaaaaggaactataaatgtaagactttctaaaaaagaattagctgcaagaaaaagaaaatggaaagctagaaaatcagattttggatctggtactttatggaaatatgcacaaa

SEQ ID NO: 286005 - DNA, 760 bp, Unknown
  Bacterial polypeptide expressing nucleotide sequence isolated from the Sargasso Sea
attagacgaaaaaactaaaatttctaaatcaataataaatttaattaaacaagatattaaaccaagtgatattctatcaaagaagtcaattgaaaatgcggtgcgtttaataacaattcttggtggatcaactaatgctgtattacatatacttgcaatttgtaaaacagctaatattgattttaagattgatgattttcaaagaatatcagatgaaactccttttttggcaaatttaaaaccaagtggaaaatatttaatggaagatcttcatgaaattggtggagtcccagctgttatgaagtttatgatggataatggtttactacatgaagattgtttaactgtaactggaaaaactattaaagaaaatttaaaaaatgttgaatcttttgatttcaatcaagatataatcaggccaatagataatccaatcaaaacatcaggtcacatacgtatattgtacggaaatctagcatctgaaggttctgttgcaaagattactggtaaggaaggtgtagtatttaaaggaaaagcaaatgtatttaactgtgaagatgatgctaatgatgcaataaagagtaattcaataagtaagggtgatgtcatagtaataagatatgaggggcctgtgggtggtcctggtatgcctgagatgcttaaaccaacatcagcaattatgggtgctggcttaggaaatgatgtagcactaattactgacggtaggttttccggtggaacacatggatttgttgtcggt

SEQ ID NO: 286006 - DNA, 799 bp, Unknown
  Bacterial polypeptide expressing nucleotide sequence isolated from the Sargasso Sea
cgatttcacaaggatcggcaaaaagacacctgtccttgccgacctcaaacccagcggaaaatacaccatgtcaaaattggttgaaattggaggcatccttcctcttatgaaacgactcttagatcgtggttacctgcatggcgattgcttaaccgtcacaggaaaaacattagcagaaaatcttgcctcattccctgattatcctgaggatcaagaagtcatcaaaagctttaatgaccccatcaaaaaaagtggtcacctagtaatctgttacggaaatatcgcacctgaaggagccgtcgctaaaatttctggtaaagaaggaacagagtttacaggaaatgccaaagtcttcgaatcagaagaaactgcattaactgcaattctagaagataaaataacaaaaggagatgtaattgtcatccgatacgaaggtccaaaagggggaccaggcatgcgtgaaatgctctccccaacatctgccgtaatgggaaaaggtctaggtcaagatgtcgcactcattacggatggacggttctctggaggaacccatggatttgtcgttggacatattacccctgaagcctattctggaggtccaatcgccatcatcgaagacggagatgaaattacaattaatacagaaacacaagaagtcaacatcgccatcagtacagaagaaataaaaaaccggctccaagactggaaacagccctctccaaactaccgaagaggagtcctatcaaaatatgcaaaactggttacctctgcgtcagaaggcgctattactgataaataa

SEQ ID NO: 286007 - DNA, 829 bp, Unknown
  Bacterial polypeptide expressing nucleotide sequence isolated from the Sargasso Sea
agaggccactgttatgatgcattagttggtttagcaggttgtgataaatcactcccaggtctaatgatgtctatggtgcgtttaaatattccaagcgtttttatttatggtggttcaattttaccaggaagattcaatggtaaagacgtaacagtagtagatgtttttgaaggagtgggaaaatatacttcaaaaaaaatgactgctcatgcgttaagaaaacttgaacttaaagcctgtccaagcgctggagcttgtggtggtcaatttactgccaatacaatggcatgtgtttcagaagctattggattagctttaccatactcagctggaacgccagcgccttataccgctagaaataaatatgcagttgatagtggaaaagctgtgatgaatttattagcaaaaaatattagacctagagatattgttactagaaaatctttagaaaatgccgcaacaattgttgcagcaactggaggatcaacaaatgcaggattgcacttaccagctatagcaaatgaaattggaattaaatttgatttaatggatgtcgctaaaatatttaaaaaaactccctatctagctgatttaaaacctggtggaaaatatgttgcaaaagatatgtggaaagcaggtggcgttcccatgttattaaaaactttaatggatggaggatacatccatggagactgcatgactgttactggaaaaaccatgcgagaaaatttaaaaaatgttaagtttaaaacaaatcaaaaagtaatgagaaaatacagtaatcccattactccaacaggtggtgttgtgggattaaaaggaaatcttg

SEQ ID NO: 286008 - DNA, 544 bp, Unknown
  Bacterial polypeptide expressing nucleotide sequence isolated from the Sargasso Sea
aggcgcaattgtaaaagttgctggtatggaaaatttaaaatttttaggaaaagcaaaatgctttgattgtgaagaagatgctttcgaatgtgtaaagaatgaaaactacaatgaaggtgatgtgtttgttattcgctatgagggtccgaaaggaggtccaggaatgcgagaaatgctctcaactactgcagctatatatggtcagggtatgggggacaaagtagctctaatcacagatggacgatttagcggcgcaactagaggtttttgtgtaggtcacgtttcacctgaagcagcggtctgtgggccgatcgcgcttattgaagatggagatgaaatttcgctcgatgccgaaaaaggtgtaatatcccttaatgtttcgcctcaaatattggaaaaaaggcaaaaaaactggaaaagaagacaaacagactttaattctggtactctttggaaatatagtaaaacagtgggttctgctgtggatggtgcggttactcatccaggagcagataaagaaacccacgtttatggtgacatataa

SEQ ID NO: 286009 - DNA, 871 bp, Unknown
  Bacterial polypeptide expressing nucleotide sequence isolated from the Sargasso Sea
tggaggccaatttacagcaaatactatggcatgtgtgtctgaggctattggattagcattaccatattcagcaggtacaccagctccttatgaagaaagagataagtatgcaaaagaaagtggcaaaatggttatgcaacttttaaaaaaaaaaattaagccaagagatattgtaacaagaaaagctttagaaaatgctgcaactattgttgctgcaacaggtggatcaactaatgctggattacatttaccggcaattgcaaatgaagcaggaattaaatttgatttaatggatgttgctaaaatttttaaaagaactccgtatctagctgatttaaaaccaggtggaaaatacgttgcaaaagatatgtggttagcaggtggtgttccaatgctattaaaaactttatatgaaggtggctacatccatggtgattgtatgactgttacaggaaaaacaatgaaagaaaatttaaaaaatattaaatttaaccctaaacaaaaagtaatgagatcttataaagatccattatcacctacaggaggggttgttggattaaaaggtaacttagcaccagatggagcaatagtaaaagttgctggattagctaaattacaatttaccggaaaagcaagatgctttgacaatgaagaaagtgccatgaaagctgttcaaagcaaaaaatataatgatggtgatgtaattataattagatatgaaggaccagttggtggccctggtatgagagaaatgttatctacaacaggtgcaatttatggacaaggtaaaggggagaaagtagctcttataactgatggaaggttctctggagctaccagaggcttctgtgtgggtcatgtgggcccctga

SEQ ID NO: 286010 - DNA, 865 bp, Unknown
  Bacterial polypeptide expressing nucleotide sequence isolated from the Sargasso Sea
gatggggattttaggcgagctagacagagccggattgctgcataccgatgtgttccatgtggcggccgatgaaggtggcaatttgaagtctgtattggcgaaatacgatgtgatgcagacgcaagatgaaaaagtaaaacacttctttatggcgggacctgcggggattccgaccactaaagcctttagccaagattgtcgctggccgtcattggataatgacagacaagaaggttgtatccgtagccgcgagtttgccttcagccaagagggcggtcttgccgtattgtcgggtaatgtggccgagaacggctgtatcgttaaaacggcgggtgtggatgaatcgaacctgaccttcgttggttcggcgcgcgtctatgaaagccaagatgacgcagtggcgggcattttaggcggcgaagtggtggcgggtgatgtggtagttattcgttatgaaggcccgaaaggcggcccgggtatgcaagaaatgttgtacccaaccagttacttaaaatcacgtggcttaggcaaagcctgtgcgctgataaccgacggtcgtttctccggtggcacttcaggtttatctatcggccacgtttcacccgaagcggcagcgggcggcacgatcgccttgattgaaaatggcgatcgcatcgagattgatatccccaagcgcagtatcaagctggcgttaactgatgccgaattggctgctcgccgcgaggccatgttagcgcgtggcccaatggcgtggaaacctataggtcgagagcgtttcgtgtcactcgcgcttaaggcctacgccatgctcgccaccagtgccgacaagggcgcggtgcgcgatcgcagtaaactggaggactaa

SEQ ID NO: 286011 - DNA, 955 bp, Unknown
  Bacterial polypeptide expressing nucleotide sequence isolated from the Sargasso Sea
aaatatgcaaaagccagtggtaaaatggttatgaaccttttgaaaaaaggaattaaaccaagagatattgttacaagaaaagctttagaaaatgctgcaacgattgttgctgcaactggtggatcaacaaatgcaggattacatttacctgctattgcaaatgaagcaggaattaaatttgatttaatggatgttgctaaaatttttaaaagaacaccttatcttgcagatttaaaacctggtggaaaatatgttgcaaaagatatgtggttagctggcggtgttccaatgttattaaaaactttatatgaaggtggatatattcatggtgattgcatgactgttactggaaaaactatgaaggaaaatttaaaaagtattaaattcaatccaaaacaaaaagtaatgagatcttataaaaatccattatcaccaactggaggtgttgttggattaaaaggaaacttagctccagaaggtgcaattgttaaagttgctggacttaaaaaattacaattcacaggtaaagcaagatgctttgataatgaggaaagcgcaatgaaagctgttcaaagcagaaagtacaatgatggtgatgtaattataattagatacgaaggacccgttggaggtccaggtatgagagaaatgttatcgacaacaggtgcaatctacggacagggaaaaggcgagaaagtagcccttattacagacggtaggttctctggggctacaagaggcttttgtgtcggtcacgtgggccctgaggccgctctagggggtcctataggccttttacgtacaggagatatcattgatattgatgccaaaaaaggaacaatcaatgtaaggctttccaaaaaagaaatggctgtaagaaaaagaaaatggaaagctagaaaatcagattttggatcaggtactttgtggaaatatgcacaaacagtaggaccag

SEQ ID NO: 286012 - DNA, 907 bp, Unknown
  Bacterial polypeptide expressing nucleotide sequence isolated from the Sargasso Sea
gaaaaatgcagcaactattgttgctgcaacgggaggatcaacaaatgctgctttgcaccttccagctattgcaaatgaaataggtattaaatttaatttgatggatgttgcaaaaatatttaagaaaactccttatcttgcagatttaaaacctggtggaaaatatgtagcaaaagatatgtggaaagcgggcggtgttcctatgttgcttaaaacacttttagacggtggatatattcacggtaattgtatgacagttacaggaaaaactatgaaagagaatttaaaaaatgttaagtttaattctaatcaaaaagtaatgagaaagtataataatcctttatcaccagatggtggtgtagttggaatgaagggaaatttagcaccggaaggaggaattgtaaaaattgctggtttaaaaaaattacaatttactggaagagcaagatgttttgataccgaagaggcagcttacaaagcagtaaaaaataaaaaatataaggacggtgatattataattattagatacgaagggccaaaaggtggacctggcatgagagaaatgcttcaaacaactggagcaatctacggacaaggaaaaggtgaaaaagttgcactcataacagatggaagattttctggagcaacaagaggtttttgcattgggcatgttggaccagaagcatctgtaggtggaccaatagccttacttagaaatggagatataattgatttagacgcaaagaaaggaactataaatgttcgtttatctaaaaaagaattagccaaaagaaaaaaaaaatggagacctaaaaaaattaattttggaaatggaacactatggaaatatgcgcaaaccgttggaccagcttatttaggagctccaactcatccaggggaaaaaacg

SEQ ID NO: 286013 - DNA, 567 bp, Unknown
  Bacterial polypeptide expressing nucleotide sequence isolated from the Sargasso Sea
taaaaggtaatctcgcacttgatggagcaattgtaaaagttgcaggattaaaaagacttcaatttactggaagagcaagatgttttgatactgaagagtctgcttataaagcagttttaaaaagaaaatacaaagatggtgatattatagttattagatatgaaggaccaaaaggtggtcctggtatgagagaaatgcttcagacaactggagctatttatggccaaggtaaaggtgaaaaagttgcattaataacagacggaagattttctggagcaactagaggtttttgtattggacacgtaggtccagaagcatctgttggtggtcctataggattattaaaaaatggagacataattcatatagatgctaaaaaaggaacgataaatgttgatctttcaaggaaagaattatctaaaagaaagaaaaaatggaaacctaaaaaaattaattttggaaatggtacgctctggaagtacgcacaaacagttggacctgcctatttaggtgcatcaacacaccctggcgggaaagaagaagttaagtgttacgcagatatttaaa

SEQ ID NO: 286014 - DNA, 886 bp, Unknown
  Bacterial polypeptide expressing nucleotide sequence isolated from the Sargasso Sea
agtatctacttggaatgaagctgcgccatgtaatactgctttaatgagacaagctcaatcagtaaaaaaaggagttaaagagtctggtggaaccccaagggagttttgtactattacagtgactgatggtattgcaatggggcatgaaggaatgaaatcatcattgatttcaagagaagttatagctgactctgcagaacttactgtaaggggacattgttatgatgctttagttggtattgctggttgtgataagtcattaccaggtttgatgatgtcaatgctaagattaaatgttccaagtgtttttatttacggaggatcaattttaccaggaagatacaaagggaaagatgtaactgttttagacgtatttgaagcagttggtaaacattcatctggcaacatgtcatcagaggaattacgtgagttagaattagttgcttgtccaagcgccggtgcttgtggtggtcagtttactgcaaatactatggcatgtgtttctgaggcaataggtttagctttaccttattctgcaggaactccggccccttatgaagaaagggataagtatgctcatctaagtggaaaaacagtaatgaatttattagagaaaaatattaaaccaagagatattgtaacaaaaaaatctttagaaaatgctgcaactattgttgctgctactggtggttctacaaatgctgctttgcatctacctgctttagcaaacgaaataggagttaaatttgaattaatggatgtagctaaaatttttaaaaataccccttatttagctgatttaaaaccaggtggaaaatatgttgcaaaagatctttgggaagcaggtggtgttccaatgttgttaaaaactttatttgatggtgga

SEQ ID NO: 286015 - DNA, 861 bp, Unknown
  Bacterial polypeptide expressing nucleotide sequence isolated from the Sargasso Sea
atacgatgcaggaaagatttctgcagaagaattagaaaatattgaaaatgtagcatgtccaaatgccggttcatgtggaggcatgtttactgcaaatacaatggcatcaatatctgaagcaatagggctatctttaccaggaagtgcaagtccacctgcagaagatgatagacgaaacaagatggtacttgaaactggaaaagcatgtgcaaaattactacaattaggcataaaaccactagatattgtcacatttgaggcatttgagaattcaattacgatgctaaatgcggtaggaggttctacaaatggaattttacatttattggcaatggcaaatgaagcaggaattaatctaacatatgatgattttgaaagaattagaaaaaagacaccgcatcttgcagatatgaaacctggaggaaattatgtaatgaatagtttagacaaaattggaggaattccattagttatgaaaaaactattagacaaaaatctgattcatggagattcattgacagttactggcaaaaccatcaaagaaaatttagaagagttagcaatagtagaagttccagatcaacaaataatcaaaccagttgaacaacctatacatgaagttggaactgccgtaattctaaaaggaacattggcaccagagggaggagtaatcaaaacggcaggagttgaaatgacagaatttacaggaacagcaaaagtttttgatagagaagaatacgcatttgaagcagtttctaaaggagagatagatgaaggagatgttgtagttatcagatatgaaggacctaaaggcggtccaggaatgagagagatgttgtctaccactgcagcacttgtagg

SEQ ID NO: 286016 - DNA, 583 bp, Unknown
  Bacterial polypeptide expressing nucleotide sequence isolated from the Sargasso Sea
tggaactccagctccattaatagaagagataaatacgctctagctagtggaaaagcagtaatgaatttattagcaaaaaatattagaccaagagatattgtaacaaaaaaagcattagaaaatgctgcaacaattgttgctgcaacaggtggatcaacaaatgccgctttacacttgccagctatagcaaatgaaattggtattaaatttgatttaatggatgttgctaaaatatttaaaagaactccttatcttgcagatttaaaacctggtggaaaatacgtagcaaaagatatgtggaaagcaggtggagttcctatgttgcttaaaactcttatggatggtggatatattcacggaaattgcatgacggttacaggcaaaactatgaaagagaatttaaagaacgttaagtttaattctaagcaaaaagttatgagaaaatataataatcctttatctaaagatggaggtgttgttggaatgaaaggaaacttagctccagaaggtgcaattgttaaagttgctggtttaaaaagattacaatttactggaagagcaagagttttgataagaagaagca

SEQ ID NO: 286017 - DNA, 886 bp, Unknown
  Bacterial polypeptide expressing nucleotide sequence isolated from the Sargasso Sea
aatgtctaaaattgataaaaaaaaattaccaagtcgtcatacttccttaggcccagatagagctccacatagatctttttactatgcaatgggagaaacagaacaggatgtagctaagccgtttgtaggagtagtatccacttggaacgaagctgcgccttgtaatacagctttaatgcgacaggcacaatccgtaaaaaaaggagtaaaacaatctggtggaacgccaagagaattttgcacgataactgttacagatggtattgccatgggtcacgagggaatgaaatcatctttaatttcaagagaggtcatagccgactcagctgaactgacagtgagaggacattgttatgatgcattagttggtatcgctggatgtgataaatctcttccaggcttgatgatgtctatgttgaggctgaatgtacctagtgtgttcatttatggaggatcgattttgccaggaaaatttaaaggaaaagatgttactgttgtagatgtgtttgaagcagtaggtaaacattcctcaggcaaaatgtcttctgaagaattaagagaattagaattagtagcttgtccaagtgctggggcttgtggagggcaatttacagctaatacaatggcgtgtgtatcagaagcgatagggttggctttaccttattcagctgggacgccagctccttatgaggaaagagataaatatgcttatgaaagcggtcaagcggttatgaatttattagaaaaaaagattaaaccaagagaaatagttactaagaaatctttagaaaacgcagcaaccattgtagctgcaactggaggctccactaatgcagcccttcatttacctgcactagctaatgagataggagtaaaatttgattta

SEQ ID NO: 286018 - DNA, 835 bp, Unknown
  Bacterial polypeptide expressing nucleotide sequence isolated from the Sargasso Sea
tctattgaaacagttgttggctgccaaggctttgatggcttagtaacaattggaggctgtgataaaaatatgccgggttgtgtcatgggaatgattcgattaaatcgaccatctgtatttgtatacggaggaaccatacttcctggatgccacaaagaaaaagacgtggatatagtctcagtatttgaagcagtaggacagtatgcgaacaataaaatagatgataaagaactaaaagaaattgagagctgtgcaattccaggagcaggttcatgcggtggaatgtatactgcaaacactatggcatgcgcaattgaagcgcttggtttaagcttgcccaatagttcagctcaagcagcaagctcgcctgaaaaaattaatgactgcaaagcagctggtaaagcagtgatgaatctaattaaacgacaaattaccccaaaacaaatactcacaaaaaaatcatttgaaaatgcaatcaccgtcattacagcacttggaggctctacaaatgccgtgctgcatctacttgcgattgcacacactgcaggaattgacttaacaattgatgatttcacacgaattggaaataaaacacctgtattagcagatgtcaaacctagtggaaagtatacaatgtctaaattagtatctatcggtggagttacacctctaatgaagcgattgttaaacgaaggatttctccatggagattgcttaactgtaactggcgcaacactagaagaaaaccttagatattgtgacgactatccaagtggccaagatattatttatcccacaagtaatccaatcaaagaaactggacatttagtaattg

SEQ ID NO: 286019 - DNA, 826 bp, Unknown
  Bacterial polypeptide expressing nucleotide sequence isolated from the Sargasso Sea
agagaagtgatagctgattcaattgaaacagtagtatttgcagaaagatttgatggtcttgtagctgtagctggatgtgataaaagtttaccgggagctatgatggcaattgcaagacttaatgttccatcagtgtttatctatggaggatcaattttaccaggaaatttaaatggtaaaacaatacaaattcaagatgtttttgaggcggttggaaagcatcaaagtggtgaaataaatgataatgagctttaccaaatagaatctcgggcttgtcctggccctggctcatgtggagggatgttcactgctaacactatgtcttctgtaggtgaagctttagggttaagcctgccaggttcagcatctgagccagctgttgatcaaagaaaaagtgcatcgagcagattagctggtgaagcagtgttaaatttattgaggaatgacataaaaccttctgacattttaactaaagaagcctttgaaaatgcagtgacagtagtaactgcaatgggcgggtcaactaatacctgtcttcatttaccagcaatagcttatgaagcagggatagaccttactctcgaaaatattcatgatatttccatgagaacacctcatctagcaaatatgaaacctgctggaaaatatctaatgtatgacttagataatgtcggtggagtgccgcttgttatgaaaagattattagatttagggttaatacatggtgaatgtataactgtaactggaaaaacagttagagaaaatcttgaaagtattaaagacgatggtatagaaaatgaagttgttagaaaaattgataacccta

SEQ ID NO: 286020 - DNA, 814 bp, Unknown
  Bacterial polypeptide expressing nucleotide sequence isolated from the Sargasso Sea
aatgacagataaaggctcaaatatcaaatctagactccctagcagacatgttagtgttggtccaaaaagtgctcctcatagatcgatgtattatgcaatgggaatgactgaagagcagatataccaaccttttgttggtgttgctacaacctggaatgaatctgcaccatgtaatattactttaggtaggcaggcacaggctgtaaaaaagggagttagtaaactaaatggtactcctcgtgaatttacaactataactgtaaccgacggaattgctatgggtcatgaagcgatgaaagcatctttagttagccgagaagtaattgctgattctgtagaattatcagttagaggtcactgttatgatggcattgtaggacttgcgggctgtgataaatcacttccaggattgatgatggctatggtaagacttaatattccttcagtttttatttatggcggatcaatattaccaggaagttataaaggtaaagatttaacaataattgatgtttttgaagctgttggaaaacatgcatcaggagaaatagatgaaagtgaacttaaaaatattgaaaaagttgcatgtcctactgctggctcatgtggtggtcaatttacagcaaatacaatggcatgtatatctgaagcacttggattagctttaactaactctgccatgacacctgcaacgtatgaagaaagagataattatggttttgaaagtggtaaagctgtaatgagtcttatagaaaaaaatatcagaccaagagatatagttactttagaatctttaaaaatgcagcagttgttg

SEQ ID NO: 286021 - DNA, 895 bp, Unknown
  Bacterial polypeptide expressing nucleotide sequence isolated from the Sargasso Sea
gctaagccatttgttggtgttgtttcaacatggaatgaagcagctccatgtaacataaatttaatgaaacaagcacaatctgtaaaaaaaggtgttcaagcaactggaggaacgccaagagaattttgtactattactgtaacagatggaattgcaatgggtcatgagggaatgaaatcatctttgatttcaagagatgtaattgcagactcaacagaactaactgttagaggtcattgttatgatgcattagttggattagcgggctgtgataaatcattgccaggtttaatgatggcaatggttagattaaatgttccaagtgtttttatttatggtggttccattttaccaggaagatttgaaggtaaagatgtaactgttgttgatgtatttgagggtgttggaaaatatacttcaaaaaaaatgacagcacatgcattaagaaaattagaacttaaagcttgtccaagtgcaggagcttgtggtggacaatttactgcaaatacaatggcatgtgtctctgaagcaataggactagctttaccattctcagcaggaacgccagcaccatatttagaaagaaataaatatgcaatagacagcggtaaagctgtaatgaatttattagcaaaaaatattagaccaagagatattgtaactagaaaatctttagaaaacgcagcaacaattgttgcagcaacaggtggttccacaaatgcaggtttgcacttaccagctatagcaaatgaaataggaattaaatttgatttaatggatgttgcaaaaatatttaagaaaactccttatcttgcagatttaaaaccaggtggaaaatatgttgcaaaagatatgtgggaagcaggaggagttccaatgttattaaaactctaat

SEQ ID NO: 286022 - DNA, 756 bp, Unknown
  Bacterial polypeptide expressing nucleotide sequence isolated from the Sargasso Sea
ggtactggccgttggtggctgcgacaagaacatgcccggcgccatgctcgcgatggcacggatgaacatcccttcggtgttcgtctacggcggcacgatcaagccgggcaagctgggcggctgtgatctcacggtggtgagcgcttttgaagcggtcggccaactgaccagcggcaagatcgacgaagagcagctcaccgcagttgagaaaaatgcctgccctggggctggcagttgcggcggcatgttcaccgccaacaccatgagtgccgccatcgaaactatgggtctcagcctcccctacagctccacgatggctgccgaggacgaggaaaaggccgacagtgcggctcgctccgccgaggtgctggtggaggccgtgaaagccaacatccgccccctggatctgctcaccaaggaagcctttgagaacgccatcagcgtgatcatggcggtgggtggctccaccaatgcggtgctgcacctgctggccattgcccgcaccgccggcgttgacctgagcatcgatgacttcgaacggattcgtcagcgggtgccggtgatctgtgatctcaagcccagtggccgctacgtgaccgttgatctgcacaacgccggcggcattccccaggtgatgaagctgctgctggatgcaggcttgctgcacggcgactgccgaacggtggagggcaaaagcctgaaggagttgctcgccgatgtgccctcggagccgccctccgggcaggacgtgatccg

SEQ ID NO: 286023 - DNA, 925 bp, Unknown
  Bacterial polypeptide expressing nucleotide sequence isolated from the Sargasso Sea
cctgctccatatgaagaaagagataagtatgcaaaggcaagtggtcgaatggtaatggaattattagcaaaaagaattaaacccagagatatcgtcacgagaaaagcattagagaatgctgcaacaatagtagctgcaactgggggttcaactaatgcagctttacacttaccagctattgcgaatgaagcaggtattaaatttgatttaatggatgttgcaaagatatttaagaaaacaccttatcttgctgatttaaaaccaggtggaaaatatgttgctaaagatatgtggttagcaggtggtgtacctatgcttttaaaaactttatatgatggtggttatattcatggcgactgtattactgttactggaaaaacaatgaaagaaaatttaaaaggaattaaatttaatccaaaacaaaaagttttaagagcttacaacagacctttatcacctgatggtggtgttgtaggattaaaaggtaatttagccccagaaggggggattgttaaaattgctggacttaaaaaattacaatttactggaagagcaagatgttttgataatgaagaaagcgcaatgaaagcagttcaaagtagaaaatataaagatggtgatgtaattattattagatacgaaggtccagtaggtggaccaggtatgagagaaatgctttcaacaacaggagcaatttatggacaaggcaaaggagaaaaagttgctttaataactgatggaagattttcaggtgcaacaagaggtttttgtgtcggtcacgttggtccagaagcagctttaggtggacctattgctcttttacgtaacggagatgttattgatattgatgctaaaaaaggaactattaacgttcgattaactagaactcaattagcttcaagaaaaagaaaatggaaggctaaaa

SEQ ID NO: 286024 - DNA, 638 bp, Unknown
  Bacterial polypeptide expressing nucleotide sequence isolated from the Sargasso Sea
tggaaaaactattaaagaaaatttaaaaaatgttgaatcttttgatttcaatcaagatataatcaggccaatagataatccaatcaaagcatcaggtcacatacgtatattgtacggaaatctagcatctgaaggttctgttgcaaagattactggtaaggaaggtctagtatttaaaggaaaagcaaatgtatttaactgtgaagatgatgctaatgatgcaataaagagtaattcgataagtaagggtgatgtcatagtaataagatatgagggacctgtgggtggtcctggtatgcctgagatgcttaaaccaacatcagcaattatgggtgcagggttaggaaatgatgtagcactaattactgacggtaggttttccggtggaacacatggatttgttgtcggtcatatttcaccagaagcagctaaaggtggggtactggctcttgtgaaaaacggagatgaaattgtgattgatgcagaaaaaaatgaaattaatgttaatattgacaaaaaagaacttgaaattagaaaaaaactatgggttaagccagatttaaaatttaaatccggaattttgtataaatattctaaacttgtttcaagtgcatccagtggttgtgtaacagattaaa

SEQ ID NO: 286025 - DNA, 985 bp, Unknown
  Bacterial polypeptide expressing nucleotide sequence isolated from the Sargasso Sea
aagcgccccaagatctttttattatgcaatgaatttaacagaaaaagatgtttccaaaccatttgttggagttgtttcaacatggaatgaggcagccccatgcaatattgctttaatgagacaagctcaatctgtcaaaaaaggagttaaaattaaaggcggtacgccaagagaattttgtacgataacagtcactgatggtatagcaatgggtcatgaaggtatgaaatcttctttgatttcaagagatgtaattgctgattcaactgagcttactgttcgtggtcattgttatgacgctctagtaggtgtagctggctgtgacaaatcattaccaggtttaatgatggcaatggtaaggttgaatgttccaagtgtttttatttatggtggttcaattctaccaggtagatttaatggaaaagatgtaacagtggtagatgtttttgaaggcgttggaaaatattcttcaggaaaaatgtcagcccatgctttaagaaaattagaattaaaagcatgcccaagtgccggagcatgcggaggtcaatttacagcaaatacgatggcatgtgtatcagaagcaattggtttagccttgccttactcagcaggcacaccagcaccttacgaacaaagggataaatatgctttgttaagtggaaaagctgtaatgaatttacttaaaaaaaatattaaacctagagacatagttactagaaaagctttagaaaatgctgcaacaattgtagctgcaacaggcggatctacaaatgcagctttacatttgccagcaattgcaaatgaaattggaattaaatttgatttaatggatgtagcaaaaatttttaaaaaaactccatatcttgctaacctaaaacctggtggaaagtatgttgcaaaagatatgtggaaagctggtggtgttccaatgtttactaaaaacgcttatgggatggaggatatattcatgggaaactgtatgaca

SEQ ID NO: 286026 - DNA, 664 bp, Unknown
  Bacterial polypeptide expressing nucleotide sequence isolated from the Sargasso Sea
aatgttgcgaggagcaggcttcacggatgaggattttgagaaatctattgttgggattgcttcgcttggggcaagtgtaactccatgcaatatgcatctaaactcacttgcagaaattgttgaagattcagtcaataattcaggatgtaaggctgtaacatttaacacaattactgtctctgatggaatttctatgggtacggagggcatgaaatattccctcgtttcaagagaagtcatagctgactctatagaaactgttgtaggttgtttgggctatgatggagtagtcggtattgggggctgcgataaaaatatgccaggtgtaatcattggtttggcaaggcttaatagaccatctttatttatttatggtggctctattagacctagcgagcaaaatactgattatgtgacagtttgtgaaaaaactggagagttctcaaaaggctcaatctctgaagaggaattaatctctgttgaaaaggtttcagttgttgggcctggatcgtgcggaggtatgtatacagctaatactatggcgtctgcaattgaagctctcggaatgtctcttcctggaagtagcagtcaggacgcagtttctaatgataagaagaatgattgtataaatacagggagtgcaattaggaaccttcttgaaaaa

SEQ ID NO: 286027 - DNA, 501 bp, Unknown
  Bacterial polypeptide expressing nucleotide sequence isolated from the Sargasso Sea
gttggtaactgatacaaattcacgtgctgccagcaggggaatgctttacggtgttggattcaaaaaaggcgatttccaaaaatctcaaattggtatcgcttctacatggggaacagttactccatgcaatatgcatataaatgacttagcagagcatgcagcaagaggtgtacgcaaagcaaaagggatgcctttgacatttggaacaattactgtttcagacgggatttcgatgggtactgaagggatgaaatattcgcttgtttctcgtgaagtgattgctgattctattgaaacggtagtaggatgtcaaagttatgacggaatagttacaattggcggttgtgataaaaatatgcctggatgtatgattgccattgctcgcttaaatcgacctgctgtttttgtatatggaggaacaatacttccaggaactcacaagggtaaagatgtcgatattgtctcaatttttgaggcagtaggtaaacaggcagctggaat

SEQ ID NO: 286028 - DNA, 653 bp, Unknown
  Bacterial polypeptide expressing nucleotide sequence isolated from the Sargasso Sea
agcctcggcgatgccttgcatcgttgggacatcatgcagaccgaagcagaagatgttcgtaccctctatgcagcggggcctgccggcattcctactcagcaggctttcagtcaggatctccgttggcccaggctcgacactgatcgcgagggcggctgcgtgagagagatggcgcacgcctactcgcaggaaggcgggctggcggtcctgttcggcaacattgcagagctgggctgcgtggtcaaaaccgccggcgtggacgatgagtcactccagttcaccggtcctgctcatatttgtgacagccaggaggccgcggtagccgacattctcgaggaccgcgtgcaggcaggggatgtggtcattgttcgttatgaggggccccgcggcgggcccggcatgcaggagatgctctaccccaccagctacctcaaatccaaggggcttggaaaagcctgcgcactcattaccgatggccgcttctccggtggcacctctgggctgtcgattgggcatgtgtcacccgaggctgccgccggcggtgcgattgctctgatcgaaccgggtgacccgatcgaaatcgatatccccgcacgaaccatcaatgtgttggtggatgacgccacgctggcgagtcgaagagaagccatgga

SEQ ID NO: 286029 - DNA, 430 bp, Unknown
  Bacterial polypeptide expressing nucleotide sequence isolated from the Sargasso Sea
atgttaaggggtgttggatttactgatgaagattttaaaaaaccacatgtgggcattgcttccttaggagcaagtgttactccttgtaatatgcatttagatgatttggcatctattgtagagaaatcagtgaatagttatgactgtaaaggcatcacatttaacacaattacagtatctgatggtatttctatgggtaccgaagggatgaaatattctctagtttctagagaggtaattgctgattctattgaaactgttgtcggttgtcttggatatgatggtgtgattggaattgggggttgtgataagaacatgcccggagttgtaatggcaatggcaagattaaacagaccctcaatttttgtttatggggggtctattaggccaagtatagagaatactgattatgtaaccgtttgtgagaaaa

SEQ ID NO: 286030 - DNA, 766 bp, Unknown
  Bacterial polypeptide expressing nucleotide sequence isolated from the Sargasso Sea
atgttgcgtggggcaggattcaaggatgaggattttgaaaaatctattgttggaattgcttcgctcggggcaagtgtaactccatgtaatatgcacctaaactcccttgcagaaattgttgaagagtcagtcaataattcaggatgtaaggctgttacatttaatacaattactgtctctgatggaatttctatgggtacggagggcatgaaatattccctcgtttcaagggaagtcatagctgactctatagaaactgtagtagggtgtttgggctatgatggagtagtaggtattggcggctgcgacaaaaatatgccaggtgtaatcattggtttggccagacttaatagaccatctttatttatttatggtggctctattagaccaagtgagcagaatactgattatgtgacagtttgtgaaaaaactggagagttctcaaaaggctcaatctctgaagaggaattaatctctgttgaaaaggtttcagttgtggggcctggatcatgcggaggaatgtatacggccaatactatggcctcagcaattgaagcactaggaatgtctcttcctggaagcagcagtcaagatgcggtttctgatgataaaaagaatgattgtataaatacagggagggcaattgagaatctccttgaaaaagatataaaaccctctgatattatgactaaggaggcatttgaaaatgcaatcacggtagttattgcacttggaggatcaacaaatgcagtacttcatctcattg

SEQ ID NO: 286031 - DNA, 789 bp, Unknown
  Bacterial polypeptide expressing nucleotide sequence isolated from the Sargasso Sea
caaattaagccaagagatattgtaaccagaaaagctttagaaaatgccgcaacaatagttgctgcaacaggtggctctactaatgctggattacatttaccggcaattgcaaatgaagcaggaataaaatttgacttaatggatgttgctaaaatttttaaaagaaccccttatcttgctgatttaaaaccaggtggaaaatatgttgcaaaagatatgtggttagcaggtggtgttccaatgctattaaaaactttatatgaaggtggctacatccacggtgattgtatgactgttactggaaaaacaatgaaagaaaatttaaaaaatattaaatttaatcctaaacaaaaagttatgagatcttataaagatccattatcacctactggaggggttgttggtttaaaaggtaatttagcaccagatggagcgatagtaaaagttgctggattagctaaattacaatttactggaaaagcaagatgttttgataatgaagaaagtgcaatgaaagcagttcaaagcaaaaagtataatgatggtgatgtaattataattagatacgaaggaccagtagggggtcctggtatgagagaaatgttatctacaacaggtgcaatttatggacagggaaaaggggagaaagtagctcttataactgatggaaggttctctggagctaccagaggcttttgtgtcggtcatgtgggccctgaggctgccctaggaggtcctataggtcttttacgtaatggagatatcattgatatcgatgccaaaaaagga

SEQ ID NO: 286032 - DNA, 918 bp, Unknown
  Bacterial polypeptide expressing nucleotide sequence isolated from the Sargasso Sea
gttattgccgttgacgacagcgccgacgatgccaccgttgatgaatatgaacgctcagcttgcccaacctgtggctcttgctcgggcatgtttaccgcgaattcaatgaactgcctgacggaagctcttggcctatcactgcccggcaatggttctacactggccacacacgccgaccgaaaagagttgtttttagaagctggccgccgcatcgtcgcactggcacgacaatactacgagcaagatgacgacagcattttaccgcgcaatattgctaattttaacgcgtttgaaaacgccatgagcctcgacattgctatgggcggctcaaccaatactatcttgcatttactcgccgccgctaacgaagccgagctggactttagcatggctgatatcgaccgcttgtcgcgcaaggtgccacaactgtgtaaagtcgctccgaattcaccgctctaccatatggaagatgttcatcgcgctggcggggtaatggcaattttgggcgaattaagccgtgccggtttgcttcacgatgacaccactaccgtccacgcacctaccatggctgaggcaattgcccacaatgacattatggtcaccgacaatcccgcgcggcagcgcttcttttcggctggcccggcgggtattcccacccagacagcctttagccaaagcacccgctggccaagcctcgataaagaccgagaagacggctgtattcgctctattgaaaatgccttcagcctcgaaggtggcttggccgtgctgtttggcaatatcgccgaagacggctgcgtagtgaagacctctggcgtggacgagtcgattttagtatttgaaggcaaggcctatatttgcgaaagtcaggaaagcgcggttgcggctattttagatgacaaagtacaggccggtgat

SEQ ID NO: 286033 - DNA, 724 bp, Unknown
  Bacterial polypeptide expressing nucleotide sequence isolated from the Sargasso Sea
tctgaacttatagaaattggtgggatcatgccattaatgaaaatgttattggaaaagggtcttttaaatggtgattgcttaactgtaactggcaagacacttaaagaaaatttatcttcagttaaaagttatcctcaggaacaagatatagtcaaaggttttgatgagccagtcaaagaagatagccacttaagggttttgtatggaaacttagctcctgaaggggctgttgcaaagatttctggaaaagaaggtactaaatttaagggtatcgccaaaccttataactctgaagaggaagccatggaagcaattcttggaggtcagattaagaaaggagatgttgtaataattagatatgaaggacctcaaggaggtccaggaatgagagagatgttaagtccaacatctgcaattatgggtagagggttaggcaatgaagttgctttcttaacagatggcagattttctggtggaactcatggttttgtagtaggtcatataactcctgaagctcatttaggaggaccgctagctttagtggagaagggagatcagatagaaatagatgcagataaaaacgaaatcaatttattagtagataaaaataaattatctgagaggaagaaaaactggaaacaaatcgtcaatgaagaagagaaaggtgttctttctaagtatgcagattctgtagcttcagcctctaaaggtgcggtaacaactt

SEQ ID NO: 286034 - DNA, 834 bp, Unknown
  Bacterial polypeptide expressing nucleotide sequence isolated from the Sargasso Sea
tactgtaacagatggaattgcaatgggccatgaaggaatgaagtcttctttaatttcaagggacgttatagcagattcaactgaacttacagttagaggtcattgttatgatgctttagttggtttagctggttgtgataaatcattaccgggtcttatgatgtctatggttcgattaaatgtgccaagtgtgtttatttatggtggatcaatattaccaggaagatttaatggtaaggatgtaactgtagtagatgttttcgaaggcgttggaaaatatacatcaaaaaaaatgactgctcatgctttaagaaaacttgaattaaaagcatgtcctagtgcaggtgcttgtggtggacagtttactgcaaacacaatggcctgtgtttcagaagcaattggattagcgttaccttattctgctggaacaccagctccatatactgaaagaaataaatatgctttagcaagtggaaaagctgtaatgaatttattagcaaaaaatattagaccaagagatatagttactagaaagtcattagaaaatgctgcaacaattgttgctgctactggtgggtctacaaatgctggtttacatttaccagctattgcaaatgaaataggaattaaatttgatttaatggatgtggcaaaaatttttaaaagaactccttacttagctgatttaaaaccaggtggtaaatatgttgctaaagatatgtggttagccggaggtgttccaatgttattaaaaactttaatggatggcggttttattcatggtgattgcatgacagttactggaaaaactatgaaggaaaatttgaaaaatgt

SEQ ID NO: 286035 - DNA, 810 bp, Unknown
  Bacterial polypeptide expressing nucleotide sequence isolated from the Sargasso Sea
tacattagaggatgtatgtaaaattttccaatcaactccttacattggtaatttggctcctggtggaaaatatgttgccaaagatctatatgaagtaggaggagttcctgttttgataaagactcttattgatggaggattaattgatggctcatgcatgactgttactggaaaaacactagcagaaaatgtaaaagatgttgaattaccaaaaaaccaagatgttatttttcctgtaaacaatccgataactaaaacgggtggagtagttggtttaaaaggttcacttgctccagatggggcgattgtaaaaatagcaggtcttaaaaaattacaattcaaaggtaaggcaatttgttttgaacgagaagaactcgccttagatgctgtgttaagtggtaaaataaaacctggtcatgttgtaattatcagatatgagggtccaaaaggtggacctggtatgagagagatgttatccaccactagtgctttatacggacaagacctcggagaagacgtggcactaataacagatggtagattttcaggagggaccagaggcttttgtattggtcacgtaggtccagaggcttatgattgcggacccatagcattagttgaagatggcgatgaaatagaaatagatgcagataaaaatttattaaatttaaacgttgatgaaaaaactttagctgaaagaaaaactaaatgggtcaataaagagccggaatttacttcaggtactttatggaaatatatgaattgtgttggacctgcgcacttaggtgcagttactcatcctggtgcaaa

SEQ ID NO: 286036 - DNA, 880 bp, Unknown
  Bacterial polypeptide expressing nucleotide sequence isolated from the Sargasso Sea
ccatttgtttttgggacaataactgttagtgatgcaatatctatgggccacattggcatgagagggtctcttgttagtagagaggtgatagctgattcaattgaaacagtagtatttgcagaaagatttgatggtcttgtagctgtagctggatgtgataaaagtttaccgggagctatgatggcaattgcaagacttaatgttccatctgtatttatctatggaggatcaattttaccaggaaatttaaatggtaaaacaatacaaattcaagatgtttttgaggcggttggaaagcatcagagtggagagattaacgatagtgaactttatcagatagagtctagggcttgtccggggcctggttcatgtggtggaatgttcactgctaatactatgtcttctgtaggtgaagctttaggattaagcttaccaggttcagcatctgagccagctgttgatcaaagaaaaagtgcatcgagcagattagctggtgaagcagtattaaatttattgaggaatgacataaaaccttctgacattttaactaaagaagcctttgaaaatgcagtgacagtagtaactgcaatgggtgggtcaactaatacctgtcttcatttaccagcaatagcttatgaagcagggatagaccttactctagaagatatccataatatttccatgagaacacctcatctagcaaatatgaaacctgccggaaaatacctaatgtatgacttagataatgtcggtggagtgccgcttgttatgaaaagattattagatttagggttaatacatggtgaatgcatgactgtaactggaaaaacagttagagaaaatcttgaaagtattaaagacgatggtatagaaaatgaag

SEQ ID NO: 286037 - DNA, 843 bp, Unknown
  Bacterial polypeptide expressing nucleotide sequence isolated from the Sargasso Sea
catggcactggcccgaatgaaccggccgggtattttcgtttacggtggaaccatcctgcctggtcttcatgggggcaaaaatttagacattgtttcagtttttgaagcggtcggggcccactcgaatggaatgattgacgaagaggaactgaccaacatcgaaaagaaagcaatccccggaccgggctcctgcggagggatgtataccgccaacaccatgtcctccgcaatcgaggctttgggtatgagcttgcccgacagttccgcccaactcgcggtctccgaagacaaacggatcgacgcccgcgacgctggggaagcggtggtccatttaattgccaacgatatcaaaccccgggacatcatgacccgggaagcctttgaaaatgctatcaccgtggtcatcaccttgggcggttccacgaacgcggtccttcacttgctggccatggcccacgccgctgaggtgcctctctcccttgatgatttcactgagataggaaagcgtgtgcctgtgctttgcgatctcaagcctagtgggaaatacaacatgtcccactttgtacggatcggaggcttacggcccttactcaaaaccttactcgaggagggtctgctccatggggactgcatgactgtgactggaaagactttggctgaaaatgtctccgatgccgaaccctatgccccctaccccggtggtcaggacttggttcgtccctttaataatccgatcaaaccggacagccacctgcgcatcctctacggaaacctcgccgctgaaggagcggtcgccaagatttcaggtaaggaaggtttgaagttcaccggagaagccattgt

SEQ ID NO: 286038 - DNA, 808 bp, Unknown
  Bacterial polypeptide expressing nucleotide sequence isolated from the Sargasso Sea
aatggcggacaactggcgcagtaagttgattacagcaggtattacgaagtctccgaacaggtctatgcttagagcggttggtttcaaggacggtgatttcgataaaccaatagtgggggttgctaatggacattcgaatatgaacccttgtaacgctggtatccagcctttaattgacgaagctatggatgctcttgagaaagtaggtgctaaacctcaggtatttggggtgccaactgtaactgacggtattggaatgggtacagagggtatgaagtattctcttgtatccagagaagttatagcggatgctattgaaacagccgttaatgggcaaatgatggatggagcactagttgttggaggatgcgataaaaatatgcctgcgggtatgatggctcttgcccgaataaatattccatcgatatatgtttatggcggaacgataaaaccgggggtatggaaaggcaaagacctaacaatagcaagtgtttttgagtcggttggtcaatattccgcaggtgatatgacagaggaggattttcaagggattgagaaaaatgctcttcccaccttcggtgcttgtggaggaatgtttacggctaataccatgtctacttctttcgaagcacttggcatgagtttgctgggttcgggtacgatggcagcccctgacaaggagaaagcggattcttcgtccacgtccgccgaagtactgtaccgggctattcaaaataatttacgcccgcgcgatataattacacgacagtctaatgagaacgccattacgctcgtgatggcaacaggg

SEQ ID NO: 286039 - DNA, 811 bp, Unknown
  Bacterial polypeptide expressing nucleotide sequence isolated from the Sargasso Sea
aagaattagaaaattagaattagttgcatgtcctacagcgggcgcatgtggcggacaatttactgctaatacaatggcctgcgtttcagaggcaattggtttagctttaccttattctgcaggaacaccagcaccatatgaagaaagagataagtatgcaaaagcaagtggccgaatggtaatggaattattagcaaaaaaaattaaaccgagagatatcgttacaagaaaagcattagagaatgctgcaacaatagttgctgcaacaggtggatcaactaatgccgcattacatttaccagctatcgcaaatgaagcaggaattaaatttgatttgatggatgttgcaaaaatatttaaaagaacaccttatcttgcagatttaaaaccaggtggaaaatatgttgcaaaagatatgtggttagcaggtggtgtaccaatgttattaaaaactttatatgatggtggttatattcatggtgactgtatgacagttacaggtaaaacaatgaaagaaaatttaaagggaattaaatttaatccaaaacaaaaagttttaagagcttataacagacccttatcccctgatggaggtgttgtaggattaaaaggtaatttagctccagaaggtgcaatagttaaaattgcaggattaaaaaaattacaatttacaggaagagcaaggtgctttgataacgaagaaagcgcaatgaaagctgttcaaagcagaaaatataaagatggtgatgtaatcattattaaaaaggaaggaccagtagggggaccaggtatgagagaaatgcttcaacaa

SEQ ID NO: 286040 - DNA, 952 bp, Unknown
  Bacterial polypeptide expressing nucleotide sequence isolated from the Sargasso Sea
atataaaggtaaagatgtaactgttgtagatgtatttgaagcagttgaaaaacattcatcaggtaaaatgactgctgctgaattaagaaaactagagttagtcgcatgtccaagtgctggtgcatgtggagggcaatttactgctaatactatggcctgtgtatctgaagcaattggattagctttaccttattcagctggtacaccagctccatatgaagaaagagataaatatgcaaaagctagcggtaaaacagttatgaatcttttaaaaaaaagaattaagccaagagatattgttaccaaaaaagctttagaaaatgctgcaactatagttgctgctactggtggatctacgaatgcaggattacacttaccagctattgctaatgaagctggaattaaatttgatttaatggatgtagcaaaaatattcaaaagaactccatatctagctgacttaaaaccaggtggaaaatatgttgcaaaagatatgtggttagcaggtggtgttccaatgttgcttaaaactttatacgaaggaggatatattcatggtgattgcataactgttactggcaaaacgatgaaagaaaatttaaaaaatattaaatttaatccaaaacaaaaagttatgagatcttataaaaacccattgtcacctactggaggagttgttggactaaaaggaaatttggcaccagaaggtgcaatagttaaagttgctggacttaaaaaattacaatttactggaaaagcaagatgctttgataatgaagaaagtgcaatgaaagctgttcaaagcaaaaagtataatgatggtgatgttattataattagatatgaaggaccagttggaggtccaggtatgagagaaatgttatcaacaactggtgcaatctacggacaaggaaaaggggagaaagtagccttgattacagacggtaggttc

SEQ ID NO: 286041 - DNA, 772 bp, Unknown
  Bacterial polypeptide expressing nucleotide sequence isolated from the Sargasso Sea
aatgaaataggaattaaatttgatttaatggatgttgcaaaaatatttaagaaaactccttatctcgctgatttaaaaccaggtggaaaatatgttgcaaaagatatgtgggaagcaggaggagttccaatgttattaaagacattaatggatggtggttacattcacggagactgtatgacagtgacaggtaaaaccatgagagaaaatttaaaaaatgttaaatttagaactaatcaaaaagtaatgagatcttataaaaatcctatttctccaacaggaggcgttgttggattaaaaggaaatttagctccagaaggcggaattgtaaaaatagctggtttaaaaaaattacaatttacaggaagagccagatgttttgataatgaagagtctgcgtataaagcagtaataaacagaaaatacaaagatggagacatcattataattagatatgagggaccaataggaggtccaggaatgagagaaatgcttcaaacaactgcagcaatatacggtcaaggaaaaggggagaaagtagcacttataacagatggtaggttctctggggctactagaggcttttgtatcggtcacgtgggccctgaggcctccgtaggcggtcctatagcccttttaaggaatggggatatcatcgatatagatgctaaaaagggcacaattaacgtaaggcttacaaagaaggaattgagtgcaagacgtaaaaaaaggaaaccaagaaagatgaattttggtaatggtacattatgga

SEQ ID NO: 286042 - DNA, 849 bp, Unknown
  Bacterial polypeptide expressing nucleotide sequence isolated from the Sargasso Sea
tattgcagactcaaccgaattaactgttagagggcactgttatgatgctctagttggtgttgcaggatgtgataaatctttaccaggcttaatgatggcaatggtaagattaaatgtaccaagtgtctttatttatggtggttcaatattaccaggtagatttaatggaaaagatgtaacagttgttgatgtatttgaaggagttggaaaattttcttcaggaaaaatgtcagcacatgcattgagaaaactagaacttaaggcttgcccaagtgctggagcttgtggaggacaatttacagcaaacacaatggcatgtgtatctgaagcaatcggattagcattaccatattcagctggaacaccagcaccatatacacaaagagattcttatgctttaaaaagtggtaaggcagtaatgaatttgttagcaaaaaatataagaccaagagacattgttacaaaaaaatctttggaaaacgctgcaacaattgttgctgcaacaggcggatcaactaatgctgctttacatttacctgcacttgctaatgaagcaggaattaaatttgatttaatggatgttgcgagaatatttaagaagacaccttatcttgcagatttaaaacctggtggaaaatatgttgcaaaagatatgtggaaagcaggtggagttccaatgcttttaaaaactttattagatggtgggtatatacacggtgattgtatgacagttacaggtaaaacaatgagacaaaatttaaaaaacgttaagtttaataaaaatcaaaaagttatgagaactcataaccaaccattgtctcctgatggaggtgttgttggtttaaaagg

SEQ ID NO: 286043 - DNA, 866 bp, Unknown
  Bacterial polypeptide expressing nucleotide sequence isolated from the Sargasso Sea
aatggcttgcgtatcagaaactattggactatctctaccaggctcagctatgacacctgctccatatactagcagagatcaatatgcatatgatagtggtaaaacagtaatggatttaattaataaaaatttaaaaccaagagatattgttacaaaacaagcattaattaattctgctatagttgtgtctgcttccggtggctctactaatgctggactacatttacctgcaatggcaaacgaagttggtattgattttacattaggagatgtatgtaaaatatttgagtcaacaccatacattggaaatttagcacctggtggaaaatatgtagctaaagatttatatgaagtgggtggtgttccagttttaattaagactctaattgatggaggtctgattgatggctcatgtatgactgttactggaaaaacactagcagagaatgtaaaagatgttgaattaccaaaaaaccaagatgttatttatccaattagcaaacctattacaaaaactggtggcgtggttggtcttaaaggttctcttgctccagatggtgcaattgtaaaaatagcaggacttaaaaaattacaatttaaaggtaaggcaatttgttttgagagagaagaagacgcactagaagctgttttaaatggtaaaattaaacctggtcacgttttaattataagatatgagggcccaaaaggtggaccaggtatgagagaaatgttatctactactagcgctctttacggacaagaacttggagaagatgtagctctaataacagatggaagattttctggaggcactagaggtttttgtattggccatgttggtccagaggcttatgattgtggaccta

SEQ ID NO: 286044 - DNA, 705 bp, Unknown
  Bacterial polypeptide expressing nucleotide sequence isolated from the Sargasso Sea
tatgcatattaatgagttggctgatcttgttgagagttcaatagattcatccggttgcaaaggagttctttttaatactattactgtatctgacggaatctcaatgggtacacaaggtatgaaattttcattagtttcaagagaagttattgcagattcaattgaaacagttgttgggtgccttggctatgatggagttattgcaatcggtggatgtgataagaatatgcctggagcacttatgggattagcaagattggatagaccttcaattttcatttatggaggatccattcggccaagttcaataaatacagactatgtcacagtttcagaaaaagtgggcgagtatgcaaaaggagatataactaaagatgaactaatagctattgaagaagtttcagttgtgggaccaggatcttgtgggggcatgtataccgcaaataccatggcatcaagcattgaagctttgggaatgagtttaccaggaagtagcagtcaggatgcagtgtctgatgataaaaaattggattgccagaatgctggagaagcgataaaacatttacttgatcttgacttaaaaccaagtgatatcatgacaaaaaaagcttttgaaaattctattgcagttgtcattgctcttgggggctcaacaaatgctgttttgcaccttttagcaattgcacattgcattggcgttgactt

SEQ ID NO: 286045 - DNA, 718 bp, Unknown
  Bacterial polypeptide expressing nucleotide sequence isolated from the Sargasso Sea
aataggccatccatatttatttatgcgtgggtcaataatgcctggtcaatataagaaaaaaccaattgatgttgtatcagttttcgaggctgtgggtgcatattcaaataaagaaatttctaaatcagaattaacagatatagaaaaagctgccatacctggccctggctcatgtggtggaatgtatacagcaaatactatggcctcagcaattgaggcactagggatgagcttacctggtagttccactcaaattgcaatatcaagtaataaaaaagatgattgtataaattctggaaagcaactggtgaaactaattgctaaagatataaagcctagagacatcatgacaagagaagcatttgagaatgctattgctgtaacaatagctttaggtggctctacaaatgctgttcttcacttactagctatggctgatgcagcaaaagttaaattaaatattaatgactttaacaaaattggaaagaaaattcctgtcctagcagatttaaagccaagtggaactcacatgatggcgaaattttgtgaaatcggtggactgccgcctttattaaaaaggcttctaaatgcaaaacttcttcatggtgattgcattactgttactggaaaaactgtaaaagaaaatttaaaaaatgtaaaagatattttaggtgatgatgtaatcaaacccttaagtagtccgattaaaaaaagatag

SEQ ID NO: 286046 - DNA, 900 bp, Unknown
  Bacterial polypeptide expressing nucleotide sequence isolated from the Sargasso Sea
aatgcggaaatttaataagaaaaaattaccaagtctacatacatctttaggacctgatagagctcctcacagatccttttattatgcaatgggagaaacggagaaggatgttgctaaaccttttgttggagtggtatcaacatggaacgaggcagctccttgtaatatagccttaatgagacaagcccagtctgtcaaaaagggtgtaagagcatcaggtggaacaccaagagagttttgtacaattaccgtaacagacggtattgctatggggcatgagggaatgaaatcttcattaatatcaagagaagttattgctgatagtgctgaattaactgttagaggacactgttatgatgctttagtaggtattgcaggttgtgataagtctttacctggtttgatgatgtcgatggttagattaaacgttccaagtgtatttatatatggtggttcaatactaccaggaaaatacaaaggcaaagacgtgactgttgtagatgtttttgaggcagttggaaaacattcatcaggacaaatgtctgcaaaagaactaagaaaattagaattagttgcatgtccaacagcaggagcttgtggaggacaattcactgctaacactatggcatgtgtatcagaagctattggtttagcactaccttactctgctggaacaccagctccgtacgaagaacgagataagtatgcaaaagcaagcggtcgaatggttatggaattattggctaaaaaaattaaacctagagatattgttacaagaaaagctttagaaaatgctgccacaattgttgctgccacaggtgggatcaccaatgcaggtttacatttaccggcaatagcaaatgaagctggtattaaatttgacttaatggatgttgcaaa

SEQ ID NO: 286047 - DNA, 545 bp, Unknown
  Bacterial polypeptide expressing nucleotide sequence isolated from the Sargasso Sea
tggagcaattgtaaaagtcgcaggattaaaaaaacttcaatttactggaagagcaagatgttttgatactgaggagtcagcgtataaagcagttttaaaaagaaaatataaagatggagatattatagttatcagatacgaaggtccaaaaggaggtccgggaatgagagaaatgcttcaaacaacaggagctatttacggacaaggcaagggtgaaaaagttgcattaataactgacggaagattttctggtgcaacaagaggtttttgtattgggcatgtaggacctgaggcatcaataggtggacctatagctttattaaaaaatggtgacgtcattcacattgatgcaaaaaaaggaacgattaacgtaaatatttcgagaaaagaattggctaaaagaaaaagaaaatggaaaccaaaaaaaattaacttcggaaacggaacactttggaaatatgcacaaacagtaggtccggcctatctaggagcatcaacacatcctggcgctaaaaatgaagttaaatgttacgctgatatttaat

SEQ ID NO: 286048 - DNA, 916 bp, Unknown
  Bacterial polypeptide expressing nucleotide sequence isolated from the Sargasso Sea
tcattgctacgatgcattagttggtattgcaggatgtgataaatccttaccaggtctaatgatgtctatggttagattaaatgtgccaagtgtatttatttatggaggttcaattttacctggtaaatacaaaggtaaagatgtaacagttgtagatgtatttgaagcggttggaaaacattcaactggtaaaatgtcagctgcagaactaagaaaattagaattagttgcatgcccaagcgctggtgcttgtggaggtcaatttactgcaaatactatggcatgtgtatctgaagcaattggattagcattaccttattcagcaggtacaccagctccatatgaagaaagagataaatacgcaaaagctagtggtaaaacggttatgaaccttttgaaaaaaggaattaaaccaagagacattgttacaagaaaagctttagaaaatgctgcaacagttgttgctgcaacaggcggatctacaaacgctggattacatcttcctgctattgcaaatgaagcaggaattaaatttgatttaatggatgttgctaaaatttttaaaagaacaccttatcttgcagatttaaaaccaggtggaaaatatgttgcaaaagatatgtggttagcaggtggtgttccaatgttattaaaaactttatatgaaggtggatatattcatggtgattgtatgactgttactggaaaaactatgaaggaaaatttaaaaggaattaaatttaatccaaaacaaaaagtaatgagatcttataaaaatccattatctccaacaggaggcgttgtaggcttaaaaggaaacttagctccagaaggtgcaattgttaaagttgctggacttaaaaaattacaatttactggaaaagcaagatgctttgaaaatgaggaaagtgcaatg

SEQ ID NO: 286049 - DNA, 784 bp, Unknown
  Bacterial polypeptide expressing nucleotide sequence isolated from the Sargasso Sea
aacaaagccccagttcttgctgatttaaaaccaagcgggaagtatttaatgacagattttgtcaggattggcgggttaccgccattgatgaaaatgctactggatgcaggactacttcatggagactgtatgactgttacaggaaaaacagtacgtgataatctgaaaaacgttaagccttatgaagaaggccaggagattgtaaaatcacttgatgatcccataagaaaaactggtcacctagtgattctgcgtggaaatcttgctgctgaaggagcagtagcaaaaatatctggaaaagaaggagagtttttcaggggaactgcgcgagtattcaattccgaggaagaagccctcattcgtattctggacggtactgtagtcaaaggtgatgtgattgtaattagatatgaaggtcccaaaggaggtccaggtatgcgtgaaatgctttcaccgacctcagccattatgggaagagggcttggtaatgatgtggctcttattactgatgggaggttttcaggtggttctcatggtttcgtgatagggcacataaccccagaagcttttgaaggaggtttgctgggaatggttgaaaatggtgataacattacaattgatattgcaaaacgcaccatagatctagaagtttcggaacatgaaattaaaagtagacaagatagctgggtttgccctcaggcccgttataccagaggcgtacttgcaaaatacgcaaaatcagttagttcagcttctttgggcgcagtaacagatttgccttaaa

SEQ ID NO: 286050 - DNA, 787 bp, Unknown
  Bacterial polypeptide expressing nucleotide sequence isolated from the Sargasso Sea
acaaaaattgggaaaagtaactcctgtacttgcagacctaaaaccatttggtagtcattttatgtctgagttaaatgcaaacggtggaatacagccattaatgaaaagtttattagataaaggaatgcttcatggagattgtttgacggttactggtaattcattagaagaaaatttaaaagatatagagccgtataaagatgaaaaaattataaaaagcttagacaatccaattaaatctgatagtcatttaagagtgttatatgggaacttagctaaggatggcgctgttgcaaaaattacaggaaaggagggcttgtcatttgaagggaaagccaaagtatttaactcagaagaagagggagttgcggcaatccttgcaaaaaaaattaatccaggcgatgtagttgtaattagatatgagggaccaaaaggtgggccaggcatgagagaaatgttaaagccaacatctgcgatcatgggattaggcttaggagataaagttgcttttataactgacggtagattttctggaggaactcatgggtttgttgtgggtcatatatctccagaggcagcagatggagggctaattgctttaatcaaagatggagacaatatcttgatcgatgcagaaaatgatgaattaatactaaaggttgatcaagatgaaatcgatttaagaaagaagaactggaagaatcctaccaatcctccaaaaaaaggagttcttgcaaagtatgctgcaagtgtaaaatctgccagcttaggagcaattactgattaa

SEQ ID NO: 286051 - DNA, 868 bp, Unknown
  Bacterial polypeptide expressing nucleotide sequence isolated from the Sargasso Sea
aagtacgaatacagtccttcatactcttgctgcatccatagaggcaggcctgtcctttgatatgaaagaaatcaatgaaattagtcgtagaacaccttacttgtgcaaagttagccccgcaactccaaatgttcacatggaggatgtgttaaaagctggcggtatatctgctattctaatggagctatcaaaacaaaatggacttttaaaacttgatcggcccactgtgctgggattaaccttgggagaatcaatttcaggtgctaaaaattataacaaagatataattagatcagttgatgaccctttttcaaaggaaggcgggttagctgttctatttggaaatattgcacctcatggatccatagtaaaaactgcagcagtaaacaaagaaatgttagttcatgaaggtcctgctagaatttatgagtctcaggatcaggcaatgaaaggcatactagacggagaagtttgtgatggtgatgtagtagtaataagatatgaaggcccaaaaggaggaccaggaatgcctgagatgcttgcaccaaccagtgcaataatgggtatggggctaggttctaaggtcgccttaataactgatggtcgattctctggaggcacaagaggagcttgtgttggtcatatttctcctgaagctgctgctggtggaccaatagcaattatccagcctggtgaaatgataaaaattgatataaatgccaggtcgatagaattaaaaattgaacaatcagaaatagataagagaatggaaaaccttccagattttgaggcaaaaatacaatctggatatcttggtcgttacacaaggatggtatcatcagcaaatacaggagcagttttaatataa

SEQ ID NO: 286052 - DNA, 621 bp, Unknown
  Bacterial polypeptide expressing nucleotide sequence isolated from the Sargasso Sea
aagtaatgagaaaatataacaatccattatcaaaaactggcggcgttgttggattaaaaggaaacttagcaccagaaggtggaatagtaaaaattgcaggattaaagaaattgcaattcactggaaaagcaagatgctttaatacagaagaagatgcatacaaagcagttaaaaatagaaaatataaagatggtgatataattataattagatacgaaggacctaaaggtggtcctggtatgagagagatgctacaaacaacagctgcaatatacggacaaggaaaaggggagaaagttgctcttataaccgatggaaggttctctggggctacgagaggcttctgtataggtcatgtgggtcctgaggcctctgtaggcggtccaatagcccttttaaggaacggagatgttattgatattgatgcacaaaaaggaaccatcaatgtgagactttctaaaaaagaattaagttcaagaagaaaaaaatggaaaccaaagaaaatgaattttggtaatggaacattatggaaatacgcacaaactgttggtcctgcttataaaggagctccaacacatccaggtggaaaaaacgaggttagaacttacgctgatatttaat

SEQ ID NO: 286053 - DNA, 712 bp, Unknown
  Bacterial polypeptide expressing nucleotide sequence isolated from the Sargasso Sea
tccatcccgggagcaggatcctgtggaggcatgtacaccgcaaatacgatggcttctgcaatcgaggctatgggcatgagtcttcccaacagttcagctcaggctgcgatttccaaagacaaggtcaaggattgtgtcaaagccggggaagcggtgatgaagttgatcgatatgaacctctgtccccgagacatcatgacccgaaaagcgtttgaaaatgcaatcaccgtcgtaatggcactcggaggttccaccaacgcggtcctgcatctgctagcaatggctcactcaaccggagtgaacctgaaaattgacgattttcgcaggattggccagaaatctcccgtactggcggatctcagaccaagcggacagttcatgatgatcgattttgtgaaaattggcgggcttcctcccttgatgaaaatgttactagacgcgggtctgctccatggggactgcatgacagtgacgggtaaaacgctgaaacaaaatctgaaaggagttaaggcatacccgaagaagcagaaaatcattcgacctctaaaagatccagtaaaagccactggacatctcgtcatcctcaaaggaaacttggcacgtgacggtgctgttgcaaaaatctccgggaaggaaggagaagtttttcaaggaagtgccaggatttttgaatctgaggaagaagcactgcagaaaattctggatggaaccg

SEQ ID NO: 286054 - DNA, 797 bp, Unknown
  Bacterial polypeptide expressing nucleotide sequence isolated from the Sargasso Sea
ttcagtagttggaccagggtcttgtggaggtatgtatacagcaaacaccatggcatcaagcattgaagcattggggatgagtttgccaggaagcagcagtcaggatgcagtgtctgatgataaaaaagtagattgtcaaaatgctggggaggcaataaaacgtttacttgatcttgatttaaaaccaagtgatatcatgacaaaaaaagcttttgaaaattctatagcagttgtaattgcgcttggaggatcaacaaatgctgttttacatctcattgcaattgctcattgcataggcgttgacttagatctagatgattttactaggattggaaaagtgactcctgtattagcagacattaaaccttttggcgatcactttatgtctcaattaaacgaaataggtggaattactccgatgatgaaaactatgcttgataataatcttttgcatggagattgtatgaccgtaactggtaaaacattagaagaaaatctcaaggatttagatccttatcctactaatcaaaagattatcatgccattgaataatcccgtaaaggattcaagtcacttaagggtgctttacggaaatttagctccagaaggagccgtagcaaaaattactggcaaagaagggactgttttcactggaaatgccagagtctttaattctgaggaagagggaatgaaagcaattcttgataagaagattaaagatggagatgttgttgttataaggtttgagggtccccaaggtggtcctggcatgagagaaatgcttaagccaacatctg

SEQ ID NO: 286055 - DNA, 616 bp, Unknown
  Bacterial polypeptide expressing nucleotide sequence isolated from the Sargasso Sea
atgagaagttataaaaatccaatcacgccaacaggtggtgttgttggattaagaggtaatttagctcctgagggtggaatagtaaaaatagcaggattaaaaaaattacaattcactggaaaagcaagatgttttaatacggaagaggatgcatacaaagcagttaaaaatagaaaatataaagatggtgatataataataattagatacgaaggaccaaaaggtggtcctggaatgagagaaatgcttcaaacaacagcagcaatctacggtcaaggaaaaggggagaaagtagctcttataacggatggtaggttctctggggcaacaagaggcttttgcattggtcatgtgggtcctgaggcctctgtaggcggtcctatagcccttttaaggaatggtgacgttattgatatagatgctaaaaaagggactatcaatgtcagactttctaaaaaagaattaaattctagaagaaaaaaatggaaacctaaaaaaatgaattttggaaacggtacgttatggaagtatgctcaaactgttggcccagcttataaaggtgcaccaacacatcctggtggaaaaaacgaggttaaaacttacgctgatatttaat

SEQ ID NO: 286056 - DNA, 991 bp, Unknown
  Bacterial polypeptide expressing nucleotide sequence isolated from the Sargasso Sea
tccttattctgctgggactccagctccattcaatagaagagataaatatgctttagctagtggaaaagctgtaatgaatttattagcaaaaaatataagaccaagagatattgtaacaaaaaaagcattagaaaatgctgcaacaattgttgctgcaacaggaggatcaacaaatgccgcattacacttaccagctattgcaaatgaaattggtattaaatttgatttaatggatgttgctaaaatatttaaaagaactccttatcttgcagatttaaaacctggtggaaaatatgtagcaaaagatatgtggaaagcaggcggtgttcctatgttgcttaaaactcttatggatggtggatatattcacggtaattgcatgacggttacaggcaaaactatgaaagagaatttaaagaacgttaagtttaattctaaacaaaaagtgatgagaaaatacaataatcctttatctaaagatggaggtgttgttggaatgaaaggaaacttagctccagaaggtgcaattgttaaagttgctggtttaaaaagattacaatttactggaagagcaagatgttttgatacagaagaagcagcttacaaagctgttaaaaatagaaaatataaagatggcgatattataattattagatacgaaggaccaaaaggtggacctggtatgagggaaatgcttcaaacaacaggagcaatttatggtcaaggtaaaggagaaaaagttgcacttataacagatggaagattttctggggctacaagaggtttttgtattggacatgttggacctgaagcatctgtaggtggaccaatagctttactaagaaacggagatataattgatttagatgcgaagaaggggacaattaatgttcgtttatctaaaaaagaattagctaaaagaagaaagaaatggaaacaaagaaaattaacttttggaatggaacactttggaaaatatgcgcaactgtag

SEQ ID NO: 286057 - DNA, 886 bp, Unknown
  Bacterial polypeptide expressing nucleotide sequence isolated from the Sargasso Sea
gaagcaattggattagctttaccttattctgccggaacacctgccccatatgaagaaagagataaatatgcaaaagcgagcggaaaaacagttatgaatcttttaaaaaaaagaattaagccaagagatattgttaccaaaaaagctttagaaaatgctgcaactatagttgctgcaacaggtggatctactaatgcaggattacacttaccagctatcgctaatgaagctggaattaaatttgatttaatggatgtagcaaaaatattcaaaagaactccatatcttgctgacttaaaaccaggtggaaaatatgttgctaaagatatgtggttagcaggtggtgttccaatgttgcttaaaactttatacgaaggaggatatatccatggagattgtatgacagtaactggcaaaacgatgaaagaaaatttaaaaaatattaaatttaacccaaaacaaaaagttatgagatcttataaaaatccattatcacctactgggggcgttgttggtctaaaaggaaatttggcgccagatggtgcaatagttaaagttgctggacttaaaaaattgcaatttaccggtaaagcaagatgctttgataatgaagaaactgcaatgaaagctgttcaaagcaaaaagtataatgatggtgatgttattataattagatatgaaggaccagttggaggtcctggtatgagagaaatgttatctacaacaggtgcaatttatggacaaggaaaaggggagaaagtagcccttattacagacggtaggttctctggagccactagaggcttttgtgtgggtcacgtgggccctgaggccgctctaggcggtcctataggccttttacgtaatggagatatcattgatatag

SEQ ID NO: 286058 - DNA, 436 bp, Unknown
  Bacterial polypeptide expressing nucleotide sequence isolated from the Sargasso Sea
gatgaaagccataatggatggaagtgtcaataaaggtgatgtagtcgttgttcgatatgaaggacctaaaggcggaccggggatgcgagaaatgctcagtccaaccagtgcgatcaatggtagaggccttagcgagcatgtcgcactgattaccgatggtcgattctctggtggctcacatgggtttgtaattggtcacattacccctgaggcttttgacggcggaccgatcgctttgattgaagacggagattccatcacgattaacgcagaaacttgtgagatcaacctgcttatctctgatgaggagtgggaggttagacgggccaaatggtttaaaccagagccctacacaaaaatcggaacactagcgaaatatgcaaagcttgtaagcacggccagtgagggtgccgtaacagacaagtacctcgattag

SEQ ID NO: 286059 - DNA, 886 bp, Unknown
  Bacterial polypeptide expressing nucleotide sequence isolated from the Sargasso Sea
atatctatggtaattgctttaggcggatctacaaatgcggttttacatttaattgctatagctcatgaagctagggtaaatctatccttaaaagactttgaaaggcttggtaagcgaacaccggtattggctgacttaaaaccgagcggcaactatttaatgtctgaattaattgaaataggaggtatcgttcccttgatgcgaatgatgcttgaaaaagaacttcttcatggcgatcaaataacggttacgggtaagactttggaagaaaatctatctgatacaaaaaattaccctaaagaccaagaaatagttaaagaatttgatgatccaataaagaaagatagtcatttacgtatcttgtacggaaatttagcccctggaggttctgtagcaaagatatctggaaaggaggggctgacatttgagggtaaggctagagtgtttgattccgaagaaactgctatgcaagcgattatgaatgacaaaataattgaaggagatgttttagtaataaggtatgaaggccctaagggaggaccaggaatgagagagatgttaggacctacttcagcgataatgggaaagggactaggggataaagttgcgttcttaacggatggaagattttccggaggaactcatggatttgtggttggtcatatttctcctgaagcctatgaagggggccctttagcatttctgaggaatggtgattcaatcagcattgatgctaattctaaccaaatcaacgtttctatttcggataaagaaattaaaaaaaggagagattcttgggaaaagccaaaaagtaatgaagaaataggagtgttaggaaaatataggtctttggttacttcagcttcgaatggagcagtaactacca

SEQ ID NO: 286060 - DNA, 805 bp, Unknown
  Bacterial polypeptide expressing nucleotide sequence isolated from the Sargasso Sea
aatgctgcgaggagcaggatttaaagatgaagattttgagaaatctattgttggaattgcttcacttggagcaagcgtaacaccctgtaatatgcatctaaactcccttgcagaaattgttgaagaatcagtcaataatgcaggatgtaaagctgtaacattcaatacaattactgtatctgatggaatttctatgggtacagagggtatgaaatattctcttgtttcaagagaagtaatagctgactctatagagactgttgtaggttgtttggcttacgatggagtagtaggtattggaggctgcgacaaaaatatgcctggtgtaattattggattagcaagacttaataggccatctttgtttatttatggcggctctattaggccaagcaagcaaaatactgattatgttactgtgtgtgaaaagactggagagttttcaaaaggttcaatgtctgaagaagaattaattgctgttgaaaaagtttcagtggtgggaccgggctcatgcggaggaatgtatacagcaaatacaatggcatcagcaattgaagccctaggaatgtctcttccaggaagcagcagtcaggatgcggtttctgctgataaaaaaaatgactgcataaatacagggagtgcaattgagaagctcctagaaaaagatattaaaccttctgatattatgacaaagcaggcatttgagaatgcaataaccatagttattgcgcttggcggatcaacaaatgcagttcttcatcttatcgcaatggcgcacgctataaatgttgacattaatttagac

SEQ ID NO: 286061 - DNA, 407 bp, Unknown
  Bacterial polypeptide expressing nucleotide sequence isolated from the Sargasso Sea
aatggaacttaacaagtatagtaaagtaattacaaaaaaggggtctcaaccagcagctcaagctatgcttcatgctatcggattgaaaaaagaagattttgataaaccatttgtaggcattgccagtacaggctatgaaggaaatccatgtaatatgcatctcaatgatttatcctatcaaataaaaaatgaaatagataaagcgaaagctgttccattaattttcaacacgattggtattagtgatggcatttcaatgggaacctcgggaatgaagtactcacttccctcaagagaaataattgcagactcaattgaatccgttgtcaatggtatgtcatatgactctttaattacagttgtaggttgtgataaaaatatgccaggtgccttgatggctatgatta

SEQ ID NO: 286062 - DNA, 894 bp, Unknown
  Bacterial polypeptide expressing nucleotide sequence isolated from the Sargasso Sea
acgattggtgtttctgatggtatgtccatgggaactgacgggatgtcatattcactgcagagccgcgatttgatcgctgattcgatcgaaacggttatggcagctcagtggtacgatggccttgtcaccttgccagggtgcgataaaaacatgccgggctgtatcatcgcgatgggtcgcttggatcgtccagcaatcatggtctatggtggcacaatccgggcagggtgcggcaccattgggggtgtcgaagagaagcttgacgttgtatcggcctttcagagctatgggcaatttctggcaggggcgatcacagaagaagaacgccagacgattgtgtcgtgcgctattcccggagcaggagcgtgtggcgggatgtataccgcaaacactatggccacggctatcgaggcgatgggcctgagcctgccgtattcgtcatgcaccccagctgaggatccggccaaaatccaagagtgtgttactgctggcgcgatgatggaaatgcttctgtcggaaggattgacaccgcgccgagtcgtcactcgcgagtcgctcgagaatgcgatggttgtgactatggcactcggcgggtcgacgaatgctgtattacacatgatcgcgatggcgcgtgcgtttgagctcgagttgagccttgatgattggctcgcaacgagttcacgagtgccgctgctcgctgatctgaaaccgtcagggcagtatgtgatggaagatctccatgatgttggtggggttcctggtgtgatgcgttacttgctcaacgagggtatgctcgacggcgaccagatgacggtaaccggcaagacgttgggcgaaaacctgtccgaggttccggacctcctaaaggatcaagacgttcttgcgtcgctcgag

SEQ ID NO: 286063 - DNA, 616 bp, Unknown
  Bacterial polypeptide expressing nucleotide sequence isolated from the Sargasso Sea
attacagaggttccagagcaacagatagtaaaaccagtagaacaaccaatacatgaagtaggaacagctgtgattctaaaaggctcattagcaccagaaggtgcagtgattaaaactgcaggtgttgaaatgacagagtttacaggtaccgccagagtttacgatagagaagaatatgcatttgaatcagtttcaaaaggagatgttgatgagggagatgtcgtagtaattagatatgaaggtccaaaaggaggaccaggaatgagagaaatgctttcgactacagcagcacttgtaggtcaaggactaggaaaaaaggtagcaatggtaacagacggtagattctctggcggaacgagaggattcatggttgggcatgttgccccagaagcatttgttggaggcccaattgcattagtaaaagacggagataagatttcaatcaatgtagaagattcttcaattaacctacatgtttcagaagaagaattagcaaataggaaaaaagaatggagaagaccagaaccaaattattctaccggggcattagcaaaatttgcatctctagtaggatctgcggcaaaaggtgcaattacaaaacctgcagagtattaat

SEQ ID NO: 286064 - DNA, 826 bp, Unknown
  Bacterial polypeptide expressing nucleotide sequence isolated from the Sargasso Sea
ctaatgactaagaaagcatttgaaaatgcaatatcagtaattatggcaattggaggatcaacaaatgcggtattgcacattttagccattgcaaatactgcaggaatagatatcaacattaatgattttgagagaatcagacaaaaagtacccgttatttgtgatcttaaaccgagtggtaaatatgtgacggtggatcttcataatgcaggtgggattccacaggtaatgaaaatacttttgaatgcaggattaattcatggcgattgcaaaaacattgaaggcaaaaccatttcagaatacttacagaatattccagataagcctccaacaaatcaaaatgtcataagagagatagatgaccctctttataaaaaaggacacctagcgatattaaaaggtaacttagcgagcgaaggctcagtagccaaaattagcggagtaaaaaatcctgtattaacaggtccagcaaagatttttgaaagtgaagaggattgtttagaatcgatattaaataatgatatcaaagctggtgatgttgttgttataagaaacgaagggcctgtaggaggaccaggtatgagagagatgttagctcctacatctgcaattgttggtcaaggcctcggagagaaagtagctttaattaccgatggcagatttagtgggggtacttatggtctagttgtgggtcacatagccccagaggctgctgttggcggaaatattgctctaataagacaaggtgatttaattactgtagatgctgtaaaacaactaattgaagttgatttgtctgacgaagaattagaaaaaagaaaaaaag

SEQ ID NO: 286065 - DNA, 874 bp, Unknown
  Bacterial polypeptide expressing nucleotide sequence isolated from the Sargasso Sea
gcaccatgtaacattgcactaatgagacaagcgcaatctgttaaaaaaggagttaaatcatctggggggaccccaagagaattttgcacgattacagttactgatggtattgctatggggcacgaaggaatgaaatcttcattagtttcaagagatgttatagcagactcaaccgaattaactgtaagaggtcactgttatgatgcattagtcggtgtggctggatgcgataaatccttaccgggtttaatgatggctatggttagattaaatattcctagtgtatttatttatggtggctcaatacttccaggtagatataacggtaaagatgtaacagtcttagatgtttttgagggtgttggaaaacattcttcaggaaaaatgacagaacatgctttaagaaaactagaattaaaagcatgccctagtgctggagcatgtggtgggcaatttacagcaaacactatggcttgtgtgtcagaagcaatcggattagcccttccttattcagcaggaacaccagcaccatatgaacaaagagataaatatgctttacaaagtggtaagacagtaatgaatttattaaaaaaaaatattagacccagggatatagttacaagaaaatcacttgagaatgccgctactattgtagctgccacaggaggctctactaatgcggctttacatttacctgctcttgcaaatgaaattggaattaagttcgacctaatggacgtggctaaagtttttaaaagaactccatatttggcagatttaaaacctggtggaaaatatgttgccaaagacatgtggaaagcgggaggtgtaccaatgttactgaaaacattattagatggtggttatatacatg

SEQ ID NO: 286066 - DNA, 823 bp, Unknown
  Bacterial polypeptide expressing nucleotide sequence isolated from the Sargasso Sea
cgcaacatcgccaccaaggcggcgttcgagaacgccatggcgctcgacatcgccatgggcggctccaccaacaccgtgctgcacctgctggcggcggcccaggaggcgggtgtcgacttcaccatggccgacatcgaccgcatgtcgcgcaaggtgccgcagctctgcaaggtggcgccctctacccagaagtaccatatggaagacgtgcaccgcgccggcggcgtggtcgccatcctgggtcagctggaaaaagcgggtctggtgcacggggatacccgcaacgtgctgggcacctcgctggtggagctgctggccgaatacgacgtcagccgccagcccagccaggaggtggtggacttctaccgcgccggcccggccgggatccgcaccaccaaggcgttcagccaggattgccgctggccggagctggatctggaccgcgccgaaggctgcatccgctcgctggacaacgcctacagcctggaagggggcctggccgtgctcgccggcaacctggcgctgaacggtgccatcgtcaagaccgccggggtggatgaggagaacctcaccttccgtggcccggcccgggtattcgagagccaggacacggcggttgccggcattctggatggcaccgtcaaggccggtgaagtggtggtgatccgctacgagggcccgaaaggcggcccaggcatgcaggagatgctctaccccaccacctatctgaagtccatggggctcggcaaggcgtgtgcgctgatcaccgacggtcgcttctccggcggcacctcgggcctctccatcggccacgtctcgccgg

SEQ ID NO: 286067 - DNA, 667 bp, Unknown
  Bacterial polypeptide expressing nucleotide sequence isolated from the Sargasso Sea
tgattgtttgaccgttacaggaaaaactatttcagaaaatttaagtaaggtaaaaaaatatccaaaaaaacaaaaaattattaaatctttagataatccaataaaaaaagatagccatcttgtagttctttacggaaatattgctccagaaggagcagttgctaaaatttctggcaaagagggtctagtctttgaggggaaggcaatagtttttaattcggaagaattggcaatgaaagcaatacttagtggcaaggttaaaaaaggtcatgttattgttataagatatgaagggccaaaaggtggtccaggaatgagagagatgcttggaccaacgagtgcaataatgggtaaaggtttaggtaaagatattgcgttaattacagacggaagattttctggaggaagtcacggatttgtaattgggcatgttgctccagaagctgcttcaagaggcccaattgcagttattaaaaatggcgaccaaataattattgatgcaaaaaatcaaactataactttaaaagttagtaaaaaagaaatgaatagtaggtttaaaaagctacctgtttttaaaagtaaatataaaaaaggggttttagctaaatatgcatctcaggtttcttctgcatctactggagcagttacagatataatcgatagttag

SEQ ID NO: 286068 - DNA, 963 bp, Unknown
  Bacterial polypeptide expressing nucleotide sequence isolated from the Sargasso Sea
ggcgcttgcgggggacatttactgcaatactatggcgtgcgtatctgaagcaattggacttgcattaccttattctgctggaacacctgctccgtataacaaaagagataaatatgctttagaaagtggaaaagcagtaatgaatttattagctaaaaatattagaccaagagatattgttacaaaaaaatctttagaaaatgcagcaacgattgttgcagcaacaggaggttcaactaatgcagctttacatcttccagctatagcaaatgaaattggaattaaatttgatcttatggatgttgcaaaaatttttaaaagaacaccttaccttgcagatttaaaaccaggtggaaaatatgttgctaaagacatgtggaaagctggtggtgttccaatgttattaaaaactctttttgagggtggatacattcacggtaattgtatgactgttactggcaaaactatgaaagaaaatttgaaaaatgttaaatttaattctaatcaaaaagtaatgagaaaatttaataatcctttatcaccagatggaggtgtggttggaatgaaaggaaacttagcaccagagggagctattgttaaagttgcaggtttaaaaagattacaatttacaggacgcgcaagatgcttcgacacagaagaggcagcttataaagctgttaaaaatagaaagtataaggatggtgatattataattattagatatgaaggaccaaaaggtggtcctggtatgagagagatgcttcaaacaacaggagcaatttacggtcaaggcaaaggtgaaaaagttgcacttataacagatggaagattttctggagctacaagaggattttgtataggtcatgttggtcctgaggcatctgtaggtggtccgatagctttattgagaaatggagacataattgatttggatgcaaaaaaaggaactataaatgttagaat

SEQ ID NO: 286069 - DNA, 946 bp, Unknown
  Bacterial polypeptide expressing nucleotide sequence isolated from the Sargasso Sea
taaggttaaatgtaccaagtggtttttatatattggaggttcaattcttccaggaagattaaatggtaaagacataactgttgtagatgtttttgaaggagttggaaaatatacttcaggaaaaatttcagaacacgcattaagaaaaatagaattaaaagcatgcccaacagccggtgcttgtggtggtcagtttactgcaaatacaatggcatgtgtatcagaagcaatgggattagctttaccttattctgctggaactccagctccatttaatagaagagataaatatgctttagcaagtggaaaagcggtaatgaatttattagcaaaaaatattagaccaagagatattgtaacaaaaaaagctttagaaaatgctgcaacaattgttgctgcaacaggtggatcaacaaatgccgctttacacttaccagctattgcaaatgaaattggtattaaatttgatttaatggatgttgctaaaatatttaaaagaactccttatcttgcagatttaaaacctggtggaaagtatgttgcaaaagatatgtggttagctggtggtgttcccatgttactaaaaacacttatggatggtggttatattcacggtaattgcatgacggttacaggcaaaactatgaaagaaaatttaaaaaatgttaagtttaattctaaacaaaaagtaatgagaaaatataataatcctttatctaaagatggaggcgttgttggaatgaaaggaaacttagctccagaaggtgcaattgttaaagttgctggtttaaaaaaattacagtttactggaagagcaagatgttttgatactgaagaagcagcttacaaagctgttaaaaacagaaaatataaagacggtgatattataattattagatatgaaggaccaaaaggtggacctggtatgagggaaatgcttcaaaca

SEQ ID NO: 286070 - DNA, 775 bp, Unknown
  Bacterial polypeptide expressing nucleotide sequence isolated from the Sargasso Sea
ccagcaccatacacgcaaagagattcttatgctttaaaaagtggtaaagcagtaatgagtttattagaaaaaaaaattagaccaagagatattgttacaaaaaaatccttagaaaatgcagccactattgttgctgcaactggcggatccacaaatgcagcactgcatttaccagcacttgctaatgaagctggaataaaatttgatttaatggatgttgcaagaatatttaaaaaaacaccttatcttgcagatcttaaacctggtggaaagtatgtagcaaaagatatgtggaaggctggcggtgttccaatgttattaaaaacacttttagatggtggatacatccatggtgattgtattactgttacaggtaaaactatgagacaaaatttaaaaaatgttaagtttaataaaaatcaaaaagttatgagaacatacaatcaaccattatctccagatggtggcgtagttggattaaaaggaaatttagcacctgatggagctattgttaaagtagctggtttaaaaagattacaatttactggtaaggcaagatgttttgatacagaagaagctgcttacaaagctgttaaaaataaaaagtataaagatggtgatatcattataattagatatgaaggtcctaaaggcggtccaggtatgagagaaatgcttcaaactacaggagcaatatatggacaagggaagggtgaaaaagttgcactaattacagatggaagattttcaggagctacaagaggattttgtattg

SEQ ID NO: 286071 - DNA, 644 bp, Unknown
  Bacterial polypeptide expressing nucleotide sequence isolated from the Sargasso Sea
aaaggcatgtccaactgctggtgcttgtggtggtcagtttactgctaatacaatggcatgtgtatcagaagcaatgggattagctttaccttattctgctggaactccagctccatttaatagaagagataaatatgctttagctagtggaaaagctgtaatgaatttattagcaaaaaatattagaccaagagatattgtaacaaagaaagctttagaaaatgctgcaacaattgttgctgcaacaggaggatcaacaaatgctgctttacacttaccagctattgcaaatgaaattggtattaaatttgatttaatggatgttgctaaaatatttaaaagaactccttatcttgcagatttaaaacctggtggaaaatatgttgcaaaagatatgtggaaagcaggtggagttcctatgttgcttaaaactcttatggatggtggatatattcacggtaattgcatgacggttacaggcaaaactatgaaagagaatttaaagaacgttaagtttaattctaagcaaaaagttatgagaaaatacaataatcctttatctaaagatggaggcgttgttggaatgaaaggaaacttagctccagaaggtgcaattgttaaagttgctggtttaaaaaggttgc

SEQ ID NO: 286072 - DNA, 885 bp, Unknown
  Bacterial polypeptide expressing nucleotide sequence isolated from the Sargasso Sea
cactaccttactctgctggaacccagctccgtacgaagaacgagataagtatgcaaaagcaagtggtcgaatggttatggaattattagctaaaaaaattaaacctagagatattgttacaagaaaagccttagaaaatgctgcaacaattgttgctgcaacaggaggatcaacaaatgcaggtttacatttaccggcaatagcaaatgaagctggtattaaatttgacttaatggatgttgcaaaaatttttaaaagaactccatatcttgctgacttaaaaccaggtggaaaatatgttgctaaagatatgtggttggcaggtggagtaccaatgcttttaaaaactctttatgaaggtggttatattcatggagattgtatgactgttacaggtaaaacaatgaaagaaaatttaaagggaattaaatttaatccaaaacaaaaagtaatgagatcatttaaaaatccattatctccgacaggtggtgttgttggtttaaaaggtaatttagctcctgaaggaggaatcgttaaaattgctggacttaaaaaactacaatttactggaagagcaagatgttttgataatgaagaaagcgcaatgaaagcagttcagagcagaaaatataaagatggtgatgtaattattattagatatgaaggaccagttggtggaccaggtatgagagaaatgctttcaacaacaggtgcaatttatggacaaggtaaaggagaaaaagttgctttaataactgatggaagattctctggagcaactcggggattttgtgtaggccatgtaggacctgaggctgcattaggtggaccgatcgctctattacggaatggagatattattgatattgacgctaagaagggaac

SEQ ID NO: 286073 - DNA, 757 bp, Unknown
  Bacterial polypeptide expressing nucleotide sequence isolated from the Sargasso Sea
agcaaaaccatttgttggtgttgtttcaacctggaatgaagctgcaccttgtaacattaatttaatgaaacaggcccaatctgttaaaaaaggtgtgcattcagcaggtggaacaccaagagaattttgcacaattacagtaacagacggtattgcaatgggacatgaaggaatgaagtcttctttaatttcaagggacgttatagcagattcaacagaacttacagttagaggtcattgttatgatgccttagttggtttagctggttgtgataaatcattaccgggtcttatgatgtctatggttcgattaaatgtaccaagtgtgtttatttatggtggatcaatattaccaggaagatttaatggtaaggatgtaactgtagtagatgtttttgaaggcgttggaaaatatacatcaaaaaaaatgacagctcacgctttaagaaaacttgaattaaaagcatgtcctagtgcaggtgcttgtggtggacagtttactgcaaacactatggcctgtgtttcagaagcaattggattagcattaccttattcagctggaacaccagctccatatactgaaagaaataaatatgcgctagcaagtggtaaagctgtgatgaatttattagcaaaaaatattagaccaagagatattgttacaagaaagtcattagaaaatgctgcaacaattgttgctgctacaggtggatcaacaaatgctggtttacatctacctgctattgcaaatgaaatt

SEQ ID NO: 286074 - DNA, 715 bp, Unknown
  Bacterial polypeptide expressing nucleotide sequence isolated from the Sargasso Sea
ttagatggtggttatatacacggtgattgtatgacagttacaggtaaaacaatgagacaaaatttaaaaaacgttaagtttaataaaaatcaaaaagttatgagaactcataaccaaccattgtctcctgatggaggtgttgttggtttaaaaggaaatttagcacctgatggagcaattgttaaagttgctggattaaagaaattacaattcacaggtaaagcaagatgctttgatacagaagaagctgcttataaagcagttaaaaataaaaaatataaagacggtgacattataattataagatacgaagggccaaaaggtgggccaggcatgagagaaatgcttcaaacaactggagcaatttacggacaaggtaaaggtgaaaaagttgcacttataactgatggaagattttcaggtgcaacgagaggattttgtataggccatgttggacctgaagcatcagttggaggaccaatagctttacttaagaacggagacatcatagatttagatgctaagaagggaacaattaatgttcgtttatctagaaaagaattagccaaaagaagaaagaaatggaaaccaaagaaaattaattttggtaatggaacactttggaagtatgctcaaacagttggtccagcttatctaggtgcacctacgcaccctggagcaaaagaagaggttagaacatacgctgatatttaat

SEQ ID NO: 286075 - DNA, 694 bp, Unknown
  Bacterial polypeptide expressing nucleotide sequence isolated from the Sargasso Sea
ggtaactgtttaacggttactggaaaaactatgagggaaaatttaaaaaaagttaaatttaataataaacaaaaagtgatgagaaaatataacaatccattatcaaatgatggaggagttgttggattaaaaggaaatcttgctccacaaggagctattgtaaaagttgcaggattaaaaaaacttcaatttaccggacgtgcaagatgttttgacactgaggaatcagcatacaaagctgttttaaaaagaaaatataaagacggagatattataattataagatatgaaggtcctaaaggtggaccaggtatgagagaaatgttgcaaacaacaggagctatttatggacaaggtaaaggagaaaaagttgcgttaatcacagacggaagattttctggcgcaacaagaggattctgtattggacacgttggtcccgaagcatcagttggtggtcctatagctttattaaaaaatggagacttgattcatattgatgcaaaaaagggaacaattaacgttaatctttcaaaaaaggaattatttaaaagaagaaaaaaatggaaaccaaaaaaaattaattttggaaatggaactctatggaaatatgcccaaaccgttgggcctgcttatctgggtgcttccactcatcctggtggaaaaaaagaagttaagtgttacgctgatatttaaa

SEQ ID NO: 286076 - DNA, 713 bp, Unknown
  Bacterial polypeptide expressing nucleotide sequence isolated from the Sargasso Sea
attttattatgcaatgggtgaaactgagaaagatgtttcaaaaccttttgtaggcgttgtatctacatggaatgaggctgctccgtgtaatattgctcttatgagacaagcacaatcggttaagaagggtgttagagcttttggtggaacaccaagggaattttgtacaattactgttactgatggtattgctatgggtcatgaaggaatgaaatcttcattaatctctagagaagtaatagcagatagtgctgaacttactgttagaggtcattgttatgatgcattagtgggtatcgcaggttgtgataaatctttaccaggtttgatgatgtcgatggttcgattaaatgttccaagtgtttttatttatggaggatcaatactaccaggaagatataaaggtaaagatgtaactgttgtagatgtttttgaagctgttggaaaacattcatcaggtcaaatgtcagcaaaagaattaagaaaattagaattagttgcatgtccaagtgcaggtgcttgtggcggtcaattcactgcaaatacaatggcctgcgtatcagaagctattggtttagccttaccttattcagcaggaacaccagctccttatgaagaaagagataagtacgcaaaattaagtggtaaaatggtaatggaattattagcaaaaagaattaaaccaagagatattgttacaaaaaaagcattag

SEQ ID NO: 286077 - DNA, 584 bp, Unknown
  Bacterial polypeptide expressing nucleotide sequence isolated from the Sargasso Sea
gacaattattagagaaatatctaatcctattaaaagtagtagtcatttgcgtattctttatggcaatttggctcctgaaggagcagtagctaagattacaggaaatgaagggctaaaattcactggcacggctaaagtatttgactctgaagaagacggaaatgaggcaattcaaaataacctaattaatgaaggagatgtggttgttataagatatgagggaccaaaaggaggccctggcatgagagaaatgctaaaacctacctctgcaataatgggacagggcttaggcgataaggtcgcatttattactgatggaagattttctggcggaactcatggctttgttgttggacatatttctccagaagcatatgttggcggacccatcggagttattgaaaatggagacaaaataacaattgatgctgagacaaactcaatttctatcgatatatctgatgaggagctccaaaaaagattagataactttaaaccaaataaagagcttcctaaaaaaggggtcttatcaaaatactcaaaaagtgtacaatctgcatccctgggagctattactgattaat

SEQ ID NO: 286078 - DNA, 658 bp, Unknown
  Bacterial polypeptide expressing nucleotide sequence isolated from the Sargasso Sea
ttaaaagaattaaatgaattagctgaaagggttccgtatttgtgcaaagttagtccagcaaccaaagatgttcatatggaagatgttgatgaagctggaggtgtttcagctatacttaatgaactttctaaacttgacgttctcgatctttccagaccaactgttacgggattcacattaggagaaaatatttcaagtgctaaagtatctaatcgaaatgtaatccgatcagttaaaaacccctattccccaactggaagcctttcagttttatttggaaatcttgcgccaaatgggtctatagtaaaaacagccgcggtcgacccatcagtaatgacttttactggaaatgctcgcatttataattcacaagacgatgcgcttaaaggaatactagatggtcaggtacaacctggtgacgttgtagtcataagatatgaaggccctaaaggtggccctggaatgcctgaaatgcttgctcctactagtacaattatgggccttggccttggtgataaagttgctctaattaccgatggacgtttttccggtgcaactcgtggagcgtgcgtaggtcatatctctcctgaagctgcagaaggtggtccaataggtgccctaatagatggtgattcaattaccatagatattccggaat

SEQ ID NO: 286079 - DNA, 548 bp, Unknown
  Bacterial polypeptide expressing nucleotide sequence isolated from the Sargasso Sea
aaatctagaatcatttgaaaatgccatgaccttggatattgccatgggaggttctacaaatactgtgttacatatacttgctgcagcaaaagaagctggacttgatttcggcatggatgacatagatcgcctatcaagaagggtccctaacttatgtaaagttgccccaagtagtaactttcatatggaagatgttcacagagcaggaggaataatggccatcctgggagaactagagaaagcaaaattgctgaattctgataacaaaacagtccactcagaaacaatgcttgatgccattcagaaatgggatatcaacaggaagccttcaaatgaagtcaaagaattctattcggcagcgcctggcatgattccaaccactcaaccattctcgcaaaacaaaagatactcagaattggatgtggatcgtgagaatggctgtattagagattctgataatgcccatagtcaagatggaggcttagcagtattaaaaggaaatattgcaattgatggatgtattgtaaaaacgagcgggtgtcgatgaa

SEQ ID NO: 286080 - DNA, 291 bp, Unknown
  Bacterial polypeptide expressing nucleotide sequence isolated from the Sargasso Sea
aatgttgcgtggcgcaggattcaaagatgaggattttgaaaaatctattgttggaattgcttcgcttggggcaagtgtaactccatgtaatatgcacctaaactcccttgcagaaattgttgaagagtcagtcaataattcaggatgtaaggctgtaacatttaacacaattactgtctctgatggaatttctatgggtacggagggcatgaaatattccctcgtttcaagagaagtcatagctgactctatagaaactgttgtaggttgtttgggctatgatggagtagt

SEQ ID NO: 286081 - DNA, 715 bp, Unknown
  Bacterial polypeptide expressing nucleotide sequence isolated from the Sargasso Sea
aatggatggtggatatatacacggtaattgcatgacagttacaggcaaaactatgaaagaaaatttaaagaatgttaagtttaattctaagcaaaaagtaatgagaaaatacaacaatcctttatctaaagatggaggtgttgttggaatgaaaggaaacttagctccagaaggtgcaattgttaaagttgctggtttaaaaagattgcaatttactggaagagcaagatgttttgatactgaagaagcagcttacaaagctgttaaaaatagaaaatataaagacggtgatattataattattagatacgaaggaccaaaaggtggacctggtatgagggaaatgcttcaaacaacaggagcaatttacggtcaaggtaaaggagaaaaagttgcacttataacagatggaagattttctggggctacaagaggtttttgtattggacatgttggacctgaagcatcagtaggtggaccaatagctttactaagaaacggagatataattgatttagatgcgaagaaggggacaattaatgttcgtttatctaaaaaagaattagctaaaagaagaaagaaatggaaaccaaagaaaattaactttggaaatggaacactttggaaatatgcgcaaacggtcggacctgcttatttaggtgccccaactcatccaggtggtaaaaacgaagtaaaaacttacgcagatatttaa

SEQ ID NO: 286082 - DNA, 799 bp, Unknown
  Bacterial polypeptide expressing nucleotide sequence isolated from the Sargasso Sea
aatgcggaaatttaacaaaaaaaaactacctagcagacacacttctttaggtcctgatagagcaccacatagatctttttactatgcaatgggtgaaactgaaaaagatgtttcaaaaccttttgtgggtgttgtatcgacatggaacgaagctgctccatgcaatatagctttaatgagacaagctcaatcagttaaaaaaggtgttagagcttcaggaggtactccaagagaattttgtactattacagtcacagatggtattgcaatgggtcatgaaggaatgaaatcttcattaatttctagagaagttatagcagactctgcagaacttactgttagaggacattgttatgatgcattagtaggtatcgcaggttgtgataaatcattaccaggtttaatgatgtcgatggttcgattaaacgttccaagtgtatttatttatggtggttcaatacttccaggaaaatacaagggtaaagatgtaactgttgtagatgtatttgaagctgtaggaaaacattcttcaggacaaatgtcagcgaaagaattaagaaagttagaattagttgcatgtccaactgcaggtgcgtgtggcggtcaatttactgcaaatacgatggcctgtgtttcagaagcaattggtttagctttaccatattcagctggcaccccagctccatatgaagaaagagataagtacgccaaattaagtggtaaaatggtaatggagttattagccaaaaaaattaaaccaagagatattgtaacaaaaaaagctcttgaaaatgctgca

SEQ ID NO: 286083 - DNA, 865 bp, Unknown
  Bacterial polypeptide expressing nucleotide sequence isolated from the Sargasso Sea
gccggcgcctgcggcggccagttcaccgccaacaccatggccatggccctgtcggtcatgggcatttcgccgatgggcgccaacgacgtgccggccgtcgatccggccaagggcgagcagggcgaacgctgcggccggctgatcgtcgaacgggtcttcgccggcgacaccgcgcgcaaatacatcaccaaggccagcctgaagaacgcggccgtggcggtctcggcctcgggcggttcgaccaatgcggtcatgcacctgaccgccatcgccgccgaggcgggcgtcgagttcggcgtcgaggattgccaccaggcctgtgttgaggcgccggtcatctgcgacctgaagccgggcggccgcttcctggcctcgcacctgtacgccgcgggcggcacgcggctggtggcccagcggctggccgaggccggcaagatcgtcaacacgccgaccgtcagcggccgcagcctgtttgtcgaggccagcgaggccgaggagacgccgggccagcaggtcgtgaccgacttcgaggccccggtcatggcgcgcggctcgttcgccgtcatctacggcgacgtggcccccgagggcgctgtcatcaagctgacgggccacaaggtcgacaagttcgaaggccccgcctgcgtcttcgacagcgaggaggacgccttccacgcggttcaggacggatcggtcggcgagggcgacgtcatcatcatccgctacgaagggcccaagggcgggcccggcatgcgcgagatgctgcaggtcaccgccgccctgaagggccgcaagatcgacaacgtcgccctgctgaccgacggccgcttctcgggcgccagctacggcttcgtcgccggccacg

SEQ ID NO: 286084 - DNA, 928 bp, Unknown
  Bacterial polypeptide expressing nucleotide sequence isolated from the Sargasso Sea
aaatattagaccaagagatatagttactagaaagtcattagaaaatgctgcaacaattgttgctgctacaggtggatctacaaatgctggtttacatttaccggctattgcaaatgaaattggaattaaatttgatttaatggatgtagcaaaaatttttaaaagaactccttacttagctgatttaaaaccaggtggtaaatatgttgctaaagatatgtggctggctggtggtgttccaatgttattaaaaacattaatggatggtggttttatccatggtgattgcatgacagttactggaaaaactatgaaggaaaatttgaaaaatgttaagtttaaaacaaaccaaaaagtaatgagaaaatataataacccattatctaaaactggaggtgttgttggattaaaaggaaatttagcacccgaaggtgggatagtaaaaattgcaggattaaaaaaattacaattcactggaaaagcaagatgctttaatacagaagaagacgcatacaaagctgttaaaaacagaaaatataaagatggtgatatcataataattagatacgaaggacctaaaggtggtcctggtatgagagaaatgcttcaaacaacagctgcaatatatggacaaggaaaaggggagaaagtagctcttataacggatggaaggttctctggggctaccagaggcttctgtataggtcatgtgggtcctgaggcctctgtaggcggtcctatagcccttttaaggaacggtgatgttattgatattgatgctcaaaaaggaaccatcaatgtcagactttctaaaaaagaattaaatgctagaagaaaaaaatggaaaccaaagaaaatgaactttggtaacggtacattatggaaatacgcacaaactgttggtcctgcttataaaggagcaccaaca

SEQ ID NO: 286085 - DNA, 566 bp, Unknown
  Bacterial polypeptide expressing nucleotide sequence isolated from the Sargasso Sea
gaaaggaaacttagctccagaaggtgcaattgttaaagttgctggtttaaaaagattacaatttactggaagagcaagatgttttgatactgaagaagcagcttacaaagctgttaaaaatagaaagtataaagacggtgatattataattattagatatgaaggaccaaaaggtggacctggcatgagagaaatgcttcaaacaacaggagcaatttacggtcaaggtaaaggagaaaaagttgcacttataacagatggaagattttctggggcaacaagaggtttttgtattgggcatgttggacctgaagcatctgtaggtggaccaatagctttactaagaaacggagatataattgatttagatgcgaagaaggggacaattaatgttcgtttaactaaaaaagaattagctaaaagaagaaagaaatggaaaccaaagaaaattaactttggaaatggaacactttggaaatatgcgcaaacggtcggacctgcttatttaggtgccccaactcatccaggtggtaaaaacgaagtaaaaacttacgcagatatttaat

SEQ ID NO: 286086 - DNA, 569 bp, Unknown
  Bacterial polypeptide expressing nucleotide sequence isolated from the Sargasso Sea
tatgcttcgaggtgttggctttacatctgaggactttacaaagccgtttgttggaattgcgtcaactggagccaaggttacaccatgtaatatgcacataaatcaattatcagaattggtagaggattcaataaatgcatctggtggcaaaggtgttttatttaatacaattactgtttctgatggcatttcaatgggaacgcaaggaatgaaatattctcttgtttctagagaggttattgctgactcaattgaaactgttgtaggctgcctaggatatgatggattaattgcaattggcggatgtgataagaacatgcccggatgccttataggtatggcaagattaaatagaccgtctatatttatttatggtggatctataaaaccaagtaatgagaatacggactacgtaactgtctcagaaaaagttggagaattttcaaagggctctataaatgaagatgagttaattcattatgaaaagatatcagttgatggaccaggctcatgtggcggaatgtatacagcaaatacaatggcatccgctatagaagcattaggaatga

SEQ ID NO: 286087 - DNA, 862 bp, Unknown
  Bacterial polypeptide expressing nucleotide sequence isolated from the Sargasso Sea
aatgggagaagatttaacaataattagtgcttttgaagcagtaggtaaaagacaggcgggtgaaataaatgacgaagagcttagacaaattgaaattcatgcatgccctggcccaggagcatgtggaggaatgtttactgcgaatacaatgtcgagcataggagaggctcttggattaagtattcccggatctgcttctgagccagcagtcgatcaaagaaaaaaagattcatcaatggaagctggaaaggcagtcatgaatcttgttagagaaaatattagaccttcagacatactaactaaaaaggcttttgaaaatgcagtaacattagtcgtagcaatgggaggatctacaaatacagctcttcatttacctgcaatagctaatgaaatgggaataagtcttacactaaaagaaatacatgatatttcaatgagaacacctctactagctgacttaaaaccaggcggaaaatacgtaatgtatgatttagacaaagttggtggtgtacaagtagttatgaaaagattgttggaggcaggtttgcttcatggagatcaattgacagttactggtaaaacaatggaagaaaatcttaaagatatagatatcaataaagaagaaaataatattgttagacatatagataatcctatttctaaaactggtggtttggtaacattgtttggtaatttagctcctgatggatgtgtgctaaaagtcgctggacatgattttgggaaaaaatttactggccctgcaaaagtatttgatcaagaagaacaggctatggagtctctaagaaaaagagaaataaaagcaggagatgtagttattataagatacgaaggtcctaaggga

SEQ ID NO: 286088 - DNA, 776 bp, Unknown
  Bacterial polypeptide expressing nucleotide sequence isolated from the Sargasso Sea
gcaggttccggtattagcagaccttaaaccgagcggtcgatttaccatgtctaagttagttgagatgggtggggtgaccccgctgatgaaacgtttattggatatgggcttattacatggtgactgtttgactgtgacgggtaagaccttggctgagaacttggaacatgtgagtgattatccagctggacaagagattattcgaccattttcggatccgatcaaagatagcggtcacttggtgatttgttatggtaacttagccccagagggcggggttgctaagatcacaggtaaggaaggggccttgttttcgggttcggctcgggtatttgattcagaagagttggcattaacagccattttggatggaacgatccaagcgggggatgtgatcgtgatccgttatgaagggcctaaaggggggccgggcatgcgagagatgttatctccgacttctgcggtcatgggccgaggtttagggaatgaggttgccttaattacagatggacgattttcgggtgggacccatggttttgtggtcgggcatatcacccctgaagcgtatgaggggggtccgattgcgattgttcaagatggggacccgattactattaattgtgagacggcagaagtaaatttagagatcgatgacgctgagattcaagcacggctcaaagggtttaagaccccagcgcctagatatacgcggggtgtactttctaaatatgctaagactgtgagtacggcatctgagggcgctgtaacggactaaa

SEQ ID NO: 286089 - DNA, 916 bp, Unknown
  Bacterial polypeptide expressing nucleotide sequence isolated from the Sargasso Sea
attgctgactcaacagaattaactgttagaggtcattgttacgatgcattagtaggagttgctggttgtgataaatctttaccaggtttgatgatggcaatgcttagacttaatataccaagtgtattcatatatggtggatcaattcttccaggcagatataatggaaaagatgtgacggttttagatgtattcgagggagtaggaaaatattcttcaggtaaaattagtgagcatgctttaagaaaactagaactaaaagcttgtcctagcgctggagcatgcggtggacagtttactgcaaacactatggcatgtgtatcggaggctattggtttagctttaccttattctgccggaacaccagcaccatacggtcagagggataaatatgctttacaaagcggcaaggcagttatgaatttgttaaaaaaaaatattagaccgagagatattgttacaagaaaatctttagagaatgcagcaactatagtcgcagctacgggaggttcaactaatgcagcattgcacttgccagccttagcaaatgaaataggaattaaatttgatttaatggatgttgcaaaaatttttaaaaaaacaccatatcttgctgatttaaaaccaggtggcagatatgttgcaaaagatatgtggaaagctggcggtgttcctatgttattgaaaactttgttagatggtggatatattcatggaaactgtatgacggtgacaggaaagaccatgaaggagaatttaaaaaaaattaaatttaataataaacaaaaagttatgagaaaacataataacccgttatcaaatgatggcggtgttgtaggattaaaaggtaatcttgcaccggatggagcaattgtaaaagttgccggattaaaaaaacttcaatttactgaagagc

SEQ ID NO: 286090 - DNA, 930 bp, Unknown
  Bacterial polypeptide expressing nucleotide sequence isolated from the Sargasso Sea
atgctgcagtaattgttgcagcttcaggaggttctacaaatgcggctttacatttaccagctattgctcatgaagctggaattaaatttacattggaagacgtcactaaaatatcaaagaaaacaccttatatagctgatttaaaacctggaggaaaatatgtagctaaagacttatatgaaattggaggagttccaattttaattaaagctttattagatggaggttttttgcacgaagattgtttaaccgtttcaggaaaaacaataggagagaatcacaaagatattgttttcccaactgatcagaaaataatttacaaaacctctcaaccattaagttcaagtggaggatttgctggtttaaaaggaaatttagcacctgaaggagctatcgtaaaggtagctggaatgaaaagaagaaaatttaaaggtaaagcaaaatgttttgacggtgaaccgtcagcattaaatgctgtactccaaagaaaaattaaagcaggagatgttttagttattcgatatgaaggtccaaaaggaagtccaggtatgcctgaaatgttatctacaacaggagcaatttatggtcaaggattaggtgaaaaggttgctttaattactgatggtcgtttctctggaggaacacatggtttttcaataggtcatgtaggtccggaggctgctgttggcggacctataggtttaattaaaaatggagacgagatagaaatagacgcagacaaaggaatgctaaaagtaaatttaactaataaagagttagctaaaagaaaaaaaaagtggaaaccaaaaaaaatagaatatacatcaggtactctatggaaatattctcaatctgtaggtccagcttataagggtgcagttacacatcctggcgccttaaaagaaaaaaaatgctacgctgatatataaa

SEQ ID NO: 286091 - DNA, 849 bp, Unknown
  Bacterial polypeptide expressing nucleotide sequence isolated from the Sargasso Sea
aatgaatataccctccatttttgtttatggaggaacaattaagccagggaaattagatggttgcgacctaaccgttgttagttcatttgaagctgtcggtcaattaacaagcggaaagatcgacgaagaacgtctaatagcagtagaaaaaaatgctatccctggtccaggtagttgtggtggcatgtttactgcaaataccatgtctgcagcaattgaaacaatgggttttagtttgccatttagttcaactatggcagcggtagatgatgaaaaagcagagagcgctgctgaaagtgctcaggtgcttgtcaatgcagttaagaacaacatcagaccattagatttactcacaaaaaaagcctttgagaatgcaatcagtgtcatcatggctgttggtggctcaacaaattctgtccttcacctacttgctatagcgaggactgccggggttgatttaacaatcgatgactttgaacgtataaggcaaactgttcctgtgatttgtgatctcaagccaagcggtagatatgtaactgtcgacttacatcaagctggggggattcctcaggtaatgaaattactcctcgatgcaggaatgctccatggagaatgcaaaactattgaaggtaaaacaattaaagaagttcttagagatatcccctcaaatcccaaagaaaatcaagatgttatcagaccaatatcaaaccctatttataagaaagggcatctagctattctcaaaggaaatttagctagtgaaggaagtgtcgcaaaaatcagtggtgtcaaaactcctgttttaactggtcctgcaagagtttttgagagtgaagaagaatgcttagc

SEQ ID NO: 286092 - DNA, 930 bp, Unknown
  Bacterial polypeptide expressing nucleotide sequence isolated from the Sargasso Sea
tttggaacgatcacagtaagtgatggaatttctatggggacagagggcatgaaatattccctagtatcaagagaagttattgctgattcaatagaaacagcctgcaatgctcagagcatggatggagtgcttgctataggtggatgcgacaaaaatatgccaggtgccatgatagcgattgcaagaatgaatattccatcaattttcatttatggagggacaattaaaccaggaaaattacatggtgaagatcttactgttgtcagtgcatttgaagctgttggacaattaacctcaggcaaaattaatgaagaaaggctaatccaagttgaaaaaaattgtattcctggggctggtagctgtggagggatgtttacagcgaatacaatgtctgcggttattgaagtattaggtttaagtcttcctcacagttcaacaatggctgctgaagatcttgaaaaagaactaagtgcagaaaaaagtgctgagatattagtatctgcaatagaaaaagatataagacctctagacctaatgaataagaaagcatttgaaaatgcaatatcagtaattatggcaattggaggatcaacaaatgcggtattgcacatattagccattgcaaatactgcaggaatagatgtcaacattaatgattttgagagaattagacaaaaagtacccgttatttgtgaccttaaaccgagtggtaaatatgtgacggtggatcttcataatgcaggcgggattccacaagtaatgaaaatacttttgaatgcaggattaattcatggcgattgcaaaaacattgaaggcaaaaccatctcagaatacttaaagaatattccagataagcctccaacaaatcaaaatgttataagagacattgatgatcctctttataaaaaaaggacatctagcaatttaaaa

SEQ ID NO: 286093 - DNA, 890 bp, Unknown
  Bacterial polypeptide expressing nucleotide sequence isolated from the Sargasso Sea
atcatctttaatttccagagaagtcatagctgactcatcagaactgacagtgagaggacattgttatgatgcactagttggtatcgctggatgtgataaatctcttccaggcttgatgatgtctatgttaagattgaatgtacctagtgtattcatttatggtggatcaattttgccaggaaaatttaaaggaaaagatgttactgttgtagatgtttttgaagctgtaggtaaacactcctcaggcaaaatgtcttctgaagaattaagagaattagaattagtagcttgtccaagtgctggggcttgtggaggtcaatttacagctaacacaatggcgtgtgtatcggaagcgatagggttggctttaccttattcagctgggacgccagccccttatgaggagagggataaatatgcttatgaaagtggtcaagcagttatgaatttattaaaaaaaaagattaaacctagagaaatagtaactaaaaaatctttagaaaacgcagcaacaattgtggctgctactgggggctcaactaatgcagcccttcatttgcctgcactagctaacgagataggagtaaaatttgatttaatggatgttgcaaaaatatttaaaaagactccttatcttgctgatttaaaacctggaggaaaatacgttgcaaaagatatgtgggaagctggcggcgttcctatgttattaaaaactttatttgacggaggttatattcatggcgggtgtatgacagttacaggtaaaactatgaaagaaaatttagctaacattaagtttaatactaatcaaaaagttttaagagaatataataatccactttctccagatgggggagtcgtagggttgaaaggtaatttagctccagacg

SEQ ID NO: 286094 - DNA, 754 bp, Unknown
  Bacterial polypeptide expressing nucleotide sequence isolated from the Sargasso Sea
tatgaagctggtggtgtaccaataatcatcaaaactttatttgaaggtggttttattcacggagattgtttaacagttacaggtagaacagttgctgaaaatttagagcaagttaaatttaatagtaaacaagatgttattcgtccttatgataaaccactttcactaactggaggtgtagttggcttaaagggcaacttagcacctgatggtgcgattgtaaaagtggctggtatggaaaatttgaagttctcaggtaaggcaaaatgttttgactgtgaggaagacgcatttgaatgtgtaaaaaatggaaattataaggaaggcgatgtatttgtcatacgatatgagggtcccaaaggagggcctggaatgcgcgaaatgctcgcaactactgcagcaatttatggtcaaggcatgggtgataaagttgcgttgataaccgatgggcgatttagtggcgcaacacgtggattttgtgttggccatgtttcccctgaagccgcagtatgcggaccaatcgcattgattcaaaacggagatgaaatcacactagatgctgaaaaaggtgaaattaatcttaatgtgagtaaaaacgagcttgatcaaagaaagagtgcctggaaagagcgaaaaactgattttaattcaggaaccttgtggaaatacacaaaaacagttggctctgcggctaatggagctgtcacccatccaggagctgaggatgaaacccacgtctatgcagatatttagc

SEQ ID NO: 286095 - DNA, 496 bp, Unknown
  Bacterial polypeptide expressing nucleotide sequence isolated from the Sargasso Sea
gcgaagatcacaaggaaaagaaggcacttcttttgaaggaaaggctaaagtttttaattctgaagaggagggagttgaggctatattatcaaataagatcattgagggtgatgttgttgttataaggtatgagggaccaaaaggtggtccaggtatgcgagagatgctaaagccaacttctgcaattatgggtctaggactgggaaataaaattgcttttataactgatggtagattttcaggaggaactcatggttttgttgtaggtcatgtttctcctgaagccgcagatggtggacttatagcactaatagaagatggagatactattttaattgatgctgataatgatcaattgattttaaaagttgatgtagatgaaattgctagaaggaaatctaattggaagaatccaattgaaggtccaaaaaaaggcgttctttctaaatatgctgaaagcgtaaagtctgcaagcttgggagcaataactgattaa

SEQ ID NO: 286096 - DNA, 947 bp, Unknown
  Bacterial polypeptide expressing nucleotide sequence isolated from the Sargasso Sea
tttaccttattctgctggaactcctgctccatttaatagaagagacaaatatgctttagctagtggaaaagctgtaatgaatttattagcaaaaaatattagaccaagagatattgtaacaaagaaagcattagaaaatgctgcaacaattgttgctgcaacgggtggatcaacaaatgccgctttacacttgccagctatagcaaatgaaattggtattaaatttgatttaatggatgttgctaaaatatttaaaagaactccttatcttgcagatttaaaacctggtggaaaatatgtagcaaaggatatgtggaaagcaggcggtgttcctatgttgcttaaaactttaatggatggtggatatattcacggtaattgcatgacagttacaggcaaaaccatgaaagagaatttaaaaaacgttaagtttaattctaagcaaaaagtgatgagaaaatataataatcctttatctaaagatggaggcgttgtcggaatgaaaggaaacttagctccagaaggtgcaattgttaaagttgctggtttaaaaagattgcaatttactggaagagcaagatgttttgatactgaagaagcagcttacaaagctgttaagaatagaaaatataaagacggtgatattataattattagatacgaaggaccaaaaggtggacctggtatgagagaaatgcttcaaacaacaggagcaatttacggtcaaggtaaaggagaaaaagttgcacttataacagatggaagattttctggggcaacaagaggtttttgtattggacatgttggaccagaagcatctgtaggtggaccaatagctttactaagaaacggagatataattgatttagatgcgaagaaagggacaattaatgttcgtttaactaaaaaagaattagctaaaagaagaaagaaatggaaaccaaaga

SEQ ID NO: 286097 - DNA, 799 bp, Unknown
  Bacterial polypeptide expressing nucleotide sequence isolated from the Sargasso Sea
agtcgtagctggagaaggtttagatgggttcataagttttggaggatgtgataagaacatgccagcatgtgtcatggctatgttaagacttaacagaccatcagtttttgtatatggcggaacaattcttccgggtatttacaaaaataaaaatattgatattgtctctgtatttgaagctgtcggaaaaaatgctaacggaattatcgatgacaatgagctttacaatattgaaaaaaaagcaattcctggcccaggctcttgtggcgggatgtataccgcaaatacaatggcatgtgcaatagaagctatgggtttgtcccttacaaatagttctgctcaaacagctatttcaaaatcaaaacttaatgatacaaaagaagctagtaaggcacttatgaagtgtgtcaaaaaagaccttaagcctagagacattgtcacaaaaaaatctcttgagaatgcaattactgttgtcatggcacttggcggttcaactaacgcagtattacatctattagctattgccaatgaagcgaaaataaaactatcactaaaagatttcgagagaatagggaaaaaaacaccagttctagcggatttgaaacccagcgggaaatattctatggctgagctagttgaaataggtggcgtagcaccattgatgaaagtacttataaatgaaggacttatgcatggcgattgtttgacagttactggaaaaactatcaagaataatttaaataagattaaaccataccctttgaatcagataattatcaagccaatcagtgatcctata

SEQ ID NO: 286098 - DNA, 709 bp, Unknown
  Bacterial polypeptide expressing nucleotide sequence isolated from the Sargasso Sea
ggcgatgatgattttggtaaacctatcatcgccatagcaaattctttcactcagtttgttccaggccatgtccatctcaaggatcttggtcaaatggttgcgagagagattgaaaaatcaggcggggttgcaaaagaattcagtactattgccgttgatgatggaatcgcgatgggccactcgggaatgctttatagcttaccctcacgagagttaatagcggatgcggttgaatatatggcaaatgctcactgtgcagatgcacttgtgtgcctttcgaattgcgacaaaattacacctgggatgttgatggcaacaatgcgtctgaatataccaaccatttttgtatccggaggcccaatggaggcaggaaaaggtttaataaaaggtcaagaagcaagtctagatttaattgatgcgatggttttagctggggatccaagtgtttcagatgaagaggttgaaaaaattgaaagatctgcgtgcccaacttgcggttcttgttccgggatgttcactgcaaattccatgaattgtttggttgaagctcttgggcttgctctgcctggcaatggaagcgtactggcaactcatattgatcgcaaagaacttttcttaaaagctggaagaattattgtagaactcacaaaacaatactatgagaaagacgatgagagtgttcttcctagaaacatcgcaaatttaaaat

SEQ ID NO: 286099 - DNA, 816 bp, Unknown
  Bacterial polypeptide expressing nucleotide sequence isolated from the Sargasso Sea
gcagcgcctgcatatagctttaatgagacaagctcaatctgtaaaaaattgtgtgagtaaatcaggcggtactccaagggaattttgtacaatcacggtaaccgatggaattgctatgggacacgaaggaatgaaatcatcgttaatttcacgagacgtaattgcagattccacagaacttactgttcgtggtcattgttatgatgcacttgttggagttgcaggttgtgataaatcattaccaggcttaatgatggcaatggtaagattgaatgttccaagcgtatttatttacggtggctcaattcttcctggaagatttaatggtaaagatgttacagttgtagatgtttttgaaggtgttggaaaatattcatctggaaaaatgacagcacatgcattgagaaaattagaattgaaagcttgtcctagcgctggtgcatgtggaggacaattcactgcaaacacaatggcctgcgtatcagaagctattggattggcattaccttattcggcaggaacgccagctccttatgaacagagagacaaatatgcattatctagcggcaaagctgtaatgaatctgctacaaaaaaatattagaccaagagaaatcgtaacaaaaaaagcattagaaaacgctgcaaccattgtagctgctactggtggatccactaatgctgccttacacttaccagcaatagcaaatgaaattggaattaaatttgatttaatggatgttgctaaaattttcaaaaaaacaccttaccttgccgatttaaaacctggaggtaaatatgtagctaaagatatgtg

SEQ ID NO: 286100 - DNA, 856 bp, Unknown
  Bacterial polypeptide expressing nucleotide sequence isolated from the Sargasso Sea
cgtgagaggacattgttatgacgctttagttggtgttgcaggatgtgataaatctttaccaggcttaatgatggcaatggtaagattaaatgtaccaagtgtctttatttatggtggttcaatattaccaggtagatttaacggaaaagatgtaacagttgttgatgtatttgaaggagttggaaaattttcttcaggaaaaatgtcagcacatgcattgagaaaactagaacttaaggcttgcccaagtgctggagcttgtggaggacaatttacagcaaatactatggcatgtgtgtctgaagctattggattagcattaccatattcagctggaacaccagcaccatacacacaaagagattcttatgctttaaaaagtggtaaggcagtaatgaatttattggcaaaaaacatcagaccaagagacattgttacaaaaaaatctttagaaaacgctgcaacaattgttgctgcaacaggtggttcaactaatgctgctttacatttacctgcacttgcaaatgaagcaggaattaaatttgatttaatggatgttgcaagaatatttaagaaaacaccttatcttgcagacttaaaacctggtggaaaatatgttgcaaaagatatgtggaaagcaggtggagttccaatgcttttaaaaactttattagatggtggttatatacacggtgattgtatgacagttacaggtaaaacaatgagacaaaatttaaaaaacgttaagtttaataaaaatcaaaaagttatgagaacacataaccaaccattgtcacccgatggaggtgttgtgggtttaaaaggaaatttagcacccgatggagcaattgtttaa

SEQ ID NO: 286101 - DNA, 833 bp, Unknown
  Bacterial polypeptide expressing nucleotide sequence isolated from the Sargasso Sea
agctataggacttgctttaccaaacagtacaggtgctcctgcaccttatgagtctcgagatgaatatgcattagctgcaggtaaacaggttatgactttaattgaaaaaaacctaagaccaagggatatagttaccagaaagtcatttgaaaatgcagctagagttgttgctgcatctggtggttcaacaaatgctgcacttcacttgccagctatggcaaatgaagcaggtattgattttgatttatttgcagtagctgaaatatttaaatctactccttatattgcagatttaaaacctggaggaaagtatgttgctaaagatttacatgaggctgggggggttcaagtaatacttaaggctctttttgaagcaggatatattcatggcgattgtatgacggtaactggtaaaactattgaagagaatttagctgatattacatttcctgaagagcaagatgtgatttataaagtagaaaatgctattactcctactggaggtgtagttggattaaaaggtaatttagctgaggaaggagctatagttaaagttgctggtatgacaagaacaaagcacgtaggtcctgcaatagtattcgattgtgaggaagatgcatataaagcggttaatgagagaaattataaggaaggtgacgtttttgtaataagatatgaagggcctaaaggaggacctggtatgagagaaatgttggctactacagctgctatttatggacaaggaatgggagaaaaagttgctctaattacagatggacgtttttctggtgcaaccagaggtttttgtgttggacatgtgggccctgaagcag

SEQ ID NO: 286102 - DNA, 676 bp, Unknown
  Bacterial polypeptide expressing nucleotide sequence isolated from the Sargasso Sea
tatgaataaactcagatcatctgcaataacccaaggtgtgcaaagatcacctaacagatcgatgttaagagctgttgggtttaatgatgaagattttaataaacctattattggagttgcaaatggatacagcaccataacaccatgcaatatgggtttaaataagttagctctaaaagctgaagagtctataaaaagatcaggtgggatgcctcagatgtttgggactataacagtaagtgatgggatttctatgggaacagagggcatgaaatattccctagtttcaagagaagttattgctgattcaattgaaactgcatgcaatgctcagagtatggatggagtacttgctataggtggatgtgataaaaatatgccgggtgctatgattgcgattgcaagaatgaatattccctcaattttcatttatggagggacaataaagcctgggaaattgcatggagaagatcttactgttgttagtgcatttgaagctgttggacaattaacatcaggcaaaattaatgaagaaaggctaatccaagttgagaaaaattgtattcctggtgctggtagctgtggaggaatgtttacagctaatacaatgtctgcggttattgaagtattagggttaagtcttcctcacagttccactatggctgctgaagatctt

SEQ ID NO: 286103 - DNA, 859 bp, Unknown
  Bacterial polypeptide expressing nucleotide sequence isolated from the Sargasso Sea
atctttcgagaatgccatcacagtgtctattgcacttgaaggatcaacaaatgcagtcctacatcttttggggattgcccacgccgctggtatcaagctagaactcgacgattttagtagaatagggaaacgcgtacccgttctcgcggatatgcgtcccgctggccagtatgctatgagcgagttgattgaaataggaggcatacaacccctcatgaagctcttattggcagagggccttctaaagggggactgtctgactgtaacgggcaaaacgctcgctgaaaaccttgaacaggttgaagattaccctgcgaatcaaaaaatcataagaccccttagcaacccgatcaaaaaagacagtcacctggtcattctcagaggaaatctcgctcccgagggcgccgtagcgaagattaccggtcatgaaggtcttacctttgaaggcactgccaagtgttacaaaggagaagaagctgcaatgaaagccataatggatggaagcgtcgataaaggagatgtagtcgtcgttcgatatgaagggcctaaaggcgggccagggatgcgagaaatgctcagtccaaccagtgccatcaatggtagaggccttagcgagcatgtcgcactaattaccgatggtcgattctctggcggctcacatggttttgtaattggtcacattacccctgaggcttttgaaggtgggccgatcgctttgattgaagatggggattccatcgcgattaacgcagaaacttgcgagatcaatttgctaatctctaaagaggagtgggatgttcgacgggccaaatggtctaaaccagaaccgtatacgaggatcggaacactagcgaaatac

SEQ ID NO: 286104 - DNA, 640 bp, Unknown
  Bacterial polypeptide expressing nucleotide sequence isolated from the Sargasso Sea
tgaaggcggctgcgtgcgcgagatggcccatgcctactcccaggagggcgggctggctgtattgtttggcaatatcgcccagcagggctgtgtggtcaaaacggctggcgtcgatgaggagtcactgcagtttacggggccggcgcacgtctgcgagagtcaagaagcggcggtggcggatatcctcgaggatcgcgtgagagccggtgatgttgtgatcgtgcgttacgaggggcctcgaggcggacctggaatgcaggagatgctgtacccgaccagctatctcaagtcgaaggggctgggtaaagcctgtgcgttaattaccgacggcaggttttctggcggcacctcggggttgtcgataggccacgtctcaccggaggccgcgggtggcggcgctatagcattgatcgaaccgggcgacgtgattgagattgatattcctgcaagaaccatcaacgtgaaagttgatgaagtaacgctcaacgagcgccgtgcaaagatgaatcaacgggaccgggcgtggcaaccagcggccgaccgcccccgacagatttcaacagcactgaaggtctacgcgagcatggtgaccagtgcagacaaaggcgccatacgggacagctcattgatcgaccgttga

SEQ ID NO: 286105 - DNA, 934 bp, Unknown
  Bacterial polypeptide expressing nucleotide sequence isolated from the Sargasso Sea
gatcaagatttaaaagatatagaacaagttgcttgcccatctgctggatcgtgtggaggtcagtttacagcaaatacaatggcatgtatttctgaagcagttggattagctcttacaaattcggctatgccaccagcagtaaatactgaagaaagaaaagcttatggtgaaaagagtggtaaagctataatgaatttattagaaaagaatataagaccaagggatatagtaactattgattcattagtaaacgctgcaagagtagttgcagctactggaggttcaactaatgcagcactccatcttcctgcaatagctaatgaagcgggtttaaaatttacattaagagatgttgtagaaatttataattcgactccttatatcggggatatgcaacctggtggaaagtatgttgcaaaagatttatatgatgtaggaggtgtgccagttgttataaaatctttattagatggtggttatataaacggagactgcataactgttacaggaaaaacaatagctgaaaatcataaagaagtaatatttcctacaaatcaagatgttgtttataaatgtgataatccaattagtgaaaatagttcagttgtagggttgtggggtaatcttgctccagatggatgtatatcaaaaatagcaggtttaaataatttaacttttaaaggaaaagctaaatgttttgactcagaagaagatgctttaaccgcagttttaaaaaatgaaattaaagcgggagatgcagtaataattagatatgaaggtcctaaaggagggcctggtatgcgtgaaatgctttcaacgacaggtgcaatatatggtcaagggttaggtgaaactgttgctttaattacagatggaagtttttcaggtggtacaagaggattttgcattggtcatgtaggacccagaagctgct

SEQ ID NO: 286106 - DNA, 634 bp, Unknown
  Bacterial polypeptide expressing nucleotide sequence isolated from the Sargasso Sea
tgcccaggcgttggtgcttgtggaggaatgtacactgccaatactatggcatctgcaattgaagcccttggtatgtcagttccttttagctcttcaaatccagcaaaaagttccgataagattaatgaatgcaattccctaggagatactcttgacacccttataaaaaagaatattttaccttctcaaattgtaacaaaaaaatctatagaaaatgcattgcgtttgatatccgttcttggtggatctacaaatgcagtattacattttttagctatagcaaaagcagcaaatattaatttaacattaaatgattttcaatccataagtgataaaacaccttttttagctgacttaaaaccaagtggtaaatatctaatgaaagatttacacaaagttggagggatacctgctgttcttaaatttatgctagaaaataagatgcttcatggagactgtttaacagttacaggaaaaactttagctgaaaatttatctaaaactagctcattaactaaaggtcaaaatttgataagacctcttgatcaaccaataaagccatcgggacatattcgcattctatatggaaatttagcatccaaaggtgcagttgcaaaaataacaggaaaagaag

SEQ ID NO: 286107 - DNA, 767 bp, Unknown
  Bacterial polypeptide expressing nucleotide sequence isolated from the Sargasso Sea
tttagaaaatgctgcaacaattgttgcagcaacaggtggctcaacaaatgctgcacttcatttaccagctttagccaatgagattggagttaaatttgatttaatggatgttgcaagaatatttaaaaaaacaccttatcttgcagaccttaaacctggtggtcaatacgtagcaaaagatatgtgggaagctggaggtgttccaatgttattgaagactttatatgatggtggtttcatccatggtgactgcatgacagttaccggtaaaaaaatgggagaaaatttaaaaaatataagttttaataaaaatcaaaaagttttaagagaacataacaatcctttatcaccagatggaggcgtagtgggtttaaaaggaaatttagcgcctgatggggctatagtaaaaatagctgggttaaaaaaattacaatttacaggtaaagcaagatgttttgataatgaagaagaagcaatgaaggcagtgcaaacaaaaaaatataaagacggcgatgtaattataattagatatgaaggacctagaggagggccaggaatgcgtgagatgctatcaacaactggcgcaatatacggtcaaggtaaaggagaaaaagttgcattaattactgatggaagattttcaggagcaacaagaggattttgtgttggtcatgttggacccgaggcagcacttggtgggccaatcgcattgttaaaaaatggtgacataattgatatagatgcaaaaaagggatctataaatgtta

SEQ ID NO: 286108 - DNA, 742 bp, Unknown
  Bacterial polypeptide expressing nucleotide sequence isolated from the Sargasso Sea
tcagtcaataattcaggatgtaaggctgtaacatttaacacaattactgtctctgatggaatttctatgggtacggagggcatgaaatattccctcgtttcaagagaagtcatagctgactctatagaaactgttgtaggttgtttgggctatgatggagtagtcggtattgggggctgcgataaaaatatgccaggtgtaatcattggtttggcaaggcttaatagaccatctttatttatttatggtggctctattagacctagcgagcaaaatactgattatgtgacagtttgtgaaaaaactggagagttctcaaaaggctcaatctctgaagaggaattaatctctgttgaaaaggtttcagttgttgggcctggatcgtgcggaggtatgtatacagctaatactatggcgtctgcaattgaagctctcggaatgtctcttcctggaagtagcagtcaggacgcagtttctaatgataagaagaatgattgtataaatacagggagtgcaattaggaaccttcttgaaaaagatattaaaccttctgacattatgacaaaggaggcattcgaaaatgcaatcacggtagttattgcacttggaggatcaacgaatgcagtacttcatcttattgcgatggcgcatgctataaatgttgatttagatttagatgactttacaagaataggtaaaagagttcctgttgtagctgacattaaaccatttggtgaaaatt

SEQ ID NO: 286109 - DNA, 796 bp, Unknown
  Bacterial polypeptide expressing nucleotide sequence isolated from the Sargasso Sea
tcgttctttttattatgcaatgggtgagacggaaaaggatgtatcaaaaccatttataggagttgtatcgacatggaatgaagcagcgccatgtaatattgctttaatgagacaagctcagtcagttaagaagggtgttcgagcatcaggaggaactccaagagaattttgtacaattactgtaacagatggtattgcaatgggccatgaaggaatgaaatcctcattaatttcaagagaggtaatagcagatagtgctgaattaactgtaagaggacattgttatgacgcattagtaggtattgcaggttgtgataaatctttacctggattaatgatgtcgatggtacgtttaaacgtaccaagtgtatttatttatggaggatcaatacttccaggaaaatataaaggtaaagatgtaaccgtagtagatgtttttgaagcagttggaaaacattcatcaggacagatgacagcaaaagaattaagaaaattagaattagttgcatgtccgagtgcgggtgcatgtggtggtcaatttactgcaaatacaatggcctgtgtatcagaagctattggtttagctttaccttattcagcaggaacaccagctccttatgaagaaagagataagtatgcaaaattaagtggtaaaatggtaatggaattattagctaaaagaattaaaccaagagatatcgttacaaaaaaagcattagaaaatgctgcaacaatagttgctgcaactggtggttcaacaaacgcagcattacatttaccagcaattgcaaatgaa

SEQ ID NO: 286110 - DNA, 494 bp, Unknown
  Bacterial polypeptide expressing nucleotide sequence isolated from the Sargasso Sea
aaaaattacaggtaaagaagggacatctttgaagggaaaagcaaaagtatttaattcagaagaagagggcgtgagtgcgattttatcaaatcagattaatgatggtgatgtaatcgtaataaggtatgagggtccaaagggtggacctggcatgagagaaatgctaaaacctacttctgcaatcatgggactaggactaggagataaaataggatttattacagacggaagattttcaggtggcacccatggttttgtagttggacatgtttctccagaagcagctgagggtggtttaatagcattagttgaagacggagatactatacttattgatgcagaaagtgatcagcttgttctaaaagttgatgatgatgaaattaaaagaagacaatcaatttggaaaaatccaaatagtaaaccaaaaaaaggagtacttgctaagtatgctgagagcgttaaatctgcaagcctgggagctataactgattaaa

SEQ ID NO: 286111 - DNA, 816 bp, Unknown
  Bacterial polypeptide expressing nucleotide sequence isolated from the Sargasso Sea
tttaggacccgataaggctccacaaagatctttttattatgcaatggatttgaccgaaaaagatgttgcaaaaccttttgttggtgttgtttcaacatggaacgaggcggctccttgtaatattgctttaatgagacaagctcaatcggttaaaaaaggagttcatcaagcaggcggtacacctagagaattttgtacgattactgttacagatggaatagctatgggtcatgaaggaatgaaatcttcattgatttcacgagatgtaattgcagactcaactgaattaactgttagaggacactgttatgatgctttagttggcgttgcaggatgtgataagtctttaccaggcttaatgatggcaatggtaagattaaatgtaccaagtgttttcatttatggcggttcaatattaccgggtagatttaacggaaaagatgtaacagttgttgacgtatttgaaggagttggaaaattttcttcaggaaaaatgtcagcacatgctttaagaaaactagaacttaaggcttgcccaagtgctggagcttgtggaggacaatttacagcaaatactatggcatgtgtatctgaagccattggattagcattaccatattcagctggaacaccagcgccatacacacaaagagattcttatgctttaaaaagtggtaaggcagtaatgaatttattggcaaaaaatatcagaccaagagatattgttacaaaaaaatctttagaaaacgctgcaacaattgttgctgcaacaggtggttcaactaatgctgctttacatttacctgcacttgctaa

SEQ ID NO: 286112 - DNA, 622 bp, Unknown
  Bacterial polypeptide expressing nucleotide sequence isolated from the Sargasso Sea
ttatctaaaattaagtctcctaatgtaagttcaaatgatctaatttttccaatatcaaatcctattaagaatactggtcatattcagatactaaagggaaatttagctgaagatggatgtgttgcaaaaataactggtaaagaaggtttaacattttcaggtccagctaaagtttttaatagcgagtttgaatgtctttcagctatcaaaaattctgaagtctcaaagggagatgttgtagtaataagatacgaagggcctaagggaggtccgggaatgccagagatgttaaaacctacatcagccataatgggtgctggattaggaaaagaagttgctttaattaccgatggaagattctctggaggaactcatggatttgtagttggtcacattgtacctgaggcatttgaaggtggaactatagcaatagtagaaaatggtgatatcataactattgattcagaaaaaaataagatttttgttgatatttctgataaagaaattatggagagaaaagaaaaatggaagcaaccagatttaaaaattaaaaaaggtattctgtataaatatttaaagtcagtttctaatgcatctaacggatgtgtaactgatgaataat

SEQ ID NO: 286113 - DNA, 869 bp, Unknown
  Bacterial polypeptide expressing nucleotide sequence isolated from the Sargasso Sea
tattgcaaatgaaattggtattaaatttgatttaatggatgtgcccagaatattaaaaagaactccttatcttgcagatttaaaacctggtggaaagtatgtagcaaaagatatgtggaaagcaggtggagttcctatgttgcttaaaactttaatggatggtggatatattcacggaaattgcatgacagttacaggcaaaactatgaaagagaatttaaaaaatgttaagtttaattctaatcaaaaggttatgagaaaatataataatccattatctccagatggaggagttgttggaatgaaaggaaacttagctccagaaggtgcaattgttaaagttgctggtttaaaaagattgcaatttactggtagagcaagatgttttgatactgaagaagcagcttacaaagctgttaaaaatagaaaatataaagacggtgatattataattattagatatgaaggaccaaaaggtggacctggtatgagggaaatgcttcaaacaacaggagcaatttacggtcaaggtaaaggagaaaaagttgcacttataacagatggaagattttctggggctacaagaggtttttgtattggacatgttggacctgaagcatcagtaggtggaccaatagctttacttagaaacggagacataattgatttagatgctaagaaggggacaattaatgttcgtttatctaaaaaagaattagccaagagaagaaaaaaatggaaaccaaagaaaattaactttggaaatggaacactttggaaatatgcgcaaacggtcggacctgcttatttaggtgccccaactcatccaggtggtaaaaacgaagtaaaaacttacgcagatatttaat

SEQ ID NO: 286114 - DNA, 874 bp, Unknown
  Bacterial polypeptide expressing nucleotide sequence isolated from the Sargasso Sea
tgcaggatgtgataaatctttaccaggtttaatgatgtcgatggttagattaaatgttccaagtgtttttatttacggaggttcaattcttccaggaaaatataaaggtaaagacgtaacagttgttgatgtatttgaagctgttggaaaacattcatcgggtaaaatgtcagctgcagaacttagaaaattagaattagttgcttgtcctagtgcaggtgcttgtgggggtcaatttactgcaaatactatggcatgtgtatctgaggctattggattagcattaccatactcagctggaactccagctccatacgaagaaagagataagtatgctaaagaaagtggcaaaatggttatgcaacttttaaaaaaacaaattaagccaagagatatcgtaaccagaaaagctttagaaaatgctgcaacaatagttgctgcaacagggggctctactaatgctggattacatttaccagcaattgcaaatgaagcaggaataaaatttgatttaatggacgttgctaaaatttttaaaagaactccttatcttgctgatttaaaaccaggtggaaaatatgtagcaaaagatatgtggttagcaggtggtgtgccaatgttattaaaaactttatatgaaggtggctacattcatggtgattgtatgactgttactggaaaaacaatgaaggaaaatttaaaaaatattaaatttaaccctaaacaaaaagtaatgagatcttataaagatccattatcacctacaggaggtgtagttggtctaaaaggtaacttagcgccagatggagcaatagtaaaagttgctggattagctaaattacaatttactggaaaagcaagatgttttgataat

SEQ ID NO: 286115 - DNA, 910 bp, Unknown
  Bacterial polypeptide expressing nucleotide sequence isolated from the Sargasso Sea
gtacacagcaaatacaatggcatctgccatagaagctatgggaatgagtcttccaaacagctctgctcaggaagccgtttcagatgataaagtgcgtgactgcgttcaagcgggtgaaacagtcttacgtttgatagaaaaaaatatttgtccacttgacattcttacaagagaagcatttgaaaacgcggttactgttgtgatggcactgggtggatccacaaatgcggttttacatcttcttgctatggccaatgcggctaaaataaatttggaactggacgattttttgagaattgggtataaagccccagttcttgcggatttaaaaccaagtggtaagtatttaatgacagattttgtcaagattggcgggttaccgccattgatgaaaatgttactggatgcaggcctacttcatggagaatgtatgactgttacaggaaaaacagtacgtgataatctgaaaaatgttaagccttatgaagaaggacaggagattgtaaaaacacttgatgatccgataagaaaaactggtcacctagtgattctgcgaggaaatcttgcttctgaaggtgcagtagcaaaaatatccggaaaagaaggagagtttttcagaggaactgcgagagtatttaattccgaggaagaagccctcaagcgaattctggacggtactgtagttaaaggcgatgtgattgtaattaggtatgaaggtcccaaaggaggtccaggtatgcgtgaaatgctttctccaacctctgccataatgggaagagggcttggtaatgatgtagctcttattaccgatgggaggttttcaggtggttctcatggtttcgtgatagggcacataaccccagaagcttttgatggaggtttgctgggtatggtgaaaatggtgataaca

SEQ ID NO: 286116 - DNA, 848 bp, Unknown
  Bacterial polypeptide expressing nucleotide sequence isolated from the Sargasso Sea
cggtcaaggcttcgatggattaattacgattggtggatgtgacaagaatatgccagcatgtgtaatggctatggcacggttaaatagaccatcgatttttgtttatggaggtagtatcaaaccaggatctaatcgaaccgatgttgtgtcagtttttgaggcggtaggaaaacactctgaaggagctatttctgatattgaattattagatattgagtcaactgcaattcctggtcctggttcttgcggaggaatgtatacagcaaataccatggcttcagctattgaagcattaggtatgagtcttcccaatagctctgctcaagaggcagtttcttcaagcaaactaaaagattcttcagatgcgggtgaatcaatcatgaatttaatttctttagatttaaagccacgcgatattatgactaagcaggcatttgaaaacgcaattgccgttgtaatagcccttgggggatctactaatgctgtattacatttattggcgattgcccatgaagcaaaaataaatctatctttaaatgattttgaaagaattggaaaaagaacaccagtcttggcagatttaagaccaagcggtaattatctgatgtccgagttgatcgaaattggcggtattgtgcctctgatgaagagtatgcttgaaaaaggtttaattgatggaaatcaaatgacagttacgggaaaaacacttgaagaaaatctttcagactatgatcattacccaaaagatcaaaaaattattacatcaacagataaaccaataaaaacagatagtcatttaagaattttgtatggaaacttagcaccctccggtgcagttgccaaaattt

SEQ ID NO: 286117 - DNA, 724 bp, Unknown
  Bacterial polypeptide expressing nucleotide sequence isolated from the Sargasso Sea
taaaaccttatttgaaggtggatatattcatggagattgtctaactgttaccggtaaaacgattgaagaaaacttaaaagatgtaacttttaatacagatcaaaaagtaatcagaccatataacgagcccctcagcccgactggcggcgtagttggcttaaagggaaacctcgcaccagacggtgcaatagtcaaagtagcgggaatggaaaatttacattttaaaggaaaagcgatttgctttgactgtgaagaggatgcatttgagtgcgttaaaaataataattatagtgaaggtgatgtatttgttatccgttatgaaggacctaaaggaggaccaggaatgagagaaatgctctctacaactgctgctatatatggacaaggaatgggggataaagtcgctctaattactgatggacgttttagtggtgcaaccagaggtttttgtattggacacgtttcacctgaagcggcagtctgtgggccaatagcgcttgttgagaacggcgatgagattattcttgatgctgaaaatggtacaattactatatctgtaagtgatgaagagatggaaaaaagaaagctatcttggaaagaaagaaaaaccgattttaattcaggaacactttggaaatatagtagaacggttggatccgcttcatcaggagcagttactcatccaggagctgaggaagagacacatacatacgccgatatttaa

SEQ ID NO: 286118 - DNA, 925 bp, Unknown
  Bacterial polypeptide expressing nucleotide sequence isolated from the Sargasso Sea
aaatttaaagggaaagatgtcaccgttgtagatgtgtttgaagcagttggcaaacattcctctggaaaaatgtcatctgaagaattaagagaattagaattagtagcttgcccaagtgctggggcttgcggaggtcagttcacagcaaatacaatggcgtgtgtatcggaagcgataggattggctttaccttattcagctgggacgccagctccttatgaagaaagagataaatatgcttatgaaagcggtcaagcggttatgaatttattagaaaaaaaaattaaaccaagagaaatagtcactaaaaaatctttagaaaacgcagcaacaattgttgctgccactggaggctccactaatgcagctcttcatttacctgcattagctaatgagataggagtaaaatttgatttaatggatgttgcaaaaatatttaaaaaaactccttatcttgctgatttaaaacctggaggaaaatatgttgcaaaagacatgtgggaagctggcggcgttcctatgttattaaaaactttatataacggaggatatattcacggcgattgtatgacagtaacaggtaaaacaatgaaagaaaatttagcaaatattaagtttaatactaatcaaaaagttttaagagaatataacaatccactttctccagatggaggagttgttggattaaaaggtaatttagctccagacggagcaatcgtaaaaattgcaggattaaaaaaattacaatttacaggtaaagctagatgcttcgataatgaggaagatgcaatgaaagctgtacagacaaaaaaatataaggacggtgatgtaataataattagatacgaaggtccaaaaggcggaccaggaatgagagaaatgctttcaacaactggagctatttacggtcaaggcaaaggagaaa

SEQ ID NO: 286119 - DNA, 664 bp, Unknown
  Bacterial polypeptide expressing nucleotide sequence isolated from the Sargasso Sea
tatgaaggaaaatttgaaaaatgttaagtttaaaacaaaccaaaaagtaatgagaaaatataataacccattatctaaaactggaggtgttgttggattaaaaggaaatttagcacccgaaggtgggatagtaaaaattgcaggattaaaaaaattacaattcactggaaaagcaagatgctttaatacagaagaagatgcatacaaagctgttaaaaacagaaaatataaagatggtgatatcataataattagatacgaaggacctaaaggtggtcctggtatgagagaaatgcttcaaacaacagctgcaatatatggacaaggaaaaggggagaaagtagcccttataacggatggaaggttctctggggctaccagaggcttctgtataggtcatgtgggtcctgaggcctctgtaggcggtcctatagcccttttaaggaacggagatgttatcgatattgatgctaaaaaaggaactatcaatgtcagactttctaaaaaagaattaagtgcaagaagaaaaaaatggaaaccaaagaaaatgaactttggtaacggtacattatggaaatatgcacaaacggttggtcctgcctataaaggagctccaacacatcctggtggaaaaaacgaggttagaacttacgctgatatttaa

SEQ ID NO: 286120 - DNA, 837 bp, Unknown
  Bacterial polypeptide expressing nucleotide sequence isolated from the Sargasso Sea
gcggcggttgttgtggctgcgacgggggggtcgacaaatgccgttctgcatcttccggccattgcccatgaagccgggatcaagtttacactggatgatgtagcgcggatcttcaagaaaacaccgtatctggccgatctgatgccgggcggaaaatacaccgcgaccgacatgtaccgcgccggcggcgtaccggtggtcatcaaggaactgctggataacggtcttctgcacggcgactgcataactgtgaccgggaaaaccctgaagcagaaccatgccaagctgaaattcccggaaaagcagaaggtgttttatcgtgttaaagatgcgctttcgccaaccggcggtgtagttgggctgaagggcacgcttgctcccgaaggtgccatcgtaaaggtcgccggcatggaaaagttgaacttcgaaggcccagcccgggtgtttaattgtgaagaggacgctttcgaagcggtggttcagcgcaagatcaaggaaggcgatgtcatcgttatccgctacgaagggcccaagggcggtccgggcatgcgggaaatgctgtccacgaccgcggcgctttatggtctcggtctcggcgaaaaggtcgccctgatcaccgatgggcgtttttccggtggcactcgcggtttctgcatcggccatgtcgggccggaagcggctgtcggcggtcccatcggcctgctaaaaaacggcgacatcatttccatcgacgccaagaagggcaagctggacgtgaagctgtcaaaagccgaactcgcccgtcgccctgaaaattggaagcccagggagcacgattatcaggcgggcgcgctgtgg

SEQ ID NO: 286121 - DNA, 811 bp, Unknown
  Bacterial polypeptide expressing nucleotide sequence isolated from the Sargasso Sea
atgcggaaatttaataaaaaaaaattaccaagtagacacacctcattgggtcctgacagagccccacatcgttctttttattatgcgatgggcgagactgaaaaagatgtatcaaaaccttttgttggagtcgtatctacctggaatgaggccgctccttgtaatatagcattaatgagacaagctcaatcagttaaaaagggtgtcaaagcatcaggtggcacaccaagagaattttgtacgatcacagttactgatggtattgcgatgggtcatgaaggaatgaaatcttctctgatatcaagagaagtcatcgcagactctgcagaattaactgttagaggtcattgttatgatgctttagttggtatagcgggttgtgacaaatccttaccaggtttgatgatgtctatggtaagattaaatgttcctagtgtatttatctatggaggctcaatattaccaggtaaatataaaggtaaagatgtcactgtagtagatgtattcgaggcagttggaaaatattcctcaggaaaaatctctgctaaagaattaaaaaaattagagttagttgcatgtcctacagcaggtgcttgtggtggtcaatttactgcaaatacaatggcatgtgtttcagaagctattggtttagctttaccatattcagcaggaactccggcaccatatgaagagagagataaatatgcaaaagctagtggtcgaatggtaatggagttattagctaaaaaaataaaaccaagagatatagttacaagaaaagcatggaaaatgcagcaacgattgttgctgc

SEQ ID NO: 286122 - DNA, 836 bp, Unknown
  Bacterial polypeptide expressing nucleotide sequence isolated from the Sargasso Sea
tacggctggggtttccctcagcatcgacgacttcgaacggatccgtcagcacgtgccggtgatctgtgacctcaagccgagcggccgctatgtgacggtggatctccacaacgccggcggcatcccccaggtgatgaaactgctgctcgacgccgggctgctgcatggcgattgccgcaccgttgagggcaaaagcctgcgtgaggtgctggcggatgtgccctccgtgccaccggccgatcaggacttgatccgtccactgagcaatcccctttacgccaaaggccacctggcgatcctcaagggcaacctggctagtgagggcagtgtcgccaagatcagcggcgtcaagacaccggtgctcactggccccgcccgggtgtttgagagcgaggaagactgcctcgcagccatccttgatcagcggatcaaggccggcgatgtggtggtggtgcgcaacgaggggcctgtgggtggtccgggcatgcgcgaaatgctggcccccacctccgccatcgtcgggcaaggcctgggagacaaggtggctctgatcaccgatggccgcttcagcggcggcacctatggcctggtggtcggtcacgttgcccccgaagccgctgtcggcggaaccatcggcctggtgcaggagggtgacagcatcaccgtggatgccgaccagttactgctgcagctcaacgtggatgaggcggaactcacgcgacgccggacagcctggagtaagccggaaccccgctaccgcactgggattctgggcaagtacgcccgtctggtctccagttcaagccgtggagcggtcaccgaccagcccgactgag

SEQ ID NO: 286123 - DNA, 631 bp, Unknown
  Bacterial polypeptide expressing nucleotide sequence isolated from the Sargasso Sea
atgaataaactcagatcatctgcaataacccaaggtgtgcaaagatcacctaacagatctatgttaagagctgttggatttaatgatgaagattttaataaacctattattggagttgcaaatggatacagcaccataacaccatgcaatatgggtttaaataagttagctctaaaagctgaagagtctataaaaagatcaggtgggatgcctcagatgtttgggaccataacagtaagtgatgggatttctatgggaacagagggcatgaaatattccctagtttcaagagaagttattgctgattcaattgaaacagcatgcaatgctcagagtatggatggagtacttgctataggtggatgtgataaaaatatgccgggtgccatgattgcgattgcaagaatgaatattccctcaattttcatttatggagggacaataaagcctgggaaattgtatggagaagatcttactgttgttagtgcatttgaagctgttggacaattaacatcaggcaaaattaatgaagaaaggctaattcaagttgagaaaaattgtattcctggtgctggtagctgtggaggaatgtttacagataatacaatgtctgcggttattgaagtattag

SEQ ID NO: 286124 - DNA, 885 bp, Unknown
  Bacterial polypeptide expressing nucleotide sequence isolated from the Sargasso Sea
taacatagctcttatgaggcaagctcaatcagtaaaaaaaggtgttaaagatgcagaaggaacacctagagagttttgcactattactgttaccgatggaattgcaatgggtcatcaaggtatgaagtcatctcttgtttctagagaagttattgctgactcaacggagcttaccgttcgtggtcattcatatgatgcgatagtagggctagctggttgcgataaatcactaccaggtctaatgatggcaatgtgtagacttaatgttccaagtgtttttatgtatggaggatccatattacctggaagatataaaggtaatgatgtaactgttgtcgatgtttttgaggcagtaggtaaatatgctgcaggagcagcaactgaaaaagatttaaaagagttagagcaagttgcatgtccaagtgatggagcatgtggaggacaatttactgctaatacaatggcatgtgtttcagaaattataggtttggctctcccatattcttccggagctcctgctccttatgaggatcgcgataaatatgcttatgattctggaaaacaaattatgaatttaattgaaaaaaatatcagaccaagagacatagttacaaagaaatcacttgagaatgctgcaactatagttgcagctacaggtggctcaactaatgcaggtctgcatttaccagcaattgcccatgaatgtggtatcaaattttctttagacgatgttgttgagatttttaaaagaacaccatacattgcagacttaaaaccaggtggacaatatgttgctaaagatgtctatgaagctggtggtgttccaattataattaaaactctatttgacggtggttttcttcatggcgattgtatgactgttac

SEQ ID NO: 286125 - DNA, 829 bp, Unknown
  Bacterial polypeptide expressing nucleotide sequence isolated from the Sargasso Sea
acttcaccttccagctattgctcatgaatgtggaataaaatttgatttagatgacgttgtagaaatatttaagcgaactccttacttagctgatttaaaacctggaggtcaatatgttgcaaaggatgtttatgaagcaggaggagttccaattataattaaaactctgtacgagggcggttttattcatggtgaatgtttgacagtcacaggaaacacaattgctgaaaatttaaaatcagttgagtttaacaaaaatcagagagttattcgatcatacgatgaacccttaagcattactggaggtgtagtagggttaaaaggaaatttagcaccagaaggagcaattgttaaagttgcaggaatggagaatttgaagtttaagggtcatgccaagtgttttgattgtgaggaagatgcatttgaatgtgtaaaaaatgaaaattataaagaaggagatgtttttgttatacgctatgaaggcccaagaggaggtccgggcatgcgagaaatgctagctacgaccgcagcaatttatggccaaggaatgggtgataaagttgcacttattacagacggacgcttcagcggcgccacaagaggattttgcgttggacacgtctctccagaagcagctgtctgcggcccgattgcacttgtagaggacggtgatgaaatcatacttgacgctgaaaatggggaaatttctattaatgttccattggaaactttagaaaagagaaaaaagtcatggaaagagcgaaaaacagactttaattctggaactctttggaaaaacagtcaaactgttggttctgcagtaaagggt

SEQ ID NO: 286126 - DNA, 562 bp, Unknown
  Bacterial polypeptide expressing nucleotide sequence isolated from the Sargasso Sea
ccagcatgtgtaatggccatggcgagattaaatcgaccctctgtattcgtttatggagggacaataaaacctggacccaataaaacagacatagtttctgtttttgaagcagttggagctctgtcaagtggaaaaattgacaataatcagtttactgaggttgaaaaaacagcaattcctgggccgggagcatgcggtggaatgtacactgccaatacaatggcatcagctattgaggccctgggactgagtttagcaaatagctcggcacaggaagcggtttcaaatgagaaagttcttgactgccgtgaggctggcaaggccgtaatgaatttgataaaaaaagacatcaaacctcttgatattttgtcaaaagaggcctttgaaaatgctattactgttgtaattgcccttggtggatcaactaatgctgtattacatctaattgccatggcaaaagaggcaaatatagatgtttcattagatgatttttccagaattggtgctaaggttcctgttttggcagatttaaaaccgaagtggaaaatatttaatgtctgat

SEQ ID NO: 286127 - DNA, 895 bp, Unknown
  Bacterial polypeptide expressing nucleotide sequence isolated from the Sargasso Sea
gcttgtccttctgctggttcctgtggtggccaatttactgctaatactatggcttgtgtctcagagacgattggactagcgcttccaggatcagcgatgacgcctgctccatttgaaagtagagatcaatacgcttatgaaagtggcaaagttgtaatggatttaattgaaaaaaatctaagacctagagatatagttactaaacaatctttaataaatgccgctattgtggtttctgcatcaggtggctcaacgaatgctggtcttcatttacctgcaattgctcatgaagcaggaatagattttaatttagaagatgttacaaaaattttccaatccacaccatatataggtaaccttgctcctggtggtaagtatgttgctaaagatctttatgaagtagggggagttcctgttttgattaaaactttgattgatggaggactcatagatggttcatgtataactgtaacaggtaaaacacttgcagaaaatgtaaaagactttgagcttccaaaaaatcaagatgttatctatcctatctctaatcccattagcaagacaggtggtgttgttggtttaaaaggttcactagctccagaaggtgcaattgttaaaatagccggtcttaaaaaattacagtttaaaggtaatgcaatttgttttgaccgagaagaggaagctttatcagctgtgcttgaaggaaaaattaaaccaggtaatgttttagttattcgctatgaaggtccaaaaggcggcccagggatgcgggaaatgctttccacaacaagtgctatctatggacaaggaatgggtgaagaggttgccttaattacagatggtcgattttcaggaggtactcgggggattttgtatcggtcatgttggccctgaa

SEQ ID NO: 286128 - DNA, 942 bp, Unknown
  Bacterial polypeptide expressing nucleotide sequence isolated from the Sargasso Sea
agatgttatagaaggagttggtgaatattcttcaggaaaaatttctcaacatgctctaagaaaattggaattaaaagcttgtccaagcgcaggtgcttgtggcggacaatttacagctaatacaatggcatgtgtttcagaggcaattggtcttgctttaccttattccgcaggaactccggcgccatatcaaaagagagataaatttgcagtagctagtggaaaaatggtaatgaatttattaagaaaaaaaattagaccccgggacattgtaacaagaaaatctttagaaaatgctgcagcagttgttgctgctactggtggatcaactaatgcagcattacatttgcctgctatagcaaacgaaataggaattaaatttgatttaatggatgtagcaaaaatttttagaagaactccttatttagcaaacttgaaacctggtggtttatatgtagctaaagacatgtggaaagcaggaggaattcctatgttattaaaaacaatgttagatggtggatatttacacggtgactgtttaacagtaaccggaaaaactatgcgtgaaaatttaaaaaacgttaaattcaatataagacaaaaagtaatgcgaaaatataataacccaattacaaaagacgggggtgttgtaggattgaaaggaaacttgtcaccacatggagcaattgtaaaaattgcgggattaaaaaagttaagttttacaggcaaggccaggtgttttgacagcgaggagtctgctttaaaagctgtcttaaataaaaaatataaaaaaggcgatgtaatagttattagacacgaaggaccaaaaggcgggccggggatgagagaaatgttacaaactacagccgctatatatggacaaggcatgggtgaaaaagttgcattgataacagacggaagattctctggggcaacaagagg

SEQ ID NO: 286129 - DNA, 840 bp, Unknown
  Bacterial polypeptide expressing nucleotide sequence isolated from the Sargasso Sea
ggcgcgctggtggcgagcgaaatcgaagcggccggcggcgtggcgaaagagttcaacaccatcgcggtggacgacggcatcgccatgggtcacggcggcatgctgtattcgctgccctcgcgcgaactgatcgccgactcggtggaatacatggtcaacgcgcactgcgccgacgcgatggtctgcatctccaactgcgacaagatcacccccggcatgctgatggccgcgatgcgcctgaacatcccggtcgtttttgtttccggcggtccgatggaagcgggcaaggtcaagtcgccgaccgatggccaggtgatcgccaagatcgacctgatcgacgcgatgatcaaggcgggtgactccagggtcagcgacgcggaagtggcggaaatcgagcgcaacgcctgcccgacgtgcggctcctgctcgggcatgttcacggcgaactcgatgaactgcctgaccgaggcaatcggccttgcgctgcccggcaacggcacgatcgtcgccacgcacgcctaccgcaagagcctgttcgaacaggcgggccgtctggtcgtggatctgtgccgccgctactatcaggaagaagacgcatcggtcctgccgcgcagcatcgccaacaagcaggcattcgagaacgccatggcgctcgacgtggccatgggcggttcgaccaacaccgtgttgcatctgctggctgccgcgcaggaaggcggtgtcgatttcacgatgtccgacatcgatcgcatctcgcgcaaagtaccgtgcctgtgcaaagtggcgcctgccaccgacaagtaccatatcgaagacgtgcatcgtgcgggcggcatcccc

SEQ ID NO: 286130 - DNA, 961 bp, Unknown
  Bacterial polypeptide expressing nucleotide sequence isolated from the Sargasso Sea
gccatggttcgattaaatgtaccaagtgtttttatttatggtgatcaatcttccaggaagattaatggaaaagatgtaaccgttgtcgatgtattcgaaggagttggcaaatattcatctggaaaaatgacagaacatgctttgagaaaattagagttagtagcttgtcctagtgcaggtgcctgtggaggacaatttactgcaaatacgatggcgtgtgtctctgaagccattggattagctttaccttattccgctggaacaccagcaccttatgaacaaagagataaatatgctttacaaagcggtaaggcagtaatgaatttgttaaaaaaaaatataagaccaagacaaattgtaactcgaaaatctttagaaaatgctgcaactatagtagcagcaacaggtggatcaaccaatgcagctttacatttaccagcattagcaaatgagattggaattaaatttgatttaatggatgttgctaaaatttttaaaaaaactccttacttagccgatctaaaaccaggcggtaaatatgttgctaaagatatgtgggcagctggtggcgttccaatgttacttaaaacacttatggacggtggttatattcacggcgattgtatgactgtaactggaaaaaccatgagacaaaatttaaaaaaagttaaatttaatataaaacaaaaagttatgcgtaaatataataatcctttatcacaagatggtggtgtagttggtttaaaaggaaatttagctccagatggcgcaattgtaaaaatagctggattaaaaaaattacaatttacaggtaaagcaagatgctttgatacagaagagtctgcttataaagcagttaaaaatagaaaatataaagatggagatattataattatcagatatgagggacctaaaggaggtcctggcatgagagaaatgcttcaaacaacgggagccattt

SEQ ID NO: 286131 - DNA, 758 bp, Unknown
  Bacterial polypeptide expressing nucleotide sequence isolated from the Sargasso Sea
tgaggctggtattaaatttgatttaatggatgttgcgaaaatatttaaaagaactccatatcttgcggacttgaaaccaggtggaaaatatgttgctaaagatatgtggttagcaggtggagtaccaatgcttttaaaaactctttatgaaggtggttatattcatggagattgtatgactgttacaggtaaaacaatgaaagaaaatttaaagggaattaaatttaatccaaaacaaaaagtaatgagatcatttaaaaatccattatctccgacaggtggtgttgttggtttaaagggtaacttagctcctgaaggaggaattgttaaaattgctggacttaaaaaattacaatttactggaagagcaagatgttttgataatgaagaaagtgcaatgaaagcagttcagagcagaaaatataaagatggtgatgtaattattattagatatgaaggaccagttggtggaccaggtatgagagaaatgctttcaacaacaggtgcaatttatggacaaggtaaaggagaaaaagttgccttaataactgatggaagattctctggagcaactcgtggattttgtgtaggccatgtaggaccagaggctgcattaggtggaccgatcgctctattacgtaatggagatattattgatattgatgctaagaagggaacaattaatgttcgattaactagagcacaattagcttcaagaagaagaaaatggaaggctagaaaatctgattttggatcag

SEQ ID NO: 286132 - DNA, 790 bp, Unknown
  Bacterial polypeptide expressing nucleotide sequence isolated from the Sargasso Sea
aatggaaatatcaagtagaaacgtagtagagggaacatctagggcaccacacagagcaatgtacaaagctatgggtttatctgatgatgatcttgctaaaccatttgttggtgtatgtcatacaggtaatgaggctacaccatgtaacattcacctaccaggacttgcccaaaaagcaaaagatggtgtaaaggatagcggtgctacacctagggagtttagtactattgctgtaagcgatggaattgcaatgggtcatgaaggaatgaaatcatcgctagttagtagagaagttattgctgattcaattgaattaatggtaagagcacatcaatatgatgcattagttggcatagcaggatgtgacaaaagtttgccaggtactatgatggctatggcaagactgaatattccatctatttttgtttacggtggaacaattatgcctggaatattagatggaaaagaactaacagttgttgatgtttacgaagcggttggatcatataatgcaggacaaatttcactagaagaattaaaaaatatagaggatactgcgtgtccaaatgctggttcctgtggcggaatgtttacggcaaatacaatggcatcaatttctgaggcactaggtattgcattacctggcagtgcaagcccaccagctgaagatgatagaagggaaaaaatagtttatgaaactggtaaagcttgtacagaactattagaacttaacattaagccacgtgacattttaacatttgaatcatttgaaaatgctataacaatgtta

SEQ ID NO: 286133 - DNA, 420 bp, Unknown
  Bacterial polypeptide expressing nucleotide sequence isolated from the Sargasso Sea
ttgtcatacgctatgaaggcccaagaggtggtccaggcatgcgagagatgttagctacaacagcagcaatctatggccaaggaatgggcgataaagttgcactcattacagacggacgattcagcggcgctactagaggattttgcgttggacacgtttctcccgaagccgctgtatgcggtccaattgcacttgttgaggacggtgatgaaattacacttgatgctgaaaatggggagatttctattaatgttccattggagactttagaaaagagaaaaaagtcatggaaagagcgaaaaacggactttaattctggaacgctttggaaatacagtcaaactgttggttcagcagtcaaaggcgcagttactcacccaggagctttaaaagaaactcacgtttatagcgatatttgaa

SEQ ID NO: 286134 - DNA, 740 bp, Unknown
  Bacterial polypeptide expressing nucleotide sequence isolated from the Sargasso Sea
gtaccaagtgtctttatttattggtggttcaatattaccaggtagatttaatggaaaagatgtaacagttgttgatgtatttgaaggagttggaaaattttcttcaggaaaaatgtcagcacatgcattgagaaaactagaacttaaggcttgcccaagtgctggagcttgcggcggacaatttacagcaaatactatggcatgcgtgtctgaggcaataggattagcattaccgtattcagctggaacaccagcaccatatacacaaagagattcttatgctttaaaaagtggtaaggcagtaatgaatttattggcaaaaaatatcagaccaagagacattgttacaaaaaaatctttagaaaacgctgcaacaatcgttgctgcaacaggtggatcaactaatgcagctctacatttacctgcacttgcaaatgaagcaggaattaaatttgatttaatggatgttgcgagaatatttaagaaaacaccttatcttgcagatttaaaacctggtggaaaatatgttgcaaaagatatgtggaaagcaggtggagttccaatgcttttaaaaactttattagatggtggttatatacacggtgattgtatgacagttacaggtaaaacaatgagacaaaatttaaaaaacgttaagtttaataaaaatcaaaaagttatcagaactcataaccaaccattgtctcctgatggcggtgttgttggtttaaaaggaaatt

SEQ ID NO: 286135 - DNA, 852 bp, Unknown
  Bacterial polypeptide expressing nucleotide sequence isolated from the Sargasso Sea
cccatcccttttggtctatggaggcactgtaagacctggaaagtggaaaggtgaagacctgaatattgtctcggctttcgaggcatatggtaagcgattaggcaatgccatttccgatgaagactatgacggaatcataaaaaattccatcccaggcccgggcgcttgtgggggtatgtacaccgccaataccatgtcttcggccattgaagcgatgggcatgagtttgccaagttcagcctctaatcccgccgaaggagatgccaaacaaaacgaaattgcgaaagttggaaaggccatctatcaccttttgaaagaagacattcggccaagtgacatcatgacgttggaggcatttgagaatgccattcgtgtcatcatgattttgggcggatcaacgaacgccgttctccatttgattgccatggcaaaggccgtgaacgtgccgattggattggatgatttccaacgactctctgataccacgccgttcattgcagaccttaaaccaagcggtgaatatttgatggaagacctgcataaagttgggggagtgccggcagtgatgaaaatgatgttggagcaaggttatctccacggagattgcctcactgtcaccggaaaaaccctggcagaaaacctggaaggataccctgatttggctcaaggccaaaaagtaattcatgacttcacccaaccaatcaagaaaacgggacacttgcaaatcctctatggaaatcttgcacctgaaggcgcagtagccaaaatcacaggcaaggaaggagaatatttcgagggtccggctaggtgtttcaatgatgaatttgaggcaatcgaaggaataggaaaaga

SEQ ID NO: 286136 - DNA, 846 bp, Unknown
  Bacterial polypeptide expressing nucleotide sequence isolated from the Sargasso Sea
gggcttgagcttgccctacagctcaaccatggcggcggaagatcccgagaaggctgacagtgctgctcgctcagcagaggttttggttgaggcaattgccgccaacattcgccccctggatttgctgacgcgcgaggcctttgaaaatgccatcagcgtgatcatggcggtgggcggctcgaccaatgccgttctgcatctgttggctattgctcggactgctggcgttcccctatcgattgacgatttcgaaacgattcgccaacgggtgccggtgatctgtgatctcaaacccagcggccgcttcgtcaccgttgatcttcacgaagctggcggcattccccaggtcatgaaactgctgctcgacggcggtttacttcacggtgattgccgaaccgtggagggcaagacactccgcgaggttctggctgatatcccctcatctccaccggctgatcaagacgtcattcgccccctgagcaatcctctttatgccaaggggcatctcgccgtgctgaaaggcaacctggccagtgaaggtgctgtcgccaaaatcagtggcgttaaaacaccagttcttacaggcccggcaaaagtctttgagagtgaagaggaatgcctacaagcgatcttggcaaacaagatccaagccggagatgtggtggttgtgcgcaatgaaggtcccgtcggtggccccggtatgcgcgaaatgttggccccaaccgcagcgatcgttggcgagggccttggagacaaggtggctttaatcaccgatggtcgctttagcggtggcacctatggactcgttgttgggcatgtggctccagaagcagctgttggaggctt

SEQ ID NO: 286137 - DNA, 874 bp, Unknown
  Bacterial polypeptide expressing nucleotide sequence isolated from the Sargasso Sea
aaaaaaaaaataaaaaataatgacagaagaaaatattctcaaaaattttatgacggatttgaaagggcgccgagtaggtcgatgctttatcctttaggttttaaaaaagacgattttaataaacctcaggtgggtattgcttcaacttggagtcgagtaaccccttgtaatgcccatattcacgatttggcaaaaaaggttgtggatggtgttgaaaaacatcagggaaaaggagttcattttaatacgataacggtttcagatggaatttctatgggaacatcgggcatgaattactctttggtatctagagaagtcattgccgactctattgaaactgtcgtagaggcccaaggttttgatggtgttgtggcccttggtgggtgtgataagaatattcccgcctgtttaatgagcatgatccgattaaatagaccttcactttttgtttatggaggatcaattttaccaggaactcttcctggaaataaaaaaattgatatagtctctgttttcgaagccgttggtaaatatgctaaaaaagaaattgatgaaacagaacttgagttgattgaaagcaaggcgatacctggttttggaagctgtggaggaatgtacaccgctaacaccatggcgtcagctgcgacagctttgggaatgactcttcctgatagctcatcaaatttggcagaatctgatgaaaaacttgatgattgtgaaagagccggtaaagccgttatgaaacttattgaaaaaaacctctgtccaaaagatattctcagctttaaatcctttgaaaatgcaatcaccgttgttatgactttaggagggtcaactaatgccgttttgcacctgttggccttggccaaagaag

SEQ ID NO: 286138 - DNA, 805 bp, Unknown
  Bacterial polypeptide expressing nucleotide sequence isolated from the Sargasso Sea
atgaaatttgataaaaataaattacctagccgccatgtgtctgttggtccagagagagcgcctcatagatcatattattatgcgatgggattgaatgaagacgatataggtaagccttttgtaggagttgtatctacttggaacgaagccgctccgtgcaacattgctttaatgagacaagcacaatctgtaaaaaaaggcgtaactaaagctgagggcactccaagagagttttgtaccattacagttactgatgggatcgcaatgggtcatcaaggtatgaagtcatccttggtatctcgtgaagtaattgcagactctaccgaacttacagttagaggacattgttacgatgcaatagttggactggcaggatgtgacaagtctctccctggtctaatgatggccatgtgccgcttaaatgtacctagtgtgtttatgtacgggggtagtattctgccaggaaaatacaaaggtaaagatgttactgtagttgatgtatttgaggctgtcggcaagtattcatctggcaatgcaactgaagaagaattacatgaacttgaatgtgtagcgtgcccaagtgcaggtgcttgtggaggacaatttactgcaaacaccatggcatgtgtttcagaagcaattggattagcactgccatattcatcgggtgcccctgctccatatgaggaaagggataaatatgcgtacgaggctggaaagcaagttatgcaattgattgaaaaaaatattagaccacgagatattgttacgaggaagtcacttgaaaatgcagcaacgattgttg

SEQ ID NO: 286139 - DNA, 1042 bp, Unknown
  Bacterial polypeptide expressing nucleotide sequence isolated from the Sargasso Sea
gctattgttttagctttaccatattcagcaggaccccctgctccttacaaagaaagacacaagtatgcgattaatagtggcaaagctgtaatggagcttttatcaaaaaatattagaccaagagatattgttacaagaaaagcattagaaaatgctgctacagttgtcgctgcaacaggaggatctactaatgcaggtttacacttaccagctattgcaaatgaaattggaataaaatttgatttaatggatgttgcaaaaatttttaaaagaactccttatcttgctgatttaaaacctggtggaaaatatgttgcaaaagatatgtgggaagcaggtggagttccaatgcttttaaaaactctttacgatggtggatatattcatggagattgtatgactgttacaggtaagacaatgaaagagaatttaaaaaatgtgaaatttaatccaaaacaaaaagtaatgagaagttataaaaacccaattacaccaacgggcggagttgttggattaagaggcaatttagctccagaaggtggaattgttaaaattgcaggtttgaaaaaattacaatttactggaagagcaagatgttttgactctgaggaaaaagcttacaaagctgtaaaagaaagaaaatacaaagacggcgatataattataattagatatgaaggcccaaagggtggtccaggaatgagagaaatgttgcagacaacagctgcaatttatggacaaggaaaaggggagaaagtagcccttataacggatggtaggttctctggggctacaagaggcttctgtatcggccatgtaggtcctgaggcctctataggcggtccaatagcccttttaaagaacggagatataattgatatagatgcaaaaaaggggactattaacgttagattaagtaaaaaagagcttagtttgagaaaaaagaaatggagacaaagaaaaatgaactttggaaacggaactctttggaaatatgctcaaacagtaggtccagcttatttaggtgcacccacacatccag

SEQ ID NO: 286140 - DNA, 967 bp, Unknown
  Bacterial polypeptide expressing nucleotide sequence isolated from the Sargasso Sea
aagaaaaaacttccaagtagacattcatcattaggtgcagatagagctccacacagatcgttttattatgctatgggtgaaactgagaaagatgtagctaaaccctttgttggtgtagtttctacatggaatgaggcagctccatgtaatattgctctaatgagacaggcacaatcagttaaaaaaggagttagagctaatggtggtactccaagagaattttgtacaattactgtcacagatggtattgccatgggccatgaaggaatgaaatcttcattgatatccagagaagtaattgcagattctgctgaacttacggttagaggtcattgttatgatgcgttagttggtattgcaggatgtgataaatctttaccaggtctaatgatgtcaatggtaagacttaatgtaccaagtgtatttatatatggtggatcaattcttccaggtagatacaaaggtaaagatgtaacagttgtagatgtatttgaagcggttgggaaacattcaactggtcaaatgtcagctgcagaactaagaaaattagaattagttgcatgcccaagcgcaggtgcttgtggtggacaattcacagcaaatacaatggcatgtgtatcagaagcaattggattagcattaccttattcagcaggaacaccagctccatatgaagaaagagataaatacgcaaaagctagtggtaaaacggttatgaaccttttgaaaaaaggaattaaaccaagagatattgtaactaaaaaagctttagaaaacgctgcaacagttgttgctgctacaggtggatctactaatgcaggattacatttacctgctattgcaaacgaagcaggaattaaatttgatttaatggatgttgctaaaatttttaaaagaacaccttatcttgcagatttaaaacccaggtggaaaaatatgttgcaaaagacccatgtggttagccagg

SEQ ID NO: 286141 - DNA, 804 bp, Unknown
  Bacterial polypeptide expressing nucleotide sequence isolated from the Sargasso Sea
tttcttaagagctgggaaaattattgttgagttgaccaaaaaatactatgaaaaagatgatgaaagtgttcttccaagaaatattgcaaatctagaatcatttgaaaatgccatgaccttggatattgccatgggaggttctacaaatactgtgttacatatacttgctgcagcaaaagaagctgggcttgatttcggcatggatgagatagatcgcctatcaagaagggttcctaacttatgtaaagttgccccaagtagtaactttcatatggaagatgtgcacagagcaggaggaataatggccatcctgggagaactagagaaagcaaaattgctgaattctgatagtaaaactgttcactcagaaacaatgcttgatgccatacagaaatgggatatcaacaggaagccttcaaatgaagtcaaagaattctattcggcagcacctggcatgattccaaccactcaaccattctcgcaaaataaaagatactcagaattggatgtggatcgtgaaaatggctgtattagagattctcacaatgcccatagtcaagatggaggcttagcagtactaaaagggaacattgcatctgatggatgcattgtaaaaacagcgggtgtcgatgaaaaaattctaacctttagtggacctgcaaaagtttttgaaagtcaagatgatgcggtggaagcaatccttggagaccagattgtagctggagatgtggttgttattcgctatgaaggaccaaagggagggcctggcatgcaagaaatgctttatccaaccagttatttaaa

SEQ ID NO: 286142 - DNA, 848 bp, Unknown
  Bacterial polypeptide expressing nucleotide sequence isolated from the Sargasso Sea
atctacaaatgcagttcttcaccttattgcaatggcacatgttataaacgttgatattaatttagatgactttacgagaataggtaaaaaagttcctgtaatagctgacattaaaccttttggtaaaaattatatgtcctctcttaacgaattgggaggtatacagccactcatgaaaatgttactcgatgcaggcttaattcatggcaactgcttaactgtttctggaaaaaccatttcagaaaatctttccaaggttgatgcatatccggaaaatcaaacaattataagagaaatgtctaatcctattaaaagcagcagtcatttacgcattctttatggcaatttagctcctgagggagcagtcgctaaaattacaggaaatgaaggtcttaaatttactggaacagccaaagtatttgattccgaagaagatggaaatgaagcaattcaaaaaaatctaatcaatgatggagatgtagttgttataaggtatgaagggccaaaaggaggccctggtatgagagaaatgttaaaacctacctctgcaataatggggcagggcttaggcgataaggttgcatttattactgatggaagattttctggcggaactcatggttttgttgttggacatatttctccagaagcttatgtaggcggacccatcggagtcatcaaaaatggcgataaaataaccattgatgctgagacaaactcaatttccatcgatatatctgatgaggagcttcaaaaaagattagataactttaaaccaaataaagagcttcctaaaaaaggtgtcttatcaaaatactcaaaaagtgtacaatctgcatccctaggag

SEQ ID NO: 286143 - DNA, 902 bp, Unknown
  Bacterial polypeptide expressing nucleotide sequence isolated from the Sargasso Sea
atttgatatcaggcataagagtcgtgtgctagtagacggacctgatcgagcagccgctcgttctcagctgcactcagtagggtatacccgtgatgacctcaaaaaaccactggttatggtggcacatgaatggattggcaccatgccttgcaattattcacaacgggccctcgcgcagcaagtgatggcgggaattcgagcggctggtggtactcccatggaagtgaacactgtatcaatttctgacggaatcactatgggaactgaaggcatgaaggcctcacttatatcgcgcgaactcattgcagactcaattgagttgtgtgggatcggatactcatttgacgcggcggtgataatcgtcggatgcgataaaaccataccgggaggtgctatggcattagctcggctcaacttgccagggatcgttctgtattcaggctcgatcgccccagggtccttccaaggtgaagacgtcaccatccaagatgtttttgaaggagttggtaaacacgcggctggcaatatgacagacgaagaacttgcggaactcgaagctgctgcctgcccgggagccggtgcgtgcggagctcaatataccgcgaacacaatggctactgttcttgaattcctaggaatctccgagatgggaacaagtacacccggagctacagatcctcgaaaaaacgatatcggtgtggagatcggcgaacgggtgatggaacttctagcaaatggcacactcccgagagagttactcactaaagaagcgtttgaaaacgggatcgcgtgtgcgacggctactggcggatcaacaaacgtcgttctgcatctgttagcaatagcagcggaatgtggaattgacctcgatattgatgacttcaacccgtgtttcggataac

SEQ ID NO: 286144 - DNA, 889 bp, Unknown
  Bacterial polypeptide expressing nucleotide sequence isolated from the Sargasso Sea
acaaccatcactgttacggacggcatagcaatgggacatgagggaatgaaatcctctcttgtttcaagagaaatcattgcggattcggttgagctaacgatgcgtggtcactgctacgacgcacttgtgggccttgcggggtgtgacaagtctttgccgggtatgatgatgtcaatggtaaggctcaatgtcccttcggtttttgtatatggtgggacgatactgccaggaaagtttcaggggcgggacgtcacaattgtcgatgtgttcgaaggtgtgggccagtatgcggccggaaatatgagtgatattgaactgaaaacgctggaaagtgttgcatgcccctgtgaggggtcgtgtggtggtcagtatacggcaaataccatggcgtgtgtcgcagagaccattggcctcgcgttacctacgtcttcaggagcaccagctgtctataaatcacgagatgagatggtgcgagcttctggaattgctgttatggatgccttggaaaaagatctacgtcctcgcgatattgttacccgtgaatcactcgaaaacgcggcggtagtggtagcagcgacaggggggtctacgaatgcaggattacatttgccggcgattgcaaatgaagccgggattaaatttacactcgatgatgttgtaaaaatatttaagaaaacgccctatcttgccgatttaatgccgggtggaaggtatactgcaaccgacatgtacagggctggtggcgtgccagtgatcattaaagaactactggataacggacttcttcacggtgagtgtatgacgatcacaggaaaaacactgaagcagaaccacgccaagcaaaagtttccggaaaaacaaaaggttttctaccgagttaggaacgcac

SEQ ID NO: 286145 - DNA, 637 bp, Unknown
  Bacterial polypeptide expressing nucleotide sequence isolated from the Sargasso Sea
atttaacaataaacaaaaagtgatgagaaaatataataatccattatcacatgatgggggggtcgtcggactgaaaggaaatcttgctccacaaggagctattgtaaaagttgcaggattaaaaaaacttcaatttactggacgagcaagatgttttgatactgaagaatcggcatacaaagctgtattgaaaagaaaatataaagatggagatattataattataagatacgaaggaccaagaggtgggccgggcatgagagagatgttacaaacaacaggagctatttacggccaagggaaaggagaaaaagttgcactaattacagacggaagattttcaggtgcaacaagaggattttgtattggccacgtaggaccagaagcatcagttggtggaccgatagctttattaaaaaatggcgacataattcatattgatgcaaaaaaaggaactattaatgttgatctttcaaaaaaagagttaattaaacgtagaaaaaaatggaaaccaaaaaaaattaattttggaaacggaacactctggaagtatgctcaaactgttggtccagcttatttaggggcttccacacatcctggtggaaaaaacgaagttaagtgttacgctgatatttaa

SEQ ID NO: 286146 - DNA, 844 bp, Unknown
  Bacterial polypeptide expressing nucleotide sequence isolated from the Sargasso Sea
tgtaagaggccattgttatgatgctttagttggtattgcaggatgtgataaatctttaccaggtctaatgatgtctatggttagattaaatgtaccaagtgtatttatatatggtgggtcaattcttccaggaagatacaaaggcaaagatgtaactgttgttgatgtttttgaagcagtaggaaaacattcatcaggtcaaatgtctgctgcagaacttagaaaattagaattagttgcttgtccaagcgcaggtgcttgtggtggacaatttactgcaaatacgatggcatgtgtgtctgaagcaataggattagctttaccttattcagcaggaacaccagctccatatgaagaaagagataaatatgcaaaagctagtggtaaaatggttatgaatcttttgaaaaaagcaattaaaccaagagatatagttacaagaaaagctttagaaaatgctgcaacagttgttgctgcaactggtggatctacaaatgcaggattacatttacctgctatagcaaatgaagcaggaattaaatttgatttaatggatgttgctaaaatttttaaaagaacaccttatcttgcagatttaaaaccaggcggaaaatatgttgcaaaagatatgtggttagcaggtggagttcctatgttattaaaaactttatatgaaggtggatatattcatggtgattgcatgacagtgactggtaaaactatgaaagaaaatttaaaaggtattaaatttaatccaaaacaaaaagtaatgagatcttataaaaatccattatcaccaacaggaggtgtggttggactaaaaggaaatttagctccagaaggt

SEQ ID NO: 286147 - DNA, 480 bp, Unknown
  Bacterial polypeptide expressing nucleotide sequence isolated from the Sargasso Sea
atactgaagagtctgcttacaaagcggttttacaaagaaaatacaaagatggtgatattatagtaatcagatatgaaggtccaaaaggaggtccgggtatgagagaaatgcttcagactacaggagctatatatggtcaaggcaaaggtgaaaaagttgcattaataacagacgggagattttctggagccacaagaggtttttgtattggacacgttggacctgaagcttctgttggtggccctatagctttacttaagaacggagacttaattcatattgatgctaaaaaaggtaccattaatgttaatctatcgaaaaaagaattatttaaaagaaagaaaaagtggaaaccaaaaaaaattaattttggaaatggtacactttggaaatatgctcaaacagttggtcctgcttatttaggtgcttccacgcatccaggtggaaaaaaagaagttaaatgctacgcagatatttaaa

SEQ ID NO: 286148 - DNA, 909 bp, Unknown
  Bacterial polypeptide expressing nucleotide sequence isolated from the Sargasso Sea
ttgtgggtgttgtttcacttggaatgaagctgctccatgtaatatagcgttaatgagacaagctcaatctgttaaaaagggtgttagagctaatggaggaacccctagagaattttgtacgattacagttactgatggaatagcaatgggacatgaaggaatgaaatcttcattaatctcaagagaagtaattgcagattctgctgaacttacggttagaggtcattgttatgatgcattagttggtatagctggatgcgataaatctttaccaggattaatgatgtccatggttagattaaatgttccaagtgtttttatatatggcggatcaattcttccaggaagatataaaggcaaagatgtaactgttgttgacgtatttgaagcagttggaaaacattcatcaggtaaaatgactgctgctgaattaagaaaactagagttagtcgcatgtccaagtgctggtgcatgtggagggcaatttactgctaatactatggcctgtgtatctgaagcaattggattagctttaccttattcagctggaacacctgctccatatgaagaaagagataaatatgcaaaagcgagcggtagaacagttatgaatcttttaaaaaaaagaattaagccaagagatattgttaccaaaaaagctttagaaaatgctgcaactatagttgctgcaacaggtggatctactaatgctggattacatttaccagctcttgcaaatgaagctggaattaaatttgatttaatggatgtagcaaaaatattcaaaagaactccatatcttgctgacttaaaaccaggtggaaaatatgttgctaaagatatgtggttagcaggtggtgtttccatgttacttaaaactttatacgaaggaggatatatccatggcga

SEQ ID NO: 286149 - DNA, 892 bp, Unknown
  Bacterial polypeptide expressing nucleotide sequence isolated from the Sargasso Sea
cgcgcgactggtcaaataaaaagcgatgaggattttgatcgtccatttattggtgtagccaactcgtatattgatttgattccagggcatgtccatctccaagagtttggaagtgttgcaaaaaaagcagttcgtgaagcaggaggtgtaccttttgagtttaacaccataggagtagatgatggtatagctatggggcatatagggatgcgatattcactagcaagtcgtgagttaattgctgacagtgtagagacggtagcagaatcgcatagattggatgggctaatatgtatttctaattgcgataagatagttccaggtatgcttatggcatcactccgagtaaatattcctactgtatttgtatcaggtggcccgatggaggcaggaaccaataaacgaggtgaaaaagttgacctggtttcagtttttgaaggtgtaggtaagtttaaaactggaagtattgatgaggatgatttattagatcttgaagaaaatgggtgccctacttgcggttcttgttcaggtatgtttacggctaattcaatgaactgtttattagaggttttaggacttgctctgcctggcaatggtacaatattagcaacagatccatccagactagaccttgttaaacaagctggcaaagcgattattgatcttgttgataaagatttaaagccccgagatattgtaaataatgattcaattagaaatgcgtttgcattggatatggcaatggggggaagtacgaatacagtgcttcatactcttgctgcatccatagaggcaggcctgtcttttgatatgaaagagatcaatgaaattagtcgtagaacaccttacttgtgcaaagttagccctgcgactccgaatgttcatatggagg

SEQ ID NO: 286150 - DNA, 813 bp, Unknown
  Bacterial polypeptide expressing nucleotide sequence isolated from the Sargasso Sea
caagatgctgtctcttcatcaaagaatcaagattgcgtagatgctggaattgcaataatggatctacttgaaaaagatataaaaccatctgatattatgacaaaagaagcttttgaaaatgctataacaatagttatcgctctgggtggatcaacaaacgcagttcttcatattttagctatggctcactctattggagtaaagttaaaattagatgacttcacaaatattggtaaaaaaacgccagttttagcagacttaaaaccttttggaagtcattatatgtcagagttaaattcttcaggtggcatacaacctttgatgaaatcgttattagaaaaagggcttctaaatggtgaatgtatgactgttactggcaagactttagaagacaatttgaaagacatcgaaccgtataaagataataaaattatcaaaagctttgaaagccctattaaaagtgacagccatttaagaatcctttatggaaatttagcaagtgatggtgctgttgcaaaaattactggcaaagaagggacatcttttgaaggcaaagccaaagtatttaattctgaggaggatggtgttaaagcaatactagggaatcaaatagaagagggagatgtaattgttataagatacgaaggtccaaagggtggtcctggtatgagagaaatgctgaaaccaacttctgcaattatggggctgggtttaggagataaagttgcatttataacagacggaagattttctggtggaacaccatggttttgtagttggccacatattctccccgaggctgcggatgggggt

SEQ ID NO: 286151 - DNA, 472 bp, Unknown
  Bacterial polypeptide expressing nucleotide sequence isolated from the Sargasso Sea
tatgaataaactcagatcatctgcaataacccaaggtgtgcaaagatcacctaacagatcgatgttaagagctgttggatttaatgatgaagattttaataaacctattattggagttgcaaatggatatagcaccataacaccatgcaatataggtttaaataagttagctctcagagctgaagagtcaataaaaagatccggtgcgatgcctcaaatgtttggaacgatcacagtaagtgatggcatttctatgggaacagagggcatgaaatattcactagtctcaagagaagttattgctgattcaatagagacagcatgcaatgctcagagtatggacggagtccttgctataggtggatgtgacaaaaatatgccaggtgccatgatagcaattgcaagaatgaatatcccctcaattttcatttatggagggacaattaaacctgggaaattacatggagaagat

SEQ ID NO: 286152 - DNA, 814 bp, Unknown
  Bacterial polypeptide expressing nucleotide sequence isolated from the Sargasso Sea
aatactgcaggaatagaaatcaacattaatgattttgagagaatcagacaaaaagtgcccgttatttgtgaccttaaaccgagtggtaaatatgttacggtggatcttcataaggcaggtgggattccacaagtaatgaaaatacttttgaatgcaggattaatacatggcgattgtaaaaacattgaaggcaaaaccatctcagaatacttacagaatattccagataagcctccaacaaatcaaaatgtcataagagaaataaataaccctctttataaaaaaggacacctagcaatattaaaaggtaacttagcgagcgaaggttctgtagccaaaattagcggagtaaaaaatcctgtattaacaggtccagcaaagatttttgaaagtgaagaggattgtttaaaatcgatattaaataatgatatcaaggctggcgatgttgttgttattagaaacgaaggtcctgtaggaggaccaggtatgagagagatgctagctcctacatctgcaattgttggtcaaggactcggagagaaggtagctttaattaccgatggcagatttagtggaggtacttatggtcttgttgtgggtcacatagctccagaggctgctgttggcggaaatattgctctaataaaagaaggtgatttaattactgtagatgctgtaaaacaactaattgaagttgatttatctgacgaagaattagaaaaaagaaaaaaagattgggtaaaacctacaccaaaatacaaaagaggaatactttcaaaatattcgaaaatcgtaagtacatcaagtttagggg

SEQ ID NO: 286153 - DNA, 769 bp, Unknown
  Bacterial polypeptide expressing nucleotide sequence isolated from the Sargasso Sea
gttgcaaaagatatgtggctagcaggtggtgtaccaatgttattaaaaactttatatgaaggtggctacattcacggtgattgtatgactgttacaggaaaaacaatgaaagaaaatttaaaaaatattaaatttaatcctaaacaaaaagtaatgagatcttataaagatccattatcacctacaggaggtgtagttggtttaaaaggtaacttagctccagatggagcgatagtaaaagttgcaggattagctaaattacaatttaccggaaaagcaagatgctttgataatgaagaaagtgcaatgaaggcagtgcaaagcaaaaagtataatgatggtgatgtaattataattagatacgaaggaccagtagggggtcctggtatgagagaaatgttatctacaacaggtgcaatttatggacaaggtaaaggggagagagtagctcttataactgatggaaggttctctggagctaccagaggcttctgtgtgggtcatgtgggccctgaggctgccctaggaggtcctataggtcttttacgtaatggagatattattgatatcgatgccaaaaaaggaactatcaatgtcagactttctaaaaaagaattagcttcaagaaaaagaaaatggagagctagaaaatctgattttggatctggtactttatggaaatatgcacaaaccgttggtccagcgtttttaggcgcaccaacacacccaggtaagaaaaaagaagttaaggattattcagagatttaat

SEQ ID NO: 286154 - DNA, 709 bp, Unknown
  Bacterial polypeptide expressing nucleotide sequence isolated from the Sargasso Sea
gattccacaagtaatgaaaatacttttgaatgcaggattaattcatggcgattgcaaaaacattgaaggaaaaaccatctcagaatacttacagaatattccagataagcctccaacaaatcaaaatgtcataagagacatagataaccctctttataaaaaaggacatctagcgatattaaaaggtaacttagcgagcgaaggttctgtagccaaaattagcggagtaaaaaaccctgtattaacaggtcctgcaaagatttttgaaagtgaagaggattgtttaaaatcgatattaaataacgatatcaaagctggtgatgttgttgttattagaaacgaaggtcctgtaggaggaccaggtatgagagagatgttagctccaacgtctgcaattgttggtcaagggctaggagagaaggtggctttaattaccgatggcagatttagcggcggtacctatggtcttgttgtgggtcacatagctccagaggctgctgtaggaggaaatattgctctaataaaacaaggtgatttaattacagtagatgctgtaaaacaactaattgaagttgatttatctgacgaagaattagaaaaaagaaaaaaagattgggtaaaacctattcgaaaatacaaaagaggaattctttcaaaatattcgagaatcgtaagcacatcaagtttaggggctgttactgatttataa

SEQ ID NO: 286155 - DNA, 901 bp, Unknown
  Bacterial polypeptide expressing nucleotide sequence isolated from the Sargasso Sea
gatgaagatgttgcaaaagttgagagatccgcttgtcccacttgtggttcatgctctggcatgttcactgccaattctatgaattgcttggttgaggctctaggactcgcacttccagggaatggaagtgtgcttgcaacacatattgatcgtaaagagcttttcttaagagctgggaaaattattgttgagttgaccaaacaatactatgaaaaagatgatgaaagtgttcttccaagaaatattgcaaatctagaatcatttgaaaatgccatgaccttggatattgctatgggaggttctacaaatactgtgttacatatacttgctgcagcaaaagaagctgggcttaattttggcatggatgacatagatcgcctatcaagaagggttcctaacttatgtaaagttgccccaagtagtaactttcatatggaagatgtgcacagagcaggaggaataatggccatcctgggagaactagagaaagcgaagttacttaattctgataacaaaacagtccactcagaaacaatgcttgatgccattcagaaatgggatatcaataggaagccttcaaatgaagtcaaagaattctattcggcagcacctggcatgattccaaccactcaaccattctcgcaaaataaaagatactcagaattggatgtggatcgtcagaatggttgtattagagattctgataatgcccatagtcaagatggaggcttagcagtactaaaagggaacattgcatctgatggatgcattgtaaaaactgcgggtgtcgatgaaaaaattctaacctttagtggacctgcaaaagtttttgaaagtcaagatgatgcggtggaagcaatccttggagacccagattgtagctggagatgtggttgttatt

SEQ ID NO: 286156 - DNA, 347 bp, Unknown
  Bacterial polypeptide expressing nucleotide sequence isolated from the Sargasso Sea
aatgttgcgtggcgcaggattcaaggacgaggattttgagaaatctattgttggaattgcttcgcttggggcaagtgtaactccatgtaatatgcacctaaactcccttgcagaaattgttgaagagtcagttaataactcaggatgtaaggctgtaacatttaacacaattactgtttctgatggaatttctatgggtacggagggcatgaaatattccctcgtttcaagagaagtcatagctgactctatagaaactgttgtaggttgtttgggctatgatggagtcgtaggtattgggggctgcgataaaaatatgccaggtgtaattattggtttggccagac

SEQ ID NO: 286157 - DNA, 743 bp, Unknown
  Bacterial polypeptide expressing nucleotide sequence isolated from the Sargasso Sea
ttaattcattatgagaaagtctctgtagaaggtcctggatcatgcggtggaatgtatacagcaaatacaatggcatcttcaattgaggcgcttggtatgagtttgccgggtagtagcagccaagatgcagtatcagattcaaaaaaccaagattgtataaatgcaggaaatgcgattatgaatctacttgagaaagatataaaaccctcagatattatgactagagaagcatttgaaaatgcaatcactgttgttattgctttaggtggatctactaatgcagttttgcatttattggcaattgcttattcaattggcgttgaattatgcttagatgattttactaaaataggaaaaagaactcctgttttagcaaatttaaaaccttttggcgatcattatatgtcagagcttaatgctaacggaggaatacaaccaatgatgaaaactcttcttgaaaaaggattacttcatggtgaatgtattacagttactggcaaaacattatctgaaaatctagagaatgttcaaccttataaaaataatataattattaaggattttgatgagcctataaaagaagatagccatttaagaattttatatgggaatttagcaaaagaaggagcagttgcaaaaattactggcaaagaaggaacatcttttgaaggcaaggcaagagtgtttaattcagaagaagatggcgtaaaagcaattttatctaattctataaaagctggtga

SEQ ID NO: 286158 - DNA, 866 bp, Unknown
  Bacterial polypeptide expressing nucleotide sequence isolated from the Sargasso Sea
ataaataatcaattaaagccaagagatattgttactaaacaagctttattaaatggagcgagggttgttgcatgcagcggcggatcaactaatgcagcacttcatttacctgctatagccaatgaagttggtattgattttgatttattagatgttgctaaaatttttaaagaaactccttatatcgttgatcttaaacctggagggaaatatctagcaaaagatctatacgaaattggaggtgttccaattattatgagagctttattagatggtggattgctcgatggcaaatgtatgactgttactggtaaaacaattgaagaaaatcttgagggtataaaacttgatgtagattcccaaaaaattgtatatccaactcattcaccaatttcaaaaactggaggagtagttggattgcaaggtaatttggctcctgacggagccatagttaaagttgctggaatgaaatctctaaaatttaaaggaaatgctagatgttttaattgtgaggaagatgcttttgaagctgtaagtaataataaatattcagacggtgatgtatttgttattcgatatgaaggccctagaggtggtcctggaatgagagaaatgcttgctacaaccgcggctatttatggtcaaggtatgggagagaaggtggctttaattactgatggaagattttctggagcaactagaggtttttgtgttggtcatgttagtccggaagcagcagatggtggtcctatttcattaataaatgatggtgatgaaataattattgacgctgaaaaaggaattattcaattggaagtgtctgacgaagagttaaaatctagaaagaaaaaaataaaaaaacaaaa

SEQ ID NO: 286159 - DNA, 838 bp, Unknown
  Bacterial polypeptide expressing nucleotide sequence isolated from the Sargasso Sea
tattcttattcatggcaaaatatctgatgacgtaacacaaggtgtaagtaaatctgctgctcgtgccatgctccgtgcagtcggtttgaaggatgatgattttaataaatttcaagtaggaatagtctcggcaggtaatgaagtaacaccctgtaatttaactgggcctgagttatctgaatatgcaaaagtcggtgttaatggtcccgattctgctggattaattttttcaactattgcagtttcggatggaatatcaatggggcatgagggaatgagagcatcacttgtctcgagagaagttattgcggactcagtagaacttgtaatgcatgcagaacgatttgatggaatggtaacaatagctggttgtgataagtctttacctggaatgttgatggcagctggcagaataaatagacctgcaatatttctatatggaggaagtagcttaccaggcgtctataagggaaaagatatatcaattgttgatgttttcgaaggtattggggcatatgaaaaaggaatgattacaaaagaagatttatatgaaatagagtgtgctgcatgccctggtgttggatcatgtgcgggaatgttcaccgctaacacaatggcatccgttggtgaggcgattggaatgagcttacccggtactgcttcaataccagccgaggacagcaggcttcgagttgcagctgaagaatcaggaaaacaattaaattatttactaaaaaatgacatcaaaccaagagacattatgacaaaagaggctttcatcaatgcaattactactgttttagctttaggaggcagcacaaatgctgttcttcattta

SEQ ID NO: 286160 - DNA, 1729 bp, Unknown
  Bacterial polypeptide expressing nucleotide sequence isolated from the Sargasso Sea
aatgacagataaaggttcaaatattaaatctagacttcctagtagacatgttagtgttggcccaaaaagtgctccacatagatctatgtattatgcaatgggaatgactgaggaacaaatctatcaaccttttgttggcgttgctacaacctggaatgaatctgcaccatgtaacattacattaggaagacaagcacaggctgtaaaaaaaggagtaagtgaattaaatggcacacctcgtgaatttacaactataactgtaactgatggaatcgccatgggccatgaagcaatgaaagcttctttagtaagtcgagaagttattgctgactctgtagaattatcagttagaggtcactgttacgatggtatcgtaggacttgctggttgtgataaatcacttccaggtttgatgatggctatggtgagacttaatattccttcagtttttatttatggtggttctatattgccaggaaattataaaggtaaagatttgacaattattgatgtttttgaagcagttggtaaacatgcatcaggtgaaatagatgaaaaagaactaaaaaatattgaaaaagttgcatgtcctacagctggttcatgcggcggtcaatttacagcaaatacaatggcatgcatatcagaggcgcttggattagctttaactaactctgccatgacacctgcaacttatgaagaaagagataattatggctttgaaagtggtaaggctgtaatgagtcttatagaaaaaaatataagaccaagagatatagttactttagaatctttaaaaaatgcagcagtcgttgttgctgctaccggcggatctactaatgccgcattgcatctacctgctattgctaatgaagcaggtataaaatttactttaaatgatgttgtggaaatttaccaatcaactccttacataggagatatgtcccctggaggtaaatatgttgcaaaggatctttacgaagtaggaggtgttcctattgtaattaaatcacttttagacggcggttatataaatggagattgcatgactgttacaggtaaaacaattgcagaaaatcataaaagtgtaatatttcctaaagaccaagatgttgtttatacatgtgataatccaataagtgatcacagttcagtagttggtttatggggtaatcttgctaaggaaggatcaatttctaaaattgctggtttaaaaaatctttcttttaaaggtaaggccaaatgttttgattgtgaagaagatgctttaacagcagttttaaaaaatgaaattgttgctggtgatgcagttattattcgctatgaagggcctaaaggtggacctggaatgagagagatgctttctactacaggggcaatttatggacaaggactgggtgaaacagttgctttgatcactgatggacgtttttctggtggtactagaggtttttgtattggtcatgtgggaccagaggctgcagttggcggaatgatagggcttgtaaaagatggtgatgaaattataattaatgcaatcaaaggagaaataaacgtttctctaacagaagaagaaatagttaaaagaaaaaaagaatggaagccaagaactactaatcataattcagggtcaatatggaaatatgcacaaactgttggacctgcttatgcaggtgcagttacccaaccaggtgcaaaagaagaaacacatacgtacgctgatatttaa

SEQ ID NO: 286161 - DNA, 1123 bp, Unknown
  Bacterial polypeptide expressing nucleotide sequence isolated from the Sargasso Sea
aaaaaattgtattcctggtgctggtagctgtggcgggatgtttacagccaatacaatgtctgcggtcatagaggtattaggtttaagtcttcctcacagttcaactatggctgctgaagatcttgaaaaagaattaagtgcagataaaagtgctgagatattagtctctgcaatagaaaaagatattagacctctagacctaatgactaagaaagcatttgaaaatgcaatatcagtaattatggcaattggaggctcaacaaatgcggttttgcacatcttagccattgcaaatactgcaggaatagatatcaatattaatgattttgagcggataaggcaaaaagtcccagttatttgtgaccttaaaccgagtggtaagtatgtgacggtggatcttcataatgcaggaggtattccacaagtaatgaaaatacttttaaatgcaggattaattcatggagaatgcaaaaacattgaaggtaaaaccatctcagaatacttacagaaaattccagataagcctccagcgaatcaagatgtaataagagacatagataatcctctttataaaaaaggacatctagcgattttaaaaggtaacctagcaagcgaaggttctgtagcgaaaattagcggagtaaaaaatcctgttctaactggtccagcaaagattttcgaaagtgaagaggattgtttaaaatctatattaaataacgatattaaagctggtgatgttgttgttattagaaatgaggggcctgtaggggggccaggaatgagagaaatgttagccccaacatctgcaattgttggtcaaggactaggagagaaggtagctttaattactgatggcagatttagcggtggtacttatggtctagttgtgggtcatatagctccagaggctgctatcggcggaaatattgctctaataaaacaaggtgatttaattaccgtagatgccgtaaaacaacttattgaagttgatttatctgacgaagaattagaaaaaagaaaaaaagattgggtaaaacctagacaaaaatacaaaagagggatactttcaaaatattcgaggatcgtaagcacatcaagtctaggggctgtcactgatttataa

SEQ ID NO: 286162 - DNA, 1048 bp, Unknown
  Bacterial polypeptide expressing nucleotide sequence isolated from the Sargasso Sea
tgtccgggcgctggagcctgcgggggtatgtacacgggcaatactatggccagcgcggctgaggctctcggattgaccctcccttatagctcatcaatcccagcggcgcaggatagaaagaaagcggaatgcagacgagtaggcgcggttttgagacgtctgctggaagaggatctccggcctcgcgacatcatgacacgagctgcgttcgaaaacgcgatagtgttggtaacgattttgggaggatctaccaacgcagtgctgcatcttttagcgatcgctcactcagcggaagtcgagctcacactcgatgattttcaggcggtgagtgaccgcaccccgtacttatctgatcttaagcctagcggtcgttatgtaatgcaagatctcgatcgggtcggaggagtgccggccgtgctccgcacgttactggatgcgggtctgatagacgggagttgcctgaccgtaacgggatacactgtcgaggagaatctcagtgaggtagctccacttagtgttaagcaggaagtagtgcggccactcagtgacccgattaaagcttcgggccatctacggatcatgagaggctctatggcaccagagggggcggtcgcgaaaatcaccggcaaggaaggtgttgagttttccggaccggcacgtgtctttgaccgagaagaggcggcgcttgctgctcttgagcgtaacgagattctgtcgggggatgtggtcgtaatccgctacgaaggtccccgaggtggtcctgggatgcccgagatgctaacgataacctctgcgatcatgggtgcaggactcggatctgaggttgcattggttactgacgggcggttttcggggggtagccacggctttgttatcgggcatgttacaccggaggcgcagaacggtggcccgattgcactcgttgaaaatggggatcggattacgattgatgctgagaggaacgacatcgcttgggacgtagattttgaggaggcagaaagaagaagagctgcctggagagagcctccgctggctgctaaacgcggtg

SEQ ID NO: 286163 - DNA, 1452 bp, Unknown
  Bacterial polypeptide expressing nucleotide sequence isolated from the Sargasso Sea
tgggtcatgaaggaatgaaatcttcattaatctctagagaagtaataacagatagtgctgaacttactgttagaggtcattgttatgatgcattagtgggtattgcaggttgtgataattctttgccaggtttaatgatgtcgatggttagacttaacgtgccaagtgtatttatttacggtggttcaatactaccaggaaaatataaaggtaaagatgtaaccgtagttgatgtttttgaagctgttggaaaacattcatcaggacagatgacagccaaagaattaagaaaattagaattagttgcatgtcctactgctggagcttgcggtggtcaatttactgcaaatacgatggcatgtgtatctgaagcaatcggtttagcattaccttattcagctggaactcctgctccttatgaggagagagataaatacgcaaaagatagtggtaaaatggtaatggaattattagcaaaaaaaattaaaccaagagatattgttacaaaaaaagcattagaaaatgctgcaacaattgttgctgcaactggtggttcaactaatgcggctttacatttacctgcaatcgctaatgaagcaggaattaaatttgacttaatggatgttgcaaaaatatttaaaagaactccatatcttgcagatttaaaaccaggtggaaaatatgttgcaaaagatatgtggttagcaggtggtgtaccaatgttattaaaaactttatatgaaggtggatatattcatggtgattgcatgactgttactggaaaaacaatgaaagaaaatttaaaaaatattaaatttaatcctaaacaaaaagttatgagatcttataaagatccattatcacctacaggaggtgtagttggtttaaaaggtaacttagcaccagatggagcgatagtaaaagttgctggattagcaaaattacaatttacgggaaaagcaagatgctttgacaatgaagaaagtgcaatgaaagctgttcaaagcaaaaagtataatgatggtgatgtaattataattagatacgaaggaccagttggaggtcctggtatgagagaaatgttatctacaacaggtgcaatttatggacagggaaaaggagagaaagtagctcttataactgatggaaggttctctggagctaccagaggcttctgtgtgggtcatgtgggccctgaggctgccctaggaggtcctataggccttttacgtaatggagatatcattgatatcgatgccaaaaaaggaactatcaatgtcagactttctaaaaaagaattagcttcaagaaaaagaaaatggagagctagaaaatctgattttggatctggtactttatggaaatatgcacaaaccgttggcccagcgtttttaggcgcaccaacacatcctggtaagaaaaaagaagttaaggattattcagagatttaat

SEQ ID NO: 286164 - DNA, 1251 bp, Unknown
  Bacterial polypeptide expressing nucleotide sequence isolated from the Sargasso Sea
tcatttatggagggacaataaagcctgggaaattgcatggagaagatcttactgttgttagtgcatttgaagctgttggacaattaacatcaggcaaaatcaatgaagaaaggctaatccaagttgagaaaaattgtattcctggtgctggtagctgtggaggaatgtttacagctaatacaatgtctgcggttattgaagtattagggttaagtcttcctcacagttccactatggctgctgaagatcttgaaaaagaactaagtgcagataaaagtgctgagatattagtctccgcaatagaaaaagatataagacctctagacctaatgacaaagaaagcatttgaaaatgcaatatcagtaattatggcaattggcggatcaacaaatgcggtattgcacatcttagctatcgcgaatactgcaggaatagatatcaacattaatgattttgagagaatcagacaaaaagtacccgttatttgtgaccttaaaccgagtggtaaatatgtgacggtggatcttcataaggcaggtgggattccacaagtaatgaaaatacttttgaatgcaggattaattcatggcgattgcaaaaacattgaaggcaaaaccatctcagaatacttacagaatattccagataagcctccaacaaatcaaaatgtcataagagacatagatgaccctctttataaaaaaggacatctagcgatattaaaaggtaacttagcgagcgaaggttctgtagccaaaattagcggagtaaaaaaccctgtattaacaggtcccgcaaagatttttgaaagtgaagaggattgtttaaaatcgatattaaataacgatatcaaagctggtgatgttgttgttattagaaacgaaggtcctgtaggaggtccaggcatgagagaaatgttagcgccaacatctgcgattgttggtcaagggctaggagagaaggtggctttaattaccgatggcagatttagcgggggtacctatggtcttgttgtgggtcacatagctccagaagctgctgtaggaggaaatattgctctaataaaacaaggtgatttaattacagtagatgctgtaaaacaactaattgaagttgatttatctgacgaagaattagaaaaaagaaaaaaagattgggtaaaacctattcaaaaatacaaaagaggaattctttcaaaatattcgagaatcgtaagcacatcaagtttaggggctgttactgatttataaa

SEQ ID NO: 286165 - DNA, 490 bp, Unknown
  Bacterial polypeptide expressing nucleotide sequence isolated from the Sargasso Sea
atgccaaaattacgttcagcaaccagtaccgaaggccgcaacatggcaggcgcccgcgcactatggcgtgccactggcgtaaaagaaaccgattttggtaagccaattattgcgattgccaactcgtttactcaatttgtgcctggtcatgtgcatttaaaagacatgggcgcacttgttgctagcgcgattgaagaggttggcggtattgctaaagaatttaacactattgcagtggatgacggcattgccatggggcatggcggcatgctttacagcttgccatcgcgtgagttaatcgccgacagtgttgaatacatggttaatgcacattgtgctgatgcattagtgtgtatttcaaattgcgacaaaatcacccctggcatgctaatggcggcgctacgattaaatattcctgtggtgtttgtttctggtgggccaatggaagcgggcaaaactaagctgtcagataaaattattaagcttgatt

SEQ ID NO: 286166 - DNA, 1861 bp, Unknown
  Bacterial polypeptide expressing nucleotide sequence isolated from the Sargasso Sea
atgccaaagttacgttcagcaaccagtaccgaaggccgcaatatggcgggtgcccgtgcgctatggcgcgccacaggggtgaaagacaatgattttggtaagccgattattgcgattgccaactcctttactcagtttgttcccggtcatgtgcacttaaaagacatgggctctctggtggcgagcgccatcgaagaggcgggaggtattgctaaggaattcaacaccatcgccgtcgatgatggtatcgccatgggccacggtggcatgctctacagtctgccttcgcgggagcttatcgccgatagcgtcgagtatatggtcaatgcccactgcgccgatgcgctggtttgtatctctaactgcgacaaaatcacccccggtatgttgatggcggcgctgcgtctcaatatccccgtggtgtttgtttcgggtgggccgatggaagcgggtaaaactaagctgtctgacaaacttattaagctcgacttagtcgatgccatggtggcggcggccgactcgagtgtgagcgatgaagatagcgccaaaatcgaacgcagtgcttgccctacatgtggctcctgttcgggcatgtttaccgctaactcgatgaactgtttaaccgaagctttaggcctgtcgctaccgggcaacggctccatgctcgcgacccatagcgaccgccgcgaactgtttttagaagcgggccgccgcgtgatggcgctaaccaaacgttactacgaacaagatgatgcctcggcactgccgcgcaacatcgccagctttaaagcctttgagaacgccatggcgctggatattgccatgggcggttcatccaatactgtgctgcacttattggctgcggcgcaggaggcggatgtggcatttactatggatgatatcgaccgtatgtcgcgccaagtgccgcatctgtgcaaggtggcgccgtcgaccgctaaataccatatggaagatgtgcaccgcgctgggggcgtgatgggcatcttaggcgaactcgaccgcgccggactgctgcataccgatgtgccacacgtcgccgccgatgcgggtggaaatctcaagtcggtgctcgccaagtacgatgtgatgcaaacccaagataacaaagtaaaacaattctttatggcggggcctgcgggcatacccaccactaaagcctttagccaagactgccgctggccatcgttggacgatgacaggcgtgaaggttgtatccgtagccgcgaatttgcttttagccaagagggcggtctggccgtgttgtcgggcaatctggccgacaatggctgtatcgttaaaactgcgggtgtggatgaatcgaatctgacctttatcggcagcgctcgggtgtacgaaagccaagacgatgcagtcgctggcatcttaggtggcgaagtggtggcgggtgacgtggtggtgattcgttatgaagggccaaaaggcggcccgggcatgcaagaaatgttgtaccccactagttacttaaaatcccgcggcttaggcaaggcctgcgcgttgatcaccgacggccgcttctctggtggaacctccggtttatccatcggccatgtgtcgcctgaggcggcggcgggcggcacgattgccttgattgaaaacggcgatcgcatcgaaatcgatattcccaagcgcagtatcaagcttgcggtgagtgatgccgagttagcggcgcgccgtgaaaccatgctcgcccgtgggccaatggcgtggaaaccgctttcgcgtcaacgttatgtgtcgctggcgcttaaagcctacgccatgcttgccaccagtgccgataagggcgcggtgcgcgatcgcagtaagttggaggactgat

SEQ ID NO: 286167 - DNA, 981 bp, Unknown
  Bacterial polypeptide expressing nucleotide sequence isolated from the Sargasso Sea
gatgaaaaaattaaataaatatagttcttcgattacacaggataattctcaacctgctgcacaggctatgttatatgcaattggattttcagatgaagattttaataaacttttgataggtattgcaagtactggatatgaaggcaacccttgtaatatgcatcttaataatatagctttagaagtaaaagagggagttaatagtattgattttgttggtttaatttttaatacaattggagtaagtgatggaatttctatgggcactccagggatgcggtattctttgccatctagagatataattgcagattctgttgaaacagttgtacaagctatgagttatgatggtttaataaccgtagtcggatgtgataaaaatatgccaggtgcgttaatgggaatgataaggttaaatagaccatcaattttactttatggagggacaattgattctggatgtcacaaaaataaaaaattagacattgtttctgcatttgaagcatggggagagaaagttgcaggttcaatcgacaataaagaatataaagaaattataagaaaatcttgtcctggatctggagcatgtggaggtatgtataccgcaaatactatggcttcagctattgaagcacttggaatgtctttaccattttcttcttcaattcctgctaacaataattcaagaaataaagtttcgatggagacaggaaagtcgatgaagagactaatagaggctgatattaaacctttggatattgtaactaaaaaatcaatcgaaaatgctgtaacaaccgttgttgctcttgggggatcaaccaatgccgttttacattttcttgctattgcaagagctgcaaaaattgattttactcttgatgattttcaaagaattagtgaaaaaaccccttttatcgcagatttaaaacctagtggtaaatatctgatggaagatttacatgatataggaggcatccctat

SEQ ID NO: 286168 - DNA, 1237 bp, Unknown
  Bacterial polypeptide expressing nucleotide sequence isolated from the Sargasso Sea
aatggctaaattcaataaaaagaaacttccaagcagacatacatcattaggggcagatagagctccacatagatcgttttattatgctatgggggaaactgagaaagatgtagcaaaaccctttgttggtgtcgtttccacatggaatgaggcagctccttgtaacattgcactaatgagacaagctcaatcagttaaaaaaggagttagagcaaatggtggaactccgagagaattttgcacaatcactgtaactgacggtattgcaatgggtcatgaaggaatgaagtcttcattgatatctagagaagtgatcgctgactcagctgaacttacggttagaggtcattgttatgatgctttagttggtatcgcaggatgtgataaatctttaccaggtctaatgatgtctatggttagattaaatgtaccaagtgtatttatatatggtggatcgatccttccaggcaaatataaagggaaagacgtaacagttgtggatgtatttgaggcggttggaaaacattcaacaggtcaaatgtctgctgcagaacttagaaaattagaattagttgcttgtccaagcgcaggcgcttgtggaggacaattcacagcaaatacaatggcatgtgtatctgaagcaattggattagcattaccttattcagcaggaacaccagcaccatatgaagaaagagataaatacgcaaaagctagtggtaaaacggttatgaaccttttgaaaaaaggaattaaaccaagagatatagttacaagaaaagctttagaaaatgctgcaactgtagttgctgcaactggtggttctacaaatgcaggattacatttacctgctattgcaaatgaagcaggaattaaatttgatttaatggatgttgctaaaatttttaaaagaacaccttatcttgcagatttaaaaccaggtggaaaatatgttgcaaaagatatgtggttagcaggtggtgttccaatgttattaaaaactttatatgaaggcggatatattcatggtgactgcatgactgttactggaaaaactatgaaggaaaatttaaaaggtattaaatttaatccaaaacaaaaagtaatgaggtcatataaaaatccattatcaccaactggtggtgttgttggattgaaaggaaatttagctccagagggtgcaattgttaaagttgcaggacttaaaaaattacaatttactggtaaagcaagatgc

SEQ ID NO: 286169 - DNA, 967 bp, Unknown
  Bacterial polypeptide expressing nucleotide sequence isolated from the Sargasso Sea
tatgtcttatgatggtctagtaactgtcgttggttgtgataaaaacatgcccggtgcattgatggctatgttaaggcttgataggccaagtatacttgtgtacggaggaacaattgactcaggctgttataacaacaaagaattagacgttgtttcagcatttgaagcatggggtgagaaggtatcaggtaagatagatgataaagaatataagaatgtaattaaaaatgcatgtcctggtgcaggagcatgtggtggaatgtatactgccaatactatggcatcagcaattgaagccctgggtatgtctcttccttataattcatctaatcctgcaataagtaatgaaaaagttagtgaatgtgctcaattaggatctgcaattaagttgctaattgaaaaagatatcaaaccctcagatattgtaacaaaaaaatctttagagaacgcattaagacttataactgttttaggtggctctactaatgcagttttacactttcttgcaatttcaagagctgcaaatttagatttatctattgattattttcaagaaatcagcgactcaaccccttatattgctaatcttaaacctagtggaaagtatttaatgaaggatcttcataaaattggaggagttccatccgttctaaaatacatgctagagaataagatgcttaatggagattgtatgacagtaactggtaaaacactagaagagaacctctcaaaaattaaatcacctgatctaaaatctagtgatataatttttccccttagtaatccgatcaaagaatctggccatatacaaattctaaaaggaaatctagctgaagaggggtgtgttgcaaagattacaggtaaggagggattgaaattttcaggcccagctaaagtgtttgacagtgagtttgaatgtttgactgcaatagcagaatcgagggttacaaaggagatgttgttgtaa

SEQ ID NO: 286170 - DNA, 652 bp, Unknown
  Bacterial polypeptide expressing nucleotide sequence isolated from the Sargasso Sea
ggtaaaactatacaagaaaatataaatgagttttcaatgcctgacgcaccagaacaacagatagttaaatcaacagaaaatccaattcataatgttggtactgcagtaatactaaaaggaacactagcacctgatggggctgtaattaaaacagccggcgttgaaatgactgaatttacagggactgccaaagtatttgatcgtgaagaactagcatttgatgcagttgcagaaggagaaattgatgaaggagatgttgtagtgattcgttatgaaggaccaaaaggtggtcctggtatgagagaaatgcttgctacaacagcggcacttgttggccagggattaggaaaaaaagttgctatggttactgacggtagattttcaggaggaacacgtggatttatggttggtcatgttgcaccagaagcatttgttgggggacctattgctttgataaaagatggagacaaaattagtattagtacagaaagtaattcaatagatcttcatgtttcagaagatgaactagagaaaagaaaacaagaatggaaaaaaccagctccaaactatacgtctggggcactagcaaaatatgcttctttagttggttctgcagcaaaaggggcaattacaacacctgcaaattattaat

SEQ ID NO: 286171 - DNA, 502 bp, Unknown
  Bacterial polypeptide expressing nucleotide sequence isolated from the Sargasso Sea
ctggaaaagcaagatgcttttaatacagaagaagatgcatacaaagctgttaaaaacagaaaatataaagatggtgatatcataataattagatacgaaggacctaaaggtggtcccggtatgagagaaatgcttcaaacaacagctgcaatatatggacaaggaaaaggggagaaagtagctcttataactgatggaaggttctctggggctaccagaggcttctgtataggtcatgtgggtcctgaggcctctgtaggcggtcctatagcccttttaaggaacggagatgttatcgatattgatgctaaaaaaggaactattaatgtcagactttctaaaaaagaattaagtgcaagaagaaaaaaatggaaaccaaagaaaatgaattttggtaacggtacattgtggaaatatgcacaaactgttggtcctgcttacaaaggggctccaacacatcccggtggaaaaaacgaggttagaacttacgctgatatttaat

SEQ ID NO: 286172 - DNA, 1457 bp, Unknown
  Bacterial polypeptide expressing nucleotide sequence isolated from the Sargasso Sea
aatgccaaaatttaataaaaaaaaattacctagtagacatacttcagttggacccgataaggctcctcaaagatcattttattatgcaatgaatttaacagagaaagatgttgctaaacctttcgttggagttgtatctacatggaatgaagcagcgccatgcaatattgctttaatgagacaagctcaatcagttaaaaaaggagttcatcagggtggaggaactccaagagaattttgcacaatcactgttacagatggtattgcaatgggacatgagggaatgaaatcttcacttatctcaagagatgtaattgcagattcaaccgaactaacggtaagagggcattgttacgatgctctagttggagttgcaggttgtgataaatctttaccaggattaatgatggcaatggtacgattaaatgtaccaagtgtttttatttatggcggatcaatattaccaggtagatttaatggaaaagatgtaacagtagttgatgtatttgaaggtgttggaaaatattcttcaggaaaaatgacagaacacgcattaagaaaattagaattagtagcatgcccaagcgctggagcatgtggcggacaatttaccgctaatacaatggcgtgtgtttcagaagctattggtttagcgttaccttattcagcaggaacacctgctccatacgaacaaagagataaatatgcattacaaagcggtaaagcagtaatgaatttattaaaaagaaatattagaccaagagatattgttactcgtaaatcattagaaaatgcagcaactattgtagcagctacaggaggatctacaaatgcagcattacatttaccagcattagcaaatgaaataggaattaaatttgatttaatggatgttgctaaaatatttaaaaaaactccatacctagctgatttaaaaccaggtggaaaatatgttgcaaaagatatgtggaaagctggaggcgttccgatgcttttaaaaactttacttgatggtggctatatacacggcaactgtatgacagtgactggaaaaacgatgagagaaaatttaaaaaaagttaaatttaatctaaaacaaaaagtgatgcgtaaatataataatcctttatcgccagatggaggagtagtgggtcttaaaggtaatttagctcccgaaggtgcaattgtaaaagtagctggattaaaaaaattacagtttacaggtagagcaagatgttttgatacagaagaggctgcatataaagctgttaaaaatagaaaatataaagatggagatatcataataattagatacgaaggaccaaaaggtggacctggcatgagagagatgcttcaaacaacaggtgcaatttacggacaaggtaaaggagaaaaagttgcattaattactgatggaagattttcaggagcgaccagaggtttttgtgttggtcatg

SEQ ID NO: 286173 - DNA, 1318 bp, Unknown
  Bacterial polypeptide expressing nucleotide sequence isolated from the Sargasso Sea
gccggcggcgtcgccaaagagttcaacaccattgccgtagacgatggcattgccatgggccacgacgggatgctctacagcctgccgtccagggatctcatcgccgattctgtggagtacatggtcaacgcgcactgtgccgacgccatggtctgtatttccaattgtgacaagatcacccccggcatgctgaacgccgcaatgcggctcaatatcccggtggtgtttgtttcgggtggcccgatggaagcgggtaaaaccgcactgtccgagcacaagctggacctagtcgacgcgatggtgatcgccgcagactccagcgccgacgacgccacggtagaagcctacgagcgatcggcttgtccaacctgcggctcctgctcaggcatgtttaccgccaactccatgaattgcctgacggaggctttggggctcagcttgcccggcaacggttcgctgctggcgacccacgcagatcgggaacagttgtttttacgagcggggcgtctgatcgtcgatttggcgcgacgctggtacgagcaggatgacgccacggcgctgccacgcgagattgccagccgacgcgcgttcgagaatgccatgagcctcgatatcgccatgggcggatcgaccaacactatcttgcacctgctcgctgccgcgcaggaggccggggtagacttcgatatggcggcaatcgacacgctgtcgcgcaaaataccgcagctgtgcaaggtcgcaccgagcaccccgctctaccatatggaagacgtgcaccgcgccggtggggtcatggccatcctcggtgaactcgcacgtggagacctgctccatctagactgcccaacggttcacagtgccagccttggcgaggcgctgggccactgggacattatgcaaactgaagcagacgatgtccgcaccctctatgcagcggggcctgccggcattcccactcagcaggccttcagtcaggatctccgttggcccagcctcgacactgaccgcgaaggcggttgcgtgagggagatggcgcacgcgtactcacaggaagggggtctagcagttttgtttggcaacattgcggagctaggctgcgtggtcaaaaccgcaggcgtggacgacgagtcactgcagttcactggtcctgctcacatttgtgacagccaggagggcgcggtggccgacattcttgaagaccgcgtgcaggcaggggatgtggtgattgttcgctacgaggggccgcgcggcggacccggcatgcaggaaatgctctaccccaccagctacctcaaatccaaagggcttggaaaagcct

SEQ ID NO: 286174 - DNA, 978 bp, Unknown
  Bacterial polypeptide expressing nucleotide sequence isolated from the Sargasso Sea
aatgaaaaaatttaataagaaaaaattaccaagtagacatacaacaataggtgctgataaagctcctcaaagatcattttattatgcaatggatttaacagaaaaggatgttgctaagccatttgttggagttgtctcaacatggaatgaagctgctccatgtaacattaatttaatgaaacaagctcaatcagttaaaaaaggagttaaagcttcaggtggaactccaagagaattttgtactattacagtaactgatggtattgcgatgggtcatgaaggaatgaaatcgtcattaatatcaagagatgtaattgcagactcaacagaacttacggttagaggacattgttatgatgcattagttggattagcgggctgtgataaatcattacctggtttaatgatgtcgatggttcgtttaaatattccaagtgtatttatatatggtggttcaattctacctgggagatttaatggaaaagatgtaaccgttgtagatgtatttgaaggagttggaaaatatacatcaaaaaaaatgacagctcatgcattaaaaaaattagaattaaaagcatgtccaagtgcaggtgcttgtggtggacaatttactgcaaatacaatggcatgtgtttctgaagcaataggattagctttacctttctcagcaggaacaccagcgccatatttagaaagaaataaatatgcaatagacagtggtaaagctgtaatgaatttattagcaaaaaatattagacctagagacatagtaacaagaaaagctttagaaaatgcagcaacaattgttgcagcaacaggtggatcaacaaatgcaggattgcacctaccagctatcgcaaatgaaattggtataaagtttgatttaatggatgttgcaaaaatatttaagaaaactccttatcttgcagatttaaaacctggtgaaaatatgttgcaaaagatattggaagcaggagg

SEQ ID NO: 286175 - DNA, 1852 bp, Unknown
  Bacterial polypeptide expressing nucleotide sequence isolated from the Sargasso Sea
tatgcccaagttacgttctgcaactaccacgcaaggtagaaatatggccggcgctcgtgcgctatggcgtgcaacaggaatgaaagactctgatttcggcaagcctattattgctattgctaactcatttacgcagtttgtacctgggcacgttcacctaaaagatctcggccagttagtggcgcgcagcgttgaagaagcgggtggtgtggcgaaagaattcaacactatcgcagtggatgacggtatcgccatgggtcatagcggcatgctgtacagccttccatctcgagaaattattgctgatgcagtggaatacatggtgaacgcacattgcgccgatgccatcgtttgtatttctaactgcgacaaaattaccccgggaatgctaatggcgtctatgcgcttgaacgtgcccgttattttcgtatctggcggtccaatggaggcgggtaaaaccaagctttcagaccagcttattaaactagacttggttgacgccatggtcgcggcagcagacgacaaggttagcgatgctgatactgatgaaattgagcgctctgcctgccctacctgcggctcatgttcagggatgttcactgcgaactccatgaactgtctaaccgaagcgttaggtttatccttgccgggcaacggctctatgctggctacccacgccgaccgtgaaggtttatttaaacaagcgggcaaacaaattgttgagctgtgcaagcgttactacggcgacgatgatgacagtgtattaccacgtaatatcgctaactttaaggcttttgagaatgccatgagcttggatattgccatgggggggtcgaccaataccattttgcatctgttagcagcggcaatggaaggcgaagtgccgtttactatggcagacatcgacagattgtctcgcaaagtccctcacctatgcaaagtggcaccttcaacacccaaatatcacatggaagacgtacaccgagcgggtggcgttttgggtattttgaacgagctaaataaggctggcttgctgaacaccgatgttaatcatgttttaggaaaaccgcttaccgacgttatcagcgagtgggacatcactaaccctgaaaacgaagacgctattaccttttatcgcgcgggtcctgcgggtattcgcacgacaaaagcatttagccaagattgtcgctgggatgaagccgatgacgaccgcgaaaacggctgcattcgctctatagaccatgcgttcagtcaagaaggtggcttagccgtgctttacggtaatgtggctgaagatggctgtattgtaaaaacggctggtgtagatgagtctattcttaaatttaacggtactgcgcgtatttacgaaagccaagatgatgcggtagcaggtatcttgggcgatgaagtaaaagccggtgatgtggtcttcattcgctacgaaggtccccgcggcggcccgggtatgcaagaaatgctgtacccaacgtcttacttgaaatctaaagggttaggcaagcactgcgctttggtaacagacggacgctttagtggcggtaccagtgggttgtctataggtcactgctcacctgaagccgccagtggtggtggcattggcctagtggaagatggcgataaaattgaaatagatatccccaatagaagtatcaatattgctattagcgatgaagaactagcagagcgtcgcgcgaaaatggaagccagtgataagccttggaagccgaaagatcgcgttcgtgaagtctccacatcacttaaaacttttgcggcgttagcaaccagtgccgataaaggtgcagtgcgtgatgtgactaagctggaaaatctgtaa

SEQ ID NO: 286176 - DNA, 901 bp, Unknown
  Bacterial polypeptide expressing nucleotide sequence isolated from the Sargasso Sea
aatggttgataaaagtaaattaccaagcaggcatgtatctgtaggccctaaaagtgctcctcatagagctttttattatgccatgggaattacagaggagcaaataaatcaaccttttgtgggtgttgtaactacctggaatgagtctgcgccttgtaatatttcactttctcgtcaagcccaatcagctaaaaaaggtgtttgggatgctaaaggaacaccaagagaatttactaccattactgtaacagatggtattgccatgggacatgagggaatgaaatcatctttaacaagtagagagattatagctgactctactgaactttctgtaagagggcattgttatgatgctttagttggtttagctggatgtgataaatctttacctggattgatgatggcaatgcttcggcttaatgtgccttctgtattcatgtatggtggttctatattaccgggcgtttacaaagatagagatgttacgattgtagatgtttttgaagctgttggaaagcactctactggaaaaatatcagatcaagaacttcatgacatagagtgtgttgcctgtccttctgctggatcttgcggaggtcagtttactgctaataccatggcatgtgtgtctgaaacaattggtttagctcttcctggatctgcaatgacacctgcaccatatgagagtagagataaatatgcttacgaaagtggaaaagttgtaatggaattaattgaaaaaaatttaagaccaagagacatagtaactaaacaatctttaattaatgcagctgtagttgtatcagcttctggaggatcaactaatgcaggtttacatttacctgccctggctcatgaggctggtattgaatttacattagaggatgtatgtaaaattttc

SEQ ID NO: 286177 - DNA, 475 bp, Unknown
  Bacterial polypeptide expressing nucleotide sequence isolated from the Sargasso Sea
catgaataaactaagatcatctgcaataacacaaggtgtgcaaagatcccccaacagatctatgttaagagctgttggatttagtgatgaagattttaataaacctattattggagttgcaaatggatacagcaccataacaccatgcaatattgggttaaataaattagctctcagagctgaagattcaataagaagatccggtgggatgcctcaaatgtttggaacgattacagtaagtgatggtatttctatgggaacagagggaatgaaatattctctagtttccagagaagttattgctgattcaatagaaacagcgtgcaatgctcagagtatggatggagtgcttgctataggaggatgtgacaaaaatatgccaggtgccatgatagcaattgcaagaatgaatattccctcaattttcatttatggaggaacaatcaaaccaggcaaattaaatggagaagatctt

SEQ ID NO: 286178 - DNA, 884 bp, Unknown
  Bacterial polypeptide expressing nucleotide sequence isolated from the Sargasso Sea
aataactattctcgggggatcaactaatgctgttttacatttactcgcaatggctcggtctgttgatgtcaatttaactattgatgacttccagtcagtcactgataaaactccataccttgcagatctaaaacccagtggtcaatacgttatggaagatcttcataaaattggtggtacaccagctgttatgaaattcttgcttgaaaataatttattaaacggagattgtcttaccgtcacaggaaaaacaattaaagaaaacctgactgatcttccgggattgagtaatggtcaaaaaataatctaccctttggctaaaccactcaaatcaagtggtcatataaggattctgaaaggtaatcttgctccaggtggttctgttgcaaaaattaccgggaaagaaggcgaagtttttacaggtcctgcaaaggtttatgactcagaagaagcaatgctgagttcattagaaaacaacgaaataaaaaaaggggatgtcattataattcgatatgaaggacccaaaggtgggccaggtatgccggaaatgctaacaccaacatccgctatcattggtgccggccttggtaatgatgtggcaatgataacagatggacgtttctctggtggttcacatggttttattattgggcacgttgtgcctgaagcacaagaaggagggccaatcgctctaattgaaaatggcgatgttgtcaccatcaatgctaaaaagaataaaatcgaatttgagatcgataatcaagaactaatcagcaggcaaaaaaaatggaatatgcctccatacaaggttaacaaaggaacgctttataaatatatcagtaatgttaaaactgcatctgaaggttgtgtaacggacgaatagt

SEQ ID NO: 286179 - DNA, 1408 bp, Unknown
  Bacterial polypeptide expressing nucleotide sequence isolated from the Sargasso Sea
aatgtctaaaattgataaaaaaaaactacccagtcgtcatacttctttaggcccagatagagctccacatagatctttttactatgcaatgggagaaactgaacaagatgtagcgaagccgtttgtaggagtagtatccacttggaacgaagctgcaccttgcaatacagctttaatgcgacaggcacagtctgtaaaaaagggagtaaaagaatctggtggaacgcctagagaattttgcactataaccgtaacagatggtattgccatgggtcatgagggaatgaaatcatctttaatttcaagagaagtcatagctgactcagctgaattgacagtgagaggacattgttatgatgcattagttggtatcgctggatgtgataaatctcttccaggtttgatgatgtctatgttgagattgaatgtacctagtgtatttatttatggtggatcaattttgccaggaaaatttaaaggaaaagatgttacagttgtagatgtgtttgaagcagtaggcaaacattcctcaggtaaaatgtcttctgaagaattaagagaattagaattagtagcttgtccaagtgctggagcttgtggaggtcaatttacagctaacacaatggcgtgtgtatcggaagcgataggattggctttaccttattcagctgggacaccagccccttatgaggaaagagataaatatgcttatgaaagtggtcaagcggtaatgaatttattagaaaaaaaaattaaaccaagagaaatagttactaaaaaatctttagaaaacgcagcaacaattgtggctgcaactggaggctccactaatgcagcgcttcatttacctgcactagctaatgagataggagtaaaatttgatttaatggacgttgcaaaaatatttaaaaaaactccttatcttgctgatttaaaacctggaggaaaatacgttgcaaaagatatgtgggaagctgggggcgttcctatgttattaaaaactttatatgacggaggatatattcatggcgagtgcatgacagttactggtaaaactatgaaagaaaatttggctaatattaagtttaatgttaatcaaaaagttttaagagaatataataatccactttctccagatggtggagttgttggattaaaaggtaatttagctccagacggagcaatcgtaaaaattgcaggattaaaaaaattacaatttacaggtaaagctagatgttttgataatgaagaagatgcaatgaaagcagtacaaacaaaaaaatacaaggacggtgatgtaataataatcagatacgaaggtccaaaaggcggaccaggaatgagggaaatgctctcaacaactggagctatttacggacaaggcaaaggtgaaaaagttgcacttata

SEQ ID NO: 286180 - DNA, 1720 bp, Unknown
  Bacterial polypeptide expressing nucleotide sequence isolated from the Sargasso Sea
atgccaaaatttaataaaaaaaaattacctagtcgtcatacatcagtaggtcccgacaaagcaccacaaagatcgttttattatgcaatggatttaaccgaaaaagatgttgcaaaaccttttgtcggtgtcgtttcaacatggaacgaggcagctccttgtaacattgctttgatgagacaagcacagtctgttaaaaagggtgttcatcaagctggtggaacaccaagagaattttgtacaatcactgtaacagacggtatagcaatggggcacgaggggatgaagtcttcattgatatctagagatgtgattgcagattcaactgaattaaccgttagaggacattgttacgatgcactagttggtgtggctggttgtgataagtcattacctggtttgatgatggccatggttcgtttgaatgtaccaagtgtatttatttatggtggatctatattgccaggtagatttaatgggaaagatgtaactgtagttgatgtttttgaaggtgttggaaaatactcttcaggaaaaatgtctgcaaatgcattaagaaaattagaacttaaggcttgtccaagtgctggtgcttgcggtggtcaatttactgcaaatactatggcatgtgtttcagaagcaattggtttggctttaccttattcagcaggaactccagcaccatatacccaaagagattctttcgctttaaaaagtggaaaagcagtaatgagtttattagaaaaaaaaattagaccaagagacattgttacaaaaaaatctttagaaaatgcagccactattgttgctgcaacaggtggatctactaatgctgcattacatttaccagcacttgcaaatgaagctggaattaaatttgatttaatggatgttgcaagaatttttaaaaaaacaccttatctagctgatcttaaacctggtggaaagtatgtagcaaaagatatgtggaaggcaggtggtgttccaatgttattgaaaacacttttagatggtggatacatccatggtgattgcatgactgttacaggtaaaactatgagacaaaatttaaaaaatgttaagtttaacaaaaatcaaaaagttatgaggacatataatcaaccattatctccagatggtggcgtagttggattaaaaggaaatttagcacctgatggagctattgttaaagtagctggtttaaaaagattacaatttactggtaaggcaagatgttttgatacagaagaagctgcttacaaagctgttaaaaataaaaagtataaagatggtgatatcattataattagatacgaaggtcctaaaggtggtccaggtatgagagaaatgcttcaaacaacaggagcaatatatggacaagggaagggtgaaaaagttgcactaattacagatggaagattttcaggagcaacaagaggattttgcattggacatgttgggccagaggcatcagttggtggaccaatagctctattaagaaatggagatattattgatctagatgctaagaaaggaacaataaatgttcgtttgtctaaaaaagaattagcaaaaagaagaaaaaaatggaaaccaaagaagattaattttggtaacgggacactttggaagtacgcgcaaactgttggaccagcataccttggggcgcctacgcatccaggtgcaaaagaagaagtcaggacatacgcagatatttaat

SEQ ID NO: 286181 - DNA, 1720 bp, Unknown
  Bacterial polypeptide expressing nucleotide sequence isolated from the Sargasso Sea
atgcggaaatttaataaaaaaaaactaccaagcagatatacaactataggtgctgacagagcacctcaaagatccttttattatgcaatggatttaacggaaaaagatgtagcaaaaccttttgtaggtgttgtttcaacatggaatgaggctgcaccttgcaacattaatttaatgaaacaagctcaatttgtaaaacaaggtgtaaatgcatcaggaggaactcctagagaattttgtacaataactgttactgatggtattgctatgggtcatgaaggaatgaaatcttcattgatttcaagagatgtaattgcagactccactgaattaactgtaagaggtcattgttatgatgctttagttggtttagcaggatgtgataaatctttaccaggtctaatgatgtctatggtgagattaaatattcctagtgtatttatttatggtggttcaatacttccaggtagatttgaaggtaaagatgtaactgttgttgatgtttttgaaggtgttggaaaatatacatcaaaaaaaatgacagctcatgctcttagaaaattagaattaaaagcttgtccaagtgcaggtgcttgtggtggtcaatttactgcaaacacgatggcatgtgtttcagaagcaattggattagctctaccttattcagcaggaactcctgcaccttataaagaaagacataagtatgcgattaatagtggtaaagctgtaatgaaacttttagaaaaaaatattagaccaagagatattgttaccagaaaagcattagaaaatgctgctacagttgttgctgcaacaggaggatctactaatgcaggtttacacttaccagctattgcaaatgaaattggaattaaatttgatttaatggatgttgcgaaaatttttaaaagaactccttatcttgctgatttaaaaccaggtggaaaatatgttgcaaaagatatgtgggaagcaggtggtgttccaatgcttttaaaaactctttacgatggtggatatattcatggagattgtatgaccgttacaggaaagacaatgaaagagaatttaaaaaatgtgaaatttaatccaaaacaaaaagtaatgagaagttataaaaatccaatcacgccaactggtggagttgttggattaagaggtaatttagctccagaaggtggaattgttaaaattgcaggtttgaaaaaattacaatttactggaagagcaagatgttttgactctgaggaaaaagcttacaaagctgtaaaagaaagaaaatacaaagacggtgatataattataattagatacgaaggtccaaagggtggtccaggaatgagagaaatgttgcagacaacagctgcaatttatggtcaaggaaaaggggagaaagtagcccttataacggacggtaggttctctggggctaccagaggcttctgtatcggtcatgtgggtcctgaggcctctataggcggcccaatagcccttttaaagaacggagatataattgatatagatgcaaaaaaggggactattaacgttagattaagtaaaaaagagcttagtttgagaaaaaagaaatggaaacaaagaaaaatgaactttggaaacggaactctttggaaatatgctcaaacagtaggtccagcttacttaggagcacctacgcatccaggtggtaaaaacgaggttaaaacatacgctgatatttgat

SEQ ID NO: 286182 - DNA, 1378 bp, Unknown
  Bacterial polypeptide expressing nucleotide sequence isolated from the Sargasso Sea
atggttaaattttcagatgacgttacgcaaggagtagaaaagtcagctgctcgtgcaatgttgagagctgttgggcttaaagatgaagattttcaaaagtttcaagttggtatagtttctgcaggaaatgaggttacaccctgtaacttaactggtccagaactttcagaacacgcaaaagaaggggttaatggagatgtatctgccggattgattttttcaacgatagctgtctcagacggtatatcaatgggacacgaaggaatgagagcatctttagtatctcgggaggtaattgctgattctgtagagttagtaatgcatgcagaaagatttgatgggatggtaacaatagctggttgcgataagtctttacctggaatgttgatggcttcagcacgtataaacaggccttccatatttctttatggaggaagtagcttaccgggtgaatataaaggtaaagatatatctatagttgatgtatttgaaggaataggagcattggaaaaaggcttaatctcagaagaggaattatatgaaatagaatgtgctgcttgcccagggcaaggatcttgtgcaggaatgttcacagctaatacgatggcatcagttggtgaggctattggaatgagccttccaggaacagcttctatacaagctgaagataagagattgagaaaagcagctaaggaaacaggagatcagctaaattatttgttaaaaaatgatttaaaacctagagatataatgactagagaagcttttcataatgcgataactacagtcttgtctcttgggggaagtacaaatgcagtattacacttgctggctattgcttatgaagcaaaggttgatttgactatcgatgtatttgatgaacttgcaagagaagtcccacatcttgcagatatgaaaccatttggaaaatatcatatggttgacctcgataagatcggcggagtccctgttgtatcaaaaatacttcttgagaataaattaatagatccaaattgtatgacggtgactggaaaaacagtcggagaaaatttagagaatattgaagtacctaaagatcaagatgttgtttatttcccggataatccaatttctaaagagggaggtttagcaatattaagaggatctctgtcacctaatggatcagttgtaaaggttgcaggtatagaaattgatatatttaaaggaccagcaaatgtttttgacagtgagcaagaagcattggatgctctttttaataataaaattaagaaaggagaggttgttgtaattagaaatgaagggccaaaaggtgggcccggaatgagagagatgttacaaataactgccgcgatgaaaggagcaggtctaggtaaagatg

SEQ ID NO: 286183 - DNA, 916 bp, Unknown
  Bacterial polypeptide expressing nucleotide sequence isolated from the Sargasso Sea
gttggtattgcaggttgtgataagtctttaccaggtttaatgatgtcaatggttagattaaatgtaccaagtgtatttatttatggaggatcgatacttccaggaaaatataaaggtaaagacgtaactgtagtagatgtttttgaagctgttggaaaacattcatcaggacaaatgtcagcaaaagaattgagaaaattagaattggttgcttgtccaactgcaggtgcgtgtggtggtcaatttacagctaacactatggcctgtgtatctgaggcaattggtttagcactaccttattcagcaggaacacctgctccatatgaagaaagagataaatatgcaaaagcaagtggaagaatggtaatggaattattagctaaaagaattaaaccaagagatatcgttacaagaaaagcattagagaatgctgcaacaatagttgctgcaaccggtggttcaactaatgcagcattacacttaccagcaatagctaatgaagctggaattaaatttgacttaatggatgttgcaaaaatatttaaaagaacaccttatcttgcagatttaaaaccaggcggaaaatatgttgcaaaagatatgtggttagcaggtggtgtaccaatgttattaaaaactttatatgatggtggttatattcatggtgactgtatgacagttacaggtaaaacaatgaaagaaaatttaaagggaattaaatttaatccaaaacaaaaagttttaagagcttataatagacccttatcaccagatggtggagttgttggattaaaaggaaatttagctcctgatggaggaattgttaaaattgctggacttaaaaaattacaatttactggaagagcaagatgttttgataatgaagagagcgcaatgaaagcagttcaaaagtaga

SEQ ID NO: 286184 - DNA, 1047 bp, Unknown
  Bacterial polypeptide expressing nucleotide sequence isolated from the Sargasso Sea
taaaaaaaaattacctagtagacacacatccttaggtccagatagagcacctcatagatctttttattatgcaatgggagaaactgaaaaagatgtatcaaaaccatttataggagttgtatcaacttggaatgaagctgctccttgcaatattgcccttatgcgacaagcgcaatcagtgaaaaagggggttagagcatcaggagggacgccaagagaattttgcacaattactgttactgatggtattgccatgggtcatgagggaatgaaatcgtctttaatttcaagagaagtcatagctgatagcgctgaattaacagtaagaggtcattgttatgatgcattagtaggtatcgcaggttgtgataaatctttaccaggattaatgatgtccatggttaggttaaatgtaccaagtgtatttatatatggtggctcaatccttccgggaaaatataaaggtaaagatgtaactgtagttgatgtttttgaagcggttggaaaacattcatcaggtcaaatgtctgcaaaagaattaagaaaattagaattagtagcgtgtcctacagcgggtgcgtgtggtggtcagtttacagctaatactatggcatgtgtttcagaagcaataggtttagcgttaccttattcagcaggaacaccagctccttatgaggaaagagataaatatgcaaaagctagtggccgaatggttatggaattattagcaaaaaaaattaaaccaagagatatcgttacaagaaaagcattagagaacgctgcaacaattgtagctgcaactggaggctcaactaatgctgcattacacttaccagctattgcaaatgaagcaggaattaaatttgatttaatggatgttgcaaaaatatttaaaagaacaccttatcttgcagacttaaaaccaggtggaaaatatgttgctaaagatatgtggttagcaggtggtgtgccgatgcttttaaaaactctttacgatggtggctatattcatggagattgtatgactgttacaggtaaaactatgaa

SEQ ID NO: 286185 - DNA, 1111 bp, Unknown
  Bacterial polypeptide expressing nucleotide sequence isolated from the Sargasso Sea
atgacaaaaaaatcgattagtaaattaaatcaaaaaagaacgcttaaacgacaggtaggaaaatggagaagttgggaaactactgaaggagtagcaagggctcctcataggtctatgatgagagctatggggctaaatgatgacgatataaatgccccatttatcggtgttgcttctacacataacgaagtcacgccctgtaatgcaggaattaagcctttagcagatgaggtaaaaaatggtattatttcctcaaaaggcacgccttttgaattcggtactataactgtttcagatgcaatatcaatgggtacagaaggtatgaaaggatcgttagtttcaagagaaataattgcagattcaattgaaactgtatgctttgccgaaagatatgatggtgttgtagcaatagcaggctgcgataaatcacttccaggagcaatgatggcaatggcacgattaaatatccctagcgtattcgtgtatggtggatcaattttacctggccatctaaatggtcaagatttaactattattagtgcatttgaagccgttggaaaaagacaatctggagaaattaatgataaacaacttagagatatagaaatgcatgcatgcccaggaccaaattcttgcggtggtatgtttactgctaatactatgtcaagtattggggaagctataggtctaagtctacctggatctgcttctgaagcagcagttgatcaaaggaaaaaagattcttctaggcaagctggtgttgcagtaatgaacctagttagaaaaaatataagaccctcggacatattaacaaaaaaagcctttgaaaacgccgtaacattagttgtagcaatgggtggttcaacaaacacagcgttgcatcttcctgcaattgcaaatgaaatgggtataaaactatccttaaaagaaattcatgatatttctatgagaacgcctctgcttgcagatatgaagcctggaggaaaatatgtaatgtttgatctagataaggtaggaggggtccaactagtaatgaaaagattactagaagctggtttattgcatggagacgaaatgactgttactggaaaaacgataaagaaaccctaag

SEQ ID NO: 286186 - DNA, 779 bp, Unknown
  Bacterial polypeptide expressing nucleotide sequence isolated from the Sargasso Sea
cggaaagaaaacacctgtattagccgacctaaagccctttggaaaacactatatgtctgagcttaatgcaaatggaggaattcagcccttaatgaaaactcttttagacaaaggacttcttcatggtcaatgtatgacagttacaggcaataccttagaagaaaatttaaaagacataaaagcatatgagacgagtgaaataattaaagattttaataatccaatcaaaaaagatagtcatcttagaattttatacggtaaccttgctaaagatggtgctgttgcaaaaattacaggtaaagaaggaacatcttttgaaggaaaagcaaaagtatttaattcagaagaagagggtgtaagtgcgattttatcaaatcagattaatgatggtgatgtaatcgtaataaggtatgagggtccaaagggagggcctggcatgagggaaatgctaaaacctacttctgcaattatgggattaggactaggagataaaataggatttattacagatggaagattttcaggtggcacccatggttttgtagttggacatgtttctccagaagcagctgagggtggtttaatagcattagttgaagacggagatactatacttattgatgcggaaagtgatcagcttgttctaaaagttgatgatgatgaaattaaaagaagacaatcaatttgggaaaatccaaacagtaaaccaaaaaaaggagtacttgctaagtatgctgagagtgtaaaatctgcaagcctgggagctataactgattaaa

SEQ ID NO: 286187 - DNA, 1090 bp, Unknown
  Bacterial polypeptide expressing nucleotide sequence isolated from the Sargasso Sea
atgaataaatttaataaaaaaaaattaccaagcagacatacatccctgggcgcagataaagctccgcaaagatctttttattatgcgatgggtgaaactgagaaagatgtagcaaaacctttcgttggtgttgtttctacttggaacgaagctgctccttgtaatattgcattaatgagacaagctcagtcagttaaaaaaggagttaaattttctggtggtacaccaagagagttttgtactattaccgttactgatggtattgctatgggtcatgaaggaatgaaatcttccttagtatctagagatattattgctgactcaacagagctaactgttaggggccattgttatgatgcattagtaggagttgctggctgtgataaatctttaccaggcttaatgatggcaatgcttagacttaatgtgccaagcgtatttatatatggcggatcgattcttccaggaagatataatggaaaagatgtaacagttttagatgtattcgagggagtaggaaaatattcttcgggcaaaatgagcgaacatgctttgagaaaactagaattaaaagcctgtcctagtgccggagcatgtggtggacaatttactgcaaacactatggcatgtgtatctgaggctattggtttagctttaccttattctgccggaacaccagcaccatacggacagagggataaatatgctttacaaagtggtaaggcagtaatgaatttgttaaaaaaaaatattagacctagagacattgttacaaaaaaatctttagagaatgcagcaactatagttgcagccacaggaggttcaactaatgcagcattgcatttaccagctttagcaaatgaaataggaattaaatttgatttaatggacgtagcaaaaatttttaaaaaaacaccttatcttgcagatttaaaacctggtggtagatatgttgcaaaagatatgtggaaagctggtggtgttcctatgcttttaaaaaccttgttagatggtggatatattcacggaaactgtcttacggttacaggcaagactatgaaagaaaatttaaaaataagtaaaatttaat

SEQ ID NO: 286188 - DNA, 568 bp, Unknown
  Bacterial polypeptide expressing nucleotide sequence isolated from the Sargasso Sea
ttgaaaggtaatcttgcaccggatggagcaattgtaaaagttgcaggattaaaaaaacttcaatttactggaagagcaagatgttttgatactgaagagtctgcttataaagcagtattgaaaagaaaatacaaagatggtgatattatagttatcagatatgaaggtccaaaaggaggtccgggtatgagagaaatgcttcagactacaggagcaatctatggtcaaggcaaaggtgaaaaagttgcattaataacggatggaagattttctggagcaaccagaggtttttgtattggtcatgtaggtccagaagcgtcggtaggaggtccaattgcattattaaaaaatggagacataattcatatagacgcaaaaaagggaacgattaaagttgatctctcaagaaaagagttatcaaaaaggaagaaaaagtggaaacctaaaaaaattaattttggaaatggaacactttggaagtatgcacaaacagttggaccggcatatttaggcgcgtccacacaccctggcggcaaagaagaagttaagtgttacgcagatatttaaa

SEQ ID NO: 286189 - DNA, 1012 bp, Unknown
  Bacterial polypeptide expressing nucleotide sequence isolated from the Sargasso Sea
tatgaccaaaaaattaaacaagtttagctctcgaataactgaaccaaaatcgcaaggtgcttctcaagcaatgctatatggtacgggcatgaaagaagaggatatgtctaaagcgcaagtgggtatatcgagtatctggtatgaaggaaacacttgcaacatgcatcttcttgcactagcagaaaaagttaaggaaggcgttatagatgccggtctcgttggcatgagatttaatactgttggtgttagtgatggtatttcaatgggaacagagggaatgagtttttcccttcaatcacgcgacttaattgcagactcaattgaaactgtaatgtctgctcagtggtatgacgctaacatttccattccggggtgtgacaaaaatatgccgggttgtttaatagcaatgggaagattaaatcgtccatctctgatgatatacgggggaactataaaaccaggttattacgagaataataaaatcgatattatttccgcttttcagagctacggtgaatttatttctggaaatatagatgatcaaaaaagaaaggagattataaaaaaatcttgtccgggtgctggcgcgtgtggtggcatgtacacagcaaatactatggcatctgctatcgaagcaatgggtatgtcgcttccatacagctcttccactcctgcagttgatgaaaaaaaattaaacgagtgctttgaagcgggaaaagctattaaatatctattgaaagaagatataaaaccaagagaaatcatgacccgtgatgcatttgaaaacgctatggttctagtcacagtgctggggggttcaactaatgctgtcttgcatttattagcaatggcacgttctgttaatattgatttaacaatcgatgattttcaatctgtcagcaatcgtattccgtatcttgcagatttaaaaccaagtggacagtatgttatggaagatcttcataaaattggtggtacgccagctgtcatgaagtttcttactcgacaatga

SEQ ID NO: 286190 - DNA, 1196 bp, Unknown
  Bacterial polypeptide expressing nucleotide sequence isolated from the Sargasso Sea
gatgggacaccaaggaatgaagtcttcattagtttcgcgtgaagtaattgcagactctactgagcttactgttagagggcactgttacgatgcaattgttggacttgctggttgtgataaatctttgccaggcttaatgatggccatgtgtagattaaatgtgcctagtgtttttatgtacggaggcagtatattgccaggaaaatataaaggaaaagatgtaacagtggttgacgtgtttgaggccgttggaaaatattcatccggaaacgctactgaagaagaacttcatgaacttgaatgtgttgcttgtcccagcgcaggtgcttgcggaggacaattcactgcaaatacaatggcctgtgtttctgaggcaattggattagccttaccttattcatcaggtgcccccgctccatacgaagagagagataagtacgcttatgaatctggaaaacaggtaatgaatttaatagaaaaaaatattagacctcgtgatatagttacaaggagatcattagaaaatgctgcaactatcgtcgcagcaaccggaggctcaacaaatgccgggctccatttacctgctattgctcatgaatgtggtatcaagtttaatttggatgatgttgttgaaatttttaaacgcactccatacttagctgatttaaaaccaggcgggcaatacgtagctaaagatgtatatgaagccggcggtgttccaataataatcaaaactctatttgaaggtggatacatacatggtgattgtctaactgttacaggcaaaacaattgctgaaaatttagagtttgtgaaattcaataataaacaaaatgtaattcgaccatacaataacccactaacacctacaggaggtgttgttggactaaaagggaatttagcgcctgaaggtgcaattgtgaaagttgccggtatggagaatttaaaatttcaagggactgcaaaatgctttgactgcgaagaagatgcttttgaatgtgtaaaaaacgaaaattacaaggagggagatgtatttgtgatccgatatgaaggacctaaaggaggtccaggaatgcgtgaaatgcttgcaaccactgcggcaatatatggtcaaggaatgggggataaagtagctttaattactgatggtagatttagtggtgccacaagaggtttttgcgtaggtcatgtttctc

SEQ ID NO: 286191 - DNA, 574 bp, Unknown
  Bacterial polypeptide expressing nucleotide sequence isolated from the Sargasso Sea
aatgagtaaaaaattaaacaaatatagctcgcgtattactgaaccaaaatcacaaggtgcatcgcaagcaatgctctatgggacgggcatgacagaagaagatatgttgaaagcccaagttggaatatcgagtatttggtatgagggcaacacttgtaatatgcatttactaaaacttgctgaaaaaattaaagaaggtgtagtttctgctggtttagttggaatgagattcaacactattggtgttagcgatggtatatcaatggggacagatggaatgagtttttcgttgcaatcacgcgacctgattgctgattcaatcgaaaccgtcatgtcagcgcagtggtatgacgcaaatatttctataccaggttgtgacaaaaatatgccgggctgtttgattgctatgggaaggctgaatcgtccatctctaatggtttacggcggaactataaaacctggctatcataaaaatgataaggttgacatcatttccgctttccaaagttatggtcaatatatctccggtaacattgatgatagcgaacgattagatatcgttaagaaatcatgt

SEQ ID NO: 286192 - DNA, 1332 bp, Unknown
  Bacterial polypeptide expressing nucleotide sequence isolated from the Sargasso Sea
catggatggtgtgttagcgataggtggatgcgacaaaaatatgccaggagcaatgttatcaatggcaagaatgaacataccttcgatttttgtttatggagggacaattaaacctgggaaattagacggttgcgacttgaccgtggtgagttcatttgaggctgtcggtcaattagcaagcggaaaaatcgacaaagaacgtttaatagctgtagaaaaaaatgctatccctgggccaggaagttgcggagggatgtttactgctaacaccatgtctgcggcgatcgaaacgatgggttttagtttgccatttagttcaacaatggctgcagtagatgatgaaaaagcagaaagcgctgctgaaagtgctcaggtccttgtcaatgcagtaaagaacaacatcagaccattagatttactcacgaaagaagcctttgagaatgcaatcagtgtcatcatggctgttggtggctcaacaaattctgtccttcacctacttgctatagctaggactgcaggagttgatttaacaatcgatgactttgaacgtataaggcaaactgttcctgtgatttgcgacctcaaaccaagcggtaaatacgtaacagtcgacctacatcaagctggtgggattcctcaagtaatgaaattactcctcgatgcaggaatgctccatggagaatgcaaaaccattgaaggaaaaacaattaaagaagttcttagagatatcccctcaaagcccaaagcaaatcaagacgttataagacaaatatcaaaccctatttataaaaaaggacatctagctattctcaaaggaaatttagcaagtgaaggaagtgtcgcaaaaattagtggcgtaaagactcccgttttaaccgggcctgcaagggtgtttgagagtgaagaagaatgcttaactgccattcttgacaataaagttaaagctggagatgtagtcgtcgttagatatgaaggacctgtaggagggcctgggatgagggagatgctctctccgacctcagcaattgtaggtcaaggattaggagagaaagttgcactaattactgatggtcgatttagtggcggatcatatggattagtggttggccacgttgctccagaagcagccgtcggaggaacaattggattagtagaggaaggagacagtattaccgttgacgctaataaattgttaattcaattaaatgtcgaagagagggaactagctagaaggaaagagaaatgggagaagccaaagcctagatataagacaggcattcttgggaaatattccagattagtaagttcatcaagccaaggagcgacaactga

SEQ ID NO: 286193 - DNA, 1720 bp, Unknown
  Bacterial polypeptide expressing nucleotide sequence isolated from the Sargasso Sea
atggcaaaatttaacaaaaagaaacttccaagtagacatacatcattaggagcagatagagctccacacagatcattttattatgcaatgggagaaactgaaaaagatgtatcaaaaccctttattggtgtggtttcaacgtggaatgaggccgctccttgtaacattgctttaatgcgacaggctcaatctgtcaaaaagggagttagagcaaatggtggaactcctagagaattttgtaccatcactgttaccgatggaattgccatgggtcatgaaggaatgaaatcttctttgatctcaagagaagttatagctgattcagcagagttaacagttagaggacattgttatgatgcattagttggtattgcaggatgtgataaatctttgccaggattaatgatgtcgatggtcagattaaatgttccaagtgtgtttatttatggaggttcaattcttccaggaagatataaaggtaaagatgtgactgtagtagatgtatttgaagcagttggaaaacattcatcaggtaaaatgtcatctgcagaacttagaaaattagaattagttgcttgtcctagtgcaggtgcttgtgggggccaatttactgcaaatactatggcctgtgtatctgaggctattggattagcattaccatattcagcaggaactccagctccatacgaagagagagacaagtatgcaaaagaaagtggcaaaatggtcatgcaacttttaaaaaaacaaattaagccaagagatattgtaactagaaaagctttagaaaatgctgcaacaatagttgctgcaacaggtggctctactaatgctggattacatttacctgcaattgcaaatgaagcaggaataaaatttgatttaatggatgttgctaaaatttttaaaagaactccttatcttgctgatttaaaaccaggtggaaaatacgttgcaaaagatatgtggttagcaggaggtgttcctatgttgttaaaaactttatatgagggtggttacatccatggtgattgtatgacagttactggaaaaacaatgaaagaaaatttaaaaaatattaaatttaatcctaaacaaaaagtaatgagatcttacaaagatccattgtcacctacaggaggtgtagttggtttgaaaggtaacttagcaccagatggagcgatagtaaaagttgctggattagcaaaattacaatttactggaaaagcaagatgctttgataatgaagaaagtgcgatgaaagcagttcaaagcaaaaaatataatgatggtgatgtaattataattagatatgaaggaccagtagggggtcctggtatgagagaaatgttatctacaacaggtgcaatttatggacagggaaaaggggagaaagtagctcttataactgatggaaggttctctggagctaccagaggcttttgtgtcggtcatgtaggccctgaggctgctctaggaggtcctataggccttttacgtaatggagatatcattgatatcgatgccaaaaaaggaactatcaatgtcagactttctaaaaaagaattagcttctagaaaaagaaaatggagagctagaaaatctgattttggatctggtactttatggaaatatgcgcaaaccgttggtccagcgtttttaggcgcaccaacacacccaggtaagaaaaaagaagttaaggattattcagagatttaat

SEQ ID NO: 286194 - DNA, 1714 bp, Unknown
  Bacterial polypeptide expressing nucleotide sequence isolated from the Sargasso Sea
aatggttgataaaagcaaattaccaagtagacatgtttctgtaggtcctaaaagtgcaccacatagagctttttattatgctatgggcattaccgaagaacagattaaacaaccttttgtcggtgtagtaaccacatggaatgagtctgccccttgcaatatttcactttctcgccaagctcaatcagcaaaaaaaggtgtgtgggatgcaaaaggtacaccaagagaatttaccaccattactgttactgatggtatagctatgggtcatgaaggaatgaaatcctctttaactagtagggagattatagctgactcaactgaactttctgtaagagggcactgctatgatgccttagttggtttagctgggtgtgataaatctttgccaggtttaatgatggcaatgctgagacttaatgtgccgtctgtatttatgtacggtggatctatattaccaggtgtttataaggataaggacgtaacaatagtagatgtttttgaagctgttggaaaacattcaacaggaaagatttcagaccaagaactccatgacattgagtgtgttgcctgtccatctgctggatcctgtggcggacaatttacagcaaataccatggcatgtgtttcagagactattggtttagctcttccaggttctgctatgacaccagctccttatgaaagtagagataaatatgcttatgaaagtggaaaagtagttatggaattaatcgaaaaaaacttgagacctagggatattgttacaaaacaatcactaattaatgcggctgtagttgtttcagcatcaggcggatcaaccaacgcaggtttacatctacctgctatggctcatgaagccggtattgaatttactttggaagatgtctgtaaaatttttcaatcaactccatatataggtaatttagcccctggggggaaatatgtagctaaagatttatatgaggttggtggtgttcctgttcttattaaagcactcattgatggcgggttgattgatggatcatgcatgactgttactggaaaaacgttagctgaaaatgtaaaagatgtggagttgccaaaaaatcaagatgttgtgtatcctgttagtagcccaataactaaaacaggtggcgtggtaggtttgaaaggttcactggctcctgatggtgcaatcgtaaaaatagctggacttaaaaaattacagttcagaggaaaggcaatttgctttgatagagaagaacatgctctagacgctgtcttaaatggtaaaattaaacctggtcatgttgttattataagatacgagggtccaaaaggagggccaggtatgagagaaatgctatctaccactagtgccctttatggacaagatcttggcgaagaggtagctttaattactgacggaaggttctctggaggtacacgaggtttttgtatcggccatgtaggtccagaggcttatgattgtggacctatagcgttagttgaagatggtgatgaaatagaaattgatgcagagaaaaatatactaaatttgaatgtagacgaaaaaacattatctgatagaaaaactaaatgggtaaataaagaaccagagtttatgtcaggtactttatggaaatacatgaaaactgttggacctgcaaatctaggggcagttacacaccctggtggtaaattagaaaaaaagacttattcagatatttaa

SEQ ID NO: 286195 - DNA, 677 bp, Unknown
  Bacterial polypeptide expressing nucleotide sequence isolated from the Sargasso Sea
actgggaaaaacaatgaaagaaaatttaaaaaatattaaatttaatcctaaacaaaaagttatgagatcttacaaagatccattatcaccaacaggaggtgtagttggattaaaaggaaacttagcaccagatggtgcgatagtaaaagttgcaggattagcaaaattacaatttactggaaaagcaagatgctttgacaatgaagaaagtgcaatgaaagcagttcaaagcaaaaagtataatgatggtgatgtaattataattaggtacgaaggaccagttggtggtcctggcatgagagaaatgttatctacaacaggtgcaatctacggacaaggtaaaggagagaaagtagctcttatcactgatggaaggttctctggagccaccagaggcttctgtgtcggtcatgtgggccctgaggctgccctaggaggtcctataggccttttacgtaatggagatatcattgatatcgatgccaaaaaaggaactatcaatgtcagactttctaaaaaagaattagcttcgagaaaaagaaactggagagctagaaaatctgattttggatctggtactttatggaaatatgcccaaaccgttggtccagcgtttttaggtgcaccaacacacccaggtaagaaaaaagaagttaaggattattcagagatttaat

SEQ ID NO: 286196 - DNA, 1243 bp, Unknown
  Bacterial polypeptide expressing nucleotide sequence isolated from the Sargasso Sea
aatggctaaattcaataaaaagaaacttccaagcagacatacatcattaggcgcggatagagctccacacagatcattttattatgctatgggggaaactgagaaagatgtagcaaaaccctttgttggtgttgtttccacatggaatgaggctgctccttgtaacattgccctaatgagacaggctcaatcagttaaaaaaggagttagagcaaatggtggaactccaagagaattttgcacaattactgtaacagacggtatcgcaatgggtcatgaaggaatgaagtcttcactgatatctagggaagtaatcgctgactctgctgaacttacggttagaggtcattgttatgatgctttagttggtattgctggatgtgataaatctttaccaggtctaatgatgtctatggttagattaaatgtaccaagtgtatttatatatggtggatcaatactaccaggcaaatataaaggaaaagacgtaacagttgtagatgtatttgaggcggttggaaaacattcaacaggtcaaatgtctgctgcagaattaagaaaattagagctagttgcttgtcctagtgcaggtgcttgtggaggtcaatttactgcaaatacgatggcatgtgtatctgaagcaattggattagcattaccttattcagcaggaacaccagctccatatgaagaaagagataagtacgcaaaagctagtggtaaaacggttatgaaccttttgaaaaaaggaattaaaccaagagacattgtaactaaaaaagctttagaaaatgctgcaacagttgttgctgcaactgggggatcaacaaatgcaggattacatttacctgctattgcaaatgaagcaggaattaaatttgatttaatggatgttgctaaaatttttaaaagaacaccttatcttgcagatttaaaaccgggtggaaaatatgttgcaaaagatatgtggttagcaggtggtgtgccaatgttattaaaaactttatatgaaggtggatatattcatggtgactgcatgacggttacaggaaaaacaatgaaggaaaatttaaaaggaattaaatttaatccaaaacaaaaagtaatgagatcttataaaaatccattatctccaacaggtggagttgttggattaaaaggaaacttagcacctgaaggtgcaattgttaaagttgctggacttaaaaaattacaatttactggtaaaagcaagatgttttga

SEQ ID NO: 286197 - DNA, 1606 bp, Unknown
  Bacterial polypeptide expressing nucleotide sequence isolated from the Sargasso Sea
aatgcttaggccaacaggtttttcagatgaggattttaaaaaaccacaagtaggtatcgcttcaacttggtcaaatgtgactccttgtaacatgcacatcaatgaattagctcaaaccatatgtagctcagttgatgatgcagggctcaaatcagttctttttaataccatcacaatctctgatggtatttcaatgggaactcttggaatgagatattcgttggtttctagagaagtcattgcagattcaattgaaactgttgttgggtgtcagtcatttgattctgttgtagcaataggcggatgcgataaaaatatgccaggttgtatgatgggattgataaggttagatagaccaagtctgtttgtttacggtggttctattaagcctgggaaggatcatactgattttgccactgttcttgaaaaggttggcgcatattctcaaaatcaaataagtgaagacgaactaatagcaattgagaaaaatgcactccctggacctggttcatgcggaggaatgtacactgcaaacactatggcatcggcaattgaagccctaggaatgagtttacctggcagtagttcacaagatgctatatctcaggagaagaaaaatgattgcctggctgtaggtcaagctatcgattacttattagaaaaagatattaaacctagcaatatactgaccaagagcgcttttgaaaattctattaaagtagttattgcactaggcggctctactaacgcagtccttcatctcttagcaatggcaaaatcagcaaatgttgctttaaatttagatgacttcactaggatagggaaaaatacacctgttctatctgatatcaggccttctgggtactatttaatgagtgatctgaatgaacagggtggcattcaacccttaatgaaaatgatgcttaatgatggattgctggacggaagttgtatgactgtttcaggaaaaactttagaagaaaatcttaaagacatagaaccctataaagacgatcaaaaaattattgctcaaattagcaaacctattaaaaaagaaagtcacattagaattttgaaaggtaatctagctcctgaaggagctgtagctaaaataactgggaaagaaggattatctttttctggtcctgcaataatttttgaatctgaagaagaggctgttgaagcaattttcaagaataccattcaagaaggttcggtaattgttatcagatacgaaggtcctgtaggaggcccaggtatgcgtgaaatgctaaaaccgactgccgcaatcatgggagctgggctaggagataaagttgctctaattactgatggaaggttctcaggcggatctcatggttttgtggttggtcatattacccctgaagcagcgaatggaggtccaattggacttttacagaatggagatttaatcaccatagacgcaaaaaaagatcaaataaacattgatatctcagaagaacagttagtagatagaaagaaaaactggcgatctttaaaagaacctccttgcagaggagtgttagctaaatacgctagatcagtatcttcagcttccgagggggctgtaacagatgatttttaa

SEQ ID NO: 286198 - DNA, 1720 bp, Unknown
  Bacterial polypeptide expressing nucleotide sequence isolated from the Sargasso Sea
atgccaaaatttaataaaaaaaaattaccaagtagacatacatcgttaggtcctgataaagcacctcaaagatccttctattatgcaatggatcttacagaaaaagatgtagcaaaaccgtttgtgggtgtggtttcaacctggaatgaggctgctccttgtaatattgctcttatgagacaagctcaatcggttaaaaaaggagttcatcaagcaggaggaacaccaagagagttttgtaccattacggtcacagatggaatagcaatgggccatgaaggcatgaagtcatctttaatatcaagagatgttattgcagattcaactgaattaaccgttagaggtcattgttacgatgcattagttggtgtagctggttgtgataaatcgttaccaggtttaatgatggcaatggtaagattaaatgttccaagtgtatttatttacggtggatcaattttaccaggaagatttaatggaaaagatgtaacggtcgttgatgtcttcgaaggcgttggaaaatatacatctggaaagatgtcagcacacgctctaagaaaattagaattaaaagcatgcccaagtgcaggcgcatgtggtggacagtttacagcaaataccatggcatgtgtatctgaagcaataggtttagctttaccttattcagcaggaacaccagcaccttatacgcaaagagattcttatgcgttaaaaagtggtaaagcagttatgaatttattacaaaaaagaattagaccaagagatattgtaacaaaaaaatcattagaaaatgctgcaacgattgttgctgcaacaggaggttctacaaacgctgcattacatttaccagcacttgcaaatgaagctggaataaaatttgatttaatggatgttgcaagaatatttaagaaaacaccttatcttgcagatttaaaaccaggtggaaaatatgttgcaaaagatatgtggaaagctggaggcgttcctatgttattaaaaacattgttagatggtggttacatacatggtgattgtatgacggttacagggaaaacaatgagacaaaatttgaaaaatgttaagtttaacaaaaatcaaaaagtaatgaggacctataatcaaccgctatctccagacggtggtgttgttggtttaaaaggaaacttagcgcctgatggagcaattgttaaaatagcaggattaaaaaaattacaatttaccggtaaagccagatgttttgataccgaagaagcagcttacaaagcagttaaaaataaaaaatataaagacggtgatattattataatcagatatgaaggtccaaaaggtggacctggaatgagagaaatgcttcagacaacaggagcaatttacggtcaaggcaaaggtgaaaaagttgcattaattactgatggaagattttcaggagcaacacgtggtttttgtataggccatgttggaccagaagcatctgtaggtggtccaatagcattacttaaaaacggagatattattgatttggatgcaaagaaggggacaataaacgttcgattgtctagaaaagaattagcaaagagacgaaaaaaatggaaaccaaagaaaatcaactttggtaatggaactctttggaagtatgcacaaacagttggaccagcttatcttggggcacctacacatcctggtgcaaaagaagaggttagaacttacgctgacatttaat

SEQ ID NO: 286199 - DNA, 1597 bp, Unknown
  Bacterial polypeptide expressing nucleotide sequence isolated from the Sargasso Sea
tatgcttaggggtgttggttttacatcagaggactttacaaagcctttcgttgggattgcatcaactggtgcaaaagtaactccatgtaatatgcatataaataaactttccgagattgttgaagattctataaataattcaggtggtaagggagtactttttaatactattacagtatctgatggcatctcaatgggtacacagggaatgaaatattcacttatatcaagagaagttattgcagactcaattgaaactgtcgttggatgcttaggttatgacgggttaattgctattggtggatgtgacaaaaatatgcctggatgtctcattggtatggctaggcttgatagaccttctattttcatttatggaggatcaataaaaccttcaaatgaaaatactgactatgtaaccgtatcagaaaaagttggtgaattttcaaaaggcgaaattaatgaagatcggttaattcattatgaaaaaatttctgttgaaggccctggatcatgtggtggtatgtatactgcaaatacaatggcatctgctgtagaagctttaggaatgagcttgcctggaagcagcagtcaagatgctgtctcagaatcaaaaaaagatgactgtgtatcagctggtgaagcaattatgaatttattagaaagtgacataaagccgtctgacattatgactagggaagcttttgaaaacgctattacagttgttatagcacttggcggatcaactaatgcagttcttcatttattagcaattgctcattcaatcggtgttgaattagaactggatgactttacgaaaatcggtaaggaaactccagttcttgctgaccttaagccttttggaagtcactatatgtctgaattgaatgcaaacggaggaattcaaccattaatgaaattattgcttgataaaggactgctgcatggagactgtctaacagttaccggtaaaactctcagtcagaacctagaaaatgtaattccttatgagaaaaaaaatatcattagagattttgataatcctattaaagaaaatagtcatctcagaattatgtatggaaatttagctgttgatggagctgttgccaaaattactggtaaagaagggacttcttttgaaggtaatgcacgagtttttaattctgaagaggagggagttgaagctatattatcgaattcaattaatgatggtgatgtaatagtaattaggtatgaaggacctaaaggcggaccgggtatgagagaaatgttaaaaccaacgtcagcaattatgggattaggtttaggagataaagttggatttattacagacggtcgtttttcagggggcacacatggatttgtggtaggacatatttcaccagaagcagcagagggtggaaacatcgctcttgtagaaaatggagatacaatcttaattgatgctgaaaatgatcaattgattcttaaagttgaagataaagttctagatgaaagaagatctaattggactaatccaattaagactccaaaaaaaggagtgcttgctaaatatgcaaagagtgtaaaatctgcaagtttaggtgctacgacagactaa

SEQ ID NO: 286200 - DNA, 1408 bp, Unknown
  Bacterial polypeptide expressing nucleotide sequence isolated from the Sargasso Sea
aatgaaaaaatttaataaaaaaaagctcccaagtagacatacctcgctaggcccagataaagctccacaaaggtctttttattatgcaatgaatttaactgaaaaagacgttgctaaaccattcgttggggttgtatcaacatggaatgaagctgctccttgcaatattgccctcatgagacaagctcaatctgttaaaaagggtgtacaagcaactggaggaacaccaagagaattttgtacaattacagtaactgatggtattgcaatgggtcatgaaggaatgaaatcttcattaatatcaagagatgttatagctgattcaactgaactcactgtaagagggcactgttacgatgctttagttggtttagcaggatgcgataaatcattgccaggtttaatgatggcaatggttagattaaatgttccaagtgtttttatttacggtggatcaattttaccgggtagattgaacggtaaagatataacggttgtagatgtttttgaaggtgttggtaaatattctgctggtaaaatttctgaacatgcgcttagaaaaatagaattaaaagcatgccctacagctggcgcttgcgggggacaatttactgcaaatactatggcgtgcgtatctgaagcaattggacttgcattaccttattctgctggaacacctgctccttacaataaaagagataaatatgctttagaaagtggaaaagcggtaatgaatttattagctaaaaatattagaccaagagatattgtgacaaaaaaatctttagaaaatgcagcaacgatagttgcagcaacgggtggttcaactaatgcagctttacatctgccagctatagcaaatgaaattggaattaaatttgatcttatggatgttgcaaaaatttttaaaagaacaccttaccttgcagatttaaaacctggtggaaaatatgttgctaaagacatgtggaaagctggtggagttccaatgttattaaaaactctttttgaaggtggatacattcacggtaattgcatgactgttactggcaaaactatgaaagaaaatttgaaaaatgttaaatttaattctaagcaaaaagtaatgagaaaatataataatcctttatcaccagatggaggtgttgttggaatgaaaggaaacttagcaccagaaggagctattgttaaagttgcaggattaaaaagattacaatttacaggtcgagcaagatgttttgatactgaagaggcagcttataaagctgttaaaaatagaaagtataaggatggtgatattataattattagatatgaaggacctaagggtggtcctggtatgagagaaatgcttcaaacaacaggagcaatttacggtcaaggcaaaggtgaaaagttgcacttataa

SEQ ID NO: 286201 - DNA, 1713 bp, Unknown
  Bacterial polypeptide expressing nucleotide sequence isolated from the Sargasso Sea
aatttaacaaaaaaaaattaccaagtagatatacaactgtaggtgctgatagagcaccacaaagatccttttattatgcaatggatttaaccgaaaaagatgtagcaaaaccttttgttggtgttgtatcaacatggaatgaggctgcaccatgtaacattaatttaatgaaacaagctcaatttgtaaaacaaggtgtaaattcatcaggaggaacacctagagaattttgtacaataactgttactgatggtattgctatgggtcatgaaggtatgaaatcttcattgatttcaagagatgtaattgcagactctactgaattaactgtaagaggccattgttatgatgctttagttggtttagcaggatgtgataaatctttaccaggtttaatgatgtctatggtgagattaaatattcctagtgtatttatttatggtggatcaatacttccaggtagatttgaaggtaaagatgtaactgttgttgatgtttttgaaggtgttggaaaatatacatcaaaaaaaatgacagcgcatgctcttagaaagttagaattaaaagcttgtccaagtgcaggcgcttgcggtggtcaatttactgcaaacacgatggcatgtgtttcagaagcaattggattagctttaccgtattcagcaggaacacctgctccttataaagaaagacataagtatgcaattaatagcggtaaagcggtgatgaaacttttagaaaaaaatattagaccaagagatattgttacaagaaaagcattagaaaatgctgctacagttgttgctgcaacaggaggatctactaatgcaggtttacacttaccagctattgcaaatgaaattggaattaaatttgatttaatggatgttgcaaaaatttttaaaagaactccatatcttgctgatttaaaaccaggtggaaaatatgttgcaaaagatatgtgggaagcaggtggtgttccaatgcttttaaaaactctttacgatgggggatatatccatggagattgtatgactgttacaggaaagacaatgaaagagaatttaaaaaatgtaaaatttaatccaaaacaaaaagtaatgagaagttataaaaatccaattacaccaacaggtggggttgttggattaagaggtaatttagctccggaaggtggaattgttaaaattgcaggtttgaaaaaattacaatttactggaagagcaagatgttttgactctgaagaaaaagcttacaaagctgtaaaagaaagaaaatacaaagacggagatataattataattagatatgaaggtccaaagggtggtccaggaatgagagaaatgttgcagacaacagctgcaatttatggacaaggaaaaggggagaaagtagctcttataacggacggtaggttctctggggctacaagaggcttctgcattggtcatgtgggtcctgaggcctctataggcggcccaatagcccttttaaggaacggagatataattgatatagatgcaaaaaaggggactattaacgttagattaagtaaaaaagagcttagtttgagaaaaaagaaatggaaacaaagaaaaatgaactttggaaacggaactctttggaaatatgctcaaacagtaggaccagcttatttaggtgcacctactcatccgggtggtaaaaacgaggttaaaacttacgcagatatttgat

SEQ ID NO: 286202 - DNA, 1380 bp, Unknown
  Bacterial polypeptide expressing nucleotide sequence isolated from the Sargasso Sea
aatgaaaaaaagaaattttgaccatagtaaattacccagtaggcatgtcagagtaggctctgaaaaagcccctcatagatcctattattatgcaatgggtttggatgaggatgatatagataaaccttttataggtgttgcgacatgttggaatgaatcagctccttgtaatatttccctaatgaggcaatctaagagtgttaaagaaggtgtttcaaaagagggtggaaccccaagagaatttacaactattactgtaactgatggaattgctatgggacaccaaggaatgaagtcttctctagtaagtagagagataatctctgactcaatagaggtatctatgagaggtcattgttatgatgctttagttggagtagcaggttgtgataaatccttacctggtatgatgatggcaatgttaagattaaatgttccatcagtatttatatatggaggctctatccttccaggaagctataaaggaaaagatgtaacagttgttgatgtatttgaagcagtaggcgaattttctgcaggtaaaataagtgaggaagacttatatgagttagaatgtgtggcatgtccaagcgcaggatcatgtggaggacaatttaccgcaaatactatggcatgtgtttctgaagcaataggactagcattaccttactcagctggacctcctgcgccagatgaaagtagagataaatatgcttttgattctggaaaagctgttatggatttactcgaaaataatattaggcctcgagatattgttacaagagagtcatttataaatgcggcagtagtcgttgcggccacaggaggatcaacaaatggagcattacacttaccagcaatggctaatgaaatcggtatagattttgatttatttgatgtagctgatatttttaagtctactccatatattgcagatttaaagcccggtggtaattatgttgcaaaagatatgcatgaagctggaggagttcctatgctattaagaactctcttagatgaaggttttataaatggtgattgccttacggtaaccggtaaatcaattgcagaaaatatatcagaggtaacatttgatggtactcaaaaagtaatttatccagcaaataaacctattacaaagacaggtggtgtagttggattgaaaggtaattttgctcctgacggcgcaatcgttaaagttgctggaatggataatttaaaatttacaggtcctgcaagatgttttgattgtgaagaagatgcttttattgctgtagaaaacaaaaattataacgatggtgatgtaattgttatacgttatgagggtccaaaaggaggcccaggaatgcgagaaatgttatcaactactgcagctcttta

SEQ ID NO: 286203 - DNA, 763 bp, Unknown
  Bacterial polypeptide expressing nucleotide sequence isolated from the Sargasso Sea
tatgcccaagttacgttcagcaactaccacccaaggtagaaatatggcgggagctcgcgcgttatggcgagcaactggaatgaaagactctgatttcggcaagcctattattgctattgcgaactcatttacgcagttcgtacctgggcatgttcacctaaaagatctcggccaattagtggcacgcagcgttgaagaagcgggtggtgtggcgaaagaattcaacactatcgcagtggatgacggtatcgccatggggcacagcggtatgctgtatagcttaccatctcgagaaatcattgctgatgcagtggaatacatggtgaacgcacattgcgccgatgccatcgtttgtatttctaactgcgacaagatcaccccgggaatgctaatggcgtctatgcgcttgaacgtaccggtcatttttgtgtctgggggcccaatggaagcgggtaaaaccaagctttcagaccagcttattaaactagacttggttgacgccatggtagcggctgctgacgacaaagttagcgatgctgataccgacgaaattgagcgctcagcctgccctacctgcggctcatgttcagggatgttcaccgcgaactccatgaactgtctaaccgaagcgttaggtttatccttgccgggcaacggctctatgctggctacccacgccgaccgtgaaggtttatttaaacaagcgggcaaacaaattgttgagctgtgcaagcgttactacggcgacgatgatgacagtgta

SEQ ID NO: 286204 - DNA, 1089 bp, Unknown
  Bacterial polypeptide expressing nucleotide sequence isolated from the Sargasso Sea
tatgcctgattacagatcaaaaacatcgacacatggaagaaatatggcaggtgcaagagccctatggcgagcaactggtatgggagatgatgattttggtaaaccaatcatcgctattgctaattccttcactcaattcgtaccgggtcatgtacacctcaaagacctagggcaaatggttgctagagagattgaaaagtcaggtggagtggcaaaagagttcagtaccattgcggtggatgacggaatagcaatgggccattcagggatgctatatagcttaccatctcgtgaactgatagcagatgcggtggaatatatggttaatgctcactgtgcagatgcactcgtctgcctttcgaattgcgataagattacacccggaatgctgatggcaacaatgcgtctgaatgtaccgaccatttttgtctcaggtggaccaatggaggcaggcaaaggtttagtaaaaggccaagaggcgagcctggatttagttgatgccatggtacttgctgcagatccaagtgtctccgatgaagatgttgcaaaagttgagagatccgcttgtcccacttgtggttcatgctctggcatgttcactgccaattctatgaattgcttggttgaggctcttggactcgcacttccagggaatggaagtgtgcttgcaacacatattgatcgtaaagagcttttcttaagagctgggaaaattattgttgagttgaccaaacaatactatgaaaaagatgatgaaagtgttcttccaagaaatattgcaaatctagaatcatttgaaaatgccatgaccttggatattgctatgggaggttctacaaatactgtgttacatatacttgctgcagcaaaagaagctgggcttgatttcggcatggatgacatagatcgcctatcaagaagggttcctaacttatgtaaagttgccccaagtagtaactttcatatggaagatgtgcacagagcaggaggaataatggccatcctgggagaactagagagagcaaaattgctgaattctgataacaaaacagtccactcagaaacaatgcttgatgccattcagaaatg

SEQ ID NO: 286205 - DNA, 1162 bp, Unknown
  Bacterial polypeptide expressing nucleotide sequence isolated from the Sargasso Sea
aatgccaaaatttaataaaaaaaaattacctagtcgtcatacatcagtaggtcccgacaaagcaccacaaagatcgttttattatgcaatggatttaaccgaaaaagatgttgcaaaaccttttgtcggtgttgtttcaacatggaacgaggcagctccttgtaacattgctttgatgagacaagcacagtctgttaaaaaaggcgttcatcaagctggtggaacaccaagagaattttgtacaatcactgtaacagacggtatagcaatggggcacgaggggatgaagtcttcattgatatctagagatgtaattgctgattcaactgaattaaccgttagaggacattgttacgatgcactagtcggcgtagctggttgtgacaagtcattacctggtttgatgatggccatggttagtttgaatgtgccgagcgtatttatttatggtggatctatattgccaggaagatttaacggtaaagatgtaactgtggttgatgtgtttgaaggtgttggaaagtactcctcaggaaaaatgtctgcaaatgcattaagaaaattagaacttaaagcttgtccaagtgcaggtgcttgcgggggtcaatttacagcaaatactatggcatgtgtttcagaggcaattggtttagctttaccttattcagcaggaactccagcaccatacacgcaaagagactcttacgctttaaaaagtggaaaagcagtaatgagtttattagaaaaaaaaattagaccaagagacattgttacaaaaaaatctttagaaaatgcagccactattgttgctgcaaccggtggatctacaaatgcagcactacatttacctgcacttgcaaatgaagctggaattaaatttgatttaatggatgttgcaagaatatttaaaaaaacaccttatctagctgatcttaaacctggtggaaagtatgtagcaaaagatatgtggaaggcaggtggtgttccaatgttattaaaaacgcttttagatggcggatacatccatggtgattgtatgactgttacaggtaaaactatgagacaaaatttaaaaaatgttaagtttaacaaaaaccaaaaagttatgaggacatataatcaaccattatctccagatggaggtgtagttggtttaaaagga

SEQ ID NO: 286206 - DNA, 1663 bp, Unknown
  Bacterial polypeptide expressing nucleotide sequence isolated from the Sargasso Sea
atggttaaattttcagatgatgttacgcaaggagtagaaaagtcagctgctcgtgcaatgctaagaggagttgggcttaaagatgaagattttcaaaagtttcaagttggtatagtttctgcaggaaatgaggttacaccatgtaatctaactggtccagaactttcagaatatgcaaaagaaggtgttaatggagatgtttctgctggattgattttttcaacgatagctgtctcagacggtatatcaatggggcacgagggaatgagagcatctttagtatctcgtgaggtaattgctgactccgtagagttagtaatgcatgcagaaagatttgatgggatggtaacgatagctggttgtgataaatctttacctggaatgttgatgtctgcagctcgcataaataggccagccatatttctttatggaggaagcagcttaccgggtgagtataaaggaaaagatatatctatagtcgatgtatttgaaggaatcggggcattggaaaaaggcttaatctcagaagaggaactatatgaaatagaatgcgcggcttgccctggccaaggttcttgtgcaggaatgttcacagctaatacaatggcttcagttggtgaagccataggaatgagccttccaggaacagcttctatacaagctgaagatcagagattgagaaaagcagctaaggaaacaggagatcaactaaattatttgttaaaaaatgatttaaaacctagagatataatgactagagaggcttttcataatgcaataacaacagtcttgtctcttggaggtagtacaaatgcagtattgcacttgttagctattgcttatgaagcaaaagttgatttgactatcgatatatttgatgaacttgcaagaaaagtcccacaccttgcagacatgaaaccatttggaaaatatcatatggttgacctcgataaaatcggtggagtccctgttgtatcaaaaatattgcttgagaataaattaatagatccaaattgcattacagtgactggaaaaacagtcggagaaaatttagagaatatacaaatacctaaagatcaagatgttgtttattttccggataatccaatttctaaagaaggaggtttagcaatattaagaggatctctgtcacctaatggatcagttgtaaaggttgcaggtatagaaattgatacattcaaaggaccagcaaatgtttttgatagtgagcaagaagcattggatgctctttttaataataaaattaaaaagggagaggttgttgtaattagaaatgaaggaccaaaaggtggacctggaatgagagagatgttacaaataactgcagcaatgaaaggagcaggtcttggtaaagatgtattgcttataacagatggcagattctctggcgggacaactggtttatgcattggacatgtaactcctgaaagttttgataacggaccgattgctatttgtaaaaatggagatgaaataagcttggacttaaaaaaaagagaactaaatataaatattgatgaagacgaaatagaaaaaagattaaaaaaatataccaaccctgagccaaggtacaagtctggagttttaaataaatattctaaattagttacaggtgctgataggggagctgtaacaggttagt

SEQ ID NO: 286207 - DNA, 1297 bp, Unknown
  Bacterial polypeptide expressing nucleotide sequence isolated from the Sargasso Sea
catgccgggcggcatgatcgccctggcgcgcaccaatgtgccgggcatctatgtgtacggcggcaccatcaagccggggcactggaagggcaaggatttgaccatcgtctcgtcgttcgaggccgtgggcgaattcaccgccggccgcatgagcgaagaagacttcgagggcatcgagaaaaacgcctgcccctcgagcggttcgtgcggtggcatgtacacggccaacacgatgagttcgtcgtttgaagcgctgggcatgtcgttgctgtattcatcgacgatggctaatcccgatcaggagaaggtcgacagcgccgccgaatccgcgcgcgtgcttgttgatgccgtgcgccgcgacctgaagccgcgcgacatcatcacgcgcaagtccatcgagaacgccgtggccgtgatcatggccaccggcggctccaccaacgccgtgcttcactacctggccatcgcccacgcggcagaagtggaatggaccatcgatgacttcgagcgggtccgccaacgcgtgcccgtcatctgcaacctcaagccgtcgggccagtatgtggccaccgacctgcacgaggccggcggcatcccgcaggtgatgaagctgctgctcaatgccggcctgctgcatggggattgcatcaccatcaccggcaagtcgctggctgaagaactcgcgcacgtccctgaccaaccgcgcgccgatcagaacgtgatcctgccgatcgacaaggcgctctaccaggaaggccacctcgccatcctgaaaggcaacctggccgaggaaggcgccgtggcgaagatcaccggcctgaagaacccggtcatcaccggcccggcgcgcgtgttcgaggacgagcaaagtgcgatgagcgcgatcctgggcgaccagatcaaggctggcgacatcctcgtactgcgctatctcgggccgaagggcggccccggcatgccggagatgctggccccgacctcggccatcatcggcaaaggcctgggcgagtcagtcggcttcattaccgacggacgcttctcgggcggtacgtggggcatggtggtcggccacgtcgcaccggaagcctacgtgggaggcacgattggattggtgcacgaaggggattcgatcaccatcgacgcgcaccagcggctgctgcagttgaacgtgccggacgacgtgcttgcccgccgccgcgccgcgtggaagcaaccggcgccgcgctatacgcgtggcgtgctggcgaagtttgcaaaactggcggcaacggccagcaagggcgcggtaacggattga

SEQ ID NO: 286208 - DNA, 1720 bp, Unknown
  Bacterial polypeptide expressing nucleotide sequence isolated from the Sargasso Sea
aatggcaaagtttaacaaaaaaaaattaccaagtagacatacatctttaggtccagataaagcgccacaaagatcgttttattatgcaatgaatttaactgaaaaagatgttgctaagccatttgtcggagtagtttcaacttggaatgaggcggcaccttgtaatatagcattaatgagacaagcacaatcagttaaaaaaggtgttagtctttcaggtggtacaccaagggagttttgtacaattacggttactgacggtattgctatgggtcatgaaggaatgaaatcttcacttatctcaagggatgtaattgcagattcaactgaactaacagtaagagggcattgttacgatgctctagttggagttgcaggttgtgataaatctttaccaggattaatgatggcaatggttcgattaaatgttccaagtgtttttatatatggtggctcaattcttccaggtagatttaatggaaaagatgtaactgtagtagatgtatttgaaggagttggaaaatattcttcaggaaaaatgactaaacacgcattaagaaaattagaattaatagcatgtccaagcgctggagcttgtggtggacaatttacagctaatacaatggcatgcgtttcggaagcaattggtttagctttaccttattcagctggaacccctgcaccatacgagcagagagacaaatatgcattacaaagtggtaaggcagtaatgaatttattaaaaagaaatatcagaccaagacaaattgtaactcgaaaatcattagagaatgcagctacgattgttgctgcaacaggtggatcaactaatgcagctttacatttaccagcattagcaaatgagatcggaattaaatttgatttaatggatgttgcaaaaatatttaaaaaaacaccttaccttgcagatttaaaaccaggtggaaaatatgtagctaaagatatgtggcaagcaggtggagttccaatgttacttaagacacttatggatggtggttacattcatggagactgtatgacagttactggaaaaactatgagacaaaatttaaaaaatgttaaatttaatctaaaacaaaaagtgatgcgtaaatataataatcctttatcgcctgatggtggtgtagtaggccttaaaggtaatttagctcctgaaggtgcaattgtaaaagttgcagggttaaaaaaattacagtttactggaagagcaagatgttttgatacagaggaggctgcatttaaagctgttaaaaataaaaaatataaagatggtgatattataattattagatacgaaggaccaaaaggtggacctggcatgagagaaatgcttcaaaccacaggagcgatttacggtcaaggcaaaggtgagaaagtagctttaataacagatggaaggttttcaggagccacgagaggcttttgtattgggcatgttggaccagaagcatctgtagggggaccaatagcattacttagaaatggagatataattgatttagatgcaaaaaaaggaactattaacgttcgtttatcaaagaaagaattaactaaaagaagaaaaaaatggaaaccaaagaaaataaactttggtaatggtacactttggaaatatgcgcaaacagtagggccagcttatttaggtgcacctacacatcctggtggtaaaaacgaagtaaaagtatacgctgatatttaa

SEQ ID NO: 286209 - DNA, 1675 bp, Unknown
  Bacterial polypeptide expressing nucleotide sequence isolated from the Sargasso Sea
atggcttacaaccgtcgctcgaagcacatcacgcagggcgtggcccgctcgccgaaccgctcgatgtattacgccctcggctaccagaaggacgatttcgacaagccgatggtcggcatcgcgaatggccattcgacgatcacgccgtgcaattccggcctgcagcgcctgtcggacgcggccgtcgccgccgtgaaggcggccgatgcgaacccgcagatcttcggcacgccgacgatttcggacggcatgtcgatgggtaccgaaggcatgaagtactcgctcgtgtcgcgcgaggtgatcgccgactgcatcgagacctgcgtgcaggggcaatggatggatggggtggtcgtcgtcggcggctgcgacaagaacatgccgggcgggatgatcgcgctcgcgcgcctgaacgtgccgggcatctacgtgtacggcggcacgatccgcccgggcaactggaaaggccgggacctgacgatcgtgtcgtcgttcgaggccgtcggcgaattcactgcgggccggatgtcgcaggaggatttcgaaggcgtcgagcagaacgcctgcccgacgtcggggtcgtgcggcgggatgtacacggcgaacacgatgagctcgtcgttcgaggcgctcgggatgtcgctgctgtactcgtcgacgatggcgaaccccgaccaggagaaggtcgattcggccgccgaatcggcacgtgtgctcgtcgaggccgtgaagcgcgatctcaagccgcgcgacatcatcacgaaggaatcgatcgagaatgcggtatcggtgatcatggcgacgggcggctcgaccaatgcggtgctgcactatctcgcgatcgcgcacgcggccgaggtcgactggaccatcgaggacttcgagcgcatccgcaagcgcgtacccgtgatctgcgacctgaagccgtcggggaagtacgtcgcgaccgacctccaccgggctggcggcattccgcaggtgttgaagatcctgctcgacgcggggctgctgcacggcgactgcatgacgatcaccggccgcacgatcgccgaagaactgaaggacgtgccgagcgtgccgcgcgcggatcaggacgtgatcttcccgatcgaccgcgcgctgtacaaggaaggccaccttgcgatcctgaagggcaatctcgcggaagacggcgcggtcgcgaagatcaccggcctgaagaaccctgtgatcacgggcccggcacgcgtgttcgacgacgagcagagcgcgatggatgcaatcctcggcgaccggatccgcgccggcgacatcctcgtgcttcgctacctgggccctaagggcggccccggcatgccggaaatgctcgcgccgacgtccgcgatcatcggcaaggggctcggcgaatcggtcggcttcatcacggacggccgcttctcgggcggcacctgggggatggtggtcggccacgtcgcgcccgaggcgttcgtcggcggcacgatcgcactcgtgcaggaaggcgactcgatcacgatcgacgcgcatcgactgctgctgcaactgaacgtcgacgacgcggaactcgcgcgccgtcgcgctgcatggcaacagccggcgccacgctacacgcgcggcgtgctcgcgaaattcgcggcactcgcccgcccggccaataatggtgccgtcacgggttagg

SEQ ID NO: 286210 - DNA, 1125 bp, Unknown
  Bacterial polypeptide expressing nucleotide sequence isolated from the Sargasso Sea
tatggcaagattaaatagaccgtcaatatttatttatggcggatctataaaaccaagtaatgagaatacggactatgtcaccgtctcagaaaaagttggagaattctcaaagggctctataaatgaagatgagctaattcattatgaaaagatatcagttgatggaccaggctcatgtggcggaatgtatacagcaaatacaatggcatctgctatagaagcattaggaatgagtttgccaggtagcagtagccaagatgcaacatctaaatcaaagaacgctgattgtgtgaatgctggatcggcaatcatgaatttactagataaagatattaaaccttctgacattatgacaagagaagcatttgaaaatgctataactgttgtaatagctctaggaggatcaacaaatgccgttcttcatttattggccatggctcattcaattggagttgaactttgcttagatgactttacttcaatcggaaagaaaacacctgtattagccgacctaaaaccctttggaaaacactatatgtctgagcttaatgcaaatggaggaattcagcccttaatgaaaactcttttagacaaaggacttcttcatggtcaatgtatgacagttacaggcaataccttagaagaaaatttaaaagacataaaagcatatgagacgagtgaaataattaaagattttaataatccaatcaaaaaagatagtcatcttagaattttatacggtaaccttgctaaagatggcgcggttgcaaaaattacaggtaaagaaggaacatcttttgaaggaaaagcaaaagtatttaattcagaagaagagggcgtaagtgcgattttatcaaatcagattaatgatggtgatgtaatcgtaataaggtatgagggtccaaagggtgggcctggcatgagagaaatgctaaaacctacttctgcaatcatgggattaggactaggagataaaataggatttattacagacggaagattttcaggtggcacccatggttttgtagttggacatgtttctccagaagcagctgagggtggtttaatagcattagttgaagacggtgatactatacttattgatgcagaaagtgatcagcttgt

SEQ ID NO: 286211 - DNA, 569 bp, Unknown
  Bacterial polypeptide expressing nucleotide sequence isolated from the Sargasso Sea
aatgttaagaggggtgggcttcaaagacaaagatttttttataccgcaagttggcattgcttccacatggagtcaagttactccttgtaacatgcatattgataaacttgcgcttaaagtcagcaagtctctttctaaacataatgttaagccagttatatttaatagcatcacaatttctgatggaatttctatgggtactgagggcatgaaatattctttggtttcaagagaagttattgctgattctattgagactgttgttgggtgcgagggttttgatggattaattacaattggtggttgtgataaaaatatgcctggatgcttgattgcaatgtcaagattaaatagaccttctgtctttatttatggtggaacgataatgccaggaaaacacaacaataaaaatattgatattgtctctgtttttgaagctgttggagaattttcaaaaggacgtatttcaaaaaaagaactaactaatattgagacgaaagcaattccaggcccaggttcttgtggaggtatgtatacagcaaatacaatggcatcggctatgaagccct

SEQ ID NO: 286212 - DNA, 1729 bp, Unknown
  Bacterial polypeptide expressing nucleotide sequence isolated from the Sargasso Sea
catgagcaacctccacaagcaccgctcgcgcaccgtcaccgaaggcatcacgcgcacaccgcatcgcgccttcctgcgagcgaccggcatggacgacgccgcgatcgaaaagcccttcgttgcgattgtcgatacgttcggcgaaaacacgccatgctcgatgtcgctcgcggcggtttccgacaatgtgcgcctcggtgtcgcggcgggcggcggtgtgccgattcgtggctcggcgatctcggtgtcggacggcacctcgatgaaccattcgggcatgcggtttagtcttgtctcgcgcgagatcatcgcggacagcgtcgaagtgttcgtgcgcgcgcattgctatgacgcgttcgtcggcgtggccggttgcgacaagacattgcccggcattctgatgggcatggtgcgcgtgaacgtgccgggcgtgtttctgttcggcggcgcgatgctgccgggcatcgcaccggacggcacgcaggcgacgattctgaccgcgatcgaggcggtcggcgcggcgcaacgcggggacatgtcgctcgaaaccttgcgcggcatcgagaagcgttgcacgccgggcgcgggatcgtgccccggccagttcaccgcgaacacgatggcgatggtcgccgaaacgctcggtctcgcgccgctcggttcggcgatggtgcccgcggtctacagcgagcgcattgcgattgcgcgccgtgcgggcgagaccgtcatgaatacgctgaaaaacggtggtccgctgccgcgcgatctggtcacgcgcaagagcctggaaaacgcgtgcgccgccgtcgccgccaccggcgggtcgaccaacgcggcgctgcacatcccggcgatcgcgcacgaggccggcatccgctttacgttggacgatgtgtccgaggtactcgctcgcacgccgttgatcggcgatctgcaaccgggcggcaagtatctcgcgctggatctgtatcacgtgggcggcgtgccggcggtgctgaatgcgctgctcgcgggcggtttcctgcacggcgatacgttgacgcaaaccggcgaaacgctcgaaaccgcgttgaagtcgttcgcgggcccggatggccgtgtcgtccgtgcgtataacgagccgctgagcgagaacgccggactggtggtgttgcgcggcaatctcgcaccagacggtgcgtgtctgaaaaccgccggcctgaaatcgctggtcttcagcggcaccgcgcgggtgttcgaaaccgaagaggcgtgcatgtcggtcgtgtcgaagcgcacttatcaggaaggggacgtgctggtgatccgcaacgaagggccgaagggcggccccggtatgcgtgagatgctcagcgtgaccgcggcgatctacggccagggcatgggcgaaaaagtcgcgctgctgaccgacggacgcttctccggcgcgacgcgcggtatgtgcattggctacgtcggaccggaagcggcagcggggggcccgattcgattgcttagggacggcgaccggatccatatcgacgcgcacaaaggcacgctcgatgttgaattgagcgacgcggaactcgcgcggcgcaacagcgaggttgtgccgttcacacggggtcggctcggcggcgtactggagaaatacgaagcgctggtgcggccggcgaatcttggcgcggtgacgcactcgggtgcggtggagtggccttatgaagcgtcgatcggcgaggatgaagcatga

SEQ ID NO: 286213 - DNA, 913 bp, Unknown
  Bacterial polypeptide expressing nucleotide sequence isolated from the Sargasso Sea
atgggaactcaaggcatgaaatactctttagtctcaagagaagttattgctgattctattgaaacagttgtaaattgcttgggttatgatggtctaattgcaattggaggctgtgataaaaatatgcctggttgcttgataggtattgcaagattaaatagaccttcaatttttgtttatggcggctctataaaaccaagcgaagaaaatacagattatgttacagtttgtgaaaaaactggtgaattttcaaagggtagcattccagaatctgatctaattcatgttgaaaaagtttccgtcaagggtccaggatcttgtggtggcatgtatacagcaaatacaatggcatctgctattgaagctttaggtatgagccttccaggaagtagcagtcaagatgcaatatcatctgaaaaaaaacaagattgtgaagatgctggattagcaataatgaaacttttagaaaaagatattaagccaaaagatataatgacaaaaaaagcatttgaaaatgcaattacaatggtaattgcacttggtggatcgactaatgcagttcttcacttactagcaatggcagacgctattggagtagacctttcattagatgacttcacaagaattggaaaaaatactcctgttcttgccaatctgaaaccttttggtgattattttatgtctgaattaaatgcaaaaggtggtattcaacctttgatgaaaatgttgcttgatcatgacatgctgcatggtgattgcttaactgtcacaggtgaaacattatcaaaaaatcttgagaccataaaaagttatgatcaaaaccaagagatcataagtactttggatagtcctataaaagcatcaagccatctgagaattttatatggtaatttagctgaagagggagctgttg

SEQ ID NO: 286214 - DNA, 1675 bp, Unknown
  Bacterial polypeptide expressing nucleotide sequence isolated from the Sargasso Sea
atggcatacaaccgtcgttccaagaacatcacgcaaggcgtggcgcgctccccgaaccgctcgatgtactacgcactcggctatcagaaggacgatttcgacaagccgatgatcggcatcgccaacggccactcgaccatcacaccgtgcaacgccggtctgcagcgcctcgccgacgcggcggttgccgcggtcaagggcgccgacgcgaatccgcagatcttcggtacgccgacgatctcggacggcatgtcgatgggcaccgaaggcatgaagtactcgctggtatcgcgcgaagtgattgccgactgcatcgagacatgcgtgcagggccagtggatggacggcgtggtcgtgatcggcggctgcgacaagaacatgccgggcggcatgatcggcatgttgcgcaccaacgtgccgagcatctacgtgtatggcggcacgatccgtccaggcaactggaagggcaccgacctgaccatcgtgtcgtcgttcgaggcggtaggcgaattcaccgccggccgcatgtcgcaggaagacttcgaggggatcgagaagaacgcgtgcccgtccacgggttcgtgcggcggcatgtacaccgccaacacgatgagctcgtcgttcgaagcgctgggtatgtcgctgctgtattcgtcgacgatggccaatcccgatcaggaaaaggtcgactcggcagccgaatcggcgcgcgtgctggtcgaagcggtcaggaaggacctgaaaccgcgcgacatcgtcacgaagaagtcgatcgaaaacgccgtggccgtgctgatggccacgggcggctcgaccaacgcggtactgcacttcctcgcgatcgcgcatgcggcggaagtggaatggaccattgaagacttcgagcgcatgcgcaagaaagtgccggtgatctgcaacctgaagccgtcgggccagttcgtcgcgaccgatctgcataaggcgggcggcattccgcaagtgatgaagatcctgctcgacgcaggcctcctgcacggcgactgcatcacgatcaccggcaagacaatcgccgaagaactgaaggacgtgccgggcaagccacgcgccgaccagcaggtgattttcccaatcgagcaggcgctgtacaaggaaggccacctcgccatcctcaagggcaatctggccgttgacggcgcggtcgccaagatcaccggcctgaagaatcctgtcattaccggcccagcccgcgtattcgacgacgagcaaagcgcactggaagccattctggccgacaaaatcgtcgctggcgacgtggtcgtgctgcgctacctcgggccgaagggcggccccggcatgccggaaatgctcgcgccgacgtccgcaatcatcggcaaggggctcggcgaaagcgtcgggctgattaccgacggccgcttctcgggcggcacgtggggcatggtggtcggtcacgttgcgccggaagccttcgtgggcggcacgatcgcgttcgtgcaggaaggcgactcgatcacgatcgacgcgcacaagctgctgctgcaactgaacatcgacgatgccgaactggaacgccggcgtgctgcctggcaacagccgaagccgcgttacacgcgcggcgtgatggcgaagtattcggcgctggcgctgccggccaacaagggggcggtgacgggctgag

SEQ ID NO: 286215 - DNA, 1393 bp, Unknown
  Bacterial polypeptide expressing nucleotide sequence isolated from the Sargasso Sea
ccttctagagatattattgcagattcaatggagactgtggttcaagcaatgtcatatgatgggttaataactgttgttggatgtgataaaaatatgcctggagccctaatggctatgctaagacttgatagacctagcatattagtttatggaggaacaattgactctggatgttacaataataaagagctggatgttgtgtcagcatttgaagcatggggtgaaaaagtttcaggaaaaataaatgagagtgagtataaaaatgtaattaaaaatgcttgtccgggagctggggcatgtggagggatgtatacagcaaatactatggcttcagctattgaagcattaggtatgtcgcttccttacaactcatctaatcctgcaataagcaaagaaaaaataaatgaatgttcagaaattggtgagtcaattaaaaatctaattgagaaggatattaagccttctgatattgttacaaagaaatctcttgaaaacgctttaagactggttactgttctcgggggatcaacaaatgcagtgcttcattttctagcaatatctagagcagcaaatttagatttgtcaattgattattttcaagaaataagtgattcaactccctacttagctaatcttaaacctagtggtaaatatctaatgaaagatctacataaaatagggggtgttccatacgtattaaaatatatgcttgaaaataaaatgcttcatggagattgtctaactgttactggtaatacattagaagaaaacttatcaaaaattaagtctcctgatgtaagttcaaatgatctaatttttccaatatcaaatcctattaagaatactggtcatattcagatattaaagggaaatttagctgaagatggatgtgttgcaaaaataactggtaaagaaggtttaatattttcaggaccagcaaaagtttttaacagcgagtttgaatgtctttcagctattaaaaattctgaagtatcaaagggagatgttgtagtaattagatatgaagggcctaagggaggtccaggaatgccagagatgttaaaacctacatcagccataatgggtgctggattaggaaaagaagttgctttaattaccgatggaagattctctggaggaactcatggttttgtagttggtcacattgtacctgaggcatttgaaggtggaacaattgcaatagtaaaaaatggtgatatcataactattgattcagaaaaaaataagatttttgttgatatttctgataaagaaattataaaaagaaaagaaaaatggaaaaaaccagatttaaaaattaaaaatggtattctatataaatatataaagtcagtttctaacgcttctaatggatgtgtaactgatgaataat

SEQ ID NO: 286216 - DNA, 1702 bp, Unknown
  Bacterial polypeptide expressing nucleotide sequence isolated from the Sargasso Sea
catgaacaagaaattaaaagaaaaaagacagataggtaaatggaggagttgggaaactacagaaggtgtaattagagccccccacagatcaatgatgagagcaatggggttgactgatgatgatatcaatgcaccttttataggagttgcatcaactcataatgaagtaacaccttgtaattcaggaataaaaccattagcagatgcagtaaagaaaggaataaattactctaaaggaactcctttcgaatttggcaccattactgtttcagatgcaatttctatgggaactgaagggatgaaaggatcgttagtttctagagaaattatagctgattcaattgaaacagtatgctttgctgagagatatgatggcgtagttgctgttgctggatgtgataaatcattgcctggagctatgatggctatggcaagattaaatattcctagtgtttttgtttatgccggttctattttacctggaagcttaaacggagaagatctaactattatcagtgcttttgaagcagttggtaaaagacaagctggagaaattactgatgaacaactcagagaaattgaaactcatgcttgccccggccctggtgcatgcgggggaatgttcacagctaatacaatgtcaagtatcggagaagccttaggattgagtattccagggtcagcatctgaagctaacgttgatcaaagaaaaatagcttcttcaagagaagctggaattgcagttatgaatttagttagaaaaaatattagaccctcagatattttaactaagaaatcttttgagaatgcagtaacattagttgttgcaatgggaggttcaacgaatactgctcttcatctacctgctatagctaacgaaataggaataaaactaacattaaaagatattcatgaaatttctatgaaaacacctttattggtagatatgaaacctggtggtaaatacgtaatgtttgatttagataaagttgggggggttccactagtgatgaaaagattacttgatgcagggcttctacatggagatgaattaacggttactggaaaaacgataagagaaaatcttcaaaatattgatccaaatttatctgaaaataatattgtcagacatatagataatcctatttctaaaacaggtggtttagttacgttatttggaaatttagcacccgatggatgcgtactaaaggtagcaggtcatgattttgggaaaaaatttactggaccagttaaagtatttgatcaagaagaacaagcaatggaatctcttaggaaaagagaaatcaaagcaggagatgtagttataattagatacgagggccctaaaggtggaccaggaatgagagaaatgctttccataactggtgccttagtaggtcaaggattaggtgaaagtgtttacctaattaccgatggaagattctcaggaggttctactggagccatcataggccatttaggtcctgaagcagcagtaggaggtccaatagctgcagttgaaaatggagatcaagttgaaatagacttagaaaaatttgagctaaatctattaattgaagatagcgaaattaataaaagactttcaaaatggaaaccaaggccaccgttatatgatagaggaactcttggaaaatatatcaaattagttcaaccagcatctgaaggtgcaataactaggtaa

SEQ ID NO: 286217 - DNA, 370 bp, Unknown
  Bacterial polypeptide expressing nucleotide sequence isolated from the Sargasso Sea
aatgctgtatccgacctcatatttaaagtccaaaggtctcggtaaggcctgcgccttgttgactgatggtcgcttctcaggcggcacatcaggcctttcaatcggtcacgtttccccggaggccgcagcgggagggacaatcgggctggtgaaagatggcgacattatccgtatcgacattccgaatcgttctatttacctcgaagttgatgacgaagagctcgctaagcgacgcaaaatccaagatgagcttggctggagtccagagatgcaacgacctcgcaaggtttcagcggctttgaaggcgtacggcctaatggcgacaagcgccgataaaggtgccgtgcgtgaccttagtgctttcttgtag

SEQ ID NO: 286218 - DNA, 988 bp, Unknown
  Bacterial polypeptide expressing nucleotide sequence isolated from the Sargasso Sea
aatggcaaaatttaataaaaagaaacttccaagtagacatacatcattaggaccagatagagcgccgcatagatctttttactatgcaatgggtgaaactgaaaaagatgtagcaaaaccctttgttggagtagtttcaacttggaatgaagcagcaccttgcaatattgcattaatgagacaagcacaatcagtaaaaaaaggtgttagagcaaatggtggaacaccaagagaattttgcacaattactgttactgatggaattgcaatgggtcatgaaggaatgaagtcttcattaatttcaagagaagttattgcagactcagctgaacttactgttagaggacattgttatgatgcattagttggtatcgctggttgtgataaatctttgccaggtttaatgatgtcaatggttagacttaatgttccaagtgtatttatttatggaggttctattcttcctggaacttataaaggtaaagacgtaacagttgtagatgtatttgaagcagttggaaaacattcatcaggtcaaatgtctgctgctgaacttagaaaattagaattagttgcatgtccaagtgcaggtgcatgtggtggtcaatttacggcaaacacaatggcatgtgtatctgaagccataggtttagcattaccttattcagcaggaactcctgctccttatgaggaaagagacaagtatgcaaaagaaagtggtaaaatggttatgaaccttttacagaaaaaaattaaaccaagagatattgttacaagaaaagctttagaaaacgctgcaacaattgttgctgcaacaggtggatctacaaatgcaggattacacttacccgctattgcaaatgaagcaggaattaaatttgatttaatggatgttgcaaaaatatttaaaagaacaccttatcttgcagatttaaaaccaggtggaaaatatgttgcaaaagacatgtggctagcaggcggtgtacca

SEQ ID NO: 286219 - DNA, 1493 bp, Unknown
  Bacterial polypeptide expressing nucleotide sequence isolated from the Sargasso Sea
tatggataaaaaaggttcaaatataaaaaaaaatctacctagtaggcatgtaagtgtaggacctaaaagtgctcctcatagatctatgtattatgctatgggtatgtctgaagaagaaatatatcagccatttattggtgtagcaactacatggaatgaatctgcaccttgtaatattactttaggtagacaagcacaagctgttaaaattggagttaaagaaaaaaatggaactcctagagaatttactacaattacagtgactgatggcatagcaatgggacatgaagcaatgaaagcctctctagttagtagagaagtaatcgctgatagtgttgagttatcagtgagaggacactgttatgatggtattgttggattagcaggatgcgataaatctttaccaggtttaatgatggcaatggtgagacttaatattccttccgtatttatttacggtggatctatattgcccggtcatcataaaggaaaagatttaactattattgatgtttttgaagctgtaggcaaacatgcacaaggtgcaatagatgacaacgaattaaagactatagaacaagtagcatgtcctaccgctggttcctgtggtggacaatttacagcaaatactatggcgtgtatttctgaagctttgggtttagcattaacaaattcagcaatgactcctgctacctatgaagaaagagataattacggtattgaaagtggtaaagcagtcatgcaattaattgaaaaaaatataaggccaagggatatagttaccttagaatctcttcgtaacgcagcagttgtagttgctgctacaggaggttctacaaatgcaggattacatttaccagcaattgctaatgaagctggtattaaatttactttgaaagatgttgtcgatatttataaatcaaccccttatattggagatatgtcacctggaggaaaatatgttgctaaagatttatacgaagtaggtggtgttccaattgttataaaatcattaatagatggtgggtatattaatggtgattgtatgacagtaacaggtaagactattggggaaaatcatagagatgtaatatttcctaaaaatcaagatgttgtttatacttgtgataaccctattagtgaacatagctcagtagttggcttgtggggaaatttagctgaagatggaagtatttcaaaaattgcgggattaaaaaatctacaatttaagggtaaagctaaatgttttgattgtgaggaagatgcacttactgctgttcttaaaaatgaaatagtagctggagatgcagttattattcgctatgaaggtccaaaaggaggacctggtatgagagaaatgctttctactactggagctatatatggccaaggtctaggagaaacagtagctttaattacagatggaagattttctggaggaacgagaggtttttgtataggtcatgtggaccagaagctgcagtggaggcatg

SEQ ID NO: 286220 - DNA, 1620 bp, Unknown
  Bacterial polypeptide expressing nucleotide sequence isolated from the Sargasso Sea
gtctttttattatgctatggatctaaccactgagcaaattcatcagccttttataggcgttgcaacaacttggaatgaatctgctccttgtaatattactcttcgtagacaggctcaatctgtaaagaaaggagttacaagtgctgatggaactcctagagaatttactactatcacagttacagatggaatagctatgggtcatcaaggtatgaaagcttctttagctagtagagaagcaattgctgatacaatagagttatcagtgagagggcattgttatgatggtttagttggagttgcaggttgtgataaatctttgcctggtgtcatgatgtctatgttaagattgaatattccaagtgtttttatttatggtggctctataatgcctggtaaacataaaggaagagatttaacagttcaggatgtttatgaagcggtgggacagaatgatgctggtatcatagatgctgatgaattagatttaattgaaagagcagcatgtccgtctgctggttcatgtggagggcaatttactgcaaatactatggcttgtgtaagtgaagcgataggacttgctttgcctaacagtacaggtgctcctgcaccttatgagtctcgggatgaatatgcattagctgcaggtaaacaggttatgactttaattgaaaaaaacctaagaccaagagatatagttactagaaagtcatttgaaaatgcagctagagttgttgctgcatctggtggctcaacaaatgctgcacttcacttgccagctatggcaaatgaagcaggtattgattttgatttattcgctgtagcagaaatatttaaatctactccttatatcgcagatttaaagccaggaggaaagtatgttgctaaagatttacatgaggcagggggtgttcaagtaatacttaaagctctttttgaagcaggatatattcatggtgattgcatgactgtaactggaaaaactatggaagagaatttagctgatattacatttcctaaggagcaagatgtaatttataaagttgaaaatgctattactcctactggaggtgtagttggattaagaggtaatttggcggaggaaggcgctatagttaaagttgctggcatgacaagaacaaagcatgtaggacctgcaattgtattcgattgtgaagaagatgcttataaagcggttaatgaaagaaattataaggaaggtgacgtttttgtaataagatatgaagggcctaaaggaggacctggtatgagagaaatgttggctactactgctgctatttatggacaagggatgggagaaaaagttgctctaattacagatggacgtttttctggtgcaactagaggcttttgtgttggacatgtgggccctgaagcagcagttggaggaacaattgctcttattaaagatggagatattataacaatagattctgatactggtgagttgagtgttgatctttcagatgaggaattaaaaaacagaaagaaagactggaaacctcgcgagcatgaatatggttccggagaaatttggaagtattcacaattagttggatctgctttaaaaggagctgtaactcatccaggcgcaaaaga

SEQ ID NO: 286221 - DNA, 1489 bp, Unknown
  Bacterial polypeptide expressing nucleotide sequence isolated from the Sargasso Sea
ccatgtaacatacatctccctaatcttgcacaacaagcaaagcaaggagttactgatggcggtacaaccccaagagaattcagtacgattgcagtaagtgatggaattgcaatgggacatgaaggaatgaaatcatcattaatcagtagagaagtaattgcagattcaattgaacttatggttcgtgcacatcaatacgatgcattagtaggaattgcaggatgtgacaagagcttgccaggtacaatgatgggaatgatacgactcaacattccatcagtatttgtttatgggggaactataatgccgggaatgctagatggaagagaattaacagtagttgacgtatacgaagcagtaggatcttatgatgcgggaaaaattactgcagaagaattagaaaatattgaaaatgttgcttgccctaatgcaggttcttgtggcggaatgtttactgcgaatacgatggcatcaatttctgaagcaataggattatctttgccaggaagtgcaagtccacctgcagaggatgaaagaagaaacaagattgtctatgaaacaggaaaagcttgttcagaattgctcaaactaggcataaaaccattagatattgtaacatttgaatcatttgaaaattcaatcacaatgttaaatgcagtaggaggttcaactaatggaattttacatttgttagcaatggcaaatgaagcaggaatcaatttgacatacgatgattttgagagaataagaaagaaaacacctcatgttgcagatatgaaaccgggaggaaattatgtaatgaatagtttagataaaattggaggaattccattaatcatgaaaaaattgttagataagaatttgatacacggagattgtttaacagttacaggtaaaacaattaaacagaatttagatgaattattaattacagaagttcctgaacaacaaatagtaaaaccagttgaacagccaattcatgaagttggaactgcagtcattctaaaaggatcacttgctccggaaggagcagtaattaaaactgcaggcgtagaaatgacagaatttacaggcactgcaagagtttatgacagagaagagtatgcatttgaatcagtctcaaaaggagatgtggatgaaggagatgttgtagtaatcaggtatgaaggtccgaaaggaggaccaggaatgagagaaatgctttctactacggcagcactcgtaggtcaaggacttggaaaaaaagtagcaatggtaacagatggcagattctctggtggaacaagaggtttcatggtagggcatgttgctcctgaagcatttgttggaggcccaattgcactagtgaaagatggcgataaaatttcaatcaatgtagaagactcttcaattaatctacatgtttcagaagaagaattagctaaaagaaaagaacaatggagaagaccagaaccaaactttctacaggtgcactgcgaagttgcatcac

SEQ ID NO: 286222 - DNA, 1529 bp, Unknown
  Bacterial polypeptide expressing nucleotide sequence isolated from the Sargasso Sea
tgctcactgtgcagatgcactggtctgcctttctaattgcgataagattacacccggaatgctgatggcaacaatgcgtctgaatgtaccgaccatttttgtctcaggtggaccaatggaggcaggcaaaggtttagtaaaaggccaagaggctagcctggatttagttgatgccatggtacttgctgcagatccaagtatatccgatgaagatgttgcaaaagttgagagatccgcttgtcccacttgtggttcatgctctggcatgttcactgccaattccatgaattgcttggttgaggctcttgggctagggcttccagggaatggaagtgtgcttgcaacacatattgatcgtaaagagcttttcttaagagctgggaaaattattgttgagttaaccaaacaatactatgaaaaagatgatgaaagtgttcttccaagaaatattgcaaatctagaatcatttgaaaatgccatgaccttggatattgccatgggaggttctacaaatactgttttacatatacttgctgcagcaaaagaagctggacttgattttggtatggatgacatagatcgcctatcaagaagggtccctaacttatgtaaagttgccccaagtagtaactttcatatggaagatgtgcacagagcaggaggaataatggcaatccttggagaactagagaaagcaaaattgctgaattctgatagtaaaactgttcactcagaaacaatgcttgatgccattcagaaatgggatatcaacaggaagccttcaaatgaagtcaaagaattctactcggcagcgcctggtatgattccaactactcaaccattctcgcaaaacaaaagatactcagaattagatgtggatcgtgagaatggctgtattagagattctgataatgcccatagtcaagatggaggcttagcagtattaaaagggaatattgcatctgatggatgtattgtaaaaacagcgggtgtcgatgaaaaaattctaactttcagtgggcctgcaaaagtttttgaaagtcaagatgatgcggttgaagcaatccttggagaccagattgaagctggagatgtggtcgttattcgctatgaaggaccaaagggtggacctggcatgcaagaaatgctttatccaaccagttatttaaaagcaaaaggacttggtgagaaatgtgcactgatcaccgatggaagattctcaggaggaacgtctggcttatccattgggcatatttctcctgaggctgcatcaaaaggctatattgcgcttatcaaagatggtgacatcattaatatcgacataccaaaaagatccattgatgttgatctcttagatgaagaattggagcttagaaaaaaagaaatggcttctcttggaaaaaaagcgtggaagcctcataaaagaaatagaacagtgagcttggcactccaagcatatgcattattggcatcatctgcatcagatggtgctgtaagacaaattgaaggaatcattgatgatgagtaac

SEQ ID NO: 286223 - DNA, 1269 bp, Unknown
  Bacterial polypeptide expressing nucleotide sequence isolated from the Sargasso Sea
aatgcgtctgaatgtaccgaccatttttgtctcaggtggaccaatggaggcaggcaaaggtttagtaaaaggccaagaggcgagcctggatttagttgatgccatggtacttgctgcagatccaagtgtctccgatgaagatgttgcaaaagttgagagatccgcttgtcccacttgtggttcatgctctggcatgttcactgcaaattctatgaattgcttggttgaggctcttggactcgcacttccagggaatggaagtgtgcttgcaacacatattgatcgtaaagagcttttcttaagagctgggaaaattattgttgagttgaccaagcaatactatgaaaaagatgatgaaagtgttcttccaagaaatatcgcaaatctagaatcatttgaaaatgccatgaccttggatattgccatgggaggttctacaaatactgtgttacatatacttgctgcagcaaaagaagctgggcttgatttcggcatggatgacatagatcgcctatcaagaagggttcctaacttatgtaaagttgccccaagtagtaactttcatatggaagatgttcacagagcaggaggaataatggccatcctgggagaactagagaaagcgaagttactcaattctgataacaaaacagtccactcagaaacaatgcttgatgccattcagaaatgggatatcaacaggaagccttcaaatgaagtcaaagaattctattcggcagcacctggcatgattccaaccactcaaccattctcacaaaataaaagatactcagaattggatgtggatcgtgagaatggctgtattagagattctgacaatgcccatagtcaagatggaggcttagcagtattaaaaggaaatattgcatctgatggatgcattgtaaaaacagcgggtgtcgatgaaaaaattctaacctttagtggacctgcaaaagtttttgaaagtcaagatgatgcggttgaagcaatccttggagaccagattgtagctggagatgtggttgttattcgctatgaaggaccaaagggagggcctggcatgcaagaaatgctttatccaaccagttatttaaaagcaaaaggacttggtgaaaagtgtgcactgatcacagatggaagattctcaggaggaacgtctggcttatccattggacatatttctcctgaggctgcatcaaaaggctatattgcgcttatcaaagatggtgacatcattaatatcgacataccaaaaagatccattga

SEQ ID NO: 286224 - DNA, 583 bp, Unknown
  Bacterial polypeptide expressing nucleotide sequence isolated from the Sargasso Sea
atgttgcgtggcgtaggttttacttcagaagattttttaaaaccttttattgggatagcgtctactggagcaaaagtaactccttgtaatatgcatattaataaattatctgaaaccgttgaagattctgtaaactcatcgggaggaaagggagttctttttaatacgattactgtttcagatggaatatctatgggaacccaaggaatgaaatattctttaatttcaagagaagtaatagcagattcaattgaaacagtagtaggttgtcttgcatatgatggtcttataactataggaggatgtgataaaaatatgccaggatgtctaattggaatggccagactggatagaccatccatatttatctatggaggctctatcaaaccaagtaatgaggatactgattatgtttctgttttggaaaaggttggtgaattctcaaaaggtaaaatcgatgaagaaaagttaattcattatgaaaaaatatctgtagagggacctggatcatgtggtggtatgtatacagcaaatacaatggcatcctcaattgaagcgcttggtatgagcttgcctggaagca

SEQ ID NO: 286225 - DNA, 832 bp, Unknown
  Bacterial polypeptide expressing nucleotide sequence isolated from the Sargasso Sea
atgaagtttaataaaaacaaattgccaagtcgtcacgtgtcagttgggccagaaagagctcctcatcgatcatattattatgctatgggtatggacgaaaatgacattaataagccatttgtaggtgtagtttctacatggaatgaggctgcaccatgtaacatagctcttatgcgtcaagcacaatcagttaaaaaaggagtttctgaggcagagggaacgccgcgcgaattttgcacaattactgtaactgatggcattgccatgggtcatcaaggcatgaagtcatcattggtttcacgtgaagtaatagcagactcaactgagctgactgtaagaggacattgttatgatgcaattgtcggattagctggctgtgataaatcgcttccaggcttaatgatggcgatgtgcagattaaacgttcctagtgtttttatgtacgggggcagtatattacctggaaagtataaaggcaaagatgtaacagtagttgacgtttttgaggcagttggcaaattttcatctggaaacgctacagaagaagaactgcatgaacttgaatgcgttgcctgtccgagcgctggtgcttgtggcggtcaatttacagcaaataccatggcgtgtgtttcagaagcaattggtttagcacttccatactcttctggtgcgcccgctccttatgaagaaagagataaatatgcatacgagtctggaaaacaagtcatgtatttaattgaaaataatattaggcctcgtgatatagtaacgaaaaagtcattagaaaatgccgcaacaattgttgcagcaacaggaggctcaacaaatgccg

SEQ ID NO: 286226 - DNA, 1672 bp, Unknown
  Bacterial polypeptide expressing nucleotide sequence isolated from the Sargasso Sea
atggattacaacagatatagtaaagtaattactaaaaaaggatctcaaccagctgcccaagcaatgttacatgcaataggcttaactaaaaaagattttaataaaccgtttattggaattgctagtactggatatgaagggaatccgtgtaatatgcatttaaacgaattatcaattcaaataaaaaataaaattaatagagatgaggctgttccattaatttttaacacaattggtataagtgatggaatatctatgggaactagtggtatgaaatattcattaccgtcgagagatattattgctgactcaattgaatccgttgttaacggaatgtcatatgattcacttattaccgtagtaggatgtgataagaatatgccgggtgcacttatggcaatgattagattaaatagaccatcaatacttgtttatggtggaactatttctgctggttgttataaaggaaagaaacttgatgttgtttcagcttttgaagcttggggtgaaagagttgcaggaaaactatctgatgatgactatgacaatattataagtaaagcatgtcctggcccaggtgcttgtggaggaatgtatactgcaaatacaatgtcgtcagctattgaagcaatgggtatgtcgcttccatacaattcatcaaaccctgcaactagtcagaagaaattagacgaaaaaactaaaatttctaaatcaataataaatttaattaaacaagatattaaaccaagtgatattctatcaaagaagtcaattgaaaatgcggtgcgtttaataacaattcttggtggatcaactaatgctgtattgcatatacttgcaatttgtaaaacagctaatattgattttaagattgatgattttcaaagaatatctgatgagactccttttttggcaaatttaaaaccaagtggaaaatatttaatggaagatcttcatgaaattggtggagtcccagcagttatgaagtttatgatgaataatggtttactacatgaagattgtttaactgtaactggaaaaactattaaagaaaacttaaaaaatgttgaatcttttgatttcaatcaagatataatcaggccaatagataatccaatcaaaacatcaggtcacatacgtatattgtacggaaatctagcatctgaaggttctgttgcaaagattactggaaaggaaggtctagtatttaaaggaaaagcaaatgtatttaattgtgaagatgatgctaatgatgcaataaagagtaattcaataagtaagggtgatgtcatagtaataagatatgaggggcctgtgggtggtcctggtatgcctgagatgcttaaaccaacatcagcaattatgggtgctggcttaggaaatgatgtagcactaattactgacggtaggttttccggtggaacacatggatttgttgttggtcatatttcaccagaagcagctaaaggtggggtactggctcttgtgaaaaacggagatgaaattgtgattgatgcagaaaaaaatgaaattaatgttaatattgacaaaaaagaacttgaaattagaaaaaaactatgggttaagccagatttaaaatttaaatccggaattttgtataaatattctaaacttgtttcaagtgcatccagtggttgtgtaacagattaaa

SEQ ID NO: 286227 - DNA, 1600 bp, Unknown
  Bacterial polypeptide expressing nucleotide sequence isolated from the Sargasso Sea
aatgcttagaggtgttggctttgaaacatctgatttctcaaaatcattagttgggattgcgtcaacttggtcaaaagttactccgtgtaatatgcatattaatgagttggctgatcttgttgagagttcaatagattcatccggttgcaaaggagttctttttaatactattactgtatctgatggaatctcaatgggtacacaaggtatgaaattttcattagtttcaagagaagttattgcagattcaattgaaacagttgttgggtgccttgtctatgatggagttattgcaatcggtggatgtgataagaatatgcctggagcacttatgggattagcaagattggatagaccttcaatttttatttatggaggatccattcggccaagttcaataaatacagactatgtcacagtttcagaaaaagtgggcgagtatgcaaaaggagatataactgaagatgaactaatagctattgaagaagtttcagttgtagggccagggtcatgtggaggcatgtataccgcaaataccatggcatcaagcattgaagctttgggaatgagtttgccaggaagtagcagtcaggatgcagtgtctgatgataaaaaattagattgccagaatgctggagaagcgataaaacatttacttgatcttgacttaaaaccaagtgatatcatgacaaaaaaagcttttgaaaattctattgcagttgtaattgcgcttggaggctcaacaaatgctgttttacaccttttagcaattgcacattgcattggcgttgacttggacctagatgattttactaggattggaaaggtgacccctgtactagcagacataaaaccttttggtgatcattttatgtctcaattaaacgaaataggcgggattactccaatgatgaaaaccatgcttgataataatcttttgcatggtgattgcatgaccgttactggtaaaacattagcagaaaatcttaaggatgtagatccatatcctagcaatcagaagatcatcatgccgttaaataatcctgtaaaggattcaagtcacttaagaatcctttatggaaatttggctccagatggagcagtagcaaaaattactggcaaagagggaactgttttcactgggaatgctagagtctttaattctgaggaagagggaatgacagcaattcttgatgagcagattaaagatggagatgtagtggttattaggtttgagggtccccgaggcggtcctggaatgagagaaatgctcaaaccaacatctgcaatcatggggcagggtttaggagataaagttgcctttattactgatggaagattttcaggaggtactcatggttttgtagttggtcatataagtcctgaagcagaattaggtggccctattgcactaatagaggatggagacgagattactattgatgcaaataaagatattttagaacttaatatttctgatgatgaaatgaaaaaaagagcaaatgtatggaaaaatcctaattcgtccccaaaaagtggtgtattagcaaaatataaaagaactgttcaatcagcttccaaaggcgccatcaccgattaa

SEQ ID NO: 286228 - DNA, 1252 bp, Unknown
  Bacterial polypeptide expressing nucleotide sequence isolated from the Sargasso Sea
accagcaatttttttatacggtggaagtagccttccgggagtctacaaaggaaaagatatatctattgtggatgtttttgagggaattggtgctttcgaaaaggggataattagcgaagaagagttgtatgaaatagaatgtaatgcctgtccaggacaaggctcttgcgcagggatgtttacagctaacacaatggcttctgtaggagaggctattgggatgagtttacctggcactgcgtcaatcccagctgaagatcaaaggttaagaacagcagcaaaagagtcaggtttgcaattaaattatttattgaaagaagacataaaaccaagagatattatgaccctagaggcttttaaaaatgcaattacaacagtattagcccttggaggcagcacaaacgcagtattgcatttgttagctatatcctatgaagcaaaaattaatcttgatctaaatacttttgatgatcttggtaaatcagttccacatcttgcagatatgaaaccgtttggaaaatatcatatggttgatcttgacaaaattggaggggttccagtagtttctaaaatccttcttgagaataaattaattgatcctaactgtttaacggtaactggaaaaactgttggtgaaaatttagaaaatattgatattccaaaaaatcaagatgtagtttcgttcccaaacaatccaatttcaaaagaaggaggaatagctattttaaacgggacactttcaccaaacggatctgttgtaaagacagcgggtattgaagtgaacgaattttctggccctgcaaatgtttttgaaagtgaacaagatgctttagatgccttattcaataacaagattgaaaaaggagatgtcgttgtaattagaaacgaggggccgaaaggtggtccaggtatgagagaaatgcttcaaattacagctgcaataaaaggtgcaggtttaggaaaagatgtcctgttgattactgatggtcgattttcgggtggaactactggtttatgtattggccacgtaacaccagaaagttttgatctaggacctattgcaatatgtcaaaatggtgatctaataaatttgaatttatcaaaaagagagttgaacttggaattgacagaatctgaaattaaaaaaaggtttgagtcctataaacttcctgaaccaagatacaaatctggagttttaagtaaatactctaaattagtttcaggagctgattcaggagcggttacctcataa

SEQ ID NO: 286229 - DNA, 1234 bp, Unknown
  Bacterial polypeptide expressing nucleotide sequence isolated from the Sargasso Sea
ggctgcgacaaaaacatgccagcgtgtggaatagcgatggcacgactcaaccgaccgagtgtttttgtttacggcggcacaatactccccggcaaagagcgaagagatatcgtctctgtgtttgaggcagtcggaggacatgctgctggaagcgtttctgatatcgagctaaaagaagtcgagtcaacggcgatacctggtccgggatcctgcggcggaatgtatacagcgaacacaatggcctcggccatggaagctcttgggctttccctaccaaatagttcagctcaaaatgcagtcagcgaagcaaaaaagatcgatagcaggaatgctggagtcgcagtgcgtaatcttatcagattaggtattaagcctagtgacatcctatgcaaagaatctttcgagaacgccatcacagtgtctattgcacttgaaggatcaacaaatgcagtcctacatcttttggggattgcccacgccgctggcatcaagctagaactcgacgattttagtagagtaggtatgcgcgtacccgttcttgcggatatgcgtcccgcaggccagtatgctatgagcgagttgattgaaataggaggtatacaacccctcatgaagctcttattggcagagggccttctaaatgggaactgtctaactgtaacgggcaaaacgctcgctgaaaaccttgaacatgttgaagattaccctgcgaatcaaaaaatcataagaccccttagcaacccgatcaaaaaagacagtcacctggttattctcagaggaaatctcgctcccgagggcgccgtagcgaagattaccggtcatgaaggtcttacctttgaaggcactgccaagtgttacaaaggagaagaagctgcaatgaaagccataatggatggaagagtcgataaaggagatgtagtcgtcgttcgatatgaagggcctaaaggcgggccagggatgcgggaaatgctcagtccaaccagtgccatcaatggtagaggcctcagcgagcatgtcgcactaattaccgatggtcgattctctggcggctcacatggttttgtaattggtcacattactcctgaggcttttgaaggtggaccgatcgctttgattgaagatggagattccatcgcgattaacgcagaaacttgcgagatcaacttgctaatctctaaagaggaatgggatgttcgacgggccaaatggtctaaaccagaaccccctatacaaa

SEQ ID NO: 286230 - DNA, 1294 bp, Unknown
  Bacterial polypeptide expressing nucleotide sequence isolated from the Sargasso Sea
gtaccaagtgtatttatttatggaggatcaattcttccaggtacttacaaaggaaaagatgtaacagtagtagatgtatttgaagcagtgggaaaacattcatcaggtcaaatgtctgcagcagaacttagaaagttagaattagtagcttgcccaagtgctggtgcttgcggtggacaatttacagctaatacaatggcatgtgtatcagaagcaattggtttagcattaccttattcagcaggaacacctgctccttatgaggaaagagataagtatgcaaaagagagtggtaaaatggttatgaaacttttacagaaaaaaattaaaccaagagatattgttacaagaaaagctttagaaaatgccgcaacaattgttgctgcaacaggtggatctactaatgcaggtcttcatttgccagctattgctaatgaagcaggaatcaaatttgatttaatggatgttgctaaaatatttaaaagaacaccttaccttgcagatctaaagccaggtggaaaatatgttgctaaagatatgtggttagcaggtggtgttcctatgttattaaaaactttatatgaaggtggatatattcatggtgattgtatgactgttacaggtaaaactatgaaagaaaatttaaaaaatattaaatttaatcctaaacaaaaagtaatgcgatcttataaagatccattatcacctacaggaggagttgttggattaaaaggaaacttagctccagaaggtgcaatcgttaaagttgctggtcttaaaaaattgcaatttactggaaaagcaagatgctttgataatgaggaaagcgcaatgaaggcagttcaaagcagaaagtataatgatggtgatgtaataataattagatacgaaggaccagttggaggtccaggtatgagagaaatgttatcgacaacaggtgcaatctacggacagggaaaaggagagaaagtagcccttattaccgatggtaggttctctggagccactagaggcttttgtgtgggtcatgtgggccctgaggccgctctagggggtcctataggccttttacgtacaggagacatcatcgatatagatgccaaaaaaggaactatcaatgtaagactttctaaaaaagaaatggctgcaagaaaaagaaaatggaaggctagaaaatctgactttggatcaggtactttgtggaaatatgctcaaactgttggacctgcatatttaggagcttcaacacatccaggtaagaaaaaagaagttaaggattattcagagatttaat

SEQ ID NO: 286231 - DNA, 994 bp, Unknown
  Bacterial polypeptide expressing nucleotide sequence isolated from the Sargasso Sea
atggcaaaatttaacaagaagaaacttccaagtagacatacatcattaggagcagatagagctccacatagatcattttattatgctatgggagaaaccgaaaaagatgttgctaaaccctttgttggcgtggtttcaacatggaatgaagcagctccttgtaacattgctttaatgagacaagctcaatctgttaaaaaaggtgttagatcaaatggaggaaccccaagagaattttgtaccatcactgttactgatggaattgctatgggtcatgaagggatgaaatcttctttaatctcaagagaagttatcgcagactctgcggagcttactgtaagaggacattgttatgatgcattagttggtattgcaggatgtgataaatctttaccaggtctaatgatgtcgatggtcagattaaatgttcctagtgtatttatttatggaggctcaattcttccaggaagatataagggtaaagacgtaacggttgttgatgtatttgaagcggtaggaaaacattcatcgggtaaaatgtcatctgcagaacttagaaaattagagttagttgcttgtcctagtgcaggtgcttgtggaggccaatttactgcaaatactatggcatgtgtatctgaggctattggattagcattaccatattcagcaggaactccagctccatacgaagagagagataagtatgcaaaagaaagtggtaaaatggttatgcaacttttaaaaaaacaaattaaaccaagagatattgtaacaagaaaagctttagaaaatgctgcaaccattgttgctgcaacaggtggctctactaatgctggattacatttacctgcaattgcaaatgaagcaggaataaaatttgatttaatggatgtagctaaaatttttaaaagaactccataccttgctgatttaaaaccaggtggaaaatatgttgcaaaagacatgtggttagcaggaggtgttcctatgctat

SEQ ID NO: 286232 - DNA, 991 bp, Unknown
  Bacterial polypeptide expressing nucleotide sequence isolated from the Sargasso Sea
atgaatttattagcaaaaaatattagaccaagagatattgtaacaaagaaagctttagaaaatgctgcaacaattgttgctgcaacaggtggatcaacaaatgcggctttacacttgccagctattgcaaatgaaattggtattaaatttgatttaatggatgttgctaaaatatttaaaagaactccttatcttgcagatttaaaacctggcggaaaatacgtagcaaaagatatgtggaaagcaggtggagttcctatgttgcttaaaactttaatggatggtggatatatacacggtaattgcatgacggttacaggcaaaactatgaaagagaatttaaagaacgttaagtttaattctaagcaaaaagtaatgagaaaatacaacaatcctttatctaaagatggtggcgttgttggaatgaaaggaaacttagctccagaaggtgcaattgttaaagttgctggtttaaaaagattgcaatttactggtagagcaagatgttttgatactgaagaagcagcttacaaagctgttaagaatagaaaatataaagacggtgatattataattattagatacgaaggaccaaaaggtggacctggtatgagagaaatgcttcaaacaactggagcaatttacggtcaaggtaaaggagaaaaagttgcacttataacagatggaagattttctggggctacaagaggtttttgtattggacatgttggaccagaagcatctgtaggtgggccaatagctttacttagaaacggagatataattgatttagatgcgaagaaggggacaattaatgttcgtttaactaaaaaagaattagctaaaagaagaaagaaatggaaaccaaagaaaattaactttggaaatggaacactttggaaatatgcacaaactgttggaccggcctatttaggtgctccaactcatccaggtggtaaaaacgaagtaaaaacttacgcagatatttaat

SEQ ID NO: 286233 - DNA, 1597 bp, Unknown
  Bacterial polypeptide expressing nucleotide sequence isolated from the Sargasso Sea
atgctgcgtggggttggatttacttctgaagatttttcaaaatcttttgtaggcattgcatcaacaggtgcaaaagttacaccgtgtaatatgcatatcaataaacttgcagaagttgttgagaattcggtaaatgtatcaggaggtaaaggcgtactttttaatactattactgtatcagacggcatatcaatgggaactcaaggcatgaaatattctcttgtatcaagagaggttatagctgattcaattgaaacagttgttggttgtttaggttatgatggcttaatcacaataggtggctgtgataagaacatgcctggctgtttgataggcatggcaagattgaaccgaccatccattttcatttatggggggtcaattaagccaagtaatgaaaaaaccgactatgtcacagtatcagaaaaggttggtgaattctccaaaggcgacattgatgaaaaagaactcattcattatgaaaaaatttcagtagaaggcccaggatcatgcggtggtatgtataccgcaaatacaatggcttcagctatcgaagctttaggaatgagtttaccaggcagcagcagtcaagatgcagtgtcaaaatctaaaaatgaagattgcattactgcaggaagagccataatgaatttgcttgaaaaagatctaaaaccttctgacattatgacaaaggaggcttttgaaaatgcaattacagttgttattgcattaggtggatcgacaaatgctgttcttcatttattagctatggctcatgctgtaggtgtcgaacttcaattggatgattttacaaaaattggaaaagtcactccggtacttgcagacctcaaaccatttggcaatcattttatgtctgagttaaatgcaaacggtggaatacagccactaatgaaaagtttattagataaaggaatgctgcatggaaattgtttgacggttactggtaattcattagaagaaaatttaaaagatatagagccgtataaagatgaaaaaataataaaaagcttagacagtccaatcaaatctgatagtcatttaagagtgttgtatgggaacttagctaaggatggtgctgttgcaaaaattacaggaaaggagggcttttcatttgaaggtaaagccaaagtatttaactcagaagaagacggagttgaggcaatccttgcaaaaaaaattaatccaggtgatgtagttgtaattagatatgaaggaccaaaaggtggcccgggcatgagagaaatgttaaagccaacatctgcaattatggggttaggtttaggagataaggttgcttttataactgatggtagattttctggaggaactcatgggtttgttgtgggtcatgtatctcctgaggcagcagatggtggccttattgctttaatcaaagatggagatactatcttgattgatgcagaaaatgatgaattaatactaaaagttgatcaagacgaaattgatctaaggaagaagaactggaagaatcccaccaatcctcctaaaaaaggagttcttgcaaagtatgctgcaagtgtaaaacctgccagtttaggagcaattactgattaat

SEQ ID NO: 286234 - DNA, 1293 bp, Unknown
  Bacterial polypeptide expressing nucleotide sequence isolated from the Sargasso Sea
aatggggcatgaaggaatgaagtcttcattgatatcaagagaagtaattgctgactcagctgaacttacagttagaggtcattgttatgatgctttagttggtatcgcagggtgcgataaatccttaccaggtctaatgatgtctatggttagattgaatgtaccaagtgtatttatatatggtggatcgatcctaccaggcaaatataaaggaaaagacgtaacagttgtagatgtatttgaggcggttggaaaacattcaacaggtcaaatgtctgctgcagaacttagaaaattagaattagttgcttgtcctagtgcaggcgcttgtggaggtcaatttactgcaaatacaatggcatgtgtatctgaagcaattggattagcgttaccttattcagcaggaacaccagctccatatgaagaaagagataaatacgcaaaagctagtggtaaaacagttatgaaccttttgaaaaaagggattaaaccaagagatattgttacaagaaaagctttagaaaatgctgcaacagttgttgctgcaactggtggatctactaatgctggattacatttaccggctattgcaaatgaagcaggaattaaatttgatttaatggatgttgctaaaatatttaaaagaacaccttatcttgcagatttaaaaccaggtggaaaatatgttgcaaaagatatgtggttagcaggtggtgttccaatgttattaaaaactttatatgaaggtggatatattcatggtgattgcatgaccgttacaggaaaaacaatgaaggaaaatttaaaaggaattaaatttaatccaaaacaaaaagtaatgagatcttataaaaatccgttatcaccaacaggaggtgttgttggtttaaaaggaaacttagcaccagaaggtgcaattgttaaagttgctggacttaaaaaattacaatttactggaaaagcaagatgctttgataatgaggaaagtgcaatgaaagctgttcaaagcagaaaatataatgatggtgatgtaattataattagatacgaaggacctgttggaggtccaggcatgagagaaatgttatcgactacaagtgcaatctacggacaaggaaaaggggagaaagtagcccttattactgatggtaggttctctggagccacaagaggcttttgtgtgggtcacgtgggccctgaggccgctctagggggtcctataggccttttacgaactggagatatcatagatatcgatgccaagaaaggaagtatcaatgtaagactttctaa

SEQ ID NO: 286235 - DNA, 948 bp, Unknown
  Bacterial polypeptide expressing nucleotide sequence isolated from the Sargasso Sea
tatggcaaaaatatctgatgacgtaacacaaggtgtaagtaaatcagctgctcgtgcaatgcttcgtgcagtaggtttaaaggatgatgattttaataaatttcaagtaggaatagtctctgcaggtaatgaagtaacaccctgtaatttaactggaccagagttatctgaacatgcaaaagtcggtcttaacggtcccgattctgctggattaattttttcaactattgcagtttcggatggaatatctatggggcacgaaggcatgagagcatctcttgtctcgagagaagttattgctgattcagtagagcttgtaatgcatgcagaacgttttgatgggatggtaacaatagctggttgtgataagtctttacctggaatgctgatggcagctggaagaataaatagacctgcaatatttctatatggtggaagtagcttaccaggcgtctataaaggaaaagatatatcaattgttgatgttttcgaaggtattggggcatatgaaaaaggaatgattacaaaagaagatttatatgaaatagagtgtgctgcatgccctggtgttggatcatgtgctgggatgttcaccgctaacacaatggcatccgttggtgaggcgattggaatgagcttacctggtactgcttcaataccagccgaggacagcaggcttcgagttgcagctgaagaatcaggaaaacaactaaattatttactaaaaaatgacatcaaaccaagagacattatgacaaaagaagctttcatcaatgcaattactactgtattagctttaggaggaagcacaaatgctgttcttcatttgcttgctattgcacatgaatcaaaaatgtctctaagtttggagacatttgacgaactaagtagaaatgtacctcatcttgctgatatgaaaccgtttgggaaatttcatatggtgactag

SEQ ID NO: 286236 - DNA, 1438 bp, Unknown
  Bacterial polypeptide expressing nucleotide sequence isolated from the Sargasso Sea
tatgaaatcatctttagtttcaagagacgtaattgcagattcaacagagctgacggttaggggacattgttatgatgctttagtagggttggcaggttgtgataaatcattaccgggattaatgatggcaatggtaagattaaatgtacctagtgtttttatttatggaggatcaattttaccaggcagattaaatggaaaagatataaccgttcaagatgttattgaaggtgttggtgaatattcatctggaagaattactgaacacgctttgagaaaattagaattgaaagcttgtcctagcgcaggtgcctgtggcggacaatttacagcaaatactatggcgtgcgtctcagaagcaattggattggcactaccttattctgctggaacaccagctccatatcaaaaaagagataaatatgcatttgatagtgggaagatggttatgaatttgttgagaaaaaaaattagaccaagagatatcgtaacgaagaaatcactagaaaatgctgcagcaattgttgcagcgactggaggatctacaaacgcagcactacatcttcctgctatcgcaaatgaaataggaataaaatttgatctgatggatgttgcaagaatatttagaaagacaccttatcttgcaaacttaaaaccaggtggattatatgtagcaaaagacatgtggaaggctggtggcataccaatgttacttaaaacaatgttggacggaggatatattcatggtgattgtttgactgtaacaggaaaaaccatgagagagaatttaaaaaacgttaaatttaataaaaaacaaaaagtcatgagaagctataacaatcctttatcaaaagatggtggtgttgtgggacttaaaggaaacctttcacctgatggtgcaattgtaaaaattgctggacttaaaaatttaaattttactgggagagcaagatgttttgacactgaggaagcagccttgaaagcagtcttaaaaaaaaaatataaaaaaggtgatgtaattgtgattagatacgagggtccaaaaggaggaccaggcatgagagaaatgttgcagacaactgctgcaatatatggacaaggaatgggagagaaagttgcactcataacggatggaagattttctggagcaactagaggtttttgtattggacacgtaggtccagaagcatcagtaggtggtccaataggattattgaaaaatggagacataattcatatagacgcaaaaaaaggaaccattaatgttgatctctcaagaaaagaattgttaaaaagaaagaaaaagtggaaacctaagagaattaattttggaaatggaacactttggaaatacgcccaaacagtcggaccagcatatcttggtgcatcaacacatccaggtggaaaagaagaagtcaagtgttacgcagatatttaa

SEQ ID NO: 286237 - DNA, 1663 bp, Unknown
  Bacterial polypeptide expressing nucleotide sequence isolated from the Sargasso Sea
tatggaaaaaatatctgatgacgtaacaaaaggagctagtaaatctgctgctagagcgatgttaagggccgttgggctggaagatgatgattttaataaatttcaagtaggagttgtttcggccggtaatgaagttactccatgtaatctgacaggtccagaattatctgaatttgctaaaaaaggcgtaaacggccctgattctgctgcattgatattctctacaattgctgtttctgatggtatttcaatgggtcatgagggaatgagagcatctttagtttctagagaagtaattgctgattcagttgaattggtaatgcatgcagaaagatttgatggaatggtgacaattgcgggatgtgataaatctcttccaggaatgttaatggctgcaggaagaattaatcgtccagcaatatttttatatggtggaagtagtttgcctggagtttacaacggaaaagatatatcaatagttgatgtttttgagggtataggtgcatttgaaaaaggaatcatctcagaagaagaactttataaaattgagtgtgcggcttgtcctggagtagggtcgtgcgcaggaatgtttactgctaacactatggcgtcagttggtgaagcaataggaatgagtttacctggtaccgctgctattccagctgaggatgcacagttacgagatgctgctgttgaatctgggaagcagctcaattatttattaaaaaataatataaaacctagtgatattatgacgcaggatgcatttactaatgctattactaccgtacttgctctcggtggaagcacaaatgccgtacttcacttattagctattgcacatgaaacaggggttgaattatcgatcgataaatttgaccaacttagtagaaatgttcctcacttagctgatatgaaaccatttggaaaatatcatatggttaatttgaatgaaataggaggagttcctgttgtgtcaaaaatacttcttgaaaataaattaattaatccggattgcatgacagttactggacaaactgttggtgagaatcttgaaaaagtacaaattccaaaaaaccaaaatgtcataagttttccagacaatccaatatcaaatgagggtggtattgcaatccttaaaggttcattaagtccaaatggatcagtcgtaaaaactgcaggaatagatattaatactttctctggacccgcaaatgtttttgattctgaacaagatgctttagatgctttgtttaataataaaatttcaaaaggagaagttgtagttattcgaaatgaaggtcctaaaggggggccaggaatgagagaaatgctacaaattactgccgcaattaaaggtgcgggattgggtaaggatgttttgctaataactgatggaagattttctggaggcactactggtttgtgtattggtcatgttgctccagaaagttttgacaaagggcctatttcagtatgtcaaaatggagatatcatcactttggatatagaaaataggtctttaaatttagagattgaaaaaaatgaatttgatgagagaataagtaaattaaaattgcctcctccaagatacaactcaggtgtactatacaaatattcaaagctagttagtggttctgatacaggtgctgttacaaattaa

SEQ ID NO: 286238 - DNA, 1203 bp, Unknown
  Bacterial polypeptide expressing nucleotide sequence isolated from the Sargasso Sea
aatgagcacaagaaaatattctaaagaactagtcgatggaccaaatcaggctgcatctcgctctatgttgcgcggtgctggattcacaactgaagatttttccaaaccttttgtaggtatcgcctcaacaggtgcgaaagtgactccttgcaatatgcatattaatgaactttcagaggttgtagaagattcagtcaattcttctggaggtaaaggcgtcttatttaatactattactgtttctgatggtatttctatgggaactcaaggaatgaaatattctcttatttcaagagaagtgattgctgactctattgaaaccgttgttgggtgtttggcatacgatggattaattactattggtggttgtgataagaatatgcccggatgtttaataggtattgctagattaaatagaccatcaatttttatttatggcggttcaataaaaccaagcaatgaaaatacagattacgtcactgtctctgaaaaagttggtgagttctctaaaggctcaataaatgagaaggaattaattcattacgaaaaaatttctgttgagggacctggatcatgtggtggaatgtatacagcaaatacaatggcctctgccattgaggctcttggaatgagtttgccaggaagcagtagccaagatgctatttcagattcaaaaaataatgactgtataaatgctggggttgcaataatgaatttattagaaaaggacattaagccctcagatattatgacaagagaagcatttgaaaatgctataactgttgtaattgctcttggaggatcaacaaatgcagttcttcatttattggctatggctcattctattggagttgatctatgtttagatgattttacaaaaattggtaagaaaacacctgttttagctgatctaaaaccatttggaaaacactatatgtcagaactaaatgcaaacggagggattcaaccactgatgaagagtctacttgataaaggattacttcacggaaaatgcattaccgtaaccggaaacactctagaagagaaccttcaagatataaagccttatgataataacgaaattattaaatcatttgaagatcctattaaagaagatagtcatttaagaatactatatggaaatctagctaaagatggagctgttgcgaagataaacaggaaggaaggtacttcttttgaagg

SEQ ID NO: 286239 - DNA, 1600 bp, Unknown
  Bacterial polypeptide expressing nucleotide sequence isolated from the Sargasso Sea
aaaaagtgatgaagattttgatcgtccatttattggtgtggccaactcgtatattgatttgattccagggcatgtccatctccaagagtttggaagtgttgcaaaaaaagcagttcgtgaagcaggaggtgtaccttttgagtttaacaccataggagtagatgatggtatagctatggggcatataggaatgcgatattcactagcaagtcgtgagttaattgctgacagtgtagagacggtagcagaatcgcatagattggatggtctaatatgtatttctaattgcgataagatagttccaggtatgcttatggcatcactccgagtaaatattcctactgtatttgtatcaggcggcccgatggaggcaggaaccaataaacgaggtgaaaaagttgacctggtttcagtttttgaaggtgtcggtaagtttaaaactgggagtattgatgaggatgatttaaaagatcttgaagaaaatgggtgccctacttgcggttcttgttcaggtatgtttacggctaattcaatgaactgtttattagaggttttaggacttgctctgcctggcaatggtacaatattagcaacagatccatccagactagaccttgttaaacaagctggcaaagcgattattgatcttgttgataaagatttaaagccacgagatattgtaaataatgattcaattagaaatgcgtttgcattggatatggcaatggggggaagtacgaatacagtgcttcatactcttgctgcatccatagaggcaggcctgtcctttgatatgaaagagatcaatgaaattagtcgtagaacaccttacttgtgcaaagttagtcctgcgactccgaatgttcatatggaggatgtgttaaaagctggtggtatatctgctattttaatggagctatcaaaacaaaatggacttttaaaactcgatcgaccaactgtgctgggagtaacattgggagagtcaatttcaggtgctaaaaattataataaagatataattagatcagttgatgaccctttttcaaaggaaggcgggttagctgttctatttggtaatattgcacctcatgggtcgatcgtaaaaactgcagcagtaaacaaagaaatgttagttcatgaaggtcctgctagaatttatgagtctcaggatgaggcaatgaaaggcatactggatggagaagtttgtgatggtgatgttgtagtaataagatatgaaggcccaaaaggagggccaggaatgcctgagatgctcgcaccaaccagtgcaataatgggtatggggctaggctccaagattgccttaataactgatggtcgattctctggaggtacgagaggagcttgtgttggccatatttctcctgaagctgctgctggtggaccgatagcagttatccagcctggtgaaatgataaaaattgatataaatgctaggtcgatagaattaaaaatacaacaatcagagatagataagagaatgaaaagtcttccagattttgaggcaaaaatacaatctggatatcttggtcgttacacaaggatggtatcatcagcaaatacaggagcagttttaatataa

SEQ ID NO: 286240 - DNA, 1331 bp, Unknown
  Bacterial polypeptide expressing nucleotide sequence isolated from the Sargasso Sea
aatgcggaagtttaataaaaaaaaattaccaagtagacatacatctctaggcccagatagagctccgcatagatctttttattatgcaatgggtgagactgaaaaagatgtgtccaaaccatttgttggcgttgtatcgacatggaatgaggctgctccatgtaacattgctttaatgagacaagctcagtcagttaaaaagggtgtaagagcctcaggaggaacaccaagagaattttgtacgattacggttacagatggtattgcaatgggtcatgaaggaatgaagtcttctttgatctcaagagaagtaattgcagatagtgctgaattaactgtaagaggtcattgttacgatgcactagtgggtatcgcaggttgcgataagtctttaccaggtttaatgatgtcaatggttagattaaacgtgccgagtgtttttatttatggaggatcaatacttccaggaaaatataaaggtaaagatgtaactgtggtagatgtttttgaagcagttggaaaacattcttcaggacaaatgtcagcaaaagaattaagaaaattagaattagttgcatgccctactgcaggtgcttgtggtggtcaatttacagctaatactatggcctgtgtatcagaagcaattggtttagcattaccttattctgcaggaaccccagctccctatgaagaaagagataaatacgcaaaagcaagtggaaaaatggtaatggaattacttgctaaaagaattaaaccaagagatatcgtcacaagaaaagcgttagaaaatgctgcaacaatagttgctgcaactggtggttcaactaatgcagcattacatttacccgcaattgcaaatgaagctggaattaaatttgatttaatggatgttgcaaaaatatttaaaaaaacaccttatcttgcagatttaaaaccaggtggaaaatatgttgcaaaagatatgtggttagcaggaggtgtaccaatgcttttaaaaactctttatgatggtggctacatacatggtgattgtatgacagtgactggcaaaacaataaaagaaaatttaaaaggaattaaatttaacctaaagcaaaaagttttaagagcttataacaaaccattatcacctgatggaggtgttgtaggattaaaaggtaatttagctccagaaggtggaatagtaaaaattgcaggactgaaaaaattacaatttacaggaaaagcaagatgttttgacaacgaagaaagcgcaatgaaagcagttcaaagtagaaaatataaagatggtgatgtaatcattattagatatgaaggtccagtagggg

SEQ ID NO: 286241 - DNA, 1351 bp, Unknown
  Bacterial polypeptide expressing nucleotide sequence isolated from the Sargasso Sea
aatgcggaagtttgataagaaaaaattaccaagcagacatacatctttaggagctgatagagcgccacatagatctttttattacgcaatgggtgaaacagaaaaagacgtttcaaaaccatttgtaggtgttgtatcaacatggaatgaggctgctccttgcaatattgctttaatgagacaagcccaatcagtaaaaaagggtgttagagcatcaggtggtacacctcgagaattttgcacaattactgtcactgatggtattgcaatgggtcatgaaggaatgaaatcttcattaatttctagagaagtgattgcagattctgcagaacttactgttagaggacactgttacgatgcattagtaggtatcgcaggttgtgataaatctttaccaggtttaatgatgtcgatggttagattaaacgttccaagtgtatttatatatggtggctcaatccttccgggtaaatataaaggtaaagatgtaactgttgttgatgtttttgaagcagttggaaaacactcttcaggtcaaatgtctgcaaaagaattaagaaaattagaattagttgcgtgtccaacagctggagcatgtggaggtcaatttactgcgaacacaatggcatgtgtttcagaagcaattggtttagcattaccttattctgcaggaactcccgctccttatgaagaaagagataagtatgcaaaaaatagcggaaaaatggtaatggaattattagctaaaaaaattaaaccaagagatatagttacaagaaaagctttagaaaatgctgcaacaattgttgctgcaacaggtggctcaacaaatgcaggattacatttacctgcaatagctaatgaagctggaataaaatttgacttaatggatgttgcaaaaatttttaaaagaactccatatcttgctgatttaaaaccaggtggaaaatatgttgctaaagacatgtggttagctggtggtgttccaatgttattaaaaactctttatgaaggtggttttattcatggtgactgtatgacagttacaggtaaaactatgaaagaaaatttaaagaaaattagatttaatccaaaacaaaaagtaatgagatcttataaaaatcctttgtcaccaactggtggtgtagttggattaaaaggaaatctagcgccagatggaggaattgttaaaattgcaggtttaaaaaaattacaatttaccggtaaagcaagatgttttgacaacgaagaaagtgcaatgaaagcagtacaaagtaaaaaatacaaagacggtgatgtaattattattagatatgagggtccagtaggcggaccaggtatgagagaaatg

SEQ ID NO: 286242 - DNA, 1271 bp, Unknown
  Bacterial polypeptide expressing nucleotide sequence isolated from the Sargasso Sea
aatggcaaaatttaataaaaaaaaattacctagtcgtcacacaaccttagggcccgataaggctcctcaaagatcattctattacgctatgaagcttactgaaaaagatgttgcaaagccatttgtaggggttgtttctacatggaatgaagctgcaccgtgcaatattgcattaatgcgtcaggctcaatctgtaaaaaaaggtgtgagtatgtctggaggaaccccaagagaattttgtaccatcacagtaactgacggtattgctatgggccacgaggggatgaaatcatctttgatatcaagagatgtgattgcagattctactgaattaacagttagaggtcattgctatgatgctttagttggtgttgctggatgtgataaatctttaccaggcttaatgatggcaatggttagactaaatgtacctagtgtttttatttatggtggatcaatccttccaggaagattaaacggaaaagatattactgttgttgacgtttttgaaggagttggcaaatatacttcaggaaaaatttcagaacatgcacttagaaaaattgaattaaaagcatgcccaactgcaggtgcatgcggtggacagtttacagctaacacaatggcctgtgtttcagaagccatcggtcttgcattaccttactctgcaggtactccggctccatttaataaaagagataaatatgctttagcaagtggtaaagctgtaatgaatcttttagctaaaaaaattagaccgagaaatatagttactaggaaatctttagagaatgcagcaacaattgttgcagccactggtggatcaacaaatgcagcactgcatcttccagctattgcaaacgaggttggtataaaatttgatttaatggatgttgcaaaaatatttaaaagaactccttatcttgcagacttaaaacctggcggaaagtatgtagctaaagatatgtggaaagctggtggtgttccaatgttacttaaaacacttatggacggaggttatattcatggtaactgcatgactgttacaggaaaaacaatgagagaaaatttaaaaaatgttaagtttaatactaaacagaaggttatgcgtaaatataataatccgttatcacctgatggcggagtagttggtatgaaaggaaatttagcacctgaaggtgctatagtgaaagttgctggtttaaaaaaattacagtttactgggagagcaagatgttttgatacagaagaggcagcttataaagctgtaa

SEQ ID NO: 286243 - DNA, 797 bp, Unknown
  Bacterial polypeptide expressing nucleotide sequence isolated from the Sargasso Sea
aatgcggaagtttgacaagaaaaaattaccaagtagacatacatctctaggagcagatagagctccacatagatctttttattatgcaatgggtgagaccgaaaaagatgtctccaaaccatttgtaggtgttgtatcaacatggaatgaagcagcgccatgtaatattgctttaatgagacaagctcagtcagttaaaaagggtgtaagagcctcaggaggaactccaagagaattttgtacgattacggtcactgatggtattgcaatgggtcacgagggaatgaaatcttcgttaatctcaagagaagtaattgcagatagtgctgaattaactgtaagaggtcattgttacgatgcattagtaggtatcgcaggttgtgataagtctttaccaggcttaatgatgtcaatggtacgattaaatgtaccaagtgtttttatttatggtggatcaatacttccaggaaaatataaaggtaaagatgtaactgtagtagatgtgttcgaagctgttggaaaacattcttcaggtcaaatgtcagcaaaagaattaagaaaattagaattagttgcatgtcctacagctggagcgtgtggaggacaatttactgcaaatacaatggcatgtgtatcagaggcaattggtttagcattaccttattcagcaggaacacctgctccctatgaagaaagagataaatatgcaaaagcaagtggaagaatggtaatggaattattagctaaaagaattaaacctagagatatcgttacaagaaaagctttagaaaatgctg

SEQ ID NO: 286244 - DNA, 1720 bp, Unknown
  Bacterial polypeptide expressing nucleotide sequence isolated from the Sargasso Sea
aatgaaaaaatttaataaaaaaaagctacctagtagacatacttctttaggacctgataaagctcctcaaagatcattttattatgctatgaacttaactgaaaaagatgttgcaaaaccatttgttggtgttgtttcaacttggaatgaggcagctccttgtaatattgcgttaatgagacaagctcagtcagttaaaaagggcgtacaatctgcaggtggtactccaagagaattttgtacaattacagtaactgacggtattgcaatgggtcatgaaggaatgaaatcttcattaatttcaagagatgtaattgcagactcaactgaattaacagttagaggacattgttatgatgcattagttggtgttgctggttgtgataaatctttaccaggattaatgatggcaatggtaaggttaaatgttcctagtgttttcatatatggaggatcaattttaccaggaagattaaatggtaaagacataactgttgtagatgtttttgaaggtgttggtaaatattcttcaggaaaaatatcagaacacgcattaagaaaaatagaattaaaggcatgtccaactgctggtgcttgtggtggtcagtttactgcaaatacaatggcatgtgtatcagaagcaatgggattagctttgccttattctgctggaactccagctccatttaatagaagagataaatacgcattagctagtggaaaagcagtaatgaatttattagcaaaaaatattagaccaagagatattgtaacaaagaaagctttagaaaatgctgcaacaattgttgctgcaacaggtggatcaacaaatgcggctttacacttaccagctattgcaaatgaaattggtattaaatttgatttaatggatgttgctagaatatttaaaagaactccttatcttgcagatttaaaacctggtggaaagtatgtagctaaagatatgtggaaagcaggtggagttcctatgttgcttaaaactttaatggatggtggatatatacacggtaattgcatgacagttacaggcaaaactatgaaagaaaatttaaagaatgttaagtttaattctaatcaaaaggttatgagaaaatataacaatccattatctccagacggaggtgttgttggaatgaaaggaaacttagctccagaaggtgcaattgttaaagttgctggtttaaaaaaattacagtttactggaagagcaagatgctttgatactgaagaagcagcttacaaagctgttaagaatagaaaatataaagacggtgatattataattattagatacgaaggaccaaaaggtggacctggtatgagggaaatgcttcaaacaactggagcaatttacggtcaaggtaaaggagaaaaagttgcacttataacagatggaagattttctggggctacaagaggtttttgtattggacatgttggaccagaagcatctgtaggtggaccaatagctttacttagaaacggagatataattgatttagatgcgaagaaggggacaattaatgttcgtttaactaaaaaagaattagctaaaagaagaaagaaatggaaaccaaagaaaattaactttggaaatggaacactttggaaatacgcacaaactgttggaccagcttatttaggtgcaccaactcatccaggtggtaaaaacgaagtaaaaacttacgcagatatttaa

SEQ ID NO: 286245 - DNA, 619 bp, Unknown
  Bacterial polypeptide expressing nucleotide sequence isolated from the Sargasso Sea
cttgaaaagttgccggacctgtcagatggacaaaaggtgttccacagtctggccgatccgatcaaggagaccggccatatccggatactgaaaggcaatttcgcccccggcggttcggtggccaagattaccggcaaggagggtcgacagttcagcggacccgcccgggtgttcgacggcgaagaagccatgctcaaatctctggaagaaggcggaattcaaaagggagacgtcatcatcatccgctacgaagggccgaaaggcggtcccgggatgcctgagatgctgacccccacctctgccattatgggcgcgggtttgggttctgatgtggctctgattaccgacggccgattttcaggaggctcccatggcttcatcatcgggcatgttgttcccgaggctcaggaaggcggaccgattggcctggtgcgtgatggagacatgattcatctcgatgccgatgccaatacgatcgacgtggatctcagtgaggaggagctgaaggcgcggcgtgatagctggacgatgccgccgtataaaacgagtcgcggtactctttacaagtacatcaagaatgtgaagacggccagcgatggttgtgtgaccgacgaataac

SEQ ID NO: 286246 - DNA, 737 bp, Unknown
  Bacterial polypeptide expressing nucleotide sequence isolated from the Sargasso Sea
tcctatgttacttaaaactcttttagatggtggatacatacacggcaactgtatgacggttactggtaaaactatgaaagaaaatctaaaaaatgttaaatttaattcaaatcaaaaagttatgagaaaatatagcaatccattatcaccaacaggtggcgttgttggaatgaaaggaaatttagctcctgaaggagcaattgtaaaagttgctggtttaaataaattaaaatttactggaagagcacgatgttttgatacagaagaggcggcttataaagctgttaaaaatagaaaatataaagacggtgatattataattattagatacgaaggaccaaaaggtggtcctggaatgagagaaatgcttcaaacaacaggagcaatttatggacaaggaaaaggagaaaaagttgcacttataactgatggaagattttctggcgccacaagaggattttgtattggtcacgtcggtccagaagcatctgtaggaggacctatagcattacttagaaatggagatgtaattgatttagatgctaaaaaaggaacaattaatgttcgtttatcaaaaaaagaattagcaaaacgtagaaaaaagtggaaaccaaagaaaattaattttggtaatggaacactttggaaatatgctcaaacagttggaccagcttatttaggtgctccaactcatccaggtggaaaaaacgaagtaaaagtatacgctgatatttaat

SEQ ID NO: 286247 - DNA, 1600 bp, Unknown
  Bacterial polypeptide expressing nucleotide sequence isolated from the Sargasso Sea
aatgcttagaggtgttggttttgagacagctgatttctcaaaaccactagttggcattgcatcgacttggtcaaaagtaacaccttgtaatatgcatatcaatgagttggctgatctcgttgagagctcaatagatgcatctggatgtaaaggagttctttttaatactattacagtatctgatgggatatctatgggtacacaaggtatgaaattttcattagtctctagggaagttattgcagattcaattgaaactgttgttggatgccttggttatgatggagttattgcaataggtgggtgtgataagaatatgccaggagcacttatgggattagcaagactgaatagaccctcaattttcatttatggaggatccattcggccaagttctataaatacagactatgtaacagtttctgaaaaagtaggcgaatatgcaaaaggggatataaccgaagatgagctcatagcaattgaaaaagtttccgttgtagggccagggtcttgtggaggtatgtatacagcaaacaccatggcatcaagtattgaagcattggggatgagtttgcctggaagcagcagtcaggatgcagtgtctaacgataaaaaagtagattgccagaatgctggggaggcaataaaacatttacttgatcttgacttaaaaccaagtgatatcatgacaaaaaaagcttttgaaaattctatagcagttgtaattgcgcttggaggatcaacaaatgctgttttacatctcattgcaattgctcattgcataggcgttgacttagatctagatgattttactaggattggaaaagtgactcctgtattagcagacattaaaccttttggtgatcactttatgtctcaattaaacgaaataggtggaattactccgatgatgaaaactatgcttgataacaatcttttgcatggagattgtatgaccgtaactggtaaaacattagaagaaaatcttaaggatttagatccatatcctagtaatcaaaagattatcatgccattgaataatcccgtaaaggattcaagtcacttaagggtgctttacggaaatttagctccagaaggagccgtagcaaaaattactggcaaagaagggactgttttcactggaaatgccagagtctttaattctgaggaagagggaatgaaagcaattcttgataagaagattaaagatggagatgttgttgttataaggtttgagggtccccaaggtggtcctggcatgagagaaatgcttaagccaacatctgcaatcatggggcagggtttgggagatagagttgcttttattactgatggaagattttcaggcggtactcatggttttgtagttggtcatataagtcctgaggcagaattaggtggccctattgctctaatagaagatggagatgagattaccattgacgcaaataaggatattttagaactcaatatttctgataatgaaatgaaaaaaagagcagatttatggaaaaatcctaattcgtccccaaaaagtggtgtactagcaaaatataaaaagactgttcaatcagcctctaaaggcgctattactgattaa

SEQ ID NO: 286248 - DNA, 1273 bp, Unknown
  Bacterial polypeptide expressing nucleotide sequence isolated from the Sargasso Sea
ttagctggttgtgataaatcattaccaggtcttatgatgtctatggttagactaaatgtaccaagtgtgtttatttatggtggatcaatattaccaggaagatttaatggtaaggatgtaactgtagtagatgttttcgaaggcgttggaaaatatacatcaaaaaaaatgactgctcatgctttaagaaaacttgaattaaaagcatgtcctagcgcaggtgcttgtggcggacagtttactgcaaacacaatggcctgtgtttcagaagcaattggattagcgttaccttattctgctggaacaccagctccatatactgaaagaaataaatatgcattagcaagtggaaaagctgtaatgaatttattagcaaaaaatattagaccaagagatattgttacaaggaagtcattagaaaatgccgcaacaattgttgctgctacaggtggatctacaaatgctggtttacatttaccggctattgcaaatgaaattggaattaaatttgatttaatggatgtagcaaaaatttttaaaagaactccttacttagctgatttaaaaccaggtggaaaatatgttgctaaagatatgtgggaagctggaggtgttccaatgttattaaaaactttaatggatggaggttttatccatggagattgtatgaccgttacgggaaaaactatgaaggaaaatttgaaaaatgttaagtttaaaacaaaccaaaaagtaatgagaaaatataataacccattatctaaaactggaggtgttgttgggttaaaaggaaatttagcacccgaaggtgggatagtaaaaattgcaggattaaaaaaattacaattcactggaaaagcaagatgctttaatacagaagaagatgcatacaaagctgttaaaaacagaaaatataaagatggtgatatcataataattagatacgaaggacctaaaggtggtcctggtatgagagaaatgcttcaaacaacagctgcaatatatggacaaggaaaaggggagaaagtagcccttataacggatggaaggttctctggggctaccagaggcttctgtataggtcatgtgggtcccgaggcctctgtaggcggtcctatagcccttttaaggaacggagatgttatcgatattgatgctaaaaaaggaactatccatgtcagactttctaaaaaagaattaaatgcaagaagaaaaaaatggaaaaccaaagaaaatgaatttttggtaacggtacattatggaaatatgcaca

SEQ ID NO: 286249 - DNA, 1045 bp, Unknown
  Bacterial polypeptide expressing nucleotide sequence isolated from the Sargasso Sea
aatgttacgaggagcaggtttcacggatgaggattttgagaaatccattgttgggattgcttcgctaggagcaagtgtaactccatgcaatatgcatctaaactcccttgcagaaattgttgaaggttcagttaataattcaggatgtaaggctgtaacatttaacacaattactgtctctgatggaatttctatgggtacggagggcatgaaatattccctcgtttcaagagaagtcatagctgactctatagaaactgttgtaggttgtttgggctatgatggagtagtaggcattgggggctgcgataaaaatatgccaggtgtaatcattggtttggcaagacttaatagaccatctttatttatttatggtggctctattagacctagcgagcaaaatactgattatgtgacagtctgtgaaaaaactggagagttctcaaaaggctcaatctctgaagaggaattaatctctgttgaaaaggtttcagttgttgggcctggatcgtgcggaggtatgtatacagctaatacgatggcgtctgcaattgaagctcttggaatgtctcttcctggaagtagcagtcaggatgcagtttctgatgataagaagaatgattgtataaatacagggagtgcaattaggaatcttcttgaaaaagatattaaaccttctgacattatgacaaaggaggcattcgaaaatgcaatcacggtagttattgcacttggaggatcaacgaatgcagtacttcatcttattgcgatggcgcatgctataaatgttgatttagatttagatgactttacaagaataggtaaaagagttcctgttgtagctgacattaaaccatttggtaaaaattacatgtcctcactaaatgaagttggtggcattcagccactaatgaaaatgttacttgatgcagacttacttcatggcgactgtttaactgtttcaggaaaaactatttcagaaaatctttcagaagttgatccatatccgaaaaatcagacaattattagagaaatatctaatcca

SEQ ID NO: 286250 - DNA, 1345 bp, Unknown
  Bacterial polypeptide expressing nucleotide sequence isolated from the Sargasso Sea
gtgggcggtcaaggatttgatggcttagtgaccataggaggttgcgataagaatatgccagcttgtttaatggccatggctagattaaataggccttcagtttttgtttacggaggcagtataaaaccagggaagggaagaacggatgtaatatctgttttcgaggccgttgggaaacattcgaaaggggatatttctgacatagaattattggaaattgaatcaagtgcaattcccggtccaggttcttgtggaggtatgtacacggcaaatactatggcttcagcaatagaagctatgggtatgagtttaccaaatagttctgcccaagaagctacttctaaaataaagctacaagattccatggaagcaggaaaggcagtaagcaacttaattaatcttgatctcaagcctagagatattatgacaaaagaagcttttgaaaatgcaatatccgtggtgattgcacttggtggttctacaaacgcagtattacatttaattgctatagcccatgaagctaaagttgatctctctctggatgattttgaaagactaggtaaaagaacaccagtgctagctgacttaaaacctagtgggacttatttgatgtctgaattaattgaaatcggaggcattgttcctcttatgcaaaagatgcttgagaaggaacttctatatggagatcagatgacagttacgggcaagaccttagaagaaaatcttagtgattcaaaaaattatcccgaagatcaaacaatagttaagaattttgataatccaattaagaatgatagccacttacgtattctttatggcaatttagctcctgaaggtgctgtggcgaagatctccggaaaagaaggattgaaatttgaaggaaaagctagagtatttgattctgaggaaactgctatggaagggataatgaaaggcaaaataaatgaaggggatgtattaataattagatacgaaggccctaagggaggaccaggtatgagagaaatgttaggacccacatccgcgatcatgggaaaaggattaggggataaagttgctttcttaaccgatggaaggttttctggtggtactcatggatttgtggttggtcatatttctccagaagcctatgaaggaggacctctagcgttggttagggatggtgactccataaatattgacgcgcactctaaccaaatcaacattgctatttcagataaagagataaaagaaaggagagaagcttgggagtgccctaaaaaaaatcaagaaacgggtgttttgggaaaatatagatccttagtgacttcagcttcgcaaggggcagtaactaccaaaaattaat

SEQ ID NO: 286251 - DNA, 772 bp, Unknown
  Bacterial polypeptide expressing nucleotide sequence isolated from the Sargasso Sea
tatgcctgattacagatcaaaaacatcgacacatggaagaaatatggcaggtgcaagagccctatggcgagcaactggtatgggtgatgatgattttggtaaaccaatcattgctattgctaattcttttactcaatttgtaccgggtcatgtacaccttaaagaccttggtcaaatggttgcaagagaaattgaaaagtcaggtggagttgcaaaagagttcagtaccattgcggtggatgacggaatagcaatgggccattcagggatgctatatagcttaccatctcgtgaattgatagcagatgcagtggaatatatggttaatgctcactgtgcagatgcactggtctgcctttctaattgcgataagattacacccggaatgctgatggcaacaatgcgtctgaatgtaccgaccatttttgtctcaggtggaccaatggaggcaggcaaaggtttagtaaaaggccaagaggctagcctggatttagttgatgccatggtacttgctgcagatccaagtatatccgatgaagatgttgcaaaagttgagagatccgcttgtcccacttgtggttcatgctctggcatgttcactgccaattccatgaattgcttggttgaggctcttgggctagggcttccagggaatggaagtgtgcttgcaacacatattgatcgtaaagagcttttcttaagagctgggaaaattattgttgagttaaccaaacaatactatgaaaaagatgatgaaagtgttcttcccaag

SEQ ID NO: 286252 - DNA, 1018 bp, Unknown
  Bacterial polypeptide expressing nucleotide sequence isolated from the Sargasso Sea
atgcttcgttccgacgccgtcactaaggggatccagcgttcccccaaccgcgccatgctccgtgcggtgggattcggagatgaggacttcggcaagccgattctcgggatcgccaacggctacagcacgatcacaccctgcaatgtcgggttgaacgacctgtcccggcgcgctgaagaggctgcccgtcaggccggcggcatgccacagatgttcggaaccatcacggtgagtgatggcatctccatgggcacagaagggatgaagtactccctggtaagccgtgaggtgatcgccgatgcgattgaaaccgcctgcaatggccagagcatggatggcgtgctggcggtgggcggctgcgacaagaacatgcccggcgccatgttggccatggcgcggatgaacattccggctgtgttcgtttacggcggcacgatcaagccggggaaactcggcggctgtgatctcaccgtggtcagcgcctttgaggcagttggccagctcaccagcggcaacatcgacgaagaccagctcaccgctgtcgaaaagaacgcttgcccaggagccggcagctgcggcggcatgttcaccgccaacacgatgagtgcagccatcgaaacgatggggttgagcctgccctacagctcaacgatggcggcagaagacgaagagaaggccgacagtgccgctcgttcagcagaggtgttgttggacgcggtgaaggccaacattcgacccttggatctgctcaccaaggaagcattcgagaacgccatcagcgtgatcatggcggtgggtggatccacgaacgccgtgctgcacctgctggcgatcgcccgtacggctggggtctccctcagcatcgacgacttcgagcggatccgtcagcgcgtgccggtgatctgtgacctcaagccgagcggccgctacgtgacggtggatctccacaacgctggcgggatcccccaggtgatgaaactgctgctcgatgccgggctgctgcatggcgattgccgca

SEQ ID NO: 286253 - DNA, 1068 bp, Unknown
  Bacterial polypeptide expressing nucleotide sequence isolated from the Sargasso Sea
atccaatgatacatataagcagatagttcaaaaagcttgtcccggccctggctcttgtggaggtatgtatacagcaaatactatggcttctgcattggaggctatgggcatgtctttgccttatagtgcttcatatttagccacatcatctgataaggcagaagaatgtaagaacctgggaaaatatgtaaggaggttattggaaaaagatataagaccaagagatatagtaactaagaaatcactggaaaatgctgtttgtgttgcagttgcacttggaggttcaacgaatcttgttctgcacatattggcaatagccagagcattggaagttgattttagtttagaagatatacaaagggtcaatgatagaacgcctcttcttggaaatttgaagccaagtggaaaatatctgatggaagacctaacagaggttgggggtgtgccggcagtaatgaaacttctctatgaaagggggtatttacatggagagtgtctaactgttaccggaaaaacattggctgaaaaccttaaaggggttaaggcacttgctgatgggcaggatgttgtaaatgatcctaaagtcccattaaaaccagaggggcacttaaatatactttatggtaaccttgcccctaaagggtcagtcgcaaaaataactggtaaagagggtgagacttttaaaggaaatgcaagggtcttcaattctgaagatgatgctgtagaggctataaagaatctttcaataaaagagggtgatgttgttgttataaggtatgtaggcccaaagggagggccgggcatgccggaaatgttaaagccaacttctgctttaatgggagttggtcttggaggtaaagtagccttgttgactgatgggcgattctcaggaggaagtcatggctttgtagtagggcatataagtcctgaggcaatggaaggaggtcctcttgcttttgttgaaaatggagatgagataagtgttgatgctaagacaaaagaaataaatcttgaaatagatgataatgaacttgtgaaaagaaaagaaagctggggaaaaaccccaaa

SEQ ID NO: 286254 - DNA, 1453 bp, Unknown
  Bacterial polypeptide expressing nucleotide sequence isolated from the Sargasso Sea
gatgggccatgaaggtatgaaatcatcattaatttcaagagatgtaattgcagattcaacagaattaactgtaagaggtcattgttatgatgcattagttggtgttgcaggatgtgataaatcgctaccaggtctaatgatggcaatggtaaggttgaatgtaccaagtgtttttatttatggcggatctattttgcctggaagatttaatggtaaagacgtaactgtagttgacgtatttgaaggtgtaggaaaatattcttcaggtaaaatgtcggcacacgcattacgaaaacttgaattaaaagcttgtccaagttcaggagcttgtggtggacaatttacagcaaatactatggcatgtgtttcagaagcaattggactagcattaccttattcagcaggaacaccagctccttatgagcaaagagataagtacgcaatgttaagtggaaaagctgtaatgaacttacttaagaaaaaaatcagacctagagatatagttacaagaaaagctttagaaaatgcagctacaatagttgcagccacaggtggttcaacaaacgcagcattacatttaccagcaattgcaaatgaagtaggtattaaatttgatttaatggatgttgcaaaaatttttaaaaaaactccttatcttgctgatcttaaaccaggtggaagatatgttgcaaaagatatgtggcaagcaggaggagtaccaatgttattaaaaactttaatggatggtggatacatacatggagattgtttaactgtaactggtaaaacaatgagagaaaatttaaaaaaagttaaatttaatttaaaacaaaaggtaatgagaaaacataataatcctttatctccagatggaggtgtagttggattaaaaggaaacttagcacccgaaggtgcaattgttaaagttgcaggtcttaaaaaattacaatttacaggaatagcaagatgttttgatactgaggaagctgcatttaaagctgttcaaaaaaaacaatacaaagatggcgacatcataattattagatacgaaggaccaagaggtggaccaggtatgagagaaatgcttcaaacaactggagctatttacggtcaaggaaaaggtgaaaaagttgcacttataactgacggtaggttctctggagccacaagaggcttttgtatcggtcatgtaggtcctgaggcctctataggcggcccaatagctcttttacgtaatggtgatgtaattgatatagatgctaaaaaaggaactattaacgtaagattatcaaaaaaagaactatcaaaaagaaagaaaaaatggaaaccaaagaaaattaactttggtaatggaactctatggaaatatgcacaaactgttggacctgcatatttaggagcgccaacacatccaggagcaaaaaacgaagtaaaagtttacgctgatatttaa

SEQ ID NO: 286255 - DNA, 1468 bp, Unknown
  Bacterial polypeptide expressing nucleotide sequence isolated from the Sargasso Sea
atgaagaaatttaataagaagaaattaccaagtagacacacatctttaggacctgacaaggctccacaaagatctttttattatgcaatggatttgaccgaaaaagatgtggcaaaaccttttgtaggtgttgtttcaacatggaacgaggcagctccttgtaatattgctttaatgagacaagctcaatcagttaaaaaaggagttcatcaagcaggcggtacaccaagagaattttgtacaattacagttacagatggaatagctatgggtcatgaaggaatgaaatcttcattgatttcacgagatgtaattgcagactcaactgaattaactgttagagggcattgttatgacgctttagttggcgttgcaggatgtgataaatctttaccaggcttaatgatggcaatggttagattaaatgtaccaagtgtttttatttatggtggttcaatattaccgggcagatttaatggaaaagatgtaacagttgttgatgtgtttgaaggagttggaaaattttcttcaggaaaaatgtcagcacatgcattgagaaaattagaacttaaagcttgcccaagtgctggagcttgtggcggacaatttacagcaaatacaatggcatgtgtgtctgaggcaataggattagcattaccatattcagctggaacaccagcgccatacacacaaagagactcttatgctttaaaaagtggcaaggcagtaatgaatttattggcaaaaaatatcagaccaagagatattgttacaaaaaaatctttagaaaatgcagcaacaattgttgccgcaacaggtggttcaactaatgctgctttacatttacctgcacttgctaatgaagcaggaattaaatttgatttaatggatgttgcaagaatatttaagaaaacaccttatcttgcagacttaaaacctggtggaaaatatgttgcaaaagatatgtggaaagcaggtggagttccaatgcttttaaaaactttattagatggtggctacatacacggagattgtatgacagttacaggtaaaacaatgagacaaaatttaaaaaacgttaagtttaataaaaatcaaaaagttatgagaacacacaaccaacccttgtctcctgatggaggtgttgttggtttaaaaggaaatttagcacctgatggagcaattgttaaagttgctggattaaagaaattacaattcacaggtaaagcaagatgttttgatactgaagaggctgcttataaagcagtaaaaaataaaaaatataaagacggtgacattataattataagatacgagggacctaaaggtggtccaggcatgagagaaatgcttcaaacaactggagcaatttacggacaaggtaaaggtgaaaaagttgctcttattactgatggaagattttcaggcgcaacgagaggattttgtataggctcatgtaggacctgaa

SEQ ID NO: 286256 - DNA, 454 bp, Unknown
  Bacterial polypeptide expressing nucleotide sequence isolated from the Sargasso Sea
tgttaaaaacagaaagtataaagatggtgatattattataattagatacgaaggacctaaaggtggtcctggcatgagagagatgcttcaaacaacagctgcaatatacggacagggaaaaggggagaaagtagcccttataacggatggaaggttctctggggctaccagaggcttctgtataggtcatgtgggtcctgaggcttctgtaggcggtcctatagcccttttaaggaacggagatgttatcgatattgatgctaaaaaaggaaccatcaatgtcagactttctaaaaaagaattaagtgcaagaagaaaaaaatggaaaccaaagaaaatgaattttggtaacggtacattatggaaatatgcacaaacggttggtcctgcctataaaggagctccaacacatcctggtggaaaaaacgaggttagaacttacgctgatatttaa

SEQ ID NO: 286257 - DNA, 1513 bp, Unknown
  Bacterial polypeptide expressing nucleotide sequence isolated from the Sargasso Sea
agccctaaaagctgaagagtcaataagagaagcagggggaatgcctcagatgttcggaaccatcaccgtaagtgatggaatctctatgggaacagaggggatgaaatattccctagtttcaagagaagttatagctgattcaatcgaaacagcatgcaatgcgcaaagtatggatggggttttagctattggaggttgtgataaaaatatgccaggagcaatgattgcaattgcaagaatgaatatcccatccatatttatttatggagggacaataaaacctggcaaattaaatggtgaggatcttacagttgtcagtgcatttgaagctgttgggcaattaacttctgggaaaataaatgaaaagagattaattgaagttgaaaaaaattgtatcccaggagctggaagttgtggcggaatgtttacagctaacactatgtctgccgttatagaagtcttgggtttaagtcttccgtatagttcaacaatggcagctgaagattacgagaaggaagttagcgctgaaaaaagtgctgaaatattagttgatgcaattagaaaagacattagacctttaactctcatgactaaagaatcatttgagaatgcaatatctgtcattatggcaattggaggttcaactaatgccgttctccatatattagcaatagcaaatacagcaggcatagatatcaatattgatgatttcgaaagaataagacaaaaagtacctgtaatttgcgacttaaaacccagcggtaaatacgtaacagtcgatcttcataaagcaggtggaatcccacaagttatgaaaatacttctaaacgcaggtttaatacatggtaattgtagaaacatagagggtaaaacaatagttgaatccttaaaagatattccagataaacctccagagaatcaggatgtcattcgagatattgataatccgctttataaaaaaggtcacttagcgattctaaaaggtaacttagcctcggaaggttgtgtagccaaaattagtggaataaagaatcctgtattaaaaggacctgctcgcatttttgagagtgaggaggattgtctcaaatcaattttgaataatgatattaaagctggtaatgttgttgtcataagaaatgaaggtcctgtgggcggaccagggatgagagaaatgttggcaccaacatcggcaattgttgggcaaggcctgggagaaaaagtagctctaataactgatggtagatttagtggaggcacctatggcctagttgttggtcatattgcgccagaggcagcagttggaggaaatatagcgttaataaaagaaggggatttaataactgttgatgcgataaaccaattaatcgaagttgaactatctgatgaggaattagaaataagaagaattaactgggaaaagcctagtaaaaaatataaaaaaggagttctttctaaatatgcaagaattgttagcacctcaagcctaggagccgttacagatttggaagaataa

SEQ ID NO: 286258 - DNA, 470 bp, Unknown
  Bacterial polypeptide expressing nucleotide sequence isolated from the Sargasso Sea
atcttttgagggaaaagccaaagtcttcaactcagaagaagagggtgttgaagcgattttatctaattcaataaaagatggtgatgtcattgtaattagatatgagggaccgaaaggcggaccaggaatgcgagaaatgttaaaaccaacgtctgcaattatgggattaggtttaggagaaaaagttgcatttattactgatggtagattttctggagggactcatggctttgtggtcgggcatatttctcccgaagctgcagatgggggcttgatagctatgattgaagatggagataaaattttaatagacgcagaaaatgatcagttaattctaaaggtggatgatgaagagattaatagaagagaatctaactggaaaaatcctatcaaaaaacctaaaaaaggcgtgcttgctaaatatgcaaaaagtgtaaaatcagcaagtttaggagccataacagattaag

SEQ ID NO: 286259 - DNA, 526 bp, Unknown
  Bacterial polypeptide expressing nucleotide sequence isolated from the Sargasso Sea
ctgggattaaaaaaattacaatttacaggaagagcaagatgttttgatactgaagagtctgcttataaagctgttaagaataaaaaatataaagacggagacataattattattagatacgaaggtccaaaaggtggtcctggtatgagagaaatgttacagacaactggtgcaatttacggtcaaggaaaaggagagaaggtagcacttattactgatggtagattttcaggtgcaacaagaggtttttgtattggtcatgttggtccagaagcatctgttggaggaccaattgcattacttagaaacggagatgtaatagacattgatgctaaaaaaggaactattaatgttagattgtccaaaaaagaattgcaaaaaagacgtaaaaaatggagacctaaaaagattaactttggtaatggaactctatggaagtatgcacaaactgttggaccagcatatttaggagcaccaacacatcctggtggtaaaaacgaggttaaagtatacgctgatatttaat

SEQ ID NO: 286260 - DNA, 920 bp, Unknown
  Bacterial polypeptide expressing nucleotide sequence isolated from the Sargasso Sea
tatgcctgactacagatctaaaacatcgacgcatggaagaaacatggcaggagcgagagctctctggcgagcaaccggcatgggcgatgatgattttggtaaacctatcatcgccatagcaaattctttcactcagtttgttccaggccatgtccatctcaaggatcttggtcaaatggttgccagagagattgaaaaatcaggcggggttgcaaaagaattcagcactattgcggttgatgatggaatcgcgatgggccactcgggaatgctttatagcttaccctcacgagagttaatagcggatgcagttgaatatatggcaaatgctcactgtgcagatgcacttgtgtgcctttcgaattgcgacaaaattacacccgggatgttgatggcaacaatgcgtctgaatataccaaccatttttgtatccggaggcccaatggaggcaggcaaaggtttgataaaaggtcaagaagcgagtctagatttaattgatgcgatggttttagccggggatccaagtgtttcagatgaagaggttgaaaaaattgaaagatctgcgtgcccaacttgcggttcttgttccgggatgttcactgcaaattccatgaattgtttggttgaagctcttgggcttgctctgcctggcaatggaagcgtactggcaactcatattgatcgcaaagaacttttcttaaaagctggaagaattattgtagaactcacaaaacaatactatgagaaagacgatgagagtgtacttcctagaaacatcgcaaatttaaaatcatttgaaaatgccatgaccttggatattgccatgggaggctctaccaatactgtgcttcacattctcgctgccgaaaaagagggtgagcttgattttggaatggatgacatagatcgcctgtccagaa

SEQ ID NO: 286261 - DNA, 649 bp, Unknown
  Bacterial polypeptide expressing nucleotide sequence isolated from the Sargasso Sea
tgtattacagttacaggcaaaacattggctgaaaatcttaaagatgttgagccttataataataatgaaattattagagattttgacaagccaattaaagaagatagtcatttaagaatcctatatggcaacttagctcaagaaggagcagtagcaaaaataacaggaaaagaaggaacgtctttcgaaggtaaagcaagagtatttaactcagaagaagaaggagtcaaagcaattttatcaaactctataaatgaaggtgatgtaattgttattcgatatgagggaccaaagggtgggccaggtatgagggaaatgcttaagccaacttcagcgattatgggcttaggtttaggcgataaagttgcatttataactgatggtagattttctggaggaacccatggttttgtagttggacatatttctcctgaagcagctgatggaggtttgatagctatgattgaagatggtgatcaaattttgattgatgcaaaaaatgatcaattagttttaaaggtcgatgatcatgagattaagcaaagaaaatcaaattggaagaatccaatcaaaaaaccaaaaaaaggagtgcttgcaaaatatgcaaaaagtgtaaaatcggcaagcttgggagctattacagattaat

SEQ ID NO: 286262 - DNA, 1210 bp, Unknown
  Bacterial polypeptide expressing nucleotide sequence isolated from the Sargasso Sea
gataaggcacctcaaagatctttttattatgcaatgaaattgacagaaaaagatgttgcaaaaccttttgttggagtagtttcaacatggaatgaggcagcaccttgtaacattgctttaatgagacaggctcaatctgttaaaaaaggtgttaaatcatctggaggaacaccaagagaattttgtacaatcactgtcactgatggtattgcaatgggacatgaaggaatgaaatcttcattagtttctcgtgatgttattgctgattcaactgagcttactgtaagaggccattgttacgatgctctagttggtgttgcaggttgtgataaatctttacctggtttgatgatggcgatggttagattaaatgtgcctagtgtatttatttatggaggttctatactccctggaagatttaatggtaaggatgtaaccgttgtagatgtttttgaaggagtaggaaaatattcttcaggacaaatgaatgcacatgctttaagaaaattagaattaaaagcttgtccaagtgctggtgcttgtggaggtcaatttacagcaaatactatggcatgcgtttcagaggcaatgggattagcattaccttattcagctggaactccagcaccctacgaacaaagagataaatttgcattacaaagtggaaaagctgtaatgaatttattagcaaaaaatattagaccaagagatattgtaactagaaaagctttagaaaacgcggcaacgattgttgcagcaaccggaggatcaactaatgcagcattacatttaccagctattgcaaatgaaataggaattaaatttgatttaatggatgttgctaaaatttttaaaagaactccttatcttgcagatttaaaaccaggtggaagatatgttgcaaaagatatgtggctagcaggcggtgtaccaatgttattaagaacactgttagacggtggatatatccatggtgactgtatgactgttactggaaaaactatgagacaaaatcttaaaaatattaaatttaatccaaaacaaaaagttatgagaaaatataacaatccactttctaacgatggtggtgttgtaggtttaaaaggaaatcttgcaccagaaggagcgattgtaaaagttgctggattaaaaaaattacaatttacaggaagagcaagatgttttgatacagaggagtctgcttataaag

SEQ ID NO: 286263 - DNA, 967 bp, Unknown
  Bacterial polypeptide expressing nucleotide sequence isolated from the Sargasso Sea
atgctgcgtggtgttggctttacaactgaagacttttcaaagcctttcattggcattgcttcaactggtgctaaggttaccccatgtaatatgcatctaaatcaattgtctgaagttgttgaaagttctgttaattcatctggaggaaaaggagttctttttaacacaattactgtatcagatgggatatcgatgggaactcaaggaatgaaatactctctagtttcaagagaggttatagcagattcaattgagacagtagtgggttgtctcgcctacgatggattaataactgtcggaggttgtgataaaaatatgccaggatgtttgattggtatggctagattaaatagaccatctatatttatttatggaggatctattaaacccagtgatgagaatacagattatgtaactgttttagaaaaagttggtgaattttcaaagggtaaaattgatgaggaacaattaattcattatgagaaagtatctgtggatggtcctggatcatgcggtggaatgtatacagcaaatacaatggcatcttcaattgaagcacttggtatgagcttgccaggtagtagcagtcaagatgctgtttctgattcaaaaaaggacgattgtctaaatgcaggaaatgcaattatgaatttacttgagagggatataaaaccctcagatattatgactagagaagcttttgaaaatgcaatcactgttgttattgctttaggcggatctactaatgcagttttacatttattagcaatagctcattcaataggggttgatttatgcttggatgattttacggaaataggtaaaagaactcctgttttagcaaatttaaaaccttttggtgatcactatatgtcagaactaaatgctaatggtgggattccaccaatgatgaagactctcttagataaaggtttacttaatggtatatgcatgacagttaccggta

SEQ ID NO: 286264 - DNA, 1249 bp, Unknown
  Bacterial polypeptide expressing nucleotide sequence isolated from the Sargasso Sea
aatgaaaaaatttaataaaaagaaattacctagtagacacacaacaattggtgcagataaagcccctcaaagatcattttattacgcaatggatttaaccgaaaaagatgtagcaaaaccatttgttggtgttgtttcaacatggaatgaagcagctccttgtaacattaatttaatgaaacaagctcaatcagttaaaaaaggagttaaagcttcaggtggaactccaagagaattttgtactattacagtaactgatggtattgcgatgggtcatgagggaatgaagtcatcattaatatcaagagatgtgatagcagactcaactgaacttacggttagaggacattgttatgatgcattagttggattagcgggctgtgataaatcattacctggtttaatgatgtcgatggtacgtttaaacattccaagtgtatttatatatggtggatcaattcttcctgggagatttaatggaaaagatgtaactgttgtagatgtatttgaaggagttggaaaatatacttcaaagaaaatgacagctcatgcattaagaaaattagaattaaaagcatgtccaagtgcaggtgcttgtggtggacaatttactgcaaacacaatggcatgtgtttctgaagcaataggattagctttaccattctcagcaggaacgccagcaccatatttagaaagaaataaatatgcaatagacagcggtaaagctgtaatgaatttattagcaaaaaatattagacctagagatatagttacaagaaaagctctcgaaaatgcagcaacaattgttgcagcaacaggtggttctacaaatgcaggtttacacttgccagctatcgcaaatgaaattggaattaaatttgatttaatggatgttgcaaaaatatttaagaaaactccttatcttgcagatttaaaacctggtggaaaatatgttgctaaagatatgtgggaagcaggaggagttccaatgttattaaaaactctaatggatggtggttacattcacggagactgtatgacagttacaggtaaaacaatgagagaaaatttaaaaaatgttaaatttagaactaatcaaaaagtaatgagatcttataaaaatcctatttcaccaacaggaggagttgttggattaaaaggaaatttagctccagaaggtggaattgtaaaaatagccggtttaaaaaaattacaatttacaggaagagccagatgttttgataaatga

SEQ ID NO: 286265 - DNA, 1675 bp, Unknown
  Bacterial polypeptide expressing nucleotide sequence isolated from the Sargasso Sea
atgtcaaagggcaatagaaaatattcttcaaaaatagttgacggtgtcgagcaggctccttcaagagctatgttaagagctgtaggttttgaaaatgaagattttaacaaaccacaagtaggagttgcttccacttggagtatggttactccttgcaatatgcatattgataagttagcagattccacagttaaaggtgtaaacgaatctggttctaaaggtatcatttttaatacaattaccgtttcagatggaatttcaatgggaactcaaggcatgaggttttcgttagtttctcgcgaagtaatagctgattcgatagaaactgtagtaagtggtcaaggatttgatggcttggtgactatagggggatgtgataagaatatgcctgcctgcttaatggctatggctagattgaatagaccttccatttttgtttacggcggtagtatcaaaccaggaaaaggtagaacggacgtgatatcagtttttgaagctgtagggaaacactcagaaggtgtaatctctgatattgaattacttgatattgaatcaagtgcaatccctggtccaggttcttgcggaggtatgtatacagcaaataccatggcctcagcaatagaagctatgggcatgagtttaccaaatagttctgcgcaagaagcgacttcaaagacaaagttactagattctttggaagcaggaaaggcagtaagtaatttaattaatcttgatctcaagccaagagatattatgacaaaagaagctttcgaaaatgctatatctatggtcattgcacttggaggatccacaaatgcagtactgcatctaattgctatagcgcatgaagcaaagataaatatttctttggatgactttgagagattaggcaagagaattcctgtattagctgatctaaaaccaagtggccattacttaatgtctgaactgattgagattggaggtattgttccattgatgcgaaagatgcttgagaaagaacttctatatggagatcaaattacagttacgggtaaaacactagaagaaaatcttagtgactctacaaattatcctgaaggtcaagaaataattaaggacttcaaaagtccaattaagaaagacagccatctacgtattctttatggcaatttagctcctgaaggagcagttgcaaaaatttctggaaaagaaggacttacatttgatggcaaagcaagagtatttgattctgaagaaactgctatggaaggaatactgaaagggcaaataaatgaaggtgatgtattaataataagatacgaaggtcctaagggagggcctggtatgagagaaatgttaggacctacttctgcgataatgggaaaagggttaggagataaggttgcatttctaactgatggaagattctccggcgggactcatggatttgttgtcggtcatatttctccagaagcatacgaaggaggacctttagcattagttagggatggagattctataaaaattgatgcaaggtctaaccagatcaatgtctctattacggataaagaaatgaaagaaagaagagaatcttggaaacttccaaaaaagaatgaagagacaggtgtattaggaaaatatagatctttagtgtcttcagcctctcaaggtgctgtaacaactaggaattaat

SEQ ID NO: 286266 - DNA, 1218 bp, Unknown
  Bacterial polypeptide expressing nucleotide sequence isolated from the Sargasso Sea
aatgtctaaaattgataaaaaaaaattaccaagtcgccatacttcactaggaccagatagggctcctcacagatcgttttattatgcaatgggtgaaaccgaacaggatgtggcgaagccttttgtaggagtagtatccacttggaacgaagccgcaccttgcaacacagctttaatgcgacaggcacagtcagttaaaaaaggagtaaaagagtctggtggaacgccaagagaattttgtacgataactgtaacagacggtattgccatgggtcatgaaggtatgaaatcatctttaatctcaagagaagtcatagctgactcagcagaactgacagtgagaggacattgttatgatgcattagttggtatcgctggatgtgataaatctcttccaggcttgatgatgtctatgttgagattgaatgtacctagtgtgtttatttacggtggatcaattttgccaggaaaatttaaaggtaaagatgttacagttgtagatgtgtttgaagcagtaggcaaacattcctcaggtaaaatgtcttctgaagaattaagagaattagaattagtagcttgtccaagtgctggggcttgcggaggtcaatttacagctaacacaatggcgtgtgtatctgaagcgataggattggccttaccttattcagctgggacgccagcaccttatgaggaaagagataaatatgcttatgagagtggccaagctgtaatgaatttattagaaaaaaaaattaaaccaagagaaatagtcactaaaaaatctttagaaaatgcagcaacaattgtggctgcaactggaggctctactaatgcagcccttcatttacctgcacttgctaatgagataggagtaaaatttgatttaatggacgttgcaaaaatattcaaaaaaaccccttatcttgctgatttaaaacctggaggaaaatatgttgcaaaagacatgtgggaagctggcggcgttcctatgttattaaaaactttatatgacggaggatatattcacggtgagtgtttgacagttacaggtaaaactatgaaggaaaatttagccaatattaagtttaatactaatcaaaaagttttaagagaatataataaacctctttctccagatggtggagttgttggattaaaaggtaatttagctccagacggagcaatcgtaaaaattgcaggattaaaaaaattacaatt

SEQ ID NO: 286267 - DNA, 852 bp, Unknown
  Bacterial polypeptide expressing nucleotide sequence isolated from the Sargasso Sea
ttttacattttcttgcaattgcaaaagctgctaatatagatgtttcaattgattattttcaaaaaattagtgactcaactccttttcttgcaaacttaaagccaagtggaaaatatttaatgaaagatttacatgaaataggtgggataccaagtgtcttaaaatatatgcttgaaaataaaatgttatatggggattgtttaaccgtaacaggtaaaactattaaagagaacttatcagatgtaaaaagtctagacttctctaatgatgttattttccctttatctaaacctattaaggaaaccggacacattcaaatattaaaaggaaatcttgcaaaagaaggttcagttgcaaaaattactggaaaggaaggattagttttttcaggtcctgcaaaagtatttaatagcgaatttgaaacgatagatgcaatccaaaattcaaaagttaacaagggtgaagtagtagttatcagatacgaaggacctaaaggtggtcctggaatgcctgaaatgctcaaaccaacatcagctataatgggggcaggcttaggaaacgacgttgctttaattacagatggaagattctctggaggaactcatggttttgtagttggacatattgtccctgaagcttttgaaggaggaacaattgcattagtagaagatggagatattataacaattgattcaaaaaataatgttattagtgttgatatttctgataatgagataggagaaagaagaaaaaaatggaaaaaaccagatttaaaaataaatcaaggaattttatataaatatgttaaatcagtttcaaatgcatctaagggatgtgtaacagatgagtaaa

SEQ ID NO: 286268 - DNA, 869 bp, Unknown
  Bacterial polypeptide expressing nucleotide sequence isolated from the Sargasso Sea
tcttggaggaagtacaaatgcagtattgcacttgctggctattgcttatgaagcaaaagttgatttgactatcgatgtatttgatgaacttgcaagaaaagttccacaccttgcagatatgaaaccatttggaaaatatcatatggttgaccttgataagatcggcggagtacctgttgtgtcaaaaatactccttgagaataaattaatagatccaaattgtatgacggtgactggaaaaacagtcggagaaaatttagaggatattgaagtacctaaagatcaagatgttgtttattttccggataatccaatttcaaaagagggaggtctagcaatattaagagggtctctatcacctaatggatcagttgtaaaagttgcaggtatagaaattgatacattcaaagggccagcgaatgtttttgacagtgagcaagaggcattggatgctctttttaataacaaaattaagaaaggagaggttgttgtaattagaaatgaagggccaaaaggtgggcctggaatgagagagatgttacaaataactgccgcgatgaaaggagcaggtctaggtaaagacgtattacttatcacagacggcagattctctggggggacgacgggtttatgcattggacatgttactcctgaaagtttcgataatggaccgattgcaatttgtgaaactggtgatgaaataagcttggacttaaaaaaaagggaactaaatctaaatgttgatgaagacgaaatagaaaaaagattaaaaaaatatagcaaccctgaaccaaggtacaattctggagttctaaataaatattctaaattagttacaggtgctgataggggagctgtaacaggttagt

SEQ ID NO: 286269 - DNA, 94 bp, Unknown
  Bacterial polypeptide expressing nucleotide sequence isolated from the Sargasso Sea
tatgcctgattacagatcaaaaacatcaacacatggaagaaatatggcaggtgcaagagccctatggcgtgcaactggtatgggtgatgatgat

SEQ ID NO: 286270 - DNA, 579 bp, Unknown
  Bacterial polypeptide expressing nucleotide sequence isolated from the Sargasso Sea
tatgcttcgaggtgtaggatttacatctgaggactttacaaagccatttgttggaattgcatcaactggagccaaagttacaccatgtaatatgcatatcaatcaattatcagaattggtagaagactcaataaatgcatctggtggcaaaggtgttttatttaatacaattactgtttcagatggcatttcgatgggaacgcaaggaatgaaatattctcttgtttctagagaagttattgctgactcgattgaaactgttgtaggttgcctaggatatgatggattaattgcaattggtggatgtgataagaacatgcctggatgtcttattggtatggcaagattaaatagaccgtctatatttatttatggtggatctataaaaccaagcaatgagaatacggactatgtaaccgtctcagaaaaagttggagaattctcaaagggctctataaatgaagatgagctaattcattatgaaaagatatcagttgatggaccaggctcatgtggtggaatgtataccggcaatacaatggcatctgctatagaagcattaggaatgagtttgccagg

SEQ ID NO: 286271 - DNA, 1171 bp, Unknown
  Bacterial polypeptide expressing nucleotide sequence isolated from the Sargasso Sea
atggttaaattttctgatgatgtaacacaaggcgttgaaaaatctgctgcaagagcgatgctcagagcagtaggtttagaagacgaagattttaataagtttcaagttggaattgtctctgctggaaatgaagtaactccctgtaatcttactggaccagagttatcaattcatgcaaaagagggagtaaatggtactgactcagctggattgattttttcaacaatagctgtttcagatggaatatcaatggggcatgagggcatgagggcttcactagtttcgagagaagttattgcagattctgttgagctggttatgcatgcagaaagattcgatggaatggtgacaatcgcaggatgtgataaatcattaccgggaatgttgatggcatcggcaagaataaacagaccagcaatttttttatatggtggaagcagtcttccaggagtttacaaaggaaaagatatatctattgtcgatgtctttgagggtattggtgcatacgaaaaagggataataagcgaagaggaattatatgaaatagaatgtaatgcctgtccaggacaaggctcttgcgcagggatgtttacagccaacacaatggcttctgttggagaagctattggaatgagtttacctggcactgcttcaatcccggctgaagatcaaaggttaagaacagcagcaaaagaatcaggtttacaattaaattatttattgaaagaagatatcaaaccaagagacatcatgactttaggggcatttaaaaatgcaatcacaacagtattagctcttggaggtagtacaaacgcagtattgcatttgttagctatatcctatgaagcaaaaattaatcttgacctaaatacttttgatgacctaggtaaatcagttccacatcttgcagatatgaaaccgtttggaaaatatcacatggttgatttagacaaaattggaggagttccagtagtatccaaaatccttcttgaaaataaacttatagatcctgattgtctgacagttaccggaaaaactgtaggtgaaaatttagaaaatattgatattccaaaaagtcaagatgtagtttcgttcccagacaatccaatttcaaaagaaggaggaatagctatcttaaacgggacactttcaccaaacggatcggtttaaa

SEQ ID NO: 286272 - DNA, 879 bp, Unknown
  Bacterial polypeptide expressing nucleotide sequence isolated from the Sargasso Sea
aatgccaaaatttaataaaaaaaagctacctagtagacatacatctgttggaccagataaggctccacaaagatcattttattatgcaatgaacttaactgaaaaagatgtagcaaaaccatttgttggggttgtttcaacctggaacgaagcagctccttgcaatatagcattaatgagacaagctcaatctgtaaaaaaaggtgtacaatcatctggaggcacacctagagaattttgtacgattacagtgactgacggtatcgcaatgggtcatgaaggaatgaaatcttcattaatttctagagatgtaattgctgattcaacagaactgactgttagaggtcattgttatgatgctctagtaggagttgcaggctgtgataaatcactaccaggtttgatgatggcaatggttagattaaatgttccaagtgtattcatatatggtggatctattcttcctggcagattaaatggaaaagatattactgtagtcgatgtattcgaaggtgttggtaaatattcttcaggaaaaatttcagaacacgcacttagaaaattagaattaaaagcatgtcctacagctggtgcttgtggtggtcaatttacagctaatacaatggcatgtgtatctgaagcaattggtttagctttaccttattccgcaggaacgccagcaccatttaatcgaagagataaatatgctttagctagcggcaaagcagtaatgaatttgttagcaaaaaatattagaccaagagatattgtaactagaaaatctttagaaaatgcagcaacaattgtagcggctactggtggatcaacaaacgctgctttgcatttaccagcaattgcaaatgaaataggaattaaatt

SEQ ID NO: 286273 - DNA, 733 bp, Unknown
  Bacterial polypeptide expressing nucleotide sequence isolated from the Sargasso Sea
atgagcgaaaagttgaacaaggttagttccagaatcacccagcctcgttcccagggtgcctcacaggccatgctctatgcgacgggactgacccgtgaggacatggacaaagcccaggtagggattgccagcatgtggtggcagggcaatccgtgcaatatgcatctgaatgatctggctgatcagatcgccacgggcgttcgcgagtcagaccttattccaatgcgctttaacaccatcggagtcagcgacgggatttccatggggaccgagggcatgagttattcgctacagtcccgtgatctgatcgcggattccatcgagaccgtcatgggagggcagtggtacgacgcgctggttactgtgcccggatgtgacaagaatatgcccgggtgcctgatggccatgggccgcgtcaatcggcccgccctgatgctgtacggcggcacgatcaggccgggccatgcgggatcacaggtggttgatatcgtgtccgccttccagagttatggccagtacattgccaaggtgattactgatgaggagcggcaggatatcgtggacaacgcctgcccaggcgctggtgcctgcgggggaatgtacacggccaatacgatggccagtgcaatcgaggcaatgggaatgtcgctgccgtacagttcttcggcccccgccaccaccgagcagaaaaaaaatgagtgccttaacgtcggcgccgccgtaaggaatctgc

SEQ ID NO: 286274 - DNA, 1675 bp, Unknown
  Bacterial polypeptide expressing nucleotide sequence isolated from the Sargasso Sea
tatgtcaaaagataagagaaaatattcttccgaaattgttgatggggtagagcaggctccatctagagccatgttaagagctgtaggctttgagtctgaagattttaataaaccccaagtcggtattgcttcaacatggagtatggtaactccctgtaacatgcatatagataaacttgctgagtcagctgctgaaggtgcaaactcggttggatcgaaggcagtaatttttaacacaattactgtttctgatggaatatcgatggggacgaaaggtatgagatattctcttgtgtctagggaagtaatagcagactcgatagaaaccgtagtaggtggacaaggctttgatggattagtcaccattggaggatgtgataaaaatatgcctgcctgtgtaatggcaatggcaagattaaatagaccttcaatttttgtgtatgggggtagcataaagcctggttctaataggacagatgtagtttctgtttttgaggctgtaggcaagcactctgaaggtgcaatttcagatatagagcttctggatattgaatcttcagctataccgggtccagggtcatgtggcggaatgtatactgcaaatacaatggcatctgcgatagaagctttaggtatgagtcttcctaatagttctgcgcaagaggccacctcaagaagcaagatgttagattcttctagtgcaggcgaagcgataatgcatttaattagtgaggatattaaacctcgcgacattatgacaaaagaggcttttgaaaatgcaattgcagttgttatagcgcttggaggctctacaaacgctgttttacatttgctcgcgatagctcatgaagccaaagttgatttatctctagatgattttgaaagaattggtaaacgaactcctgtacttgctgacctaagacctagtggtaactatctaatgtccgaattaattgaaattggaggtattgttcctctaatgaaaactatgcttgagaaggatctgttaaatggaaagcaaatgacagttactggcaagacgttagaggaaaatcttcttgaatatgaagattatccagacgatcaaaagattgtttctaattttgatgaccccataaagcctgatagccatttacgaattttgtatggcaatttggctccacaaggtgcggttgcaaaaatctcaggaaaagaaggattaaggtttgaaggaaaagctaaggtctataactccgaagaagatgcaatggaaggcattctttctaatcaaatttctgagggagatgttcttgttataaggtacgaaggccctaggggagcaccaggaatgagagaaatgttgagccctacgtctgcaatcatgggaaagggcttaggcgataaagtagcctttctaacagatggaaggttttctggaggtacacatggatttgttgttgggcatattacccctgaagcattcgatggtggtcttattgctttcgtacaagatggagatttgatctctatagatgcggaaacgaatcaaataaacttagatttaacagaagaagaaatccaaaaacgaaaagattcatgggtttgtcctgttaaggatgaagaaggaggggttttagataaatatagatcccttgtagcttcagcgtcagagggagcggtaactacaaaaaaataa

SEQ ID NO: 286275 - DNA, 1198 bp, Unknown
  Bacterial polypeptide expressing nucleotide sequence isolated from the Sargasso Sea
atgtataataaatttagtagagtagttacaaaggatgattcccagccagctgcacaagctatgcttcatgccattggtttgaatgatgaagattttgacaaaccatttattggaattgcaagtacaggttatgagggtaatccttgtaatatgcatctcaatgatttatcagtaaaaattaaagatagtataactgcttcaaaatacgttggattaatttttaataccattggtgttagtgatgggatttctatgggaacttttggaatgagatattcactaccctctagagatattatagcagattcaatggagactgtagttcaagcgatgtcatatgatgggttaataacagttgttggatgtgacaaaaatatgcctggagccctcatggctatgttaaggcttgatagaccaagcatattagtatatggaggaacaattgactctggatgttataataataaagagttggatgttgtgtcagcatttgaagcatggggtgaaaaagtatcaggaaaaatagatgagagtgagtataaaaatgttattaaaaatgcttgtcccggagctggggcatgtggagggatgtatacagcaaatactatggcttcagctattgaagcattaggtatgtcgttaccttacaactcatctaatcctgcaattagcaatgaaaaaataaatgaatgtgatgagattggtgagtcaattaaaaatctaattgaaaaggatattaagccttctgatattgttacaaagaaatctcttgaaaacgctctgagactggttactgttcttgggggatcaactaatgcagtgcttcattttttagcaatatctagagcagcaaatttagatttgtcaattgattattttcaagaaataagtgactcaactccctacttagctaatcttaaacctagtggtaaatatctaatgaaagatttacacaaaatagggggtgttccatacgtattaaaatatatgcttgaaaataaaatgcttcatggagattgtctaactgttactggtagtacaatagaagaaaacttatcaaaaattaagtcacctgatgtaagttcaaatgatctaatttttccaatatcagatcctattaagaatactggacatattcaaatattaaagggaaatttagctgaagatggatgtgttgcaaaaataactgtaaagaagg

SEQ ID NO: 286276 - DNA, 1813 bp, Unknown
  Bacterial polypeptide expressing nucleotide sequence isolated from the Sargasso Sea
gcatatgcgggtgctcgcgcactgtggcgcgccaccgggatgaccgatgatgatttcggtaaaccgattatcgctgtggtgaactcttttacccagtttgtgccgggtcacgtccacctgcgcgatctcggtaaactggttgccgaacaaatcgaagcctcaggcggcgtggcgaaagagttcaacaccattgctgtggatgatggtatcgccatggggcacggtggcatgctgtattcactgccgtcgcgcgagctgattgctgattcagtggagtacatggttaacgcccactgcgccgatgcgatggtctgtatctctaactgcgacaaaatcacccctgggatgttaatggcctctttgcgcctgaatattccggtgatctttgtttccggcggtccgatggaagccgggaaaaccaagctctctgaccaaatcatcaagctcgacctagttgatgcgatgattcagggcgctgacccgaaagtctccgactcacaaagcgagcaggttgaacgttccgcctgtccaacctgcggctcctgctccggcatgttcaccgccaactcgatgaactgcctgaccgaagcgctgggcctgtcgcagccgggtaacggttcgctgttggcgactcacgccgaccgtaaaacgctgttccttaacgcgggtaaacgcatcgtcgagctgaccaaacgctattacgagcaggatgatgcctccgccctgccgcgcaacattgccagtaaagcggcgtttgagaacgccatgacgctggatatcgccatgggcggctccaccaacaccgttctgcacctgctggcggccgcacaggaagcggaaatcgacttcaccatgagtgatatcgacaagctgtcccgcaaagtcccacagctgtgtaaagtggcgccgagcacgcagaaataccatatggaagacgtgcaccgcgcaggcggcgtactgggtattttaggcgaactggatcgtgccggactgctgaaccgcgacgtgaaaaacgtgctgggtctgactctgccgcaaacgcttgatcggtatgacgtgatgttgaccaaagacgacgcggtgaaaaaaatgttccgcgccggaccggcgggcatccgtaccacccaggcgttctcgcaggactgccgttgggatacgctggatgacgaccgcgctgaaggctgcatccgctcgctggaacatgcttacagcaaagacggcggtctggcagtcctgtacggtaactttgcggaaaacggctgtatcgtaaaaactgcaggcgtggatgacagtatcctgaaattcaccggcccggcaaaagtgtatgaaagccaggacgatgcggttgaagcaatcctcggcggtaaagtggtggctggcgacgtggttgtcattcgctacgaagggccgaaaggcgggccaggcatgcaggaaatgctctacccaaccaccttcctgaaatcgatgggcctcggcaaggcttgtgcgctgattaccgatggtcgtttctccggcggtacttcggggctttccatcggtcacgtttccccggaagcggccagcggcggtaatatcgcgattatcgaagatggtgacatgattgccatcgatatcccgaatcgtggcattcaactgcaactgagtgatgcggaaatcgcagcgcgccgtgaagcgcaggaagctcacggtgacaaagcctggacgccaaaatatcgtcaacgtcaggtctcctttgctctgcgcgcctacgccagcctggcaaccagtgccgacaaaggtgcggtgcgcgataagtcgaagctcgggggataat

SEQ ID NO: 286277 - DNA, 1162 bp, Unknown
  Bacterial polypeptide expressing nucleotide sequence isolated from the Sargasso Sea
tatagctgactcaattgaaacagttgtatttgctgaaagatttgatggattggttgcagtagcaggttgcgataagagtttgcctggagccatgatggcaattgcaagattagatgttccttcagtatttgtttatggaggttcaatattaccaggaaatcttaatgggaaaacaattcaaattcaagacgtttttgaagcagttggaaagcaccaaaaaggagatctgtcagacaatgaattatatcaaatagaatctagggcatgcccaggtcctggatcttgtggcgggatgtttactgcaaatacaatgtcttcagtaggagaagctttagggttaagtctaccaggatcagcttcagaaccagcagtagatcaaagaaaatcagcgtctagcagaaaggcaggagaagctgttttgaatcttcttagaaaagatatcaggccttctgacatacttactaaaaaggcctttgagaatgcagtaacagtagtaaccgctatgggtggctcaactaatacagcattgcacttacctgcaatagctcacgaaatgggagtagacctatctttggaagacatacatgacatatccatgaagactcctcatttagcggatatgaagccagggggcaaatacatcatgtatgacctagataatgttggtggcgtcccattggtaatgaaaaggctttttaagcttggtctaattcatggagattgcatgacagtaaccggaaagactgtagaagagaatcttgcagaaattaaagacaatggaactgaaaatgacgtagtaagattgccagataatccaattagtaatacaggaggactagtcatattgcatggaaatctagctccagaaggagcggtacttaaagtcgcaggtcacaactatggaaaatcttggtctggcccagcaagagtatttaatcaagaagaagaatgcatggaatctttaaaaaaacatgaaattaaagaaggagattttgtagtaattcgatatgaaggaccaaaaggtgggcctggaatgagagagatgctgtcgattactagcgcaatagtggggcaaggcttaggtgataaagtatttttaatgacagatggaagattttctggagcatcccatggacctatgattggtcatgtgggtctccga

SEQ ID NO: 286278 - DNA, 1600 bp, Unknown
  Bacterial polypeptide expressing nucleotide sequence isolated from the Sargasso Sea
aatgttgcgtggagcaggattcaaggacgaagattttgaaaaatctatagttggaattgcttcgcttggcgcaagtgtaactccatgtaatatgcacctaaactcccttgcagaaattgttgaagagtcagtcaataattcaggatgtaaggctgtaacatttaatacaattactgtctctgatggaatttctatgggtacggagggcatgaaatattccctcgtttcaagagaagtcatagctgactctatagaaacggtagtgggatgtttgggatatgatggagtagtaggtattggcggctgtgataaaaatatgccaggtgtaattattggtttggccagacttaatagaccatctttatttatttatggcggctctattagaccaagtgagcagaatactgattatgtgacagtttgtgaaaaaactggagagttctcaaaaggctcaatctctgaagaggaattaatctctgttgaaaaggtttcagttgtggggcctggatcatgcggaggaatgtatacggccaatacgatggcatctgcaattgaagctttaggtatgtctcttcctggaagcagcagtcaggatgcagtttctgatgataaaaagaatgattgtataaatacagggagggcaattgagaatctccttgaaaaagatattaaaccctctgacattatgaccaaggaggcattcgaaaacgcaatcacggtagttattgcgcttggaggatcaactaatgcagtacttcatcttattgcgatggctcacgctataaatgttgacttagatttagatgactttacaagaataggtaaaagagttcctgttgtggctgacattaaaccattcggtgaaaattatatgtcctcactgaataaagttggcggcattcagccgctaatgaaaatgttactcgatgcagacttgcttcatggcgactgtataacagtttcaggaaaaactatttcagaaaatctttcagaagttgattcatatccagataatcagacaattattagagaaatatctaatccaattaaaagtagtagccatttgcgtatcctttatggcaatttagctcctgaaggagcagtagctaagattacaggaaatgaagggctaaaattcactggcacggctaaagtatttgactctgaagaagatggaaatgaggcaattcaaaataacctagttaatgaaggagatgtggttgttataagatatgagggaccaaaaggaggccctggcatgagagaaatgcttaaacctacctctgcaataatgggacaaggcttaggcgataaagtcgcatttattactgatggaagattttctggcggaactcatggttttgttgttggacatatttccccagaagcatatgttggcggacccatcggagtcattgaaaatggcgacaaaataacaattgatgctgagacaaactcaatttcaatcgatatatctgatgaggagcttcaaaaaagattagataactttaaaccaaataaagagcttcctaaaaaaggcgtcttatcaaaatactcaaaaagtgtacaatctgcatccctaggagctattactgattaa

SEQ ID NO: 286279 - DNA, 1237 bp, Unknown
  Bacterial polypeptide expressing nucleotide sequence isolated from the Sargasso Sea
atgttgcgaggagcaggattcaaggatgaggatttcgaaaaatctattgttggaattgcttcgcttggggcaagtgtgactccatgcaatatgcatctaaactcccttgcaggaattgttgaagagtcagtcaataatgcaggatgtaaggctgtaacatttaacacaattaccgtatctgatggaatttctatgggtacggagggtatgaaatattcccttgtttcaagagaagtcatagctgactctatagaaactgttgtaagttgtttgggctacgatggagtagtaggtattgggggctgcgacaaaaatatgccaggtgtaatcattggtttggcgagacttaatagaccatctttatttatttatggcggctctattaggccaagcaagcagaatactgattatgtgacagtttgtgaaaaaactggcgagttttcaaaaggttcaatctctgaagaagaattaattgctgttgaaaaggtttcagtagtgggaccgggctcatgcggaggaatgtatacagcaaatacaatggcttctgcaattgaggctctaggaatgtctcttccaggaagcagcagtcaggacgcagtttctgatgataaaaaaaatgactgtataaatactgggagtgcaattgaaaatctcttagaaaaagatattaaaccctctgatattatgacaaaggaggcatttgaaaatgcaatcacggtagttattgcacttggaggatcaacaaatgctgtacttcatcttattgcaatggcgcatgctataaatgttgatttagatttagatgactttacaagaataggtaaaagggtacctgttgtagctgacatcaagccatttggtgaaaattatatgtcctcactgaataaagttggcggaattcagccactaatgaaaatgttactcgatgcagacttacttcatggcgactgtttaacagtttcaggaaaaactattttagaaaatctttcagaagttgatccatatccggataatcagacaattattagagaaatatctaatcctattaaaagtagtagtcatttgcgtattctttatggcaatttggctcctgaaggatcagtagctaagattacaggaaatgaagggctaaaattcactggcacggctaaagtatttgactctgaagaagacgggaatgaggcaattcaaaataacctaattaatgaaggagatgtggttgttataagatatgagg

SEQ ID NO: 286280 - DNA, 973 bp, Unknown
  Bacterial polypeptide expressing nucleotide sequence isolated from the Sargasso Sea
ggtcatgaaggaatgaaatcttcacttatttcaagagatgtaattgcagattcaactgaactaacagtaagaggacattgttatgatgctctagttggagttgcaggttgtgataaatctttaccaggattaatgatggcaatggttcgattgaatgttccaagtgtttttatatatggaggctcaattcttccaggtagatttaatggaaaagatgtaactgtagtagatgtatttgaaggagttggaaaatattcttcaggaaaaatgactaagcatgcattaagaaaattagaattaatagcatgtccaagtgctggtgcatgtggtggacaatttacagctaatacaatggcgtgtgtttctgaagcaataggtttagctttaccttattcagctggtactcctgcgccatacgagcagagagacaaatatgcattacaaagtggtaaggcagtaatgaatttattaaaaagaaatatcagaccaagacaaattgtaactcgaaaatcattagaaaatgcagctacgattgttgctgcaacaggtggatcaactaatgcagctttacatttaccagcattagcaaatgagattggaattaaatttgatttaatggatgttgcaaaaatatttaaaaaaacaccttatcttgcagatttaaaaccaggtggaaaatatgttgcaaaagatatgtggcaagcaggcggtgttccaatgttacttaagacacttatggatggtggttatattcatggagattgtatgacagttactggaaaaactatgagacaaaatttaaaaaatgttaaatttaatctaaaacaaaaagtgatgcgtaaatataataatcctttatcaccagatggaggagtagtaggtcttaaaggtaatttagcccctgaaggtgcaaattgtaaaagtagctgggttaaaaaaattacagtttactggaagagcaagatgttttgat

SEQ ID NO: 286281 - DNA, 409 bp, Unknown
  Bacterial polypeptide expressing nucleotide sequence isolated from the Sargasso Sea
ctgaaggtgcaaattgtaaaagtagctgggttaaaaaaattacagtttactggaagagcaagatgttttgatacagaagaggctgcatataaagctgttaaaaatagaaaatataaagatggtgatataataattattagatacgaaggaccaaaaggtggacctggcatgagagaaatgcttcaaaccacaggagcgatttacggtcaaggcaaaggtgagaaagtagctttaataacagatggaaggttttcaggagccacaagaggcttttgtattgggcatgttggaccggaagcatctgtagggggaccaatagcattacttagaaatggagatataattgatttagatgcaaaaaaaggaattattaacgttcgtttatcaaagaaagaattagctaaaagaa

SEQ ID NO: 286282 - DNA, 907 bp, Unknown
  Bacterial polypeptide expressing nucleotide sequence isolated from the Sargasso Sea
ctgggaggatcaacaaacgctgctttacacttaccagctattgcaaatgaaattggaattaaatttgatttaatggatgttgcaagaatttttaaaaaaactccttatcttgcagacttaaaaccaggtggaaagtatgtagcaaaagatatgtggaaagctggtggagttcctatgttgcttaaaacacttttggatggtgggtatattcatggaaactgtatgacggttaccggcaaaactatgaaagaaaatttaaaaaatgttaaatttaattcaaagcaaaaagttatgagaaaacataataatcctttatctccagatggaggtgttgttggaatgaaaggaaatttagcaccagaaggtgcaatagtaaaagttgcaggtttaaaaaaattacaatttacaggtagagcaagatgttttgatacagaagaggcagcttataaagctgttaaaaatagaaaatataaagatggtgatattataattattagatacgaaggaccaaaaggtggacctggaatgagagaaatgcttcaaacaactggagcaatctatggacaaggaaaaggagaaaaggttgcactaataacagacggaagattttctggagccacaagaggattttgtattgggcacgttggaccagaggcatcagtgggcggaccaatagcattgcttagaaatggagatgtaattgatttggatgctaaaaaaggaacaattaatgttcgtttatctaaaaaagaattagctaaaagaagaaagaaatggaaaccaaagaaaattaactttggaaatggaacgctttggaagtacgcacaaactgttggaccagcttatttaggtgctccaactcatccaggcggtaaaaacgaagtaaaaacttacgcagatatttaat

SEQ ID NO: 286283 - DNA, 1420 bp, Unknown
  Bacterial polypeptide expressing nucleotide sequence isolated from the Sargasso Sea
tcgaaaccttttgttggtgttgtatcaacatggaatgaagctgcaccatgtaatatagctttaatgagacaagcacaatcggttaaaaaaggtgttaagcttagtgggggtacaccaagagagttttgtaccattacagtaacagacggaattgcaatgggacacgagggcatgaaatcttctttagtttccagagatgttattgcagactcaacagaattaacagtcagaggacattgttatgatgctttggttggtctagctggatgtgacaagtcattaccaggtttaatgatggcaatggtaagattaaacgtaccgagtgtttttatttatggtggatcaatattaccaggtagattaaacggtaaagatataacagttcaagacgttattgaaggagtaggtgaatattcatctggtagaattacaaagcacgcattaagaaagcttgaattaaaagcatgtccaagtgctggagcatgtggcggtcaatttaccgcaaatacaatggcgtgtgtttcagaagcaattggattggcattaccctattcagcaggaacacctgctccatatgagaaaagagataaatatgctgttgaaagtggaaaaatggtgatgaatttattaagaaaaaaaataagaccaagagatattgtaacaaaaaaatctttagaaaatgcagcagctattgttgcagctaccggaggttcaactaatgcagcattacatttaccggcaattgcaaatgaaataggaattaaatttgatttgatggatgttgcaagaatttttagaaagacaccttatctcgcaaatcttaaaccaggtggattatatgttgcaaaagatatgtggaaagccggtggcattcctatgcttcttagaacaatgttggatggaggatacattcacggtgagtgtttaacagttacaggaaaaactatgagagaaaacttaaagaatgtaaaatttaacaacaaacaaaaagttatgagaaaccataaaaaccctctttcaaaggatggcggtgttgttggccttaaaggaaatttatcaccccaaggtgcaatagtaaaaattgcagggttaaaaaaattaaattttactggaagagcacgatgctttgatacagaggagtctgctcttaaagcagtgttaaataaaaaatataaaaagggagatgtaattgtaattagatacgagggaccaagaggtggtccaggtatgagagaaatgcttcaaactacagctgctatatacggacaaggaatgggagaaaaagttgcgttaataacggatggaagattttctggagcaactagaggtttttgtattggacatgtaggtccagaagcatcagtaggaggccccattggattattaaaaaatggagacataattcatatagacgcaaaaa

SEQ ID NO: 286284 - DNA, 1861 bp, Unknown
  Bacterial polypeptide expressing nucleotide sequence isolated from the Sargasso Sea
catgcccacttaccgttccaaaacctccaccgccggccgcaacatggcaggtgcgcgctcgctctggcgcgccaccggcatgaaagacgacgatttctcgaagccgatcatcgcggtcgtcaactcgttcacccagttcgtacccgggcacgtgcacctgaaggatctcggccagctcgtcgcgcgcgaaatcgaggctgccggcggcgtcgcgaaggaattcaacacgatcgcggtcgacgacggcatcgcgatgggccatgacggcatgctgtattcgctgccgagccgcgacatcatcgccgactcggtcgaatacatggtgaacgcgcactgcgcggacgcgatggtgtgcatctcgaactgcgacaagatcacgccggggatgctgatggccgcgatgcgcctcaacatcccggtgatcttcgtgtcgggcggcccgatggaagcgggcaagacgcgcctcgcgaacccggtcaccaaggccatcgaggtgaagaagctcgacctcgtcgacgcaatggtgatcgcggtcgacccgtcgtattccgacgcggaagtcgccgaagtcgagcgctcggcctgcccgacctgcggttcgtgctcgggcatgttcaccgcgaactcgatgaactgcctgaccgaagcgctcggcctgtcgctgcccggcaacggcacggtggtggccacgcacgccgaccgcgagcaactgttcaagcgcgccggccgtcgcatcgtcgaactcacccgccagcactacgagcaggacgacgaacgcgtgctgccgcgctcggtgggcttcaaggcgttcgagaacgcaatgacgctcgacatcgcgatgggcggctcgaccaacacgatcctgcacctgctggcgatcgcgcaggaagccggcatcgacttcacgatgaaggacatcgaccgcctgtcgcgcgtcgtgccgcagctgtgcaaggtcgcgccgaacacgaacaagtaccacatcgaggacgtgcaccgcgcaggcggcatcatggcgatcctcggcgagctcgaccgcgccggcaagctgcacaccgacgtgccgaccgtgcatacgccgacgctgaaggacgccctcgaccagtgggacatcgtccgcacgcaggacgacgcggtccgcacgttctaccaagccggcccggccggcatcccgacgcaggtcgcgttcagccagaacacgcgctggccgagcctcgacctcgatcgcgccgaaggctgcatccgctcgtacgagcatgcgttctcgaaggaaggcggcctcgccgtgctgacgggcaacatcgcgctcgacggctgcgtggtgaagacggccggcgtcgacgagagcatcctcgtgttcgaaggcacggctcacgtgaccgaatcgcaggacgaggcagtcgaaaacatcctgaacgacaaggtcaaggccggcgacgtggtgatcgtgcgctacgaaggcccgaaaggcggccccggcatgcaggaaatgctctacccgaccagctacatcaagtcgaagggcctcggcaaggcctgcgcgctgctgacggacggccgcttctcgggcggcacgtcgggcctgtcgatcggccactgctcgccggaagcggcagcgggcggcgcgatcggcctcgtgcgcgacggcgacaagatccgcatcgacatcccgaaccgcacgatcgacgtgctcgtgtcggacgaggaactcgcgcgccgccgcgaagagcagaacgccaagggctggaagccggcgcagccgcgtccgcgcaaggtgtccgctgcgctgaaggcctacgcgaagctggtcatgtccgccgacaagggtgccgtgcgcgacctgtcgctgctcgacgactga

SEQ ID NO: 286285 - DNA, 1057 bp, Unknown
  Bacterial polypeptide expressing nucleotide sequence isolated from the Sargasso Sea
tttatttaataccattacagtatctgatggtatttctatgggaactgagggcatgaaatactcattggtctcaagggaagtgatagctgattcaatagaaacggttgttggttgtcttggttatgatggcttagttgcaatcggtggatgtgataaaaatatgccaggagccttgattgggatggcaagattaaatagaccatctctttttatctatggcggatctatcaagcctagtcatgaaaatacagattatgtaactgtctgtgagaagactggagagtatgcaaaaggagatattactgaagacgaactcattagaattgaggaaatttctgttaaaggccctggttcatgtggaggcatgtacacagctaatacgatggcttcagccattgaagctcttggcatgagtcttccaggaagcagcagtcaagatgctatctctaacaataaaaaacaagattgcaaagaagcaggtagagcgatagaacatttaattgaattagatttaaagccttcagacattatgaccaaagaagcttttgaaaatgccataactgtggttattgcccttggtggatctacaaatgcagtgctacatcttttggcaatggcagatgcaattggagttgatttgcatttagatgatttttctaggattggtgaaaatgttcccgttattgctgatatcaaaccatttggcaatcattttatgtctgagctgaatgagcaaggtggaatttcgcccgttttaaaaatgttactggataaaaatttactccacggggattgtttaacggtaacaggaaaaacgcttgctgaaaatcttgaagatatcaatccttataattccagtcaggccattattaagtctcttgaagatccaataaaaggaagtagtcatcttagaattctttacggtaacttagcgcctgaaggagcagttgctaagattacgggccaagaaggaactatttttgaagggaaggctaaagttttcaactctgaagaagacggtaatcaagcaatccttaacaaggaaataaaagcagga

SEQ ID NO: 286286 - DNA, 435 bp, Unknown
  Bacterial polypeptide expressing nucleotide sequence isolated from the Sargasso Sea
aagaagagggagttgcggcaatccttgcaaaaaattttaatccaggcgatgtagttgtaattagatatgagggaccaaaaggtgggccaggcatgagagaaatgttaaagccaacatctgcgatcatggggttaggcttaggagataaagttgcttttataactgacggtagattttctggaggaactcatgggtttgttgtgggtcatatatctccagaggcagcagatggaggactaattgctttaatcaaagatggagacactatcttgatcgatgcagaaaatgatgaattaatactaaaggttgatcaagatgaaattgatttaagaaagaagaactggaagaatcctactaatcctccaaaaaaaggagttcttgcaaagtatgctgcaagtgtaaaatctgccagcttaggagcaattactgattaat

SEQ ID NO: 286287 - DNA, 769 bp, Unknown
  Bacterial polypeptide expressing nucleotide sequence isolated from the Sargasso Sea
atgacagataaaaaaagaaaatactcatcgatcatagtagatggagtagagcaagctccttctagagctatgttacgggcagtaggttttgaagaagaagatttctcaaaacctcaggtaggcattgcctcaacatggagtatggtcactccatgcaatatgcacatagataagttagctaaagagtctgcaagaggagctgatgaagcaggaacaaaatccattatctttaatacgattactatttcagatggaatttctatgggaactaaaggaatgcgttactctcttgtttcaagggaagtgatagctgattcgattgaaacagtagtagcaggacagttatttgatggattagttgctataggtggatgcgataaaaatatgcctggatgcatgatggctatagcaagactaaatagaccagctatttttgtttatggagggagtatacaacctggagaaggaagaacagatgtggtgtctgtatttgaagctgttggtgcacattcagatggaaagttatcagacatagagcttctagatattgaatccaaagcaatacctggaccaggctcctgtggtggaatgtatacagctaataccatggcttctgctatagaagctcttggtatgagtttacctggaagttctgcccaagaagctatttcttctgataaagaagaggattcatacaacgccggaaaatttttaagcacatttaatagagaaagacataaaacccagagacatctcacgaaagaagctt

SEQ ID NO: 286288 - DNA, 1675 bp, Unknown
  Bacterial polypeptide expressing nucleotide sequence isolated from the Sargasso Sea
atgaataaactcagatcatctgcaataacccaaggtgtgcaaagatcccctaacagatcgatgttaagagctgttggatttaatgatgaagattttaataaacctattattggagttgcaaatggatacagcaccataacaccatgcaatatgggtttaaataagttagctctaaaagctgaagagtctataaaaagatcaggtgggatgcctcagatgtttgggactataacagtaagtgatgggatttctatgggaacagagggcatgaaatattccctagtttcaagagaagttattgctgattcaattgaaacagcatgcaatgctcagagtatggatggagtacttgctataggtggatgtgataaaaatatgccgggtgccatgattgcgattgcaagaatgaatattccctcaattttcatttatggagggacaataaagcctgggaaattgcatggagaagatcttactgttgttagtgcatttgaagctgttggacaattaacatcaggcaaaattaatgaagaaaggctaatccaagttgagaaaaattgtattcctggtgctggtagctgtggaggaatgtttacagctaatacaatgtctgcggttattgaagtattagggttaagtcttcctcacagttccactatggctgctgaagatcttgaaaaagaactaagtgcagataaaagtgctgagatattagtctctgcaatagaaaaagatataagacctctagacctaatgactaagaaagcatttgaaaatgcaatatcagtaattatggcaattggcggatcaacaaatgcggtattgcacatcttagctatcgcgaatactgcaggaatagatatcaacattaatgattttgagagaatcagacaaaaagtacccgttatttgtgaccttaaaccgagtggtaaatatgtgacggtggatcttcataaggcaggtgggattccacaagtaatgaaaatacttttgaatgcaggattaattcatggcgattgcaaaaacattgaaggcaaaaccatctcagaatacttacagaatattccagataagcctccaacaaatcaaaatgtcataagagacatagatgaccctctttataaaaaaggacatctagcgatattaaaaggtaacttagcgagcgaaggttctgtagccaaaattagcggagtaaaaaaccctgtattaacaggtcccgcaaagatttttgaaagtgaagaggattgtttaaaatcgatattaaataacgatatcaaagctggtgatgttgttgttattagaaacgaaggtcctgtaggaggaccaggtatgagagagatgttagctccaacatctgcaattgttggtcaagggctaggagagaaggtggctttaattaccgatggcagatttagcggcggtacctatggtcttgttgtgggtcacatagctccagaggctgctgtaggaggaaatattgctctaataaaacaaggtgatttaattacagtagatgctgtaaaacaactaattgaagttgatttatctgacgaagaattagaaaaaagaaaaaaagattgggtaaaacctattcaaaaatacaaaagaggaattctttcaaaatattcgagaatcgtaagcacatcaagtttaggggctgttactgatttataaa

SEQ ID NO: 286289 - DNA, 1138 bp, Unknown
  Bacterial polypeptide expressing nucleotide sequence isolated from the Sargasso Sea
gctgtaacatttaacacaattactgtctctgatggaatttctatgggtacggagggcatgaaatattccctcgtttcaagagaagtcatagctgactctatagaaactgttgtaggttgtttgggctatgatggagtagtcggtattgggggctgcgataaaaatatgccaggtgtaatcattggtttggcaaggcttaatagaccatctttatttatttatggtggctctattagacctagcgagcaaaatactgattatgtgacagtttgtgaaaaaactggagagttctcaaaaggctcaatctctgaagaggaattaatctctgttgaaaaggtttcagttgttgggcctggatcgtgcggaggtatgtatacagctaatactatggcgtctgcaattgaagctcttggaatgtctcttcctggaagtagcagtcaggatgcagtttctgatgataagaagaatgattgtataaatacagggagtgcaattaggaatcttcttgaaaaagatattaaaccttctgacattatgacaaaggaggcattcgaaaatgcaatcacagtagttattgcacttggaggatcaacgaatgcagtacttcatcttattgcgatggcgcatgctataaatgttgatttagatttagatgactttacaagaataggtaaaagagttcctgttgtagctgacattaaaccatttggtgaaaattatatgtcctcactaaatgaagttggtggcattcagccactaatgaaaatgttgcttgatgcagacttacttcatggcgactgtttaactgtttcaggaaaaactatttcagaaaatctttcagaagttgatccatatccgaaaaatcagacaattattagagaaatatctaatccaattaaaagtagtagccatttgcgcattctatatggcaatttggctcctgaaggagcagtagctaagattacaggaaatgaagggctaaaattcaccggcacggctaaagtttttgactctgaagaagaaggaaatgaggcaattcaaaataaccttattaatgagggagatgtggttgttattagatatgagggaccaaaaggaggccccggcatgagagaaatgttaaaacctacctctgcaa

SEQ ID NO: 286290 - DNA, 412 bp, Unknown
  Bacterial polypeptide expressing nucleotide sequence isolated from the Sargasso Sea
gatgaccgactccagcaagccctccgcgcccatcaaccgccgcagcgccaacatcacccagggcaagtcgcgcgcacccaaccgctccatgtactacgccatgggctacgaggaaggcgacttcgtgaaacccatggtgggcgtggccaatggccacagcaccatcacgccctgcaacagcggcctgcaaaagctggccgatgcggcgattgcaggcatcgaagaagccggtggcaacgcccaggtgttcggcacccccaccatcagcgacggcatggccatgggcaccgaaggcatgaagtacagcctggtgagccgcgaagtcatcagcgactgcatcgaaacctgcgtgggcggccagtggatggacggcgtgctggtggtgggcggctgcgacaagaacatgcccggc

SEQ ID NO: 286291 - DNA, 640 bp, Unknown
  Bacterial polypeptide expressing nucleotide sequence isolated from the Sargasso Sea
gatgcccatctaccgttccaaaacctccaccgccggtcgcaacatggcaggcgcgcgttccctgtggcgcgccaccggcatgaaagacgatgacttcagcaagccgatcatcgcggtggtcaattcgttcacccagttcgtgcccggccatgtgcacttgaaggacctgggccagctggtggcccgcgagatcgaagccgctggcggcgtggccaaggagttcaacaccattgctgttgatgatggcatcgccatgggccacgacggcatgctgtattcgctgcccagccgcgacatcattgccgactcggtcgagtacatggtcaacgcgcactgcgccgacgccatggtctgcatctccaactgcgacaagatcacccccggcatgctgatggccgcgatgcgcctgaacatcccggtgatcttcgtctccggcggccccatggaagcgggcaagacccgcctcgccaaccccgtcaccaaggtcatggagttcaagaagctcgacctggtggacgcgatggtgattgccgccgacaccaactactccgacgccgacgtggccgaggtcgagcgctcggcttgccccacctgcggttcgtgctcgggcatgttcaccgccaacttcatgaactgcctg

SEQ ID NO: 286292 - DNA, 601 bp, Unknown
  Bacterial polypeptide expressing nucleotide sequence isolated from the Sargasso Sea
tttgggaaataaaataataagagatatttctaaccctatcaagaaggatagtcaccttgttatactcaaggggaatatttcaccagatggagcagttgcaaaaatttctggaaaagaaggtctagtatttgaaggacccgcaattgtttttgattcagaggaagaatgtatggagtcaatattaaaaaagaaaattaaaaaaggacatgtaattgtaataagatatgaagggccaaaaggtggtcctggaatgagagaaatgttagctccaacatcagccatcatgggtcaaggattgggctcagatgttgcttttataactgacgggagattttctggtggtactcatggtttcgtggttggacatgtaacacccgaagcctttgacggcgggcttatatctattattaaaaataatgatgttatcaagattgattcatctaaaagattacttgaaatcaaaattactaaaaaagaaataactgctagacaaaaaaaatggaaaaagccctcacaaaaacatttgacaggtgcaatttataaatattcagcattagttagctcagcttctgaaggtgcaataacagatggtaaaaattaa

SEQ ID NO: 286293 - DNA, 1861 bp, Unknown
  Bacterial polypeptide expressing nucleotide sequence isolated from the Sargasso Sea
aatgccaaagttacgttcagctaccagtaccgaaggccgcaatatggcgggtgcccgtgcgctatggcgcgccacaggggtgaaagacaatgattttggtaagccgattattgcgattgccaactcctttactcagtttgtccccggccatgtgcacttaaaagatatgggctctctggtggcgagcgccatcgaagaggcgggcggtatcgccaaggaattcaacaccatcgcagtcgatgatggtatcgccatgggccacggtggcatgctctacagtctgccttcgcgggagcttatcgccgatagcgtcgagtatatggtcaatgcccactgcgccgatgcgctggtctgtatctctaactgcgacaaaatcacccccggcatgttgatggcggcgctgcgcctcaatatccccgtggtgtttgtgtcgggcgggccgatggaagcgggtaaaaccaaactgtcggataagcttatcaagctcgatttagtcgatgccatggtggcggcggcagactcgagtgtgagcgatgaagatagcgctaaaatcgagcgtagcgcgtgtccaacctgcggctcctgctcgggcatgtttaccgccaactcgatgaactgtttaaccgaagccctaggtctgtcgctgccgggcaatggctccatgctcgcgacccatagcgaccgccgcgaactgtttttagaagcgggtcgccgcgtaatggcgctgaccaaacgttattacgaacaagatgatgcctcggcactgccgcgcaacatcgccagctttaaagcctttgagaacgcgatggcgctggatatcgccatgggcggttcgtccaatactgtgttgcacttattggctgcggcgcaggaggcggacgtggcattcactatggacgatatcgaccgtatgtcgcgccaagtgccgcatctgtgcaaggtggcgccgtcgaccgctaaataccatatggaagatgtgcaccgcgccggtggtgtgatggggatcttaggcgagctagaccgcgccggactgctgcataccgatgtgccacacgttgccgctgatgcggggggcaatctcaagtcggtgctcgccaagtacgatgtgatgcaaacccaagatgacaacgtaaaacaattctttatggcgggacctgcgggcattcctaccactaaagcctttagccaagactgccgctggccatcgctggacgatgacaggcgtgaaggttgtatccgtagccgcgaatttgccttcagccaagagggcggtttggccgtgttatcgggcaatctggcggacaatggctgtatcgttaaaacggcgggtgtggatgaatctaacctgacctttatcggcagcgctcgggtgtacgaaagccaagatgatgcagtcgctggcatcttaggtggcgaagtggtggcgggcgatgtggtggtgattcgttacgaagggccaaaaggcggcccaggcatgcaagaaatgttgtatcccaccagttacttaaaatcccgcggcttaggcaaggcctgcgcactaattaccgacggccgtttctctggtggaacttccggtttatccatcggccatgtgtcgcctgaggcggcggcgggtggcacgattgccttgattgaaaacggcgatcgcattgaaatcgatattcctaagcgcagtatcaagctcgctgtgagtgatgccgagttagcggcgcgccgtgaaaccatgcttgctcgtggtccaatggcgtggaaaccgctttcgcgtcagcgttatgtgtctatggcgcttaaagcctacgccatgcttgccaccagtgccgataagggcgcggtgcgcgatcgcagtaagttggaggactga

SEQ ID NO: 286294 - DNA, 246 bp, Unknown
  Bacterial polypeptide expressing nucleotide sequence isolated from the Sargasso Sea
catgccgaagttgagatccgccaccaccacccacggacgtaacatggccggggcccgcgccctgtggcgtgccaccggaatgaccgatcaggatttcggcaagcccatcatcgccgtggtcaactccttcacccagttcgtgccgggtcacgtccacctcaaggatctgggccagctggtggcgcgcgagatcgaagccgctggcggcgtcgccaaggagttcaacaccatcgccgtggatgacgg

SEQ ID NO: 286295 - DNA, 1663 bp, Unknown
  Bacterial polypeptide expressing nucleotide sequence isolated from the Sargasso Sea
tatggcaaagttttctgatgacgtaacacaaggtatcgaaaaatcagctgcaagagcaatgttgagagcagttggtttaaatgatgatgactttaataaatttcaagtaggaatagtttctgcaggaaatgaagttacaccatgtaatttaacaggaccagaattatcaaattttgcaaaagagggtgtaaatggagctgattcagcaggattaatattttcaacaattgctgtttcagatggtatttcaatgggccacgaaggtatgagagcttcattggtttcaagagaagtaattgctgattcagttgaattggtaatgcatgctgaaagatttgatggaatggtgactattgcgggatgtgataaatcattacccggcatgttgatggcttcagcgagaataaataggccagcaatatttttatatggtggcagcagccttcctggagtatataaaggaaaagatatttcaattgtggatgtttttgaaggcattggggcatttgataaaggcttgatatctgaagaagaattatacgaaatagaatgtaatgcatgtcctgggcaaggttcctgcgctggaatgttcacagcaaacacaatggcatcagttggcgaagctatagggatgagcttaccagggacagcatcaatacccgcagaggatgaccgattaagagatgctgcaaaagagtcaggacttcaattaaattacttacttaaaaatgacattaaaccacgagatatcatgactattgatgcatttaaaaatgcaatcacaacagtcttggcgttaggtggaagtacaaatgcagtattacatttattaggtatagctcatgaagctcgtgtaaacctagatttaagcacttttgatgatattggaagacaggttccacatattgctgatatgaaaccattcggaaaatatcatatggttgatttagataaaattggaggagtcccagtagtttcgaaaattttacttgaaaataaattaataaatcctgactgtttgactgttactggaaaaacagttggtgagaacttagagaatattgaaatacccactaatcaagacgtagtatattttccagataatccgattgcgagtgaaggcggaattgcaatccttaaaggttccttatcaccaaaaggatctgttgtgaaaacagcaggtatagagattaatgaattttctggtcctgctaatgtctttgaaagtgaacaagatgctattgatgctttatttaacaacaaaataaataaaggggatgttgtagtaattagaaatgaaggacccaaaggaggtcctggaatgagagagatgctccagataactgctgctataaaaggtgctggtcttggcaaggatgttttgttaattaccgatggtcgattttccgggggaacaacaggtttatgcattggacatgttactcctgaaagttttgatcatggacctatctcgatttgtaaaaatggtgatgtgattactcttaatcttacaaagagagagctcaatcttgaaataagtgaatctgaagtagtttccagacttgaagattatgttttgcctgaaccaagatataaatctggagtgctgaacaaatactctaaactagtatcaggagctgatactggcgcagttacctcatag

SEQ ID NO: 286296 - DNA, 1663 bp, Unknown
  Bacterial polypeptide expressing nucleotide sequence isolated from the Sargasso Sea
atggttaaattttcagatgatgttacgcaaggagtagaaaagtcagctgctcgtgcaatgttgagagctgttgggcttcaagatgaagattttgaaaagtttcaagttggtatagtttctgcaggaaatgaggttacaccatgcaacctaactggtccagagctttcagaacatgcaaaagaaggtgttaatggtgatgtttctgctggattgattttttcaacgatagctgtctcagacggtatatcaatgggtcacgaaggaatgagagcatctttagtatctcgagaggtaattgctgactctgtagagttagtaatgcatgcagaaagatttgatgggatggtaacgatagctggttgtgataaatctttacctggaatgttgatggcttcagcacggataaataggccagccatatttctctatggaggaagtagcttaccgggtgaatataaaggtaaagatatatctatagtcgatgtatttgaaggaatcggtgcattggaaaaaggcttaatcacaaaagaggaactatatgaaatagaatgtgcagcttgtcctgggcaagggtcttgtgcagggatgttcacagctaatacaatggcttcagttggagaggctattggaatgagtcttccaggaacagcttctatacaagctgaagatcagagattgagaaaagcagctaaggaaacaggagatcagctaaattatttgttaaaaaatgatttaaaacctagagatataatgactagagaagcttttcataatgcaataactacagtcttgtctcttgggggaagtacaaatgcagtattgcacttgctggctattgcttatgaagcaaaagttgatttgactatcgatgtttttgatgaacttgcaagaaaagtcccacatcttgcagatatgaaaccatttggaaaatatcatatggttgacctcgataagatcggaggagtccctgttgtatcaaaaatacttcttgagaataaattaatagatccaaattgtatgacggtgactggaaaaacagtcggagaaaatttagagaatattgaagtacctaaagatcaagatgttgtttattttccggataatccaatttctaaagagggaggtttagcaatattaagaggatctctgtcacctaatggatcagttgtaaaggttgcaggtatagaaattgatacattcaaaggaccagcaaatgtttttgacagtgagcaagaagcattggatgctctttttaataataaaattaagaaaggagaggttgttgtaattagaaatgaagggccaaaaggtgggcccggaatgagagagatgttgcaaataactgccgcgatgaaaggagcaggtctaggtaaagatgtattacttattacagatggcagattctctggtgggacgactggtttatgtattggacatgttactcctgaaagtttcgataatgggcctattgcaatttgtgaaactggtgatgaaataagcttggacttaaaaaaaagggaactaaatctaaatgttgatgaaaaggaaatagaaaaaagattaaaaaaatataccaatcctgagccaaggtacagttctggagttctaaataaatattctaaattagttacaggtgctgataggggagctgtaacaggttagt

SEQ ID NO: 286297 - DNA, 1087 bp, Unknown
  Bacterial polypeptide expressing nucleotide sequence isolated from the Sargasso Sea
aatgaaaaaatttaataaaaaaaagctacctagtagacatacttctttaggacctgataaagctcctcaaagatcattctattatgctatgaacttaactgaaaaagatgttgcaaaaccattcgttggtgttgtttcaacttggaatgaggcagctccttgcaatatagctttaatgagacaagctcaatcagttaaaaaaggtgttcaattatcaggaggtacaccaagagaattttgcacaattacagtaacagatggtattgcaatgggtcatgaaggaatgaaatcttcattaatttcaagagatgtaattgctgattcaactgaattaacagttagaggacattgttatgatgctctagtaggagttgcaggatgtgataaatcattgcctggtttaatgatggcaatggttagattaaatgttccaagcgtttttatatatggaggatctattcttccaggtagattaaatggaaaagatattaccgtagtagatgtttttgaaggagttggtaaatactcttctggaaaaatttcagaacacgcattaagaaaaatagaattaaaagcatgcccaactgctggtgcttgtggtggtcagtttactgctaatacaatggcatgtgtatcagaagcaatgggactagctttaccttattctgctggaaccccagctccatttaacagaagagataagtatgctttagctagtggaaaagctgtaatgaatttattagcaaaaaatattaaaccaagagatattgtaacaaaaaaagcattagaaaatgctgcaacaattgttgctgcaacaggtggatcaacaaatgctgctttacacttaccagctattgcaaatgaaattggtattaaatttgatttaatggatgttgctaaaatatttaaaagaactccttatcttgcagatttaaaacctggtggaaaatatgtagcaaaagatatgtggaaagcaggtggagttcctatgttgcttaaaactcttatggatggtggatatatacacggtaattgcatgacggttacaggcaaaactatgaaagagaatttaaaaaacgttaagttt

SEQ ID NO: 286298 - DNA, 856 bp, Unknown
  Bacterial polypeptide expressing nucleotide sequence isolated from the Sargasso Sea
tatgcctgattacagatcaaaaacatcgacacatggaagaaatatggcaggtgcaagagccctatggcgagcaactggtatgggagatgatgattttggtaaaccaatcatcgctattgctaattccttcactcaattcgtaccgggtcatgtacacctcaaagacctagggcaaatggttgctagagagattgaaaagtcaggtggagtggcaaaagaattcagtaccattgcggtggatgacggaatagcaatgggccattcagggatgctatatagcttaccatctcgtgaactgatagcagatgcggtggaatatatggttaatgctcactgtgcagatgcactcgtctgcctttcgaattgcgataagattacacccggaatgctgatggcaacaatgcgtctgaatgtaccgaccatttttgtctcaggtggaccaatggaggcaggcaaaggtttagtaaaaggccaagaggcgagcctggatttagttgatgccatggtacttgccgcagatccaagtgtctccgatgaagatgttgcaaaagttgagagatccgcttgtcccacttgtggttcatgctctggcatgttcactgccaattctatgaattgcttggttgaggctcttggactcgcacttccagggaatggaagtgtgcttgcaacacatattgatcgtaaagagcttttcttaagagctgggaaaattattgttgagttgaccaagcaatactatgaaaaagatgatgaaagtgttcttccaagaaatatcgcaaatctagaatcatttgaaaatgccatgaccttggatattgccatgggaggttctacaaatactgtgttacatata

SEQ ID NO: 286299 - DNA, 747 bp, Unknown
  Bacterial polypeptide expressing nucleotide sequence isolated from the Sargasso Sea
aatgaagatttctagtagaaatgttgtggaaggtacagctcgagcaccacatcgtgcaatgtataaagcgatgggattaactaatgaagatttagcaaaatctatggttggcgtatgtcacacaggtaatgaggcaaccccatgtaatattcatcttccaaatcttgcacaacaagcaaagcaaggtgtgttagatggtggaagtacaccacgagaattcagtacaattgcggttagtgatggaattgcaatggggcatgaaggaatgaaatcatcattaatcagtagagaagtgattgcagattcaattgagcttatggttagagcacatcaatatgatgcattagtaggaattgcaggttgtgacaagagtttaccaggtacaatgatgggaatgattagactgaatattccatcggtctttgtttatggtggaaccataatgccaggaatgctagacggaaaagaactaacagttgttgatgtttatgaggccgtaggttcatacgatgcgggaaaaataactgcagaagaattagaaaatattgaaaatgtggcatgtcctaatgcaggttcttgtggaggaatgtttactgcaaacactatggcatcaatttcagaagccattggattatcattaccaggtagtgcaagcccacctgcagaagatgaaagaagaaacaaaattgtgtatgatacaggaaaagcgtgttcagaattactcaaaacaggcataaaaccactaga

SEQ ID NO: 286300 - DNA, 1126 bp, Unknown
  Bacterial polypeptide expressing nucleotide sequence isolated from the Sargasso Sea
aaaaaaattacctagtagacatacttcattaggtccagataaagcgccacaaagatctttttattatgcaatggatctaacagaaaaagatgtagcgaaaccttttgttggtgttgtttcaacctggaatgaggctgcgccatgtaacattaatttaatgaaacaagcccaatctgttaaaaaaggtgttcattcagcaggtggtacaccaagagaattttgtacaattaccgtaacagatggaattgcaatggggcacgaaggaatgaagtcttctttaatatcaagagatgtaatagcagattcaacagaactaacagttagaggtcattgttacgatgctttagtaggtttagctggttgtgataaatcattaccgggtcttatgatgtctatggttcgattaaatgtaccaagtgtatttatttatggtggatcaatattaccaggaagatttaatggtaaggatgtaactgtagtagatgtttttgaaggtgtcggaaaatatacatcaaaaaaaatgacagctcatgctttaagaaaacttgaattaaaagcatgtcctagtgcaggtgcttgtggtggacagtttactgcaaatacaatggcctgtgtttcagaagcaattggattagcgttaccttattcggctggaacaccagcaccatacactgaaagaaataaatatgcgctagcaagtggtaaagctgtgatgaatttattagcaaaaaatattagaccaagagatatagttactagaaagtcattagaaaatgccgcaacaattgttgctgctacaggtggatctacaaatgctggtttacatttaccggctattgcaaatgaaattggaattaaatttgatttaatggatgtagcaaaaatttttaaaagaactccttacttagctgatttaaaaccaggtggtaaatatgttgctaaagatatgtggttagctggtggtgttccaatgttattaaaaactttaatggatggtggttttattcatggtgattgcatgacagttactggaaaaactatgaaggaaaatttgaaaaatgttaaatttaaaaaaaatcaaaaagtaatgagagaatataacaatcctttatcaaaaactggaggc

SEQ ID NO: 286301 - DNA, 1037 bp, Unknown
  Bacterial polypeptide expressing nucleotide sequence isolated from the Sargasso Sea
aatggcaaaatttaataaaaaaaagctaccgagtagacatacgtcagttgggcctgataaagctccacaaagatctttttattatgctatgaatttaacagaaaaggatgttgcaaaaccgtttgttggagtagtttctacttggaatgaggcagcaccttgtaatatagctttaatgaggcaagcccaatcagttaaaaaaggtgttcaactctcaggtggtactccaagagaattttgcacaattactgtaaccgatggaattgcaatgggccatgaagggatgaaatcatctttaatttcaagagatgttattgcagattctacagaattaactgttagaggccattgctatgacgctttagttggagttgcaggttgtgacaaatctttaccaggattaatgatggcaatggttagattaaatgttccaagtgtatttatatatggcggatctattcttccaggaagatttaatggaaaagatgtaaccgttgttgatgtatttgaaggagttggaaaatattcctcaggtaaaatgtcagctcatgcattaagaaaattagaattaaaagcttgtccaagcgcaggtgcatgtggtggacagtttacagcaaatactatggcatgtgtatctgaagctattggattagcattaccatattcagctggtaccccagcaccatacacgcaaagagattcttatgctttaaaaagtggaaaagcagttatgaatttattacagaaaaaaattagaccaagagatattgttacaaaaaaatcactagaaaatgctgcaacgattgttgctgcaacaggcggatctacaaacgctgcattacatttaccagcacttgcaaacgaagctggaattaaatttgatctaatggatgttgcaagaatatttaaaaaaacaccgtatcttgcagatttgaaaccaggtggaaaatatgttgcaaaagatatgtggaaagctggaggagtgcctatgctccttaaaacgcttttagagggaggttatatacatggtaattgta

SEQ ID NO: 286302 - DNA, 1720 bp, Unknown
  Bacterial polypeptide expressing nucleotide sequence isolated from the Sargasso Sea
atgccaaaatttaataaaaaaaaattacctagtagacatacttcagttggacccgataaagctcctcaaagatcattttattatgcaatgaatttaacagagaaagatgtagccaaaccttttgttggagttgtatctacatggaatgaagcagcaccttgtaatattgcattaatgagacaagctcaatctgttaaaaaaggcgttcatcaaggaggagggacaccaagagaattttgcacaatcacagttacagatggtattgcaatgggacatgagggaatgaaatcttctttaatttcaagagacgttatcgctgactctacagaactaacagtaagagggcattgttatgatgctctagttggagttgcaggttgtgataaatctttaccaggattaatgatggcaatggtacgattaaatgtgccaagtgtttttatttatggtggatcaattcttccaggcagatttaatggaaaagatgtaacagtagttgatgtatttgaaggtgttggaaaatattcttcaggaaaaatgacagaacacgcattaagaaaattagaattagtagcatgcccaagtgctggtgcatgtggtggacaatttacagcaaatacaatggcatgcgtttcagaagctattggtttagcgttaccttattcagcaggaactcctgctccatacgaacaaagagataagtatgcattacaaagtggtaaagcagtaatgaatttattaaaaagaaatattagaccaagagatattgttactcgtaaatcattagaaaatgcagcaactattgtagcagctacaggaggatctacaaatgcagcattacatttacctgcattagcaaatgagatcggaattaaatttgatttaatggatgttgctaaaatatttaaaaaaactccgtacttagctgatttaaaaccaggtggtaaatatgttgcaaaagatatgtggaaagcaggtggagttccaatgttacttaagacacttatggatggtggttatattcatggagattgtatgacagttactggaaaaactatgagacaaaatttaaaaaatgttaaatttaatctaaaacaaaaagtgatgcgtaaatataataatcctttatcgccagatggtggtgtagtaggccttaaaggaaatttagctcctgaaggtgcaattgtaaaagttgcagggttaaaaaaattacagtttactggaagagcaagatgttttgatacagaagaggctgcttataaagctgttaaaaatagaaaatacaaagatggagatataataattattagatacgaaggaccaaaaggtggacctggtatgagagaaatgcttcaaactacaggagcgatttacggtcaaggcaaaggtgagaaagtagctttaataacagatggaaggttttcaggagccacaagaggcttttgtattgggcatgttggaccagaagcatctgtagggggaccaatagcattacttagaaatggagatataattgatttagatgcaaaaaaaggaactattaacgttcgtttatcaaagaaagaattagctaaaagaagaaaaaaatggaaaccaaagaaaataaactttggtaatggtacactttggaaatatgcgcaaacagtagggccagcttatttaggtgcacctacacatcctggtggtaaaaacgaagtaaaagtatacgctgatatttaat

SEQ ID NO: 286303 - DNA, 1732 bp, Unknown
  Bacterial polypeptide expressing nucleotide sequence isolated from the Sargasso Sea
atggaagataagggttcaaatagaaaatctaatctacctagtagatatgttagtgtagggcctaaaagtgcgcctcatagatcttattattatgctatgggtttgaaagaacatgaaatttatcaaccatttgttggtgttgttagcacctggaatgaatcagctccttgcaacattactcttcaggatcaagcgcaacatgtgaagacaggtgtcaaagatgctggaggaacaccaagagaatttacaactataacagtaacagatggaattgccatgggccatgaggcaatgaaatcctctcttattagtagagaagttattgcagattccattgaattatctgtgagaggtcactgttatgatgcaatagttggacttgctggctgtgataaatctttgccaggtttaatgatggctatggttagattaaatgtaccatctgtattcatttatgggggttcaatcttaccaggaaaatacaagggtaaagatgttactgttattgatgtttttgaagcagttggaaaacatgctgctggaactatctcagatcaagatttaaaagatattgaacaagttgcttgcccatctgctggatcgtgtggaggtcagtttacagcaaatacaatggcatgtatttctgaagcagttggtttagctctaacaaattcagctatgccaccagcagtaaatactgaagaaagaaaagcttatggtgaaaagagtggtaaagctataatgaatttattagaaaagaatataagaccaagggatatagtaactattgattcattagtaaacgctgcaagagtagttgcagctactggaggttcaactaatgcagcactccatcttcctgcgatagctaatgaagcgggtttaaaatttacattaagagatgttgtagaaatttataattcgactccttatatcggagatatgcaacctggtggaaagtacgttgctaaagatttatatgatgtaggaggtgtgccagttgttataaaatctttattagatggtggttatataaacggagactgcataactgttacaggaaaaacaatagctgaaaatcataaagaagtaatatttcctacaaatcaagatgttgtttataaatgtgataatccaattagtgaaaatagttcagtcgtagggttgtggggtaatcttgctccagatggatgtatatcaaaaatagcaggtttaaaaaatttaacttttaaaggaaaagctaaatgttttgactcagaagaagatgctttaaccgcagttttaaaaaatgaaattaaagccggagatgcggtaataattagatatgaaggtcctaaaggaggacctggtatgcgtgaaatgctttcaacaacaggtgcaatatatgggcaagggttaggtgaaactgttgctttaattacagacggacggttttcaggtggcacaagaggattttgcattggtcatgtaggaccagaagcagctgtaggaggtatgataggtttacttaaagatggcgatgagattattattgatgctgttaaaggtgaaatcaacgttacgctttcagatcaagaaatagaaaagagaaaaaaagattggaagccaagaaaaactaatcataattctggatctatatggaaatattctcaaactgttgggccagcttacgagggtgctgttactcaaccaggagcaaaagacgaaacgcatacatacgctgatatttaat

SEQ ID NO: 286304 - DNA, 1303 bp, Unknown
  Bacterial polypeptide expressing nucleotide sequence isolated from the Sargasso Sea
gatgagaaaatattcctcaatcattgtagacggcaaagataggtcacctagtagatcaatgctcagggcagttggttttaagaaaaaagattttaaactccctcaaataggaattgcttcaacatggagtatggttactccgtgcaatatgcatattgataaactagcaaatgttgctgcttccaatataaactcttgtggtggcaaatctgtaatctttaatactataacagtctctgatggaatttctatgggaacaagtgggatgagatattctctagtttcccgagaggtaattgctgattcaatagaaactgtcgttggctgcgaaggttttgatgggtttttgacaattggtggatgtgataaaaatatgcccggatgcgtcatagcgatggctaggctgaacaggccatctatatttatatatggagggacaattctcccaggcttatataaaggtaaaaaaatagatattgtatctgtttttgaagcagttggtaaaaatgccaataaacaaattagtaatagagaattagaagatattgaaaaaaaagcgatacctgggcccggatcatgcggaggaatgtacactgctaatactatggcttctgcaattgaagcaatgggtcttagtcttacaaatagttctgctcagtctgcagtttctagtaacaaaaagaatgattgcaaaaaatctgcagctgcgcttatgaattgcgttaagaaagacataaaaccaagggatattatcacaaaaaaatctcttgagaacgcaataactgttgtaatggctcttggtggctcaacgaatgcagttctgcatttaattgcgatagcaaaagcttcaaaagttaaacttactctagatgattttgacaggattggaaaaagaacccctgtgttagcagatttaaaaccaagcggaaagttcagtatgtcagaactgatacatatcggtggcgttgcccctttaatgaaaatgctattaaatgctaaattactgcatggcgactgtttgacagttaccggaaagacattagctcaaaatcttaaaaatataaaaccttatactaaaaaacaaactatcgtaagagattttgataatccaattaaaaaagatggacacttaattatcctaaaaggaaatttgtcaccaaatggttcagttgctaaaatttctggaaaagagggaaatattttcattggtaaagcacaagtcttcaattccgaagagagagccttgaaaactattttaaatggaaaaattaaaaaaggaactgtaatagttatcagaaacgag

SEQ ID NO: 286305 - DNA, 1675 bp, Unknown
  Bacterial polypeptide expressing nucleotide sequence isolated from the Sargasso Sea
atgagaaaatattcctcaattattgtagatggtaaagataggtcacctagcagatcaatgcttagggcagttggtttcaagaaaaaagattttaaactccctcaaataggagtcgcctcaacatggagtatggttactccatgcaacatgcacattaacgaattagcaaatgttgctgcttctaatatagactcttgtggtggcaaatcagtaatctttaatactataacagtatctgatggaatttctatgggaacaagcgggatgagatattctctagtttccagagaggtaattgctgattcaatagaaactgtcgttggctgcgagggttttgatgggtttttgacgattggtggatgtgataaaaatatgccaggatgcgtcatagcgatggctagactaaatagaccatctatatttgtatatggcgggacaattcttccgggtttacataaaggtaaaaaaatagacattgtctccgtttttgaagcagttggtaaaaacgcgaataaacaaattagtaatagagaattagaagatattgaaaaaaaagcgataccagggccaggatcgtgcggaggtatgtataccgctaatactatggcatctgcaattgaagcaatgggccttagtttgacaaatagctcggctcagtctgcagtttctagtagcaaaaagaacgattgtaaaaaatctgcaatcgcgctaatgaattgtgtcaagaaagacataaaaccaagagatatcatcacaaaaaaatcacttgagaatgcagtaactgttgtaatggctcttgggggctcaaccaacgcagttctccatttaattgctattgcaaaagcctcaagggtcagacttactttggatgattttgatagaattggtaaaaagactcctgttttagcagatttaaaaccaagtggaaagtatagtatgtcagaattgataaatattggtggtgtagctcctttaatgaaaacattactaaacgctaaattacttcatggtgactgtttaacagtcacagggaagacattagctcaaaatcttaaagacataaaaccttatccgaaaaaacaaacaatcgtaagaggcctggataatccaattaaaaaagatggccacttaattattctaaaaggaaatttatcaccaaatggttcagttgctaaaatttctggaaaggagggaaacattttcattggtaaagctcaagtttttaattctgaagagagagctttaagggctattttaaatggaaaaattaaaaaaggaactgtaatagttattagaaacgagggccccgttggaggtccaggtatgagagaaatgttatcacccacatctgcagtaatgggtaaagggctaggaaaagacgtagcacttattacagatggcagattttcgggcggtagtcatggatttgttgtaggacatatttctccagaggcattcgttggtggaccattagcagctgttaaaaacggtgatcttatagaaattgattcagttaaaaaagaacttaatttaaaaataaaaaaaactgagattactaaaagattaaaaaaatatgataaatcacgcaatcaaaagctcgatggtgtattacttaagtatgcaaaattagtcagtcaagctgatgaaggtgcagtaactacagatataaattaaa

SEQ ID NO: 286306 - DNA, 1660 bp, Unknown
  Bacterial polypeptide expressing nucleotide sequence isolated from the Sargasso Sea
aatgagttcaagaaaatactccaaagatctagttgatggacctaaccaagcagcatcacgttcaatgcttcgtggtgtgggattcacaactgaggattttactaagcctcttgtgggtgttgcttctactggtgccaaagtaactccatgtaatatgcatttaaataaactttcagaagttgtagaagattcaattaattcatctggaggaaaaggagtcttatttaatacgatcactgtgtcagatggtatttcaatgggaacacaaggtatgaagtattctttggtttctagggaagtaattgcagactcaattgaaactgtggttggttgtcttggttatgatggattaataactataggtggttgtgataaaaacatgccaggttgtcttataggaatggctaggttaaataggccctcaatatttatatatggggggtcaataaaaccaagtaaggaaaatactgactatgtgactgtttcagaaaaggttggtgaattttcaaagggaaaaatcagtcaagaagaattaattcatttcgaagaaatatcagttgagggacctggctcatgtggtggtatgtatacagcaaataccatggcttctgctattgaagcattaggcatgagtcttcctggaagttctagtcaagatgccgtttcatcatcaaagaatcaagactgtatagatgctggaattgcaataatgaatctacttgaaaaagatataaagccatctgatattatgacaaaggaagcttttgaaaatgctattacaatagtaattgctcttggcggatcaacaaatgcagttcttcatatcatagccatggctcactctattggagtaaaattaacattagatgacttcacaaatattggtaaaaaaacgccagttttagcagacttaaaaccttctggaagtcattatatgtcagagttaaattcttcaggcggcatacaacctttaatgaaatcattattagaaaaaggattgctaaatggtgagtgcattactgttactggaaaaactctagaagataatttaaaagacatagagccatataaagataataaaattattaaaagctttgataatcccattaaaagtgacagtcatctaagaattctttatggaaacttagcaagtgatggcgctgttgcaaaaattactggcaaagagggcacatcttttgaaggtaaagctaaagtatttaattctgaggaggatggagttgaagcaatactagggaaccaaatagaagagggagatgtaattgttataagatacgaaggtccaaagggtggtcctggcatgagagaaatgctgaaaccaacttctgcaattatgggactgggtttgggagataaagttgcatttataacagacggaagattttctgggggaactcatggttttgtagttggtcacatatctccagaggctgcggatggaggattaatcgctttaatagaagacggagatcaaattttaattgacgcaaaaacagataagctaattctaaaagtaaatgatgatgaaattgagaaaagaaggatggcctggaagtctccaataaaaacaccagaaaaaggtgtcttatctaagtatgcaaaaagtgtaaaatctgcaagtttaggagcgataactgattaa

SEQ ID NO: 286307 - DNA, 1342 bp, Unknown
  Bacterial polypeptide expressing nucleotide sequence isolated from the Sargasso Sea
tgtgataaatcactccctggcttaatgatggcgatgtgcagattaaatgtaccaagtgtttttatgtatgggggcagcatattgcctggaaagtacaaaggcaaagatgtaacagtagttgatgtttttgaggcagtcggcaaattttcatctggaaacgccactgaagaagagttacatgaacttgaatgtgttgcctgtccaagtgctggtgcttgtggcggtcaatttacagcaaataccatggcgtgcgtttcagaagcaatcggcctagcacttccttactcttctggtgcgcctgctccttatgaagaaagagataaatacgcatacgactctggaaaacaagttatgaacttaattgaaaataatatcagacctcgagatatagtaacaagaaaatcactagaaaatgctgcaacaattgttgccgcgacaggtggttcgacaaacgcaggtcttcatctgccagccattgctcatgaatgtggaataaaatttgatttagatgacgttgtcgaaatttttaagcgcactccttacttggctgatttaaagcctggaggtcaatacgttgcaaaggatgtttatgaagcggggggagttccaattataattaaaactttatatgagggtggtttcattcatggcgattgtttgacagtcacagggaaaacaatagctgaaaatttaaaatcagttgagtttaataaaaatcaaaaagttattcgaccatatgatgaacccttaagtatcacgggaggtgttgtaggtttaaaaggcaacttagctccagaaggggcgattgtgaaagttgctggaatggagaatttgaagtttaagggtcatgccaagtgttttgactgtgaggaagatgcatttgagtgtgttaaaaatgaaaattacaaagaaggagatgtttttgtcatacgctatgaaggcccaagaggaggtccgggcatgcgagaaatgttggctacaaccgcagcaatttatggtcagggaatgggtgataaagttgcactcattacagacggacgcttcagcggcgccacaagaggattttgcgttggacacgtctctcctgaagcagctgtctgcggcccaattgcacttgtagaggacggcgatgaaattatacttgatgccgaaaatgggaaaatttctattaatgttccattggaaacgttagaaaagagaaaaaagtcatggaaagagcgaaaaacagactttaattccggaacactttggaaatacagtcaaactgttggttctgcagtaagtggcgcggtaacccaccctggagctgaaaaagaaactcacgtttatagcgatatttgac

SEQ ID NO: 286308 - DNA, 1168 bp, Unknown
  Bacterial polypeptide expressing nucleotide sequence isolated from the Sargasso Sea
gttggagaattttcaaagggctctataaatgaagatgagttaattcattatgaaaagatatcagttgatggaccaggctcatgtggcggaatgtatacagcaaatacaatggcatccgctatagaagcattaggaatgagtttgccaggaagcagcagccaagatgcaacatctaaatcgaagaatgctgattgtgtgaatgctgggtcggcaatcattaatttactagataaagatattaaaccatctgatattatgacaagagaagcatttgaaaatgctataactgtagtaatagctctagggggatcaacaaatgccgttcttcatttattggccatggctcactcaattggagttgaactttgcttagatgactttactacaatcggaaagaaaacacctgtattagctgacctaaaacccttcggaaaacattatatgtctgagcttaatgcaaatggaggaattcagcccttaatgaaaactcttttagataaaggacttcttcatggccaatgtatgacagttacaggtaatacattagaagaaaatttaaaagacataaaaccatatgagactagtgaaataattaaagattttaataatccaatcaaaaaagatagtcatcttagaattttatacggtaacctcgctaaagatggtgcagttgcaaaaattacaggtaaagaaggaacatcttttgaaggaaaagcaaaggtatttaattcggaagaagatggtgtaagtgcaattttatcaaatcaaattaatgatggtgatgtaatagtaataaggtatgaaggtccaaagggtggtcctggcatgagagaaatgcttaaacctacttctgcaataatgggattaggcctaggagataaaattggatttattacagacggaagattttcaggtggtacccatggttttgtagttggacatgtttctccagaagcagctgagggtggtttaatagcattaattgaagacggagatactatacttattgatgcagaaagtgatcagcttgttctaaaagttgatgatgatgaaattaaaagaagacaatcaatttggaaaaatccaaacaggaaaccaaaaaaaggagtacttgctaaatatgctgagagcgtaaaatctgcaagcctgggagctataaccgattaaa

SEQ ID NO: 286309 - DNA, 448 bp, Unknown
  Bacterial polypeptide expressing nucleotide sequence isolated from the Sargasso Sea
atgttttgattcagaagaatctgcaatgcgctccatactgaatggaaaagtaaaaaaaggtcatgtagttattatcagattcgaaggaccaaaaggagggcctggcatgagagagatgttgggacctacaagtgcaattatgggtgccggattaggtaaagatgtcgctttaattactgacggtaggttttctggtggcagtcatggttttgtaattggtcacgtttctcctgaagccgctgaagggggcgaaattgccattgttagaaatggtgactctattacaattgatgcaaaatcaaaaaaaatctctttacatctgacagcgaaagaaatcaaacatagaaaaagtaaattacctgctcataagtccaaatacaaaaaaggggttttagcaaaatatgcaaaatctgttagctctgcatctgaaggtgcaataactgattaa

SEQ ID NO: 286310 - DNA, 838 bp, Unknown
  Bacterial polypeptide expressing nucleotide sequence isolated from the Sargasso Sea
tgaggcaggaattaatctaacatatgatgattttgaaagaattagaaaaaagacaccgcatcttgcagatatgaaacctggaggaaattatgtaatgaatagtttagacaaaattggaggaattccattagttatgaaaaaattattagacaaaaatctgattcatggagattcattgacagttactggcaaaaccatcaaagaaaatttagaagagttggcaatagtagaagttccagatcaacaaataatcaaaccagttgaacaacctatacatgaagttggaactgccgtaattctaaaaggaacgttggcaccagagggaggagtaatcaaaacggcaggagttgaaatgacagaatttacaggaacagcaaaagtttttgatagagaagaatacgcatttgaagcagtttctaaaggagagatagacgaaggagatgtcgtagttattagatatgaaggacctaaaggcggcccaggaatgagagagatgttgtctactactgcagcacttgtaggtcaaggattaggaaaaaaagttgcaatggttactgatggtagattttctggaggaactcgaggatttatgattggacatgttgcaccagaggcatttgttggaggacctatagcattggtaaaagacggcgataaaatctcaattaaattagaagacaattcattaaacctacacgtatcagaagaagaattatctaaaagaaaagaacaatggagaagaccagcaccaaattattctacaggagcacttgcaaaatttgcatcactcgtaggatctgctgcaaacggtgcaattacaaaacctgcagaatactaa

SEQ ID NO: 286311 - DNA, 1799 bp, Unknown
  Bacterial polypeptide expressing nucleotide sequence isolated from the Sargasso Sea
agctctctggcgagcaaccggcatgggcgatgatgattttggtaaacctatcatcgccatagcaaattctttcactcagtttgttccaggccatgtccatctcaaggatcttggtcaaatggttgccagagagattgaaaaatcaggcggggttgcaaaagaattcagcactattgcggttgatgatggaatcgcgatgggccactcgggaatgctttatagcttaccctcacgagagttaatagcggatgcagttgaatatatggcaaatgctcactgtgcagatgcacttgtgtgcctttcaaattgcgacaaaattacacctgggatgttgatggcaacaatgcgtctcaatataccaaccatttttgtatccggaggcccaatggaggcaggaaaaggtttgataaaaggtcaagaagcgagtctagatttaattgatgcgatggttctagccggggatccaagtgtttcagatgaagaggttgaaaaaattgaaagatctgcgtgtccaacttgtggttcttgttccgggatgttcactgcaaattccatgaattgtttggttgaagctcttggacttgctcttcctggcaatggaagcgtactggcaactcatattgatcgcaaagaacttttcttaaaagctggaagaattattgtagaactcacaaaacaatactatgagaaagacgatgagagtgttcttcctagaaacatcgcaaatttaaaatcatttgaaaatgccatgaccttggatattgccatgggaggctctaccaatactgtgcttcacattctcgctgcagcaaaagagggtgagcttgattttggaatggacgatatagatcgtctgtccagaagagttcccaacctatgcaaagttgctccaagcagtaactttcatatggaagatgttcacagagccggcggaataatggctattcttggggagctcgagaaagcaaaattactcaattctgagagtaaaacagtccatacagaaacaatgcttgatgcaattaatgaatgggatatcaatagaaaaccgtccgaagaagttaaagaattctattctgctgctccgggaatgattccaacaactcagcctttctcgcaaaataaaagatatccagaactggatttggatcgcgaaaacggatgcattagaggttctgataatgcgcatagccaagacggtggattagctgtgttaaaaggcaatattgcaacggatggatgcattgtaaagacggccggtgttgatgaaaagattctaacctttagtggtcctgcaaaggtttttgagagtcaagacgatgcggttgatgcaattcttggagacgagattcttgcgggggatgttgtagttattcgttatgaagggcctaagggcgggccaggcatgcaagaaatgctctatccaactagttatctaaagtcaaaagggcttggtgaaaaatgtgccttaatcacagacgggcgattctcaggtggaacatctggtttatccattgggcatatttctccagaggcagcatcaaaaggctatattgctttaattaaagacggagacatcataaacattgatattccaaatagatcgatcaatgttgatctcttggatgaagagctagagcttagaagaaaagaaatgtcctcctttgggaaaaaagcttggaaacctcgaaacagagacaggacggttagcttggctctacaggcatatgcattattggcatcgtccgcatcagatggggccgtcagacaaatagaaggaattggtgatgacgagtaaa

SEQ ID NO: 286312 - DNA, 580 bp, Unknown
  Bacterial polypeptide expressing nucleotide sequence isolated from the Sargasso Sea
agggaacattgcatctgatggatgcattgtaaaaactgcgggtgtcgatgaaaaaattctaacctttagtggacctgcaaaagtttttgaaagtcaagatgatgcggttgaagcaatccttggagaccagattgtagctggagatgtggttgttattcgctatgaaggaccaaagggagggcctggcatgcaagaaatgctttatccaaccagttatttaaaagcaaaaggactaggtgaaaagtgtgcactgatcaccgatggaagattctcaggaggaacgtctggcttatccattggacatatttctcctgaggctgcatcaaaaggctatattgcgcttatcaaagatggtgacatcattaatatcgacataccaaaaagatccattgatgttgatctcttagatgaagaattggaaatcagaaaaaaagaaatggcttctcttggaaaaaaagcgtggaagcctcataaaagaaatagaaaagtgagcttggcactccaggcatatgcattattggcatcatctgcatcagatggtgctgtaagacaaattgaaggaatcattgatgatgagtaa

SEQ ID NO: 286313 - DNA, 499 bp, Unknown
  Bacterial polypeptide expressing nucleotide sequence isolated from the Sargasso Sea
atggaatatataagcactagaaacaattcagatcatttttcatttaaaaacgtatttctaaaaggtttagctgatgacgggggtctttttgtaccaaagtcaatcaaaccatttagtaaagatgaattaaacaaactaagtggtcttaattacaatgaattagcagccgaaataattttcccatttattggtgattttatgactaaagaagaattaatttccacaatatcaaaatcttactcaaattttagagtagaggatgttgtaaaaatctctgatttaggaaatttaaaagttttagaactctatcatggcccaacacttgcttttaaagatattgcaatgcaattaataggaaatttttatcaatttcatttagcaaatgagcaaaaaaaaattaatattattgtagcaacttcaggagacacaggtgcagctgcaattgatgctttaaaaggaaaaaagaatttaaatgtttttgtattacatccaaataaca

SEQ ID NO: 286314 - DNA, 534 bp, Unknown
  Bacterial polypeptide expressing nucleotide sequence isolated from the Sargasso Sea
gatgaaatatataagcacaagaagtaaagaaaaagaatacagttttggtgaagtttttctaaaagggcttgctgatgatggtggtctttatgttccaaaatcgataaataaatataactcagcagaactatcaaaactcaaaaacttaaattatagagaattatcttctgaaataataagccaatttttaggagattttatctcaagagaagaactttcatcattaattaaaaaatcatattcaacatttagagaaaaagaagtggttaaactttcaaatgttggagtaacaaaattattagaattatatcacggcccaacattggcatttaaagatgttgcaatgcaatttattggcaatttatatgattatcatctaagtaaaaatgacaaaaaaataaacatagtggttgcaacttctggtgatactggagcagcagctattgatgctattaaaggaaaatctaatttaaatatatttgtcttacatccaaacaataaaatttcttctgttcaaagaaaaataatgaccac

SEQ ID NO: 286315 - DNA, 982 bp, Unknown
  Bacterial polypeptide expressing nucleotide sequence isolated from the Sargasso Sea
gcgtcctatgccggtttcgggcatccggaaaccgcgcccttggtcgaattgagcgaccattgcaaggtcctggagcttttccatggcccaactctggcattcaaggatttcgcccttcagcttttgggcaacctctacgagatccagatagcccgcaccggacgcaacctgaccatcttgggcgctacttccggcgacacgggagccgccgcaatctccggccttctcggcaagcgtggggtcacggtgttcatcctctatcccgacgggaaggtttcccctttgcaggaacgccaaatgacctgcacggaggcggaaaacgtatttcccatcgccatcaagggcaccttcgatgatgcccagcatacggtaaaggaactcttttcggaccttcggttccgtgaggaagtcggtttgtccgcagtgaactcgatcaatttggcccgcatactcgcccagaccgtctattatctttacgcttggctgaggcttggggaaggggcgcgggaatccaccaccttcgtcgtcccgaccggcaatttcggaaacgtcttcgcgggttggctcctgaccaagatgggcattcgcataagtggttttcgggtggcgaccaatcagaacgacgtactgcatcgcctttttgataccggtgagtactcccttgggtcggttgttcccagtttggccccttccatggatattcaagtggcgtccaacttcgagaggctgctttatttcattcttggagggaatccgcaaaaagtacgtgaggtgatggatcatttccgaagggagggcaggtattgcttcgagaacttcgcggccaagggtttctccagttcaagcgcttccgactccgagattcccgggattatttccatggtgagtcgtgaattcgggtatttggtcgaccctcatactgcatgcggggttcaggacctgccgacggatgcgaaatccctcgtccttgcgaccgctcacc

SEQ ID NO: 286316 - DNA, 684 bp, Unknown
  Bacterial polypeptide expressing nucleotide sequence isolated from the Sargasso Sea
gatggaatatataagcactagaaataattcagatcatttttcatttaaaaacgtatttttgaaaggtttagctgatgatggaggtctttttgtgccaaagtcaatcaaaccatttagtaaagatgaattaaataaacttagtggtcttaattacaatgaattagcagctgaaataatttttccatttattggtgattttatgactaaagaagaattaatttccacagtatcaaaatcttactcaaattttagagcagaagatgttgtaaaaatctctgatttaggaaatttaaaagtcttagaactctatcatggcccaactcttgcttttaaagatattgcaatgcaattaataggaaatttctatcaatatcacttaggaaatgagaaaaaaaaaattaatattattgtagcaacatcaggagacacaggtgcagctgctattgatgctttaaaaggaaaaaaaaatttaaatgtttttgtattacatccaaataacaggatttcaccagtgcaaagaagactgatgacaatccatgaagaaaaaaatgtattcaatattgctattgaggggaactttgatgactgtcaaaatttagttaaagcaatgtttaatgatgaaaaattctcaagctctattaatatgtcgggtgttaattcaattaattgggcaagaattgttgc

SEQ ID NO: 286317 - DNA, 646 bp, Unknown
  Bacterial polypeptide expressing nucleotide sequence isolated from the Sargasso Sea
aatgaagtatatctcgacccgtggattggctcccgcgctcacttttgaagaggcgatgcttacgggcttggctttggatggtgggttatatgttccagagtatattcccaaagtaacaaagaatcagatcttgtctatgcagggtttacgttatcaagagattgctttcaaaataactaaacctttcatgggtaacgcattcgaagatgatgagttacatgaaattattgaaaaagcctatgcggatttcagtcatatctcgtgcgctccgcttgttgaattggaagctaatcactttttattagagctttttcatggtcccactcttgcatttaaagactttgcgatgcagctgataggccagttattccaagttgcgttaaaacgccgtggaaaaagagttacaataattggtgcaactagtggtgatactggtagtgctgctatcgaggcgtttaaaggtttagatgcagtagatgtatttattctttttccagatggccgggtttccgatgtgcaacgtagacagatgacaactgctaaagaaagcaatgttcatgcgattgcagtagatgggactttcgatgattgtcaatctcgtgtaaaagacatgttcaatgaacacgaatttcagaaaagaagtaaa

SEQ ID NO: 286318 - DNA, 810 bp, Unknown
  Bacterial polypeptide expressing nucleotide sequence isolated from the Sargasso Sea
ttgttaatgaatatataagcacaagaaataacaaaactgagttttctgctgaacaagttcttaattatggcttagcaccagatggaggactgtttattccaagtgaaattccaaaatttagtgtcgatcaaattaattcattaaaaggaaaaaattattttgaaatagcagattttattttaactccttatttactagatttatttgaagctgatacaattaaaaaaataattaatgaagcctattgtgtctttgataaagagatcgtttctgtatcaaacataggagataatgaattattaaatttattccatggcccaaccttggcttttaaagattacgctatgtgcttgttagcaaaaatatatgagtactatttaaaaaaagtgggtaaaaaattagttgtaattggagcaacttctggtgatacaggttctgcagcgattcaggcctttaaaggtattgaaaatattagtatttttattcttcatcctcataattcaacatctctttttcaaagaaaacaaatgaccacaagtggagcaaataatgtttttaatatagctttaaatggaagttttgatgattgtcaaaactcagtaaaaaaattatttagagataaagatttaaatgaaaaatttagttttactgctgtaaattcaattaactggttcagggttttaccacaatctatttattacgcttggtcatatttaaattgtaatgtagataattttgttgttccaagtggtaattttggaaatatatattctgctcatttattaaagtctatgggtttccccaattaat

SEQ ID NO: 286319 - DNA, 533 bp, Unknown
  Bacterial polypeptide expressing nucleotide sequence isolated from the Sargasso Sea
tatgagatacaaaagtacacgtggcggaatatctggacttactttttgtgaaaccttattgatgggccttgccccggatgggggcctattgctgccggagtctattccgaatatttctgataacttggaatcgtggcgctctttgtctttcgtcgatttagctcaagaaattattgctatttttgcagatgacataccaaaagacgatttagatacgattattaaggaggcttattctacttttgaacatgaagatgttgttgccctggaaaaattgggcgatatccacgttatggagctctttcacgggccgacgctggcatttaaggacgtagctctccagctattgggaggcttgtttgattatgttctgtctaaaagtaacgaacatcttaatatcctaggagcgacaagtggggataccggcagtgcagcaatagctgggattcgcggtagggccaacatggatattttcattatgtatcccgatgaaaaagttagccctcttcaagaattgcagatgacaaccaact

SEQ ID NO: 286320 - DNA, 562 bp, Unknown
  Bacterial polypeptide expressing nucleotide sequence isolated from the Sargasso Sea
atgagatatatttctacaagaggaaaagctcccgagttaggttttgaagatgtacttttgtctggtcttgccaatgatggtgggctatatattccaaaagaatggccaaaactagattttaagagtcttcctacaacctcttattctgaacaggctgcatatgttatctatccttttgttagtgaatttttgaaatatgaagagcttcagagcattactgataaggcttatagtcaatttccaaataaagaagcaataggattaaaagaagttgagaaaggtaattatttgctggaactctttcatggtccaactcttgcttttaaagactttgcaatgcttttattggcacaattttttgaaacttcattaagaagaaaaaataaatcaataacgattttaggtgcaacttccggagatactggtagtgcagcaatagaagcttttaagaacaataagcactgtactgtttttatattattcccgaaaggtagagtatctgaaattcaaagaaagcaaatgactacagtagaaagctcaactatttttccaatgaaataga

SEQ ID NO: 286321 - DNA, 460 bp, Unknown
  Bacterial polypeptide expressing nucleotide sequence isolated from the Sargasso Sea
atgagatatgtaagtactagagataattctaaagaatatagttttgaagatgtttttataaaaggtttggccgatgatggaggcctatatgtgcccaaatcattaaaaaaatatagcaaccaagaactgttagaacttaaaaatttaaattacaatgaattatctactgaaataataaacccattttctacacaatttatatctaaagaagaactttcatcattgatcaaaaaatcatattcgacatttagagagaaagaagttgttaagatttctgaaattggacaaatgaaattgttagaattatttcacggtccaacattagcctttaaagatgttgcaatgcagttcattggtaatttatatgagtattatttaagtaaaaatgataaaaaaataaatatagtagttgcaacatctggagatacaggtgccgcagcaataaatgctattaaaggaa

SEQ ID NO: 286322 - DNA, 810 bp, Unknown
  Bacterial polypeptide expressing nucleotide sequence isolated from the Sargasso Sea
aatgcagtactacagcacaagagatataaatctaaataaaacttttgaagaaattattattcaaagtttgtgtaaaagtggaggattatatctcccaatggattatcctacttttaactatgaagagatttttaaaaataatccaagttataatgatatagcatacagtgttttatcaaattttatcgggtcatcaatcaaagataatgaccttaaaaacattatcaaaaaaacatacgatggattttcatgtgaaaatagtgctaacttattcaactatgctgaaaataaatttatactagaacttttttatggtcctactttagcatttaaggattatcctctgcaattattaggaaacctttttgactattatttaaataagaataataaaaaaataacaattataggggcaacttcaggtgacactggttccgcagctatacatgcttgtaaagataaagaaaatattaatatatttatattacatccataccaaaaaacatcggaactacaaagaaaacaaatgacaacagtaaattcaaaaaatgtattcaatatagcaataaaggggaattttgatgattgtcagaatataataaaaaatttatttgtttccgaaaaattaaactccctaactaacttaacagccattaattccattaattgggcaagaataatatctcaaacaatatactttatctgggcaatatacaaaactcatcagtacggcaagcaaaaaattaattttattgttcctactggaaattttggaatatttttgctgcaagtgtggctaaagaatgggat

SEQ ID NO: 286323 - DNA, 922 bp, Unknown
  Bacterial polypeptide expressing nucleotide sequence isolated from the Sargasso Sea
catggagttagcaactgagatactttttccttttgttgaaggggacatagatagaaaggtatttagtaaacttgtagaagaaacttataaagagtttgaaacagaaaacgtagttgagctagttgaattaacagaaaatagacaaatcctagaattatttcatggcccaactcttgcttttaaagatgtggccatgcaacttctaggatctttactcaatcacttcgctaaagaacaaggaaagaagatagctgttttgggagcgacttctggagatacaggtgcagcagcaatttcagcatgtgcgaggcatgaaaatgtagaagtatatattctttatcctcataaaaaagttacagacatacaaagaagacagatgacaactacctgttcaaaaaatgtttatcctttggccatacaaaccgattttgatggttgtcagtccatagttaaagaaattttcttagataaagattttcttattgaaagcacaagattcattgccgccaattcaattaattgggcaaggtgtatgacccaatctgtgtatttcttttgggcttatctgaaattaaagaatttagagaaagatataattttttctataccctcaggaaactttggccatgcttatgcagggtggaccgcaaaagaaatgggacttcctattaaaaaactaatgattgctaccaatagcaatgatgttctgcataagcttttttcagataatcattatgctaaaagttcagtagatcaaaccttggcacctagtatggatatatcagtagcaagtaattttgagaggctcttatataacttacatgataataactccgaagctatattctcgataatgaatgaatttccaaagcaacctatctcaataccaaaagataaatgggatttagttgttaagtttttt

SEQ ID NO: 286324 - DNA, 949 bp, Unknown
  Bacterial polypeptide expressing nucleotide sequence isolated from the Sargasso Sea
caaaaactttaatcatcctaaaattgctccaatagtacaaattgatgaaaataaatatattttagaattattctatgggcccacattagcatttaaagattatgcattacaattattaggaaatcttttgacacattttatggcttcatcagaaaaaaaaattactattttaggagctacctctggtgatactggttcagcagcaattaatgcatttaaagggaaacagaatattaatatttttattttacatccattaaataaagtttcagaggtgcaaagaagacaaatgacaactgttttaaatgataatgtttttaatattgctgtagatggcacatttgatgattgccaaaaaattgttaaagatttatttaataatacagaagttcaaaataaaacttctttaactgctgtaaattcaatcaactgggctcgaataatggctcaagtagtttactatttttgggcatatttacaaattgctcaaaaaaagattagttttattgttccttcaggcaattttggaaatatttatgcagctagagttgctaaacatatgggattgccaattaatgatttacatatagccacaaatcaaaatgatattttgcacaaaattatttcattaggaaaaatgcaaataacaaatgtaaaagaaacttatagtccaagtatggacattcaagtttcaagtaactttgaaaggcaaatttttgaaagtttgaattttgatagcaatgaattaattaaaattatgcaaaattttaataaaaataaaaattacttatttagtgagcaattaaagcttaattttcaaaatatctataagtcaagttcagtttcagacaaaaaaacacttcaaacaataaaattatttaaagaaacatataattacttagctgaccctcatacagctacaggcctttctgttatgcacgaaacaaat

SEQ ID NO: 286325 - DNA, 808 bp, Unknown
  Bacterial polypeptide expressing nucleotide sequence isolated from the Sargasso Sea
aatgaattacattagtacaagaaataatcaaaaaaacttttcttttaaagatgttttcctcaaaggattagcggatgatggaggactttttgttcttaaatcaattaaacaattccaaaaagaagaattagataatttaaaaaatcttagttacaatgatttagctgctgaaataatttatccatttataggagatttcatgtctaaagatgatctaatctctacgatttcaaaatcatattcaaattttagatctgacgatgttgttaaaatttctaatctcggaaatctaaaagtattagaactatttcatggacccacacttgcttttaaagatatcgcaatgcagctgattggtaatttttatcaataccatttagcccgtgatgaaaaaaaaattaatataatagtagcaacctcaggtgatactggtgcagctgcaatcgatgctttaaaaggaaaaagcaatttaaatgtttttgtattacacccaaataataaaatttcacctgtgcaaagaaggttaatgacaatacatgaggaaaataacgtatttaatattgcagtagagggcaactttgatgactgtcaaaatctagtaaaagcaatgttcaatgacgaaaaattttcaaaagcgattaatatgtcaggggtaaattcaattaattgggcaagaattattgctcaatcggtgtattatttttacgctttctttaaagttggaaatggtcagcctttatccttttctgttccaacaggaaactttggtgatatatatgctggatacttagcaaaaaaattaaccctt

SEQ ID NO: 286326 - DNA, 700 bp, Unknown
  Bacterial polypeptide expressing nucleotide sequence isolated from the Sargasso Sea
catggaatatttaagtactagaaatgataagattagagagaaatttgagcatatatttattaaaggactctctgatgacggcggtttatttctgccaaaacaaattaaaaaattatctgataaagaatttttaaatcttagaaatttatcatatgttgatttggctacagaaatcatttctagattcactggtgatttttgctctaatgaaaaactgcaccaaattgttaaaaaatcgtattctacatttaacgagcacaatgtagttaaaattaaaaaagtagaggatttacatgtactagagctttttcacggtcctacgctagctttcaaagatgttgcaatgcaacttattggaaatttttatgaatattacttaagtaagaatactaaaaaaataaatatcattgttgcaacttcaggtgatacaggagcagctgcgatagatgcagtcaaaggaaaaaaaaacataaatatttttgttttacatccaaataatcgtatatcaccagtccagagaatgttaatgactacaaatccatcaaaaaacgtatttaatatcgctgttgagggaaactttgacgactgccaaaaacttgttaaagaaatgttttctgacaatgagttttctaaatctataaacatgtcaggtgtaaattcaattaattgggccgagaatagttgcacaaacagtctatta

SEQ ID NO: 286327 - DNA, 739 bp, Unknown
  Bacterial polypeptide expressing nucleotide sequence isolated from the Sargasso Sea
gttgaaagaagttgaaaaaggaaactatttattagaactttttcatggaccaacccttgcttttaaagattttgccatgcttttattagctcaattttttgaaacttctttaagtaagaaaaataaatcaataactatattaggcgctacttcaggagatactggtagtgccgcgattgaagcttttaaaaataataaacattgcactgttttcatattatttccaaaaggaagagtatctgaaatacaaagaaaacaaatgacaactgttgatagcgcaagcatttatccaattgaaattgacggaacttttgatgattgtcaaaaccttgtgaaacatctattccaaaatcttgaattcaaagaagaggtgagtcttggtgcaattaattcaataaattgggcgcgcgtagcagcccaaattgtttactatttttcaacatttcagcaattacaatcaaatagagtttctttttcagtaccaacaggaaattttggagatgttttagctgggtgggtcgcaaaaaaaatgggattacctattgataaattaattgttgcaacaaatgataatgatattttagatcgagcgatatctaatggtgattactttcaagaagaagtaaaggctactacatctccaagtatggatattcaaatttcaagtaattttgagagactattatttgaatctttagatagggactcagaaaaattaagaaatctatttaaagaataa

SEQ ID NO: 286328 - DNA, 439 bp, Unknown
  Bacterial polypeptide expressing nucleotide sequence isolated from the Sargasso Sea
aatgaattacattagtacaagaaataatcaaaaaaacttttcttttaaagatgtttttttaaaaggattagcggatgatggaggactttttgttcctaaatcaattaaacaattccaaaaggaagaattggataatctaaaaaatcttagttacaatgatttagctgctgaaataatttatccatttataggagatttcatgtctaaagacgatctaatctctacgatttcaaaatcatattcaaattttagatctgacgatgttgttaaaatttctaatcttggaaatctaaaagtattagaactatttcatggacccacacttgcttttaaagatatcgcactgcaactgattggtaattttttccaataccatttagaccgtgatcaaaaaaaaattaatataatagtagcaacctcaggtgatactggtgcagct

SEQ ID NO: 286329 - DNA, 436 bp, Unknown
  Bacterial polypeptide expressing nucleotide sequence isolated from the Sargasso Sea
gatgaaatatataagcacaagaagtaaagaaaaagaatacagttttggagaagtttttttaaaaggtcttgctgatgatgggggtctttatgttccaaaatcgttaaaaaaatatagctcagcagaattattaaagctcaaaaatttaaattataatgaattatctactgaaataataagccaattttcagcagactttatctcaagagaagaactttcatcattaattaaaaaatcatattcaacatttagagaaaaagaagtggttaaaatctcagatgttggagagatgaaattattagaattatttcatggaccaacattggcatttaaagatgttgcaatgcaatttattggcaatttatatgattattatctaagtaaaaatgataaaaaaataaatatagttgttgcaacttccggagatactggtgcg

SEQ ID NO: 286330 - DNA, 547 bp, Unknown
  Bacterial polypeptide expressing nucleotide sequence isolated from the Sargasso Sea
atgagatatgtaagtactagagataattccaaagaatatagttttgaggatgtttttataaaaggtttggctgatgatggggggctttatgtgcctcaatcattaaaaaaacatagccttcaagaattatcaaagcttaaaaacttaagttataatgaactcagtactgaaataataaatcaattttcatcagattttatcaaaaaagacgaactttcatccttagttagtaaatcatattcaacatttagagaaaaagaagttgttaaaatttcagatattggagaacttaaattgttagaattgtttcatggtccaactttagcttttaaagatgtggccatgcagtttattggaaatttgtatgaatattatttaaataaaaatgataaaaaaattaatatagttgttgcaacgtctggagacacaggtgctgcggctatagatgcaataaaaggaaagtctaatttaaatatttttgttttacatccaaacaatagaatttcttcagttcagagaaaaattatgacaaccgttgatgaaaaaa

SEQ ID NO: 286331 - DNA, 648 bp, Unknown
  Bacterial polypeptide expressing nucleotide sequence isolated from the Sargasso Sea
aatggaatatataagcacaagaaacaataataataaattttcctttagcgaaatatttctcaaaggtcttgctgaggatggaggcctctttataccatcgaatattgaaaaatttgatgagagtaagatcaactccttgaaaaaattaagctacatagatttagctactgaaattatttatttatacactgggaattttttaagtaaaaaagatttgaatgaaattattaaaaaatcatactctacgtttagagaaaaagatgttgtaaaaattgctgtattaaaccaaatcaaaattttagaattatttcatggaccaactctagccttcaaagatatcgcaatgcagcttataggcaatatgtatgaacatttcttaaaatcaaataacaagacaataaatatagttgttgctacttctggtgatacaggcgcagcagctattgatgcaatcaaaggaaaatctaatttaaatatatttgttctacatccaaacaataaaatttcatcagttcaaaggaaaataatgactactgtagaagaagaaaatgttttcaatattgcaatcgatggaaactttgatgattgtcaaaatatcgtaaaacagttattttcagatcttgagttttcaaagtctataaatatgtc

SEQ ID NO: 286332 - DNA, 464 bp, Unknown
  Bacterial polypeptide expressing nucleotide sequence isolated from the Sargasso Sea
gatgaaatatataagcacaagaagtaaagaaaaagaatacagttttggagaagtttttctaaaaggacttgctgatgatgggggtctttatgttccaaaatcgataaaaaaatataactcagcagaactgtcaaaactcaaaaacttaaattatagtgaattatctgctgaaataataagccagttttcaggagattttatttcaagagaagaactttcgtctttaattaaaaaatcatattcaaaatttagagaaaaagaagtggttaaattttcaaatgtcgaaaaaataaaattattagaattatttcatgggccaacactagcatttaaagatgttgcaatgcaatttatcgggaatttgtacgaatattatctaagtaaaaatgacaaaaaaataaacatagtagttgcaacttctggagatactggtgcagcagctattgacgcaattaaaggaaaat

SEQ ID NO: 286333 - DNA, 970 bp, Unknown
  Bacterial polypeptide expressing nucleotide sequence isolated from the Sargasso Sea
aatagttcaaaagaatataatttgaaacaaattttcataaaaggtctagctgatgatgggggactttttgtccctaaatcgttaaaaaaatttaataatgatgaattaaataaattaaaaaatttagattataatggtctatctactgaaataataaatatattttcatcagatttcatttctagagatgaactttcatctttaattaaaaaatcatattcaacgtttagagagaaagacgttgttaaattttctaatgttggagaaataaaattattagaattatttcatggcccaacattagcatttaaagatgttgcgatgcaattcattggaaatttatatgaatattacttaagtaaaaatgatcaaaaaattaacatagttgttgcaacttcaggagatacaggcgcagcagctattgatgcaattaaaggaaaatctaatttaaatatatttgttctacatcctaataatagaatttcttccgtacaaagaaaaataatgactactattgatgaaaaaaatgtttttaatattgcaatagatggaaattttgatgattgccagaacatagttaaaagtatgttttctgatctagagttttctaaatctataaatatgtctggagtaaactcaataaattgggcaagaattattgcccaagccgtttattatttttattcatatttaaaattagacaaagaaactatttctttttcagttccaacaggaaactttggcgatgtatttgcaggttaccttgcaaagaaaatgggactaccaattgataaactaattgttgcaacaaacgaaaatgatattttgcacagagcaatctcaaaaggagattatgtatcaaaacaagttaaagaaacattgtcacctagtatggatattcaattagcgagcaactttgaaagattaatttactatgtaaataattcagattctaaaataactgcagata

SEQ ID NO: 286334 - DNA, 616 bp, Unknown
  Bacterial polypeptide expressing nucleotide sequence isolated from the Sargasso Sea
aatggaatatattagtacaagaagtgataataagatattttccttcagtgaggtatttctcaaaggtcttgctgatgatggaggcctttttataccgttaaatattaaaaaatttgataagggcaaaatgaactctctaaaaaaattaagttatgtagatctagctactgaaattatttatttatacactggtgattttttaagcaaaaaagaattaaatgaaattgttaaaaaatcatattctaacttcagggaaaaagaagttgttaaaatagttgagttaaatcaattaaagatcttagaattatttcatggacccactctagcttttaaagatattgcgatgcagttaattggaaatatgtatgagcatcttttaaaatcaaataacaaaacaataaatatagtcgttgcaacttctggggacaccggagcagcagctattgatgcaatcaaaggcaaatctaatttaaatatatttgttttacatccaaataatagaatttcctcagttcaaagaaaaattatgactacagtagaggaaaaaaatgttttcaatattgcaattgatggaaactttgatcactgtcaaaatattgtaaaacaaatgttttct

SEQ ID NO: 286335 - DNA, 581 bp, Unknown
  Bacterial polypeptide expressing nucleotide sequence isolated from the Sargasso Sea
gatgaaatatataagtacaagaagtaaagaaaaagaatacagttttggagaagtttttttaaaaggacttgctgatgatggcggtctttatgtaccaaaatcaataaaaaaatataactcagtagaactatcaaagctcaaaaacttaaattataatgaattatctactgaaataataagccaattttcaggagattttatttcaagagaagaactttcatctttaattaaaaaatcatattcaacatttagagaaaaagaagtggttaaactttcaaatattggagaaacaaaattattagaactatttcacggtccaacattagcatttaaagatgttgcaatgcaatttattggaaatttatatcaatattatttgaagaaaaatgaaaaaaaaataaacatagtagttgcaacttcaggcgatactggcgcagctgcaatagatgcaattaaaggaaaatccaatttaaatatatttgttttacatccaaataataaaatttcctctgttcaaagaaaaatcatgactactgttgatgacaaaaatgtatttaatattgcaatagatgggaaacttt

SEQ ID NO: 286336 - DNA, 852 bp, Unknown
  Bacterial polypeptide expressing nucleotide sequence isolated from the Sargasso Sea
cgaaagcatcccgacgttgagccatggcgatatcgcggccctgtccggcttgccctacgaggaaatcgcctttcgtatcatgcggccgttcatcggcgagacctttaccgatgatgaatttgccgagatcatcgccaagacctatgccggttttggccatgacgcccgcgcgcctttggtgcaattggctgaaaatcactttttgctcgaattgttccacggtccgaccttggcgttcaaagattttgccatgcagttgattggccaattgttcgaggcgtccctcaaacggtctggcaaccgggtcaccatcgtcggtgcgacctccggcgacaccggatcggcggcgattgaagcgtttcgtggattggacgcggtggatgtgttcattctttatccgcatggccgcgtctccgaagtgcagcgccgccaaatgaccacacccagcgaaagcaatgtgcatgctttggcgatggacgggcatttcgatgattgccaagcccgcgtcaaagacatgttcaatgatttcgatttccgcgacggggtgcgtttggcaggggtcaattcgatcaactgggcgcgggttctggcgcaggtggtctattatttctcctctgccgtgagccttggcgcgccgcatcgcaaggtcagcttcaccgtgccgaccggcaatttcggtgatattttcgcaggctacatcgccaaacgcatggggcttccgattgagcaactcgtcgtggcgaccaaccaaaacgatatcttgcaccgctgcctcgcgactggcgactatcgtcccgatggtgtgatcccctcgatcagcccctcgatggatattcaagtgtcctccaattt

SEQ ID NO: 286337 - DNA, 761 bp, Unknown
  Bacterial polypeptide expressing nucleotide sequence isolated from the Sargasso Sea
gatgaaatatataagcacaagaagtaaagaaaaacaatacagttttggagaagtttttctaaaaggacttgctgatgatggtggtctttatgttccaaaatcgttaaaaaaatatagctcagcagaactatcaaagctcaaaaatttaaattataatgaattatctgttgaaataataagccaattttcagaagattttatctcaagagaagaactttcatctttaattaaaaaatcatattcaacatttagagaaaaagaggttgtaaaaatctcaaatattggagaaataaaattattagaattatttcatggaccaacactagcattcaaagatgttgcaatgcaatttattgggaatttgtatgaatattatttgaataaaaatgacaaaaaaataaacatagtggttgcaacttctggcgatacaggcgcagccgcaatagacgcaatcaaaggaaaatctaatttaaatatatttgttttacatccaaacaacaaaatttcttctgttcaaagaaaaataatgaccactgtagaagaaaaaaatgttttcaatattgcaattgatggaaactttgatgactgtcaaaatattgtaaaacaaatgttttctgatcttgagttttctaaatctataaatatgtcaggtgttaactcaatcaattgggcaagaataattgctcaagcggtatattatttttactcatattttaaactagataaagaaactgtttcattctcagtaccaacaggaaact

SEQ ID NO: 286338 - DNA, 791 bp, Unknown
  Bacterial polypeptide expressing nucleotide sequence isolated from the Sargasso Sea
acggttaaccgagaaaatagcaaccccatttgtgggtcaaaatttaaaaacaaaaatagggatgataagtaaaaaggtttacaaaaaatttaatcataaagatatagctccattgataaagttaaagaataatttttatgttatggaattgtttcacggaccaacattggcatttaaagattatgccatgcaatttttagctgaattgtttgacaatgttttaagtaataaaaataagaaaattgtaattcttggcgctactagcggtgacacaggatcagcggcattagaagcatttaaagggaaaaaaaattcggatatatttatattgttcccacatggacgtgtttctgaagtgcaaagaaaacaaatgacatggataaatcaaagtggatctaatgctttagctataagaacagattttgatggttgtcaagaaatagtaaaatcattgtttaatgatcttaaatttagaaatgaagtttctttatcggcagtaaactcaataaattgggcaaggttagtgcctcaaatagtatattatttttatgcaggattaaaattgggtgctccagagcaaaaagtttcattttcagttccaacaggaaactttggtaatattttagctggatggatagcaatgaaattgggtttaccaatagaaaagttaatatgtgcttccaacaaaaatgatattttaacaagattttttcatacaggtagaatggaaagaaaaaatgttttaccgtcgttaactccaagtatggatatacaggtttcaagtaattttg

SEQ ID NO: 286339 - DNA, 394 bp, Unknown
  Bacterial polypeptide expressing nucleotide sequence isolated from the Sargasso Sea
catggacgtgagccagccgaataactggccgcgtatcgaagcccttattgagcgcgggtatatcgacaaagcgtgtttaaaaggtgagatggttgacgaagagtacactcagcttgctatgcgccagttagcgcagcagggctacactagcgaacctcatgctgctattgcctaccgcgcagtgagtcatgacttggaagaaggtgaaattggcctgttccttggtactgctcatcctgcaaaattccgcgagacggtagaaaacgtgttaggaaacccaatcagcttacctaagcctcttgctgatgtggcgggagaagatagtttagccgtcgatttgcctgcaacttatgaggcactgaagcaacacatgatgagtcttttgaagccatga

SEQ ID NO: 286340 - DNA, 472 bp, Unknown
  Bacterial polypeptide expressing nucleotide sequence isolated from the Sargasso Sea
atgaattatataagtactagaaataatagtaaaaaagtgtcttttgaacatgtctttttaaaaggtctatctgaggatggtggtctttttataccagataaattaaaaaaatttgatcataaagaattagaggatctatcaaatttaaattacaaaaatcttgcatttaatattatcaaattatttactggggatttcatcagtgagctagaattaaaaaatttggttaataaatcatatgaaaattttagagatagcaatgttgtaaaaattaataaaattaataaaaattatctattagaactatttcacggtccaacactcgcttttaaagatattgctatgcaacttattggtaatttttacgaatattacctagagaagagtaataaaaaaattaacattatagttgcaacttcaggtgacaccggtgcagctgcaattgatgcgatcagaggaaagaaaaatatta

SEQ ID NO: 286341 - DNA, 577 bp, Unknown
  Bacterial polypeptide expressing nucleotide sequence isolated from the Sargasso Sea
tatgaaatatgtaagcacaagagataactcaaatgaatataattttgaggaggtatttattaaaggattagcagatgatgggggtctttatgtgcccacatctttaaaaaaatatactcataaagaattattagatcttaaaaacttaaattataacgaattatctactgaaataataaatcaatttttgtcagattttatatcaaaagaagaacttttatctttagttaaaaaatcatattcaacatttagggaaaaagaggttgttaaaatttcaagtattaggaaattaaaattattagaattatttcatggtccaacattagcttttaaagatgttgctatgcagttcattggaaatttatatgaatactatttaagtaaaaatgataaaaaaataaatatagttgttgctacttctggagatacaggagcagcagccatagatgcaattaaaggaaaatctaatctaaatatttttgttttgcatccaaataatagaatttcaccagttcaaagaaaattaatgactacagtagaggaaaaaaatgtttttaatattgcaatagatggaaat

SEQ ID NO: 286342 - DNA, 850 bp, Unknown
  Bacterial polypeptide expressing nucleotide sequence isolated from the Sargasso Sea
gataaaaaagaatactctgctgagcaggtactcaatttcggtctagcaccagatggaggtctatttattccaaatgaaataccaaaatttagtaataatcaaataaatgcattaaaaggaaaaaattattttgaaatagcaaattttattttaaccccttttttatcagatttatttgaagccccaataattgaaaagattatcgaagaagcatattgtaaatttgataaagaaattgtttcaatatctaacataggtgacaacgatctattaaatttatttcatggtccgacactagcttttaaagattatgctatgtgtttgttagctaagatatatgaatactatttaaagaaactagataaaaaattagttgttgttggagcaacttctggtgatactggttcagctgcaattcaagcctttaaagatattgaaaatattagtatttttattttacaccctcataactccacatctctcttccaaagaaaacaaatgacaactagtggaggtaaaaatgtttttaatatagccctaaatggaagttttgatgattgtcaaaatttagtaaaaaaactttttagagataaagatataaataataaatatagctttactgcagtgaattcaattaattggtttagggtgctaccacaatcaatttattatgcatggtcatatcttaatcataatattgataattttgttgtaccaagtggtaattttggaaatatatattctgctcatttgctaaagtcaatgggatttccaataaataagttaattgttgcgacaaatgagaataatattttacatcgaattataagcaataatgatctacatcttt

SEQ ID NO: 286343 - DNA, 940 bp, Unknown
  Bacterial polypeptide expressing nucleotide sequence isolated from the Sargasso Sea
atatctgaatttacaaatttttcatatgctgatttagcatttcaaataatgtctccttttataggagaatcattatctaaaaaagaattagagcagataattaaaaaatcatattccagtttttatcacccagagattacacctataagcagaatatctaataatgaatatttactagagttattccatggacctacattagcatttaaagattgtgcaatgcaatttctaggcagtttatttgaacattttcttaaaaaaaggaaagagaaaattactataatctgcgctacttctggggataccggagctgcagctgttgaagcctttaaagatagagaattgattgatttagttgtattgtttcctagaggtagaatttctgaagttcagcaaaggcaaatgactaccacaggttccaaaaatattcattgcttatccatggatggtacttttgatgactgtcagacaatcgttaaaaacctgttaaatgatagtgatttttgtaataaatttaatttatcggctgtaaattcaataaattgggtcagggtgatggctcaagttgtgtattatttttatgctgctttaaaattaggcagccctcaagaaaaaataaatttcagtgttccaacaggaaactttggtgatatttttgcaggttttgtggcctccaaaatgggtttacctataggaaaattatgtattgctacaaattcaaatgatgcacttgaaaggtttcttataaagggtgaatatgagatagatgaagtaattgcaactttgagtcctagtatggatattcaaatagcaagtaatttggaaagactactgtatgaaagttcaggacaaaaatctgatataataagaaatataatgaatgatttacaaattaataaaagttttaaaatagagagtaaagttcttgaatctataaaag

SEQ ID NO: 286344 - DNA, 807 bp, Unknown
  Bacterial polypeptide expressing nucleotide sequence isolated from the Sargasso Sea
ttagagaaaaagaagttgttaaactttcaaaatgttggagaaataaaattattagaattatttcacggaccaacattggcatttaaagatattgcaatgcaatttattggaaatttgtatgaatattatttgaagaaaaatgacaaaaaaattaatatagtagttgcaacttctggtgatactggtgcagcagccatagatgcaatcaagggaaaatctaaattaaatatttttgttctacatccaaacaatagaatttcctctgttcaaagaaaaataatgactactgttgatgataaaaatgtatttaatgttgcaatagatggaaattttgatgattgtcaaaatatcgtaaaacaaatgttttctgatcttaagttttctaaatctataaatatgtctggagtaaactcaataaattgggcaagaattattgctcaagcggtatattatttttactcatattttaaattaggaaaagaaactatttcattttctgttccaacaggaaactttggtgatgtttttgcgggttatcttgcaaagaaaatgggattgccaattgataaattaattgttgcaacaaacgaaaatgatattttacatagagccatttcaaaaggagattatgtttcaaaagaagttaaagaaacattgtctcctagtatggatattcaattagcaagtaactttgaaagattaatttattatgtaaataattctgactctgaaaaaacagcagaaattatgaaaaaagttaagcaaaattcttatcaaattgaaaagaacaatttagatataattcaa

SEQ ID NO: 286345 - DNA, 568 bp, Unknown
  Bacterial polypeptide expressing nucleotide sequence isolated from the Sargasso Sea
atgaaatacttcagtaccagaggtctgtctccagctgcttctttttctgatgttatgttgggaggtttagctcctgatggcggtttatacatgcctgaaaataactctcctttaacaattgatgacatcgattctttaagaaatttaagttatgaagagttaaccacaaaacttcttttcccgtttgtctccgatgaactagataaaaaacaattctctttggttgtagaggacgcctataaaacctttgagaatcaaattattgatctagttgaggtagaagataatagatgggttctagagctttttcatggaccgacccttgcttttaaagatatagctatgcagcttttgggatcattacttcagtttacatctcaaaagagagataaaaagatagctgttttgggtgccacatcaggagatactggatcagctgctatttctgcttgctctaggcattcagatgtagatgtttttattttatttccacatggaaaggttaccgatatacaaagaaagcaaatgacaacttcaggaagtaagaatattcatgctatagcagtag

SEQ ID NO: 286346 - DNA, 730 bp, Unknown
  Bacterial polypeptide expressing nucleotide sequence isolated from the Sargasso Sea
catgagatacgtaagcacaagagataattcaaaagaatacagttttgaagatgttttcatcaaaggtttagctgatgatggaggactttatgtgcctacatctttaaaaaaattaagctcaggtgaattgtcagagcttaaaaatcttaattatattgatttatctactgaaataataaatcaattttcatcagactttatttcaaaagatgatctttcatcattaattaaaaaatcttattcaacttttagagaaaaagaagttgttaaaatatcaaacattggatatctaaaattattagagttatttcatggtcctacattggcttttaaagatgtggcaatgcagtttattggtaacttgtatgaatattatttaagtaaaaatgataaaaaaattaatattgttgtggctacatcaggtgatactggtgctgccgctatagatgcaattaaaggcaaatcaaacttaaatatttttgtcttacatcctaataatagaatttcaccagtgcaaagaaagttaatgacaacagttgaggatgaaaatgttttcaatattgcaattgacggtaattttgatgactgtcaaaatattgttaagcaaatgttttcggatttaaatttttctaaatcaataaatatgtcaggggtaaattctattaattggacaagaattatagctcaagctgtatattatttttatacttattttaaaattggtggtgat

SEQ ID NO: 286347 - DNA, 904 bp, Unknown
  Bacterial polypeptide expressing nucleotide sequence isolated from the Sargasso Sea
atgaattacataagcacaagaaataaatctttaaactttgattttagcaatatctttttaagaggattagctccagacggaggtctatttcttccaagtgaaataaaaaaattcagtgataacaaattaaaagaattaagcaaacttaattatatagatttgggagttgaaattatatccgagttttgcgttcctgctttaaaaaagggtaaaatcaaattaattcttgatgaagcttattcaagttttaatacgaaaaatattgtggaaattaaaaaaatagacaatattaatttactcgagctttaccatggcccaactttggcatttaaagacattgctatgcaagtaattggactgatgtatgaggcgttaaatttaaataaaaaaaaaataaatataattgttgcaacatcaggtgatactggatctgcagcgatagcagctttaaaagaaaaaaaaaatatcaacctttttgttttgcaccctcacaaaaaaatttctaatattcaacgaaaaataatgactacatgtcagtcgaataatatttataatatagctgttaaaggaaattttgatgactgccaaaaaattgttaaacaaatgtttaatgatgaacaatttagagaaaaaataaatatgtctggagtaaattcaattaattgggcaagaattatttgtcagattgtttattatttttatgcatattttcaaatgtcttcaaaattaaatttttctgttccaactggaaattttggagatatatatgcaggttatattgccaaaaaaatgggattacccatagataagttaatagttgcgacaaatgaaaacgacatattatgcagagtaataaattctggagagtacagaccagctgaagttagaccctctctttctccaa

SEQ ID NO: 286348 - DNA, 581 bp, Unknown
  Bacterial polypeptide expressing nucleotide sequence isolated from the Sargasso Sea
tttgcgttatttaagtactaggggcgtcgcaccagaactaaattttgatgatgtgctaataaccggcctcgcgcgtgatggtggactttaccttcccacggattggccccaattttcgcacgaagatttaaggtcttttgcttccttgtcctacccagagctggccatcgaagttatgcgacctttcttgggtgataccatgtcgcgagaggtctttggtaatatagttgacgctacctacaggaaattttcgcacccatcggttgcaccgatcaaacaattggaatcaaacatctggttgatggagttgttccatggaccaacgctggcatttaaagattatgctatgcaaatattgggacgactctttgaccaagcgctgttagcacgtggaaaaaggacaactattgtaggcgcgacatcaggcgatacgggctccgccgctatagaagcgtgtaaagaccgggaagctattgacgtctttattttctttccaaaggatcgcgtgtcccccattcagcaaaagcaaatgacgactgttgatgctgataacatacatgctatcgcgctggagggaactt

SEQ ID NO: 286349 - DNA, 800 bp, Unknown
  Bacterial polypeptide expressing nucleotide sequence isolated from the Sargasso Sea
aatgaattattttagcactagggataaatctttaaaatttagttttaaagatattttcttgagaggtctcgcgcctgatggaggattatttttacctagtgaaataaaaaaatttactaaagaagatctaaaaagattaagtcaattaagttacaatgagcttgcaactgaaataatctatagttttgtatcaaatgaaataagcaagagcgaactaaatacactgatagaaaaatcttatagcaattttaaagaaaaaaaagttgttacattaaaaaaaattggcaatatagatcttctcgaactttatcatggacctactttagcttttaaagatattgcaatgcagttaattggaaatttgtatgatcatttgcaagttgcaaaaactaaagctgttaatattattgtagctacatctggagatactggttctgccgctatagctgctttgaataatagaaaaaatattaatctttttgttttacacccgcacaaaaaaatttctaatattcaaagaaaaattatgacaacaattggtggatcaaatatttacaatattgctatagaaggatcatttgatgattgtcaaaaaattgtaaaagaactttttaatgaggatgattttagaacaaaaataaatatgtcaggagtaaattctattaattgggtgagaatagtttgccaaattgtttattatttttactcttgcttaaaattacaaaaaaataatattagtttttcggttccaacgggaaactttggtgatatttttgcgggatacgttgcaaaaaaaatgg

SEQ ID NO: 286350 - DNA, 496 bp, Unknown
  Bacterial polypeptide expressing nucleotide sequence isolated from the Sargasso Sea
atggaatatgtaagtaccagaaatacaaaaaaaactttttcatttaaagatgtttttttacaaggattagctcctgacggtggtctttttgttcctaaaaatattccaactcttactgcaagtgaattaaaagatttaaaaaatttaacatacaacgaactgtctacaaaaataattttaaaattttgtgaagatgagtttaatgaaaaagaaattaaagaaatagtagaaaattcttataaaaattttcgtattaaagatgtggtgtcagttaaaaaaattgaaaaaataaatttgatggaacttttccatggtccaacattggcatttaaagatatagcaatgcaaataattgggaatatgtatgacctaattttaaaaaggtacaaccaaaaaattaatatagtggtagcaacttcaggagacacaggagctgcagcaataagcgcaataaaagatagaaaaaatatgaaaatttttgttttgcacccttaca

SEQ ID NO: 286351 - DNA, 791 bp, Unknown
  Bacterial polypeptide expressing nucleotide sequence isolated from the Sargasso Sea
taccgataagaagttcacctttgaagaaataattctgaatggccttgcagaggacggcgggttgtatattccagagcaaactccgatatttaccgaaaatgatgtaaataggttgctatgttctgactacgaaactattgcatacgaggttataaaacaatttacgggtgaaacatttacaagtgacctgcttaagagaatgattcatgactcctataaatcattcaggagtgattttgtaacaccattgacagaagttgatggctcattatcgatattagaattatttcatggcccaactcttgcatttaaagatttggcgatgcaattgttatcgcgcatgattgaagaggtgctatcccgcacgaattctaaagcctccataatatgtgcaacatctggtgatactggaggtgcagcggtaacttcattcgcaaataaaaaaaatatcaaactatttgttttatatccaaaaggcagaatatctgaagtccaaagaaggtttatgtcaactgtcaaggctgaaaatataaaagtaatatcgattaatggcaattttgatgattgccaaaatattgttaaaactttatttagtgacagatattttgcaaaaaatgttagtttgacggcagttaattcaataaactgggcaaggataatgatacaaatagtctattattttagcgccttctcacaatacaagagattagaaaagaatataaattttatagttccaactggtaattttggagatatatttgcaggttacatggcgaaaaaaatgggtctgc

SEQ ID NO: 286352 - DNA, 670 bp, Unknown
  Bacterial polypeptide expressing nucleotide sequence isolated from the Sargasso Sea
tttgcgttatttaagtactaggggcattgcaccagaattaaacttcgatgatgtgctaataactggccttgcgcgtgatggaggactgtaccttcctatggactggcctcaattttcttctgaagatttaagagcttttggttctttgtcttatccggaattggcggcgaaggttatgcgacctttcttgggtgatacgataacgagagatgtttttgataatttagttgaagcaacttataggcaatttacccacccattagttgcgccacttaaacaatttgaatcaaacatttggttaatggagttgttccacgggcccacgttggcattcaaagattatgctatgcaaatattagggcggttatttgaccaagcgctgttagctcgcggtaaaagaacaaccattgttggagcaacctctggagacacgggctcagctgctatagaggcgtgcaaagaccgggaagccatagatgtttttattttctttccaaaggatcgtgtgtctctcattcagcaaaggcaaatgacgaccgtcgacgctgacaacattcatgctatagcgttggagggaacttttgacgattgtcaggatatggttaaagcgttgtttaataacctagaattcagagataaatatgccctttcagctataaactcgattaat

SEQ ID NO: 286353 - DNA, 761 bp, Unknown
  Bacterial polypeptide expressing nucleotide sequence isolated from the Sargasso Sea
tgttctagaaagatacaaagaatttttaccggttaccagtaatactccccttatatcacttggtgaaggggatacccctcttgttgcttcaaatagaataattgatgaagttggatgcgaaaggctgttttttaaattagaaggttgtaacccaacaggttcatttaaagacagggggatggttgttgccgttgcaaaagctatggaaaagggtgtgtccagcatagcttgtgcctctactggaaatacaagtgcgtctgctgctgcttatggagctcactacaatttgagaactacaataattgtgcctaaaggtaaaattgctaaagggaaattagctcaagctgttgcatatggggcacacattgcaatgattgatggtaattttgatcaagcattgaatatagtgaaagaactttgtgaaaaacatcctatagagctagtaaattcgattaaccctaacagaatagaaggtcaaaaaacagcttcttttgagataattgatgatataggctctgctccagaccacttatttataccagttggaaatgcaggtaatattaccgcatactggaaagggtttttagaatcaaaaagaagaaatgaaaaacttactttacctgttatgaatggttttcaagcagaaggttcagctccaattgttaataaccaaattgttaaaaatccgcaaactatagcctcagctatacgtataggtaatcctgctagttgggaaaaagctattaatgctagggatgaat

SEQ ID NO: 286354 - DNA, 831 bp, Unknown
  Bacterial polypeptide expressing nucleotide sequence isolated from the Sargasso Sea
tcaaagaataaattaaataaactaaaaaaactatcttacaattctttagcagaaaaaataatctttgaattttgtagtgatgaattcaataaaaaagaaataaaaaaattaattaatttttcttataaaaaatttagagtcaaagatgttgtgaatattaaaaaagttggtgatctcaatttattagaattatttcatggtccaactctagctttcaaagatattgctatgcaggttattggcaacatgtatgaaaaaattttaaaaaaaaacaatgaaaaaataaatattatagtagcaacatctggtgatacaggtgctgctgcaatagaagcaataaaaaatagaaataaaattaaaatttttgttttacatccacataaaaaaatttctaaagttcaaagaaaatttatgacaacggtaaattcaaaaaatgtttttaatatttctgtactaggaagctttgacgattgtcaaaagttagttaaatccatgtttgcagataaaagtttcagtagaaaaataaatatgtctggagtaaattctattaactggtcaagaattatattccaaactgtttattatttttactcttattttaaaattgcaaaagggatggaaaaaataaatttttcagttcccactggaaattttggagatatttacgctgggtatttagctaaaaaaatgggtttgcctattaataaattattaattgcaactaataaaaatgatattttaaaaagggttgttaaaactggcatttataaacctcttcaagtcagatatacgatttctcccaagccatggatattcaagtggccagcaact

SEQ ID NO: 286355 - DNA, 451 bp, Unknown
  Bacterial polypeptide expressing nucleotide sequence isolated from the Sargasso Sea
gatgaattataaaagtactaggggaagtaaaaaatttaattttaaagatatattattttctggtcttgctgaagatggagggttatttgtgccaattgactggcctcaagtaaatcttagagaaattgaacggaacataacttatcctgaattagcaacaaatataattaaacctttcgttcatgatgaaataagtactaaagacctcgataacttagttgaaaacgcatattcaaatcaattttccaaaggtgaaatcatatcatttaaaaatttaaatactaatgaggttattgttgagctatttaatggccccactctggcatttaaagattttgcaatgcaattattagttcctatatttgactattttctagatatagagaaaaaaaaacttaatcttattgtggcaacttcaggcgatactggttcggccgcattgatgcagtaa

SEQ ID NO: 286356 - DNA, 823 bp, Unknown
  Bacterial polypeptide expressing nucleotide sequence isolated from the Sargasso Sea
gttaaattatcaaatgttggagaaataaaattattagaactatttcatggtccaactttggcatttaaagatatagcaatgcaatttattgggaatttatatgaatattatttgaataaaaataacgaaaaaataaatatagttgttgcaacttcgggagatactggtgcagcagccatagatgcaattaaaggaaaatctaatttaaatatatttgtcttacatccaaacaataaaatttcgtctgttcaaagaaaaataatgactactgctgaagaaaaaaatgtcttcaatatcgcaatagatggaaattttgatgattgtcaaaatattgtaaaacaaatgttttctgatttagagttttctaagtctataaatatgtcaggagtaaactcaataaattgggcaagaataattactcaagcagtatattatttttactcatattttaaattaggtaaggaaacaatttcattttcagttccaacaggtaactttggcgatgtttttgcaggctatcttgcaaagaaaatgggattaccaattgataaattaattgttgcaacaaacgaaaatgatattttgcatagagcgatttcaaaaggaaattatgtttcaaaagaagttaaagaaacattgtcacctagtatggatattcaattagcaagtaactttgaaagattaatttactatgtaaataattccgactccaaaaaaacagcagaaattatgaaaaaagttaagcaaaattcttatcaaattgagaagccaagtttagatataatccaaaaagattttctttcagaaagttgcaatgaaaaag

SEQ ID NO: 286357 - DNA, 592 bp, Unknown
  Bacterial polypeptide expressing nucleotide sequence isolated from the Sargasso Sea
atgaaatacataagtactagagacgataggaaagaattaaattttgaaaaagtttttataaaaggcttagctgatgatggaggtctttatgttcctaaatcattaaaaaagtataactccgaagagttatcagagcttaaaaatttaaattataacgaattatctactgaaataataaatctattttcttcagattttataaaaaaagaagaactttcatcattaatgaaaaaatcatactcaacatttagagaaaaagaagtagttaaaatttcgaaagttggagaaataaaattgttagaattatttcacggcccgacattagcttttaaagatattgcaatgcaattcattggaaatttgtatgaatattatctaagtaaaaatgacaaaaaaataaatatagttgttgcaacttctggggatactggcgcagcagctattaatgcgattaaaggaaaatctaatttaaatatatttgtcttacacccaaataataaaatttctcctgtacaaagaaaaattatgactaccgttgaagaaaaaaatgttttcaaaattgctatagatggaaattttgatgattgtcaaa

SEQ ID NO: 286358 - DNA, 601 bp, Unknown
  Bacterial polypeptide expressing nucleotide sequence isolated from the Sargasso Sea
atgagatacgtaagtacaagagacacatcaaaaacctttgaatttaaagacgtttttattaaaggtcttgccgatgatgggggcttatttattccagagacagtagtggaatataatgaaaatgaaatcagagatttaaaaaaacttagttattcagagttagctaaaaaaattgtttatccatttattggtaattttatgtctgaagctgaattgagtaaaattattgataaatcttactccacattcagaaaagataacgttgtagatttcattaagcttggagacaaaacagtattggagctatttcatggccctactttagcttttaaagacgttgccatgcaacttttaggtaatttttacgaataccacctaaacaatcaaaatcaaaaaattaatattgttgttgccacatctggagatactggtgctgcagcaattgatgcaattaaaggtaaaaaaaatgttaatatctttgtgcttcatccagataatcgtgtttcaccagtgcaaagaaaattaatgacaacaggtaaaaatgaaaatgtatttaatatagctataaaaggaaattttgatgattgccaaaacttagtaa

SEQ ID NO: 286359 - DNA, 781 bp, Unknown
  Bacterial polypeptide expressing nucleotide sequence isolated from the Sargasso Sea
actacattaggcaaaaatattcacactgtagcggtaacatcagattttgatgcatgccagcatttagttaagcaagcgtttgatgacagcgatgttcgtgacggtttagctttaaactccgctaattcaatcaatattagccgtttattagcgcagatttgttattattttgaggctgtcgctcaagcaaaaaaagccggtaatgatgacattgtgatgtctgtacccagtggtaattttggtaatttaaccgcagggttgttcgccaaagcaatggggctgccaataaagcggtttatcgccgccactaacagtaatgatactgtacctcgctatttacaagatggcgcatggcaaccacataaaacggttgcaaccatgtcaaatgccatggatgtgtcggagccgagtaactggccacgtgtcgaggcgatttgcgagcaaatgggttggcctttatcgttagtgacgggcattgctttatctgagcatgatacagctgctgctttagctcaactctatcaagttgggtatctttcagagccccatgcagcgattgctgcgcaggctttaaccttagagttaacggacgatgaaactgggatttttcttggcacagctcatccagctaagtttaaagatgtggttgatcagcaattagcaattgaattgcctctacctgttgaactagctgcagttactgagaagcccattttatctgcagaattagaggctgattttgagcagctaaaagcgcatatgttttctgtattaaaataac

SEQ ID NO: 286360 - DNA, 589 bp, Unknown
  Bacterial polypeptide expressing nucleotide sequence isolated from the Sargasso Sea
tatgaaatatatttctacgagaggaaaggcccctgagttaggttttgaagatgttcttttatctggacttgcaaatgatggtggtctttatattccaaaagaatggccaaagttagattacaaagagctacctacaacatcatattctgaacaggcagcatatgttatttacccttttgttaaaggttttttaagttatgaagatttaaacgatattgctagtcaggcttatagtcattttccttcgaaagaagcaattgggttgaaagaagttgaaaaaggaaactatttattagaactttttcatgggccaacccttgcttttaaagattttgccatgcttttattagctcaattttttgaaacttctttaagtaagaaaaataaatcaataactatattaggcgctacttcaggagatactggtagtgccgcgattgaagcttttaagaataataaacattgcactgttttcatattatttccaaaaggaagagtatctgaaatacaaagaaaacaaatgacaactgttgatagcgcaagcatttatgcaattgaaattgacggaacttttgatgattgtcaaaat

SEQ ID NO: 286361 - DNA, 605 bp, Unknown
  Bacterial polypeptide expressing nucleotide sequence isolated from the Sargasso Sea
aatgcgctatatcagtacccgtggccaggctccggccctgaattttgaagacgttctgctggctggtttggcttctgacggtggtctgtacgtccccgagaatctgccgcgttttacccaagagcagattgcgtcctgggccggtctgccgtaccacgagctggcgttcaacgtcatgcgtccgtttgttaccggtagcattccggatgctgacttcaaacagattctgcaagacacctacggcgtctttgagcacaaggcggttgccccgctgcgtcagctggacagcaacgagtgggtgatggagctgttccacggcccgaccctggcgttcaaggactttgccttgcagctgctgggtcgcctgctcgactacttcctggtcaagcgcggtgagcgcgtggtcatcatgggcgcgacctccggtgataccggttctgctgcgatcgaaggctgcaaggcctgcgagaacgtcgacattttcatcatgcacccgcacaaccgggtgtccgaggtgcagcgtcgccagatgaccagcatccttggcgaccacatccataacattgccatcgaaggtaacttccacgactgccaagagatggtca

SEQ ID NO: 286362 - DNA, 460 bp, Unknown
  Bacterial polypeptide expressing nucleotide sequence isolated from the Sargasso Sea
atgaaatatataagtactagaaatagtgataaagactttagctttagagaagtttttgtaaaaggccttgccgatgatggggggctatttgttccaaaatcattaaaaaaatatagcagctcagagttacaacaacttaaaaatttaaattattgtgaattgtctactgaaataataaacttattttcatcagattttatttcaaaagaagagctttcatctttaattaaaaaatcatattcaatctttagggaaaaagaagttgtcaaaatctcaaatattggagagctaaaattattagaattatttcacggtccaacgctagcattcaaggatatagcaatgcaattcatcgggaatttgtatgaatattatttaagtaaaaatgataaaaaattaaatatagtcgttgcaacttctggtgacacgggttcagcagccatagacgcgattaaaggaa

SEQ ID NO: 286363 - DNA, 798 bp, Unknown
  Bacterial polypeptide expressing nucleotide sequence isolated from the Sargasso Sea
ttaaaaaaagcttactcaaattttaatactaaagaagtagtagaaataaaaaaaattggtaacataaatttgcttgaactttatcatggtccaaccttagcttttaaagatattgctatgcaggtaattggacttatgtataataaccttgatttagatcaaaaaaaaataaatgttatagtagcgacctctggtgatacgggagctgctgcaatttcagctttaaaagataaaaaaaatattaatatatttgttttacatcctcatgaaaaaatttcgagtattcaaaggaaaataatgacctcttgtgagtcaaaaaatatctttaatatagctgtaaaaggaaactttgatgactgtcaaagaattgttaaacaaatgtttaatgatgagaaatttagaaaacaaataaatatgtcaggagttaattcaataaattgggcaagaataatttgtcaaatagtatattatttttacgcatattttaaattttcctctagtattaacttttcagtacctacgggtaattttggtgatatttacgcaggttttattgccaaaaaaatgggattaccaattgataaattaattatagctacaaatgaaaatgatattttgtatagagtttttagatctggggaatatagaccactacaagtaaaaacatcactttcaccaagtatggatatccaagtagctagtaattttgaaagattattatttgatataatggaagagaatgatgaaaaagtgaagttgtcaatgaccaagctcttaagtgagggatacttaaactcg

SEQ ID NO: 286364 - DNA, 792 bp, Unknown
  Bacterial polypeptide expressing nucleotide sequence isolated from the Sargasso Sea
aatacccctttaattgaattagcgaacttacctgcacactatggcattaaggctagatggttcgttaaatttgaaggtttaaacccaacgggctcttttaaagatcgaggcatgactatggctattacaaaagctaaagaagaaggtgctaaagttgtgatttgtgcttctaccggtaacacctctgcttcggcggcggcttatgctgctaaagctaatatgggctgttgtgtgttaatacctgaaggtaaaattgcacttggtaagctttctcaggcaatgatgcacggtgcgattgtattgcaaattaaaggtaattttgatgatgctttaaatttagttcgtgaaatatcagctgaataccctataaagcttgttaattcgcttaacccttaccgtatcgaaggccaaaaaacaggttcttttgaaattattgatgcccttggcgatgcgcccgactttcatagcatgccagttggtaatgccggcaatatcacaggttactggaaaggttataaagaatttttagatttaggaaaatctactaaattacctcagattttaggttaccaagccgctggctcggcgcccattgttgatggtcatcccattaaaaatccagaaacgattgcgacggctattcgaattggtaatccggcacgctggtctcaggcagaagaagcgcgtgacgagtcaaagggtcatattgataaggtaacggacgaagaaattacacaagcacaaaaagaccttgctaaatatgacggtgttttttgcgaaccggcttcagcg

SEQ ID NO: 286365 - DNA, 808 bp, Unknown
  Bacterial polypeptide expressing nucleotide sequence isolated from the Sargasso Sea
aaaaacttttcatctgaagaagttattaaattaaagaagttcaaagatttaaatttaatagagctttatcatggacccacgttagcattcaaagatatagcgatgcaagttctaggaaacatgtatgatgaatttaatatttcttcgaataaaaaaattaatatagtggttgctacttctggagatactggatcagcagctatttcggcgttaaacgatagaaaaaatataaatgtatttgttttacatccgcataacaaaatttctaatatacaaagaaaaattatgacaactattggatctaacaatatttacaatatagctatcaaaggaacatttgatgattgtcaaaaacttgtcaaagaaatgttttccgaaaatacatttagagaaaaaattaatatgtcaggtgtaaattctataaattgggcaaggataatttgtcagatagtttactatttttattcttattttaagcttcaaagtaaaaaagttagttttgcggtaccaactggtaattttggagatgtctttgccggatatgtagcaaaaaaaatgggactaccaattgaaaagttaatagttgctacaaatgaaaatgatattttagagagagttataaatacaggtgaatataaaccaactgaagtaaaaccatccttgtctccaagtatggatgttcaaatatcaagtaattttgaaagactgctttttgatgtgctcaatgaggatgataaacaagtatcaattttaatgaataatttaaagtcaaaaggatcatttttattaaataaagaaccaggtagca

SEQ ID NO: 286366 - DNA, 874 bp, Unknown
  Bacterial polypeptide expressing nucleotide sequence isolated from the Sargasso Sea
agagataattcaaaagaatatagttttgaggaggttttcattaaaggccttgctgatgatggaggactttatgtgcctacatctttaaaaaaattcaatttagatgaattgtcaaagcttaaaaatcttaattacaatgatttatctgttgaggtaataaatatattctcatctgattttatctctaaagatgatctttctaagttaattaaaaaatcttattcaacttttagagaaaaagaggttgttaaaatctcaaatcttggtgatttaaaactgttagaattatttcatggtccaacattggcttttaaagatgttgccatgcagtttattggtaatttgtatgaatattatttaagtaaaaatgacaaaaaaattaatattgttgtggctacatcaggtgatacaggggcagctgctattgatgcaattagaggtaaatcaaatttaaatattttcgttttacatcctaacgatagaatttcgccggttcaaagaaagttaatgacaacagttgagaacaaaaatgttttcaatattgcaattgatggaaattttgatgactgtcaaaacattgttaagcaaatgttctcagatttagatttttcaaattcaataaatatgtctggagtgaattctattaactgggcaagaattatagctcaagctgtttattatttttatacttattttaaaattgatagtgacaaaccaatttctttttcagttccaacaggaaactttggagatgtttttgcaggctatctagcaaaaaaaatgggattgccaatagataaacttatagttgcaactaatgagaatgatattttgcatcgagcaatttcaaaaggtgattatattcaaaaaaagt

SEQ ID NO: 286367 - DNA, 907 bp, Unknown
  Bacterial polypeptide expressing nucleotide sequence isolated from the Sargasso Sea
aaggtggcacgccccctggtgtacgcgtgctcgcttagtgaaacgctcgaatgcgaggtgtggctgaagttcgaaggtgccaacccaactgggtcgttcaaggaccgcgggatgacgatggccatcagcaaggccgcggaagatggcgcccgggcggtgatctgcgcgtcgaccggcaacacctcggcgagtgcgtcggcgtacgccgtcaaggccggcatggtgagtgcggtgctggtgccccagggcaagatcgccatgggcaagttggcgcaggcgatcgtgcacggagcgacgttgttgcaggtggatggaaacttcgacgactgcctgacggttgcccgggaagtgtcggactcatatcccgtcgcgctcgtcaacagtgtgaatccggtgcgcatcgagggccagaagacggccagtttcgaaatcgtcgatcagttggggcgtgcgcccgatattcacgcactcccggtgggcaacgcgggcaacatcaccgcgtactggcgtggctacaccgagtacacggccgacggtgtgagtgattcctgcccgcgcctgtgggggttccaggcggcgggcgcggcaccgttggtgcagggctcaccggtgacctcgccggaaaccatcgcgacggctatccgcatcggcaaccccgcgtcgtgggacgcggccatcgccgcacgcgacgaatccgacgggctgatcgattcggtgaccgacgacgagattctgagtgcctatcgattgctggcatcgaccgaagggctgttctgcgaaccgtcaagcgccgccggtgtcgcgggtctgctgaaggtcaagagccagggtggtctcgattcgggtcaggtgatcgttgcgacattgacgggcaacggactgaaggacccgcagtgggctctggagt

SEQ ID NO: 286368 - DNA, 981 bp, Unknown
  Bacterial polypeptide expressing nucleotide sequence isolated from the Sargasso Sea
gtcctattcagatttagcctttgaactaatgaaaccttatataggtgactctctttctttaggtgagcttagtgagataattaagaaatcctatgcttctttttctcacgaagagataacacccttaagtcagattactaaggaggagtatctcctagaattgtaccatggtcctaccttagcattcaaagattgcgctatgcaattattaggtcatttgtttgagcattttttaaaaaaaagagaaaaaaaaattactattatttgtgctacttcaggtgatactggcgcagcagctgtagaggcaatgaaaaacaaagatttaattgatttagttgttttatttccaaaagataaaatatcacaggttcagcaaaagcaaatgacaacgtcagcttctgataatatacactgtttagcagttgaaggcacgtttgacgactgtcaagcaattgtaaaagacttattaaatgataaacaatttaaaaaaaaatataatttatcggctgttaattcaataaattgggtaagggttatggctcaagtcgtgtattatttttatgctgggttaaaattaggaagtccaaataaaaaaataaattttagtgttcccacaggaaactttggagatatttttgcaggctttgttgcttacaagatgggtttgccagtcgatgtattgtgcattgcaacaaactcaaatgatgcgctcgaaaggtttttaagacatggagaatacttagtagaaaatgttaaagccacaataagtcctagcatggatattcaagtcgctagtaatttggagaggttgctttatgaaagctcaggcagaaactctaagatgattagggaaatgatggtagatttaggtgccaataaaaggtttactttggaccaattaacacttaatttcatcaaagatttatttattgctaaaagtgttgatgaggaaatcaacaaaaatacaatagaaagcctttg

SEQ ID NO: 286369 - DNA, 449 bp, Unknown
  Bacterial polypeptide expressing nucleotide sequence isolated from the Sargasso Sea
aatgagatacgtaagtacaagagacacatcaaaaacctttgaatttaaagacgttttcattaaaggtcttgcagatgatggaggtttatttattccagaaacattagtgagatatggggaaaatgaaattagagatttaaaaaaacttagttattcagagttagcaaaaaaaattgtttatccatttattggtaactttatgcctgagtctgaaatgagtaaaattattgataaatcttactccacatttagaaaagacaacgttgtagatttcataaagattggagacaaaacaatattagaattatttcatggcccaactttagcttttaaagatgttgctatgcaacttttaggtaacttttacgaatattacctaaacaatgaaaatcaaaaaattaatattgttgttgccacatctggagacactggtgctgcagcaattgatt

SEQ ID NO: 286370 - DNA, 835 bp, Unknown
  Bacterial polypeptide expressing nucleotide sequence isolated from the Sargasso Sea
atgaaatatgtaagcacaagagataactctaaagaatacagttttgaagacgtttttataaaagggctggcagacgatggaggcctttatgtaccaacatctttaaaaaaatatagctctaaagaattgcagggacttaaaaaattaaattacaatgaattatctgctgagataataaatttattttcgtcagattttatctcgaaagatgaactgtcatctttaatagaaaaatcatattcaacttttagagaaaaggaagtggttaaactctcaaatgtcggagaaataaaattattagaattatttcatggaccaacattagcttttaaagatgttgcaatgcaatttattggaaatttatatgaatattatttaagtaaaaatgacaaaaaaattaacatagttgttgcaacttctggagatacaggagcagcagctatagatgcaattaaaggaaaacccaatttaaatatttttgttttgcatccaaataacagaatttcgtcaattcaaagaaaaataatgacaaccgttgaggataaaaatgtattcaatatagcaatagatggaaattttgatgattgtcagaatatagttaaaagtatgttttctgacttagaatttgcaaaatctataaatatgtctggtgtaaattcaataaattgggcaagaattattgctcaaactgtatattatttttactcatattttaaattagataaagaaactgtttcattttcagtgccaacaggaaattttggtgatgtttttgcaggttatcttgcaaagaaaatgggattaccaattgataaactaattgttgcaacaaacg

SEQ ID NO: 286371 - DNA, 748 bp, Unknown
  Bacterial polypeptide expressing nucleotide sequence isolated from the Sargasso Sea
atgaaatatttaagcacaagaggaaagaaagcggattcttttaaggaagtcttgttttctggtttagcagacgatggaggactgttcgttcctgaggaatggccaaagatagaaattgatcaaattgatccaaatatttcatatattgatcttgctttaaaaattatttcaccttttgtaggggatgatattcctaaagaagatttaaaaaaaattatttccaatgcttatcataatagtttctcggttaacgatcttgtgtcgtttaaaaagctaaataaaaatgaaacaattgtggagttgtttaatggaccaacattagcatttaaagattttgctatgcagctattgattccaatatttgattatttcttattaatggagaataagaagattaatttaatagttgcaacatcaggtgatacaggatcagcagccattaatgctgtaaaaaatagtaaaaatataaatattttttgtctatatccaaaagatcgtgtttcagattttcaaagaaggcaaatgtccacagtaatagaaaataatatagtcctatgtgagattgatggaacttttgatgattgtcagaaaattgttaaatcaatccttagtgataagaatttttctgataaattttctgtttctgcagtaaattctattaattgggctagaataataattcaatctgtttattacttttttactttcttaagacttaataacaatagattagataaaattaattttt

SEQ ID NO: 286372 - DNA, 681 bp, Unknown
  Bacterial polypeptide expressing nucleotide sequence isolated from the Sargasso Sea
gatgaaattattagaattatttcatggaccaacattggcatttaaagatgttgcaatgcaatttattggcaatttatatgattattatctaagtaaaaatgataaaaaaataaatatagttgttgcaacttccggagatactggtgcggctgctattgatgcaattaaaggaaaatctaatttaaatatatttgtcctacatccaaacaataaaatttcttctgttcaaagaaaaataatgactactgttgataacaaaaatgtatttaatattgcaattgatggaaactttgatgactgtcaaaatattgtaaaacaaatgttttctgatttagaattttctaaatctataaatatgtcaggcgtaaactcaattaattgggcaagaattattgctcaggcagtatattatttttattcatattttaaattaggcaaagaaactatttctttttcagttccaacaggaaactttggtgatgtttttgcgggctatcttgcaaagaaaatgggattaccaattgataaactaattgttgcaacaaacgaaaatgatattttgcatagagctatttcaaaaggagattatgtttcaaaagaagttaaagaaacattgtctcctagtatggatattcaattagcaagtaactttgaaagattaatttactatgtgaataattc

SEQ ID NO: 286373 - DNA, 547 bp, Unknown
  Bacterial polypeptide expressing nucleotide sequence isolated from the Sargasso Sea
atggaatatattagtacaagaagtgataataagaaattttccttcagtgaggtatttcttaaaggtcttgctgatgatggaggcctttttataccgttaaatattaaaaaatttgatgagggcaaaatgaactctctaaaaaaattaagttatgtagatttagctactgaaattatttatttatacactggtgattttttaagcaaaaaagaattaaatgaaattgttaaaaaatcatattctaacttcagggaaaaagaagttgttaaaatagttgagttaaatcaattaaagatcttggaattatttcatggacccactctagcttttaaagatattgcgatgcagttaattggaaatatgtatgagcatcttttaaaatcaaataacaaaacaattaatatagtcgttgcaacttctggagacaccggagcagcagctattgatgcaatcaaaggcaagtctaatttaaatatatttgttttacatccaaataatagaatttcctctgttcaaagaaaaattatgactacagtagaggaaaaaa

SEQ ID NO: 286374 - DNA, 840 bp, Unknown
  Bacterial polypeptide expressing nucleotide sequence isolated from the Sargasso Sea
tatgagatacaaaagtacacgtggcggaatatctgggcttaccttttgtgaaaccttattgatgggacttgccccggacgggggcctattgctgccggagtctattccgaatatttctaataacttggaatcatggagctctttgtcttttgtcgagttggctcaggaagtcattgctatttttgctgacgacataccaaaagacgatttagatacgattattgagcaggcttattctaattttgaacacgaagatgttgtaggcttggaaaaattgggcgatatccatgtactggaactctttcacgggccgactctggcctttaaggacgtcgcgcttcagttgttgggaggtctgttcgattatgttttgtctaaaaacaaccaacacctcaatatccttggggctacgagtggcgatactggcagtgccgcaatagctgggattcgtggtagggccaacatggatattttcattatgtatcctgatgaaaaagtgagcccacttcaagaattgcagatgaccactaatctagaacccaacgtgcattgcatagcgatcgatggcagttttgatgattgtcagaatttaatgaaaaacatatttggcgatttggcttttaagaaagattttcgattgggcgcgattaactcagttaattgggcgcgaatcatggcgcaaattgtttattatgcttacgcgaccttaagggtaggtggtcggccaagctttgctgtccccactggaaactttggtaatgtttttgcggcctatattgctcataaaatggggttcccgattggaaaattggtagtcgcaaccaatgaaaacgatattct

SEQ ID NO: 286375 - DNA, 565 bp, Unknown
  Bacterial polypeptide expressing nucleotide sequence isolated from the Sargasso Sea
aatgaaatatataagcacaagaagcaaagaaaaagaatacagttttggagaagtttttttaaaaggacttgctgacgatggaggtctttatgtgccaaaatcattaaaaacttatagtaaagaagaattattaaagctaaaaaatttaaattataatgaattatctactgagataataagtcaattttcagcagattttatatcaagagacgaactttcatctttaattaaaaaatcatattcaacatttagagaaaaagaagtggttaaaatttcaaatgttggagatatgaaattattagaattatttcacggaccaacattagcatttaaagatattgcaatgcaatttattgggaatttgtatgaatattatttgaagaaaaatgacaaaaaaataaacatagtagttgcaacttctggtgatactggagcagcagctatagacgcaattaaaggaaaatctaacttaaatatatttgttttacatccaaacaacaaaatttcttctgttcaaagaaaaataatgacaactgttgaagaaaataatgtttttaatattgca

SEQ ID NO: 286376 - DNA, 780 bp, Unknown
  Bacterial polypeptide expressing nucleotide sequence isolated from the Sargasso Sea
aatgttcggaaaaataaaattattagaattatttcatggcccaactttagcttttaaagacgttgcaatgcaattcattggaaacctctatgaatattatttaactaaaaataataaaacaattaatattgtagttgcaacttctggagatacaggtgcagcagccatagatgctataaaaggtaaatcaaatttgaatatttttgtacttcatccaaataataggatttcatctgttcaaagaaaaataatgacaacagtagaagaaaaaaatgtttttaatatagcaatagaaggaaattttgatgattgtcagaatattgttaagagtatgttttctgacttagaattttctaaatcaataaatatgtctggagtgaactcaataaattgggcaagaattattgctcaagcagtatattatttttactcatattttaaattagataaagaaaccatatccttttcagtacccacaggaaatttcggagatgtttttgcaggctatcttgcaaaacaaatgggattaccaattaataagttaattgttgcaacaaacgaaaatgatattctacacagggctatctcaaaaggagattatatttcaaaagaagttaaagaaacattatcacctagtatggatattcaattagcaagtaactttgaaagattgatttattatgtaaataattcagattcttcaaaaactgcagaaattatgaaaaaaattaaacaaaattcttataaaattgaaaagaacaatttagatattattcaaaa

SEQ ID NO: 286377 - DNA, 658 bp, Unknown
  Bacterial polypeptide expressing nucleotide sequence isolated from the Sargasso Sea
ttggtaaatttaaaagattcatcggacacagcaaattttgctgaagccgttaagcggggcttaggtaaaaaccaagggctttattttccagagcatattcctaccctagacaatattgacggattgttggaaaagccatttgtagagcgcagtattgatgtacttcgcgcccttatcggcgatgagctgaataatggcgagctagaagaaattgttcagaccgcatttgcttttggtgcaccggttgagcaggtcaacgataatgtatactgcttagagcttttccatggcccaacgctagcgtttaaagattttggcggccgctttatggcgcaaaccctgtcgcgtattagtgaagggaagccagttaccattctaacagcgacttcaggtgataccggcgcagcggttgcacatgcatttcacggcattgataatatcaacgtagttattttgtttccaaagggcaagattagcgcgctgcaggaaaagctattcactacgctaggcggtaacattcataccgttgctgtagagtcagacttcgatgcgtgccaatcgttagtgaaaaccgcgtttgacgaccctgatgtgcgtgaaggccttcacctgaactcagcaaactcaatcaacatcagccgtttactagcgcaggttg

SEQ ID NO: 286378 - DNA, 787 bp, Unknown
  Bacterial polypeptide expressing nucleotide sequence isolated from the Sargasso Sea
gactcctataaatcatttaggagtgattttgtaacaccattgacagaagttgatgactcattatccatattagaattatttcatggcccaactcttgcatttaaagatttggcaatgcaattgttgtcacgcatgatagaagaagtgctatctcgcactaattccaaagcctccataatatgtgcaacatctggtgatactggaggtgcagcggtaacttcatttgcaaataaaaaaaatatcaaactatttgttttatatccaagaggcagaatatctgaagtccagagaaggtttatgtcgaccgtcaaggcacaaaatataaaagtaatatcgattaatggcaattttgatgattgccagaatattgttaaaactttatttaatgacagatactttgcaaaaaatgtaagtttgacagcggttaattcaataaactgggcaaggataatgatacaaatagtctattattttagtgctctatcacagtaccagagattagaaaagaatgttaattttatagttccaactggtaattttggagatatattcgcaggctacatggcgaaaaaaatgggtctgccaatccaaaagctagttattgctacaaatattaataatattttagaaaggtgtctaaaaacaggcaagtatgaagcaattgactctatacagacaaactccccatcaatggatattcaaatatcaagtaattttgaaaggcttctttttgatttattggatatgagtcctggattagtgggagaaaaaatgagtgaattaaagg

SEQ ID NO: 286379 - DNA, 845 bp, Unknown
  Bacterial polypeptide expressing nucleotide sequence isolated from the Sargasso Sea
gatgaaagggctggctgaagataagggcctttatatgcctgaggtatggccaaagttttctatgaatgaaatatctggtcttagtaatttttcttatccagatttagcgtttgaattgatgagaccttttataggtgattctctatctttggaggagtttagcgaaataattaataagtcctatgattctttttcccataaagatacaacgccattaaatcagattactaaaaatgagtatcttttagagttattccatggccctacattagcctttaaggattgtgccatgcaattattagggtctttatttgagcattttttaaaaaaacaagggaaaaaaattaatataatttgtgctacctcaggtgatactggtgcagcagctgttgaggcctttaaaaataaagatttaattaatttagttgttttgtttcctaaaaataaaatttcaagagtccaacaaaaacaaatgacaacatctgattctgataacatccattgtttggctgtagaaggaacttttgacgactgtcaggcaatagtaaaaaatttattaaataataagcaatttaaaaataagtataatctatcagctgtcaattcaataaattgggtaagggttatggcccaggttgtttattatttttacgcaggattaaaattaggaagtccaaaagaaaaagtaaattttagtgttccaacaggcaatttcggagatatatttgctggctttagcgcacacaagatgggcctaccgatagatgtattatgtattgcaacaaactcaaacgatgctcttgaaagatttttaaaaaatggagaatatatagtcgaaaatgtta

SEQ ID NO: 286380 - DNA, 818 bp, Unknown
  Bacterial polypeptide expressing nucleotide sequence isolated from the Sargasso Sea
atacattagtacaagaaataaaaatcaaagttacttttttaaagatatatttctaaggggtttagcacctgatggaggtttatttgttcccaaaaatattaaaatttataatgaagatgaaataaaaaaacttagcgagttatcttatatagaattagcaactgaaataatttttaatttttgttcatctgatataacaaaaacaaatctaaaaaatctcgttcaaaaatcctataaaagtttttctagtgaagaagtaattaaaacaaataaaatcggcgatattaatttagtggaactttatcacggaccaacattagcttttaaagatattgccatgcaggttcttggcaacttgtatgacgaactaaaagtttcagctaataaaactgttaatataatagtcgcaacttcaggagatactggatcagctgcaatcgcagcattaaatgatagaaaaaatattaatgtttttgttttacatcctgataacaaaatatctaaaattcaaagaaaaattatgacaacgataggttcagataatatttacaatgtagcaataaaaggatcattcgacgattgtcaaaaaattgttaaagatatgttttcggaaaatagttttagagaaaaaattaatatgtcaggtgtaaattctattaattgggcaagaatagtttgtcaaattgtttactatttttattcagcatttaaatttaaaaacaaaaaaattaatttttcagttccaactggaaatttcggagatgtttttgctggttatatggcaaaaaaaatgggacttcccattgaaaaattaatcg

SEQ ID NO: 286381 - DNA, 718 bp, Unknown
  Bacterial polypeptide expressing nucleotide sequence isolated from the Sargasso Sea
aatgaactattttagcacaagagataaatctttaaaattcagctttaaagatattttcttaagaggtctagctccgggaggagggttgtttttgcctagtgaaattaaagaatataataaagaggacttaaaaaaactaagtcaactaaattataaagatcttgccacagaaataatattcaatttttgttcaaacgcgataagtaaagatgaacttaattctttgatagaaaagtcatacaacagttttatagatagcgaggttgttaaattaaaaaaaatcggagagataaatcttttagaactttaccatggacccactttagcttttaaagatattgcaatgcagattattggaaacatgtatgatcacttgcaagttgctaaaaataaaactgttaatgtagttgtagccacttctggagatacaggctcagccgcaatagctgctttgagtaatagaaaaaatataaatctttttgtattacatccgcataataaaatttctgatactcagagaaaaattatgacaactatcggcggtactaatatttataatgttgcgatagaaggatcatttgacgattgtcaaaaaattgtaaaagatctatttaacgaagacaactttagagtaaaaataaacatgtctggagtaaattctattaattgggcgagaattatttgtcagattgtttattattttttactcatattttaa

SEQ ID NO: 286382 - DNA, 445 bp, Unknown
  Bacterial polypeptide expressing nucleotide sequence isolated from the Sargasso Sea
aatgaactatataagcacaagaaataatcagaaaaattttgcttttaaggatgtttttcttaaaggtttggctgatgatgggggcctatttgtgcctcaatcaatcaaaccatttaaaaaagaagaattagaaaatttaaaaaaccttaattacaataatttagcgtctgaaataatttatccatttataggagatttcatgtctaaagatgatctaatcactttgatttcaaaatcatacttaaattttagatgtaatgatgttgtaaaaatctcagatctgggaaatttaaaagttttagaactatttcatggtccaacgcttgcttttaaagatatcgcaatgcaattaataggtaatttctatcaatactatttagaacgtgatcaaaaaaaaattaacataatagtagcaacttcaggtgatactggtgcagctgctata

SEQ ID NO: 286383 - DNA, 499 bp, Unknown
  Bacterial polypeptide expressing nucleotide sequence isolated from the Sargasso Sea
atgagatacgtaagtacaagagacacatcaaaaacctttgaatttaaagacgtttttatcaaaggccttgctgatgatggaggcttatttattccagaaacagtagtgaaatatgatgaaaatgaaatcagagatttaaaaaaacttagttattcagaattagctaaaaaaattgtttatccctttataggtaatttcatgtctcaagctgaattgagtaaaattattgataaatcttactctacgtttagaaaagataatgttgtagatttcataaagcttggagacaggatagtgttagaactgtttcatggtccaactttagctttcaaagatattgctatgcaacttttgggtaacttttacgagtattacctaaataatgaaaatcagaagattaatattgttgttgctacatctggagacactggtgccgcagcaattgatgcaattagaggtaaaaaaaatgtcaatatttttgtgcttcatcccagataat

SEQ ID NO: 286384 - DNA, 919 bp, Unknown
  Bacterial polypeptide expressing nucleotide sequence isolated from the Sargasso Sea
aaaacatttgaatttaaagacgtttttatcaaaggtcttgctgatgatggaggcttatttattccagaaaaattcatgaaatataacataaatgaagttaaagattttaaaaaactaagctaccaagagctagctaaaaagatagtttatccatttattggtaattttatgtctgagtctgatatgggtaaaattattgataaatcttactccacatttagaaaagataacgttgtagatttcataaagattggagacaaaacaatattagaattatttcatggtcctactctagcttttaaagatgttgccatgcaacttttaggtaacttttacgaatattacctaaacaatgaaaatcaaaaaattaatattgttgttgccacatctggagacactggtgctgcagcaattgatgcaattaaaggtaaaaaaaatgttaatatttttgtgcttcatccagacaatcgtgtttcaccagttcaaagaaaattaatgacaacaggtaaacatgaaaatgtatttaatatagctataaagggaaattttgatgattgccaaaacctagttaaatcaatgtttgcagataaacagttttcaaatgatatcaaaatgtcaggggtaaactctattaattgggcgaggattattgctcaaagtgtttattatttttatagttattcattggttgaaaatacatctgaactaacaaatttttcagtaccaacaggaaattttggagatgtgtatgcaggatatttagccaaaaaaatgggcttacctataaataaattgattgttgcaactaatcaaaatgatattttacatagagcaatatcaaaaggtagttatgaagcagaaaaggtttcagaaactatttctcctagtatggatattcaaatagctagtaattcgagag

SEQ ID NO: 286385 - DNA, 759 bp, Unknown
  Bacterial polypeptide expressing nucleotide sequence isolated from the Sargasso Sea
catgcgttacatcagcacccgcggccaggcaccggccctgaatttcgaagacgttctgctggcaggccttgccaccgacggcggcctgtatgtgccggaaaacctgccacgcttcacccaggaagaaatcgcctcctgggccggcctgccgtaccacgaactggctttccgagtgatgcgcccgttcgtgaccggcagcattccggatgcggacttcaagaagattctggaagaaacctatggcgtgttttcccacaacgccatcgcgcccctgcgccaactgaacggcaatgagtgggtgctggagctgttccacggcccgaccctggcgttcaaggacttcgccctgcaactgctcggtcgcctgctcgactacgtgctggaaaaacgcggcgagcgcgtggtgatcatcggcgccacctccggcgataccggctcggcggccatcgaagggtgcaagcactgcgaaaacgtcgacatcttcatcctgcacccgcacaagcgcgtgtcggaagtgcaacgtcggcagatgaccaccatctttggtgagaacattcataacatcgccatcgaaggcaacttcgatgactgccaggaaatggtcaagaacagcttcgctgaccagagcttcctcaagggtacgcgcctggtggcggtcaactcgatcaactgggcgcggatcatggcccagatcgtctactacttccacgcttcgctgcagttgggtggcccggcgcgttcggtgtcgttctcggtgcc

SEQ ID NO: 286386 - DNA, 502 bp, Unknown
  Bacterial polypeptide expressing nucleotide sequence isolated from the Sargasso Sea
aatgaattatattagtacaagaaataatcagaaatactttactttcaaagatgttttcctcaaaggtttggcagatgatggggggttatttgtacctaaatcaattacaccatttaatgaagaagaattagataatctaaaaaaccttagttacaatgatttagcagctgaaataatttatccgttcatgggagatttcatatctaaagatgacctaatctctatgatttcaaaatcatattcaaatttcagatctgacgatgttattaaaatctcaaatctaggagatttaaaagtattagaactatttcatggtcctacactcgcttttaaagatatcgcaatgcaactaataggtaatttttatcaatatcatttagaccgtgatcaaaaaaaaattaatataattgttgcaacttcaggtgatacgggtgcagctgctatagacgctttaaagggaaaaaataatttaaatgtttttgtattacaccccaataacaaa

SEQ ID NO: 286387 - DNA, 850 bp, Unknown
  Bacterial polypeptide expressing nucleotide sequence isolated from the Sargasso Sea
atgaaatattttagtacaagaaataaaaatttaaatcatagctttaaagaagtttttctaagaggtttggcgcctgatggcggtctatttattccacagaaaattaaaatatataacagttctgaattaaaagaattaagcaaattaaaatacaccgatctcgctactgagattatttctaatttttgtgttcctgatattgaaaaaactaaactaaaggaattaatagagagagcttataaaagatttaacttggaagatgttgttgcaataaaaaaagttggcaatcttaatttattagagctttatcatgggccaactcttgcattcaaagatatagctatgcaagttattggtaatatttataatgaatttaattctacagacaaaaaaataattaatattatagttgcaacttctggagacacaggttcagctgcgatttctgctcttagcagcaaaccaaacattaatgtttttgtcttacatcctcataataaaatttcccatattcaaagaaaaattatgacagttgtagactcaaaaaatattcataacatagcattaaaaggaaactttgatgattgtcaaaaaattgttaaagaaatgttcactgataacaaatttagggaagacataaatatgtctggtgttaattcaattaactgggcaagaatagcctgtcaaatagtttattatttttattcttcttttaagtttccaaataaaaaaataaatttttcggttccaacaggcaattttggagatgtttacgctggttacgtagcaaaaaagatgggattacccatcaataaattaatagtagctacaaataaaaatgatattttgc

SEQ ID NO: 286388 - DNA, 934 bp, Unknown
  Bacterial polypeptide expressing nucleotide sequence isolated from the Sargasso Sea
attgtttcatggacccactctagcctttaaagatattgcaatgcagttaattggaaatatgtatgagcatcttttaaaatcaaataatgaaactataaatatagttgttgcaacatccggagatactggtgcagcagccattgatgcaattaaaggaaaatctaatttaaatatatttgttttacatccaaataatagaatttcctctgttcaaagaaaaattatgactacagtagaggaaaaaaatgtttttaatattgcaattgatggaaactttgatgattgtcaaaatattgtaaaacaaatgttttctgatcttgagttctcaaaatctataaatatgtcaggggtaaactcaataaattgggcgagaataattgctcaagcggtatattatttttatgcacattttaaattagaaaaagacaatatctctttttcagttccaacaggaaattttggagatgtctttgcaggatatcttgcaaaaaaaatgggattaccaattgataaattaattgttgcaacaaatgaaaacgatattttgcatagagccattacagaaggagattatatttctaaagaagttagagaaacattatcccctagtatggatatccaattagcaagtaactttgaaagattaatttactacgtgaataattccaattctgaaaaaacagcagaaattatgaaaaaagtgaaaaagaattcttataaaattgaaaagagagatttagatataattcaaaaagattttttatcagaaagctgcaatgaaaaagaaactttaggaattattaagaaaaattacgaggaaaatggtgtggttttagatccacatacagccattggagtgggcgctgcacaaaaagtatctttgaatgattgtgtagttttatcaactgcacatccggtaaattccagacgccac

SEQ ID NO: 286389 - DNA, 461 bp, Unknown
  Bacterial polypeptide expressing nucleotide sequence isolated from the Sargasso Sea
aatggaatatataagtacaagaggtgataataagaaattttccttcagtgaggtatttctcaaaggtcttgctgacgatggaggcctttttataccgttgaatattaaaaaatttgatgagagtaaaatgaactctctaaaaaaattaaattatatagatttagctactgaaattatttatttatacacaggtgattttttaagcaaaaaagaattaaacgaaattgtaaaaaaatcatattctaattttagagaagaggatgttgtcaaaatagttgagctaaatcaattaaaaatcatggaattgtttcatggacccactctagcctttaaagatattgcaatgcaattaattggaaatatgtatgagcatcttttaaaatcaaataatgaaactataaatatagttgttgcaacatccggagatactggtgcagcagccattgatgcaattaaaggaa

SEQ ID NO: 286390 - DNA, 868 bp, Unknown
  Bacterial polypeptide expressing nucleotide sequence isolated from the Sargasso Sea
aaaattagagatttaaaaacacttagttattcagagttagcaaaaaaaattgtttatccatttattggtaattttatgtctgaagctgaattgggtaaaattattgataaatcttactccacatttagaaaggataatgttgtagatttcataaagcttggagacaaaacaatattagaattatttcatggtccgactttagcttttaaagacgttgccatgcaacttttaggtaacttttacgaatattacctaaacaatgaaaatcaaaaaattaatattgttgttgccacatctggagatactggtgctgcagcaattgatgcaattaaaggtaaaaaaaatgttaatatttttgtgcttcacccagataatcgtgtttcaccagtgcaaagaaaattgatgacaacaggtaaatatgaaaatgtatttaacatagctataaagggaaattttgatgattgccaaaacctagttaaatctatgtttgcagataagcagttttcaaatgatatcaaaatgtcaggggtgaactctattaattgggcaaggattatcgctcaaagtgtttattatttttatagttattcatttgttgaaaatacaggtgaaccaacaaatttttcagtaccaacaggaaattttggagatgtttatgctggatatttagccaaaaaaatgggcttgcctataaataaattgatcgttgcaactaatcaaaacgacattttacatagagcaatatctaaaggtagttatgaagcagaaaaggtttcagaaaccatttctcctagtatggatattcaaatagctagtaatttcgagagacttatattcgatcttaataatgagaatgataaacagacta

SEQ ID NO: 286391 - DNA, 792 bp, Unknown
  Bacterial polypeptide expressing nucleotide sequence isolated from the Sargasso Sea
aatggaatatataagtacaagaggtgataataagaaattttcctttagtgaggtatttctcaaaggtcttgctgatgatggaggcctttttataccgttaaatattaaaaaatttgatgagactaaaatgaactctctaaaaaaattaaattatatagatctagctaccgaaattatttatttatacactggtgattttttaagcaaaaaagaattaaatgaaattgtcaaaaagtcatattctaactttagagaaaaggatgttgtcaaaatagttgagttaaatcaattaaaaatcttggaattgtttcatggaccgactctagcttttaaagacattgcaatgcagttaattggaaatatgtacgagcatttcttaaaatcaaataacaaaacaataaatatagttgttgcaacttcaggggatactggtgcagcagccattgatgcaattaaaggaaaatctaatttaaatatatttgttttacacccaaataatagaatttcctctgtccaaagaaaaattatgactacagtagaggaaaaaaatgttttcaatattgcaattgatggaaactttgatgattgtcaaaatattgtaaaacagatgttttctgatctcgagttctcaaaatctataaatatgtcaggtgtaaactcaataaattgggcaagaataattgctcaagcggtatattatttttatgcgcatttcaaattaggaaaaaacaatatctctttctcagtccctacgggaaattttggagatgtctttgcagggtatcttgcaaa

SEQ ID NO: 286392 - DNA, 859 bp, Unknown
  Bacterial polypeptide expressing nucleotide sequence isolated from the Sargasso Sea
agccgaaataatttccccatttattggtgattttatgtcaaaagaagagttaatttctatagtatcaaaatcttattcaaattttagagcagaggatgttgtaaaaatatctgatttaggaaatttaaaagttttagaactctatcacggcccaacacttgcttttaaagatattgcaatgcaattgataggaaatttttatcaatatcatttaggaaatgagcaaaaaaaaattaatattattgtagcaacttcaggagatacaggtgcagctgctattgatgctttaaaaggtaaaaagaatctaaatgtttttgtattacatccaaataacagaatttcaccagtgcaaagaagactgatgacaatccatgaagaaaaaaatgttttcaatattgctattgagggtaactttgatgactgtcaaaatttagttaaagccatgtttaatgatgaaaaattttccagctcaataaatatgtcaggtgttaattcaattaattgggcaagaattgttgctcaagctgtttattatttttattcttattttaaaataggcaatggacagtctctgtctttttctgtccctactggaaattttggagatatttatgctggttatttagcgaagaaacttggtcttccaattgataaacttattgtagctactaacaaaaatgacatccttcatagagcaatttctggcggggattatactcaaaagaaagttgaggaaacaaatactcctagcatggatatccagatagcaagtaactttgaaagacttttatatgatgtaaaagactgtaactcagaagttacaaaagatgtgatgagtaagataaaaaataatacttat

SEQ ID NO: 286393 - DNA, 929 bp, Unknown
  Bacterial polypeptide expressing nucleotide sequence isolated from the Sargasso Sea
tataatttcaaagtcgtactctattttcagatctaatgatgttgtagaaatctctgatctaggaaatctaaaagttttagaactatttcatggtccaacacttgcttttaaagatatcgctatgcaattaataggtaatttttatcaatattatttaggacatggacatgatcaaaaaaaaattaatataatagtagcaacttcaggtgacactggtgcagctgctatagacgctttaaaaggaaaaaaaaatttaaatgtttttgtattgcacccaaacaataaaatttcaccagtgcaaagaagactaatgacaacacatgaagagagtaacgtatttaatattgcagtagagggtaattttgatgattgtcaaaatttagtaaaatcaatgtttaaggacaaaaaattttctagagcaattaatatgtcgggtgtaaattcaattaattgggcaagaattattgctcaatcagtttattatttttacgcttatttcaaagttggagatggtcaacctttatctttttctgttccaacaggtaactttggagatatttatgctggttatttagcaaaaaaactaggtcttccaattgataaactaattgtggctacaaataaaaatgacatacttcacagagcaatatcaggtggcgactatactcaaaaaaaagtggaggaaacaaatactccaagcatggatatacaaatagctagtaatttcgaaaggcttttatatgacataaaagatagtaactctgaagttacaaaagatgtaatggctgaaataagaaataatacttataaaattaataaaagtgatttagataaaattaaaaagaattttatatctgagatgcttaatgaaaacgagactgtagaaatgataaagacaattagtgatgagcatcagaccagtggttgat

SEQ ID NO: 286394 - DNA, 451 bp, Unknown
  Bacterial polypeptide expressing nucleotide sequence isolated from the Sargasso Sea
atgaaatatgtaagcacaagagataactctaaagaatacagttttgaagacgtttttataaaagggctggcagacgatggaggcctttatgtaccaacatctttaaaaaaatatagctctaaagaattgcagggacttaaaaaattaaattacaatgaattatctgctgagataataaatttattttcgtcagattttatctcgaaagatgaactgtcatctttaattgaaaaatcatattcaacttttagagaaaaggaagtggttaaactctcaaatgtcggagaaataaaattattagaattatttcatggaccaacattagcttttaaagatgttgcaatgcaatttattggaaatttatatgaatattatttaagtaaaaatgacaaaaaaattaacatagttgttgcaacttctggagatacaggagcagcagctatagatgcaa

SEQ ID NO: 286395 - DNA, 522 bp, Unknown
  Bacterial polypeptide expressing nucleotide sequence isolated from the Sargasso Sea
catgcagttaagcaatattaaagtacctgccgagcaggttagttttttacaggccgtacggcagggattagggcaacagcaaggcctgttttttccaaccagctggcctaagctggacattgaagccttgctggcgatgccaatggtcgaacgcagtgctgctattttaaaggcgttgataggtgacgagttaagcgcagccgaagtaggtgagatggtagcaaaggcttttacctttgctgcgccgctggcgccggttacagatgatatcagttgccttgaactgtttcatggcccgaccctggcgtttaaagattttggtggccgctttatggcgcaggccttagccaaagcgcaagggggcagaaaaaccacgatcgttaccgcaacctcaggtgataccggtgctgcggtagcccatgctttttataagcagccaggggtgcaggtggttattttatttccgaaaggtaaaatcagcccgctgcaggagaaactgtttactacgcttggcgaaacatt

SEQ ID NO: 286396 - DNA, 802 bp, Unknown
  Bacterial polypeptide expressing nucleotide sequence isolated from the Sargasso Sea
aacatttagagaaaaagaagttattaaaatttctagtttgggaaaattaaaattattagaattatttcacggtccaacgttagctttcaaagacgttgcaatgcaattcattggaaacttgtatgaatattatttaagtaaaaataataaaaaaataaatatagttgttgcaacttcaggagacacaggcgcagcggcaatagacgctattaaaggaaaatcaaatttaaatatttttgttttgcacccaaataatagaatttcaccagttcaaagaaaattaatgacaactgttgaagaaaaaaatgtttataatattgcaatagatggaaattttgatgattgccaaaatattgtaaaacaaatgttttctgacttggaattttctaaatctataaatatgtcaggtgtaaattcaatcaattgggcaagaattattgctcaaacagtttattatttttactcatattttaaattaggcaaagaaaatgtttcattttcagtaccaactggaaactttggtgatgtttttgcaggctatcttgcaaagaaaatgggattaccaattgataaactaattgttgcaacaaacgaaaatgatattttgcacagagcgatctcaaaaggagactatgtttcaaaagaagtaaaagaaacattgtcacctagtatggatattcaattagcaagtaattttgagagattaatttactatgtaaataattccgactctgaaaaaacagcaaatattatgaaaaaaattaagcaaaacacttatcaaattgacaaaccaagtttagaa

SEQ ID NO: 286397 - DNA, 789 bp, Unknown
  Bacterial polypeptide expressing nucleotide sequence isolated from the Sargasso Sea
ttttacctaagcgaaataataaaatttaatcaagctgaattaaatgatctgagcaagttaagctataaagaattagctacagaaattatattcaatttttgtaaagacgaagttagtaaaaatgaattaaaatctttaatacaaaaatcatataataactttaaaaatgaagaggttgttaatttaaaaaagttaggtgatatcaatcttcttgagctttacaatgggccaacattagcttttaaagatatcgcgatgcaagttataggaaatttgtatgaacatttaaaagtggcaaaagaaaaatccgtgaatatagttgtcgccacttcaggcgatactggatcagcagcaatagccgctttaaataatagagaaaatataaatttgtttgttttacatccacacaataaaatttcgagtactcaaagaaaaataatgacaactattggcggttcaaatatttataatattgctgttaaaggttcttttgatgactgtcaaaaaatagtaaaggaactttttaatgatgataatttcagattaaaaattaatatgtccggtgtaaattccattaactggtcaagaattgtttgtcagattgtttattacttttattcatattttaggttaaaaaaaaataatattagcttctcagttcctacaggaaacttcggagatatttatgctgggtatattgcaaaaaaaatgggacttccaattaataaattaatcgtggcaactaatgagaacgatatattagaaagagtaataagtaccggtgaatat

SEQ ID NO: 286398 - DNA, 802 bp, Unknown
  Bacterial polypeptide expressing nucleotide sequence isolated from the Sargasso Sea
gtaaatataaataaaattggaaatataaatcttctcgaactttatcatgggcccactttagcttttaaagatattgcaatgcaggtaattggcaatatgtatgactatttggaagtcgctaaagataaaactgtaaatgtcgtagtagctacatcaggagatactggttcagctgctatagctgcattaagcaatagaaaaaatataaatctttttgtactacatccgcataataagatttcaaatactcaaagaaaaattatgacaacaataggtggatcaaatatttttaatattgctatagaaggatcatttgatgattgtcaaaaaattgtaaaagagctttttaatgcagatagttttagggcaaaaataaatatgtcaggtgtaaattctatcaattgggcaaggatcgtttgtcagattgtttattatttttattctttctttaaattgaaaaaaaacaatattagcttttctgtgccgactggaaattttggagatatctatgctggatatgtagcaaaaaaaatgggtttaccaattaataaacttataattgctacaaataaaaatgatattttacaaagagtaattaacacaggtgaatacaaacctgactcagtgaaagcaaccatcacaccaagtatggatatacaagttgccagtaattttgagaggctgctctattatatattagatgaaagcgatattaaggtagggtcattaatgaatgatctttcatcaaaaagtttttttaatttagaaaaaaaagaaatcgataaaataaaaaaagatttga

SEQ ID NO: 286399 - DNA, 910 bp, Unknown
  Bacterial polypeptide expressing nucleotide sequence isolated from the Sargasso Sea
ttttgagggggtactgctcgcagggcttgcgcgtgacggcgggctttatttgccgcagtctttgccaagtttcagtgccgcagagcttcaggccatgcgcggtatgtcatatagcgagttggcgacgacggtgattgcgcctttcgtggagggcagtatcgaccgcgacacgctgtcccagttagttgagtccagctaccgggatttccggcatcaggcagtcgcgcccgtcaaacagctcgaccgtgaccaatggcttttagaacttttccacgggcctacgctggcgttcaaggattttgccttgcagttgctgggcaggttgctcgatcacgttttgacccggcggaacgagaaggtcgtgatcatgggtgccacgtccggcgacaccggcagcgctgccattgagggttgtcgtcacagcgaccacgtggacatttttattctttacccagatggccgggtatctgatgtgcagcggcgacaaatgacaacggtgtcgggggacaacattcacaacctcgctattcggggtaactttgatgattgtcaggcactggttaaggctagtttcgttgccgaacccttcttgcccgaaggacgctccctcgtcgcagttaactcgattaattgggctcggatcatggctcagatcgtttactacttttacgccgcgtttgcggtgggagggcccgatcgccccgtcaatttttcggtccccacgggcaactttggtgatatctatgctggttatctggcgcaccgcatgggtttaccggttaacaacctcgtaatcgccaccaatcgaaacgacgttttgcatcgaatgctgactacgggaacgtatgcccgacaaccaattgaggcgtccctgtcgccccagtatggatatttctgtatcctcggaatt

SEQ ID NO: 286400 - DNA, 883 bp, Unknown
  Bacterial polypeptide expressing nucleotide sequence isolated from the Sargasso Sea
agatgttgtgaaaatctctgatttaggaaatttaaaagtcttagaactctatcatggcccaacacttgcttttaaagatattgcaatgcaattaataggaaatttttaccaataccatttaggaaatgagcaaaaaaaaattaatattattgtagcaacttcaggagacacaggcgctgctgctattgatgctttaaaaggaaaaaagaatttaaatgtttttgtattacatccaaataacagaatttcaccagtacaaagaagactgatgacaatccatgaagaaaaaaatgttttcaatattgctattgaggggaactttgatgactgtcaaaatttagttaaagccatgtttaatgatgaaaaattctctagctcaattaatatgtcaggtgttaattcaattaattgggcaagaattgttgctcaatctgtttattatttttatgcttattttaaaataggtaatggacagcctttgtctttttctgttccgactggaaattttggagatatttatgctggttatttagcaaagaaacttggacttccagttgataaacttattgtagctactaacaaaaatgacatccttcatagagcaatttctggtggggattattctcaaaagaaagttgaggaaacaaatactcctagcatggacatccaaatagcaagtaactttgagagacttttgtacgatgttaaaggctgcaattcagatgttacaaaagatgtgatgagtaaaataaaaaataatacttatcaaatcgataatagtgatttagatgaaataaaaaagaattttacatctgaaatgttagatgaaaacgaaactatccaaatgataaaagatataaataaagaatataaagttgtagtt

SEQ ID NO: 286401 - DNA, 544 bp, Unknown
  Bacterial polypeptide expressing nucleotide sequence isolated from the Sargasso Sea
attgaaattttatagtacaaataataataaaataagagtttcatttaaagaggcattaatggtaggtatgcctcttgacaaaggcctctatatgcctgaatatattcctaatcattcacgacttttggaaggtattgatagtttgagtttccaggatatttcatatgctatagccagcagttttttatcagaagattttaaaaatagtcaaattgaagatattattagtggttcaatttcttttgatactccgattgtaaatatttttgataatgttaatatattagaattatttcatgggccaaccttagcttttaaggattttggagctagatttatggctagaactatggaaaatgttgtgttgggatataataaagaagtaaatattcttgttgcaacatcaggagatacaggaagtgctgttgctcatggcttttataatgttgaaggtgtaaatgtgattatcctgtacccaagtcaaaaagtaagctatattcaagaaaaacagctaactactttagataaaaatatatatgcatta

SEQ ID NO: 286402 - DNA, 579 bp, Unknown
  Bacterial polypeptide expressing nucleotide sequence isolated from the Sargasso Sea
aatgagatacttaagtacaagagacacatcaaaaacctttaaatttaaagacgttttcataaaaggtcttgctgatgatgggggcttatttattccagaaacagtagtgaaatatgatgaaaatgaaatcagagatttaaaaaaactcagttattcagagttagctaaaaaaattgtttatccatttattggtaattttatgtctgagggtgaattaagtaaaattattgataaatcttactctacatttagaaaagataacgttgtagatttaatgaagcttggagacaaaacagtattagagctatttcatggtcctacattagcttttaaagatgttgccatgcaacttttaggtaatttttacgaatattatctaaacaatgaaaatcaaaaaattaatattgttgttgccacatctggagacactggtgctgcagcaattgatgcgattaaaggtaaaaaaaatgttaatatttttgtgcttcatccagaaaatcgtgtttcaccagtgcaaagaaaattaatgacaacaggtaaacatgaaaatgtatttaatattgctataaaaggaaaatt

SEQ ID NO: 286403 - DNA, 814 bp, Unknown
  Bacterial polypeptide expressing nucleotide sequence isolated from the Sargasso Sea
agttacaatgatcttgcaacagaaattatctttaatttttgttcagatgaaattaaaaagaaagagcttaactcactaatacaaaaatcttatagtagttttaaagaaaaagaagtcgtaaatataaaaaaaatcggaaatataaatcttctcgaactttatcatggacccactttagcttttaaagatatagcaatgcaagtaattggaaacatgtatgaccacttagaagtcgcaaaagataaaactgtaaatgtcgtagttgccacatcaggcgacactggttcagcagccatagcagcattaagcaacagaaaaaatataaatctttttgttctgcatccgcataataagatttcaaatattcaaagaaaaattatgacaacaattggtggagccaatatttataatattgctattgagggttcatttgatgattgtcaaaaaattgtaaaagagctttttaatgaaaatagttttagatcaaaaataaacatgtccggagtaaattctataaattgggcaagaattgtttgtcaaattgtttattatttttactctttcttcaaattaaaaaaaaacaatattagcttttctgtaccaactggtaattttggagatatttatgctggatatgtagcaaaaaaaatgggtttaccaattaataaacttatagttgctacaaataaaaatgatattttacaaagagtaattaatacaggggaatataaacctgatacagtgaaagcaaccatcacaccaagtatggatatcccaagttgcccagtaattttgagaggcttctttattatat

SEQ ID NO: 286404 - DNA, 541 bp, Unknown
  Bacterial polypeptide expressing nucleotide sequence isolated from the Sargasso Sea
gatgaaatatataagcacaagaagtaaagaaaaagaatacagttttggagaagtttttttaaaaggtcttgctgatgatgggggtctttatgttccaaaatcgttaaaaaaatatagctcagcagaattattaaagctcaaaaatttaaattataatgaattatctactgaaataataagccaattttcagcagactttatctcaagagaagaactttcatcattaattaaaaaatcatattcaacatttagagaaaaagaagtggttaaaatctcagatgttggagagatgaaattattagaattatttcatggaccaacattggcatttaaagatgttgcaatgcaatttattggcaatttatatgattattatctaagtaaaaatgataaaaaaataaatatagttgttgcaacttccggagatactggtgcggctgctattgatgcaattaaaggaaaatctaattttaatatatttgtcttacatccaaacaataaaatttcttctgttcaaagaaaaataatgactactgtttga

SEQ ID NO: 286405 - DNA, 811 bp, Unknown
  Bacterial polypeptide expressing nucleotide sequence isolated from the Sargasso Sea
gcatggccctcactgactatagaaaatatcacagcaaattccagctcggaacgaggctatgtagatgtcgcagttgaagttctaaaaccgtttacttcaggttcgcttgaccagttagaactcaaagaactcgcgacacgagcgtatgaatcatttgcgcaccccgagatcatcccgcttaaagagctcggttccaacacttggctcatggagttatttcatgggcctacccttgcatttaaagacgtagccttacaactggttggacaaatgttcgaccatgagttggctaaaaggaaagaaaggataactattgtcggcgccacatcaggtgacacaggatctgcagcaattgacgcttgtcgagaccgaccaacaatagatatcgtaatcctccacccccatgaaaggacaagtgaagtccagcgccgtcaaatgaccactgtccaatcacctaatgtccacaacgtagccattgaaggaacatttgatgattgtcaagatctagtaaaagcgatgttcctcgacgtaaagtttcgaaacgagcaaaacctctctgcaataaactcaattaattgggcccgtgtcatggcgcaaacagtgtattactggtgggcggcgatcactctgagcccatctgataatcagatagatttttcagtccctagcggaaacttcgggaatatctttgcagggtatagctctcacctcatgggtttagaagtttcaagatttatcgtgggaacaaatcagaacgaagtattgaatcgatttttccaaagcgggtctatgacagcagcagccgtcgttc

SEQ ID NO: 286406 - DNA, 814 bp, Unknown
  Bacterial polypeptide expressing nucleotide sequence isolated from the Sargasso Sea
ttagaaaaaagtaatcttaaaaatttgattaaaaagtcttacagaaccttttcatctgaagaagttattaaaattaagaagtttggagatttacatttaatagaactttatcacggacctaccttggcattcaaagatatagcaatgcaagttcttggaaacatgtatgatgaatttaatatttcctcagataataaagttaatattatagttgctacttctggtgatactggctcggctgcaattgcagcgttaaatgatagaaaaaatattaatgtatttgttttgcacccgcataataaaatttcaaatatacaaagaaaaattatgacaactattggctctaataatgtttataatatcgctatcaaaggaacatttgatgattgtcaaaaaattgtaaaagaaatgttctctgaaaatacttttagagaaaaaatcaacatgtcaggtgtaaactctattaactgggcaagaataatttgtcagatagtttattatttttattcttattataaatttaaaaataaaaaggtaagttttgcagtaccgactggtaattttggagacgtctttgctggatacgtagctaaaaaaatgggacttccgattaaaaagttaatagtggctactaatgaaaatgatattttagaaagagtaataaatacaggtgaatacaagccgtctaaagtaaaaccatctttgtctccgagtatggatgttcaaatatcaagtaattttgaaagactactttttgatgtggctaaagaagatgataaacaagtatcaatttttatgaatgatttaaaatcca

SEQ ID NO: 286407 - DNA, 814 bp, Unknown
  Bacterial polypeptide expressing nucleotide sequence isolated from the Sargasso Sea
gaactcaaaaaattaaattataatgaactatctactgaaataataaatttattttcgtcagattttatctcgaaagatgagctgtcatctttaattgaaaaatcatattcaacttttagagaaaaggaagtggttaaactctcaaatgtcggagaaataaaattgttagagttatttcatgggccaacattagcttttaaagacattgcaatgcaatttattggaaacttgtatgaatattatttaagtaaaaatgaaaaaaaaattaacatagttgttgcaacttctggagatacaggggcagcggccatagatgcaattaagggaaaatcaaatttaaatatttttgttttgcatccaaatgacagaatttcgccaattcaaagaaaaataatgacaaccgttgaggataaaaatgttttcaatatagcaatagatggaaattttgatgattgtcagaatatagttaagagcatgttttctgacttagaatttgcaaaatctataaatatgtctggtgtaaattcaataaattgggcaagaattattgctcaaactgtatattatttttactcatattttaaattagataaagaaactgtttcattttcagtgccaacaggaaattttggtgatgtttttgcaggttatcttgcaaagaaaatgggattaccaattgataaactaattgttgcaacaaacgaaaatgatattttacatagggctatctcaaaaggagattatgtttcaagagaagtgaaagaaacatcatcacctagtatggatattcaattagcaagtaacttgaaagatt

SEQ ID NO: 286408 - DNA, 658 bp, Unknown
  Bacterial polypeptide expressing nucleotide sequence isolated from the Sargasso Sea
ttggataggttagcgcgcttttcatcgaaggacgtggatgtgcaatacgtgagtaccaggggtgcggcgccggaactggcgttcgaggacgctctgttgagcggcctggcgcgcgatggtggcctgtatgtgccggccgaatggccctccatggcgcccgacgccattcgggcgctcgatggcctcggctatgctgagatcgtggctcgcgtgatccgcccgttcatcgaaacctcgctggtgagcgatgacgagctggcggagatcacgcgcgagacctatggcgtgttccgccatccggctgtggccccgctgacccagatcgatcacgacacctggctgctggagctgtttcacggcccgaccctggccttcaaggatttcgcattgcagctgctgggccggctgttcgagcatgtcctggcgcgccgtggggagcgcatcaccatcatcggggcgacgtccggcgacaccgggtcggccgcgatcgaggcctgccgcggacggaacaatctggacatcttcatgctgcacccggctggccgggtatcggaggtgcagcgccggcagatgaccacggtcgtcgccgacaatgtcttcaatattgcgctcggcggcacgttcgacgattgccaggatttggtgaaggcgctgttcg

SEQ ID NO: 286409 - DNA, 789 bp, Unknown
  Bacterial polypeptide expressing nucleotide sequence isolated from the Sargasso Sea
atcgttaattaaaaaatcctattcaacttttagagaaaaagaagttgttaaaatttcaaatattggtgatcttaaattattagagttatatcatggtccaacattagcatttaaagatattgcaatgcagttcattggaaatttgtacgaatattatttaagtaaaaatgataaaaaaattaatattgttgttgcaacttcgggtgatacaggagctgccgctatagatgcaattagaggcaaatcaaacttaaatatttttgtcttacatcctaataatagaatttcatcagtgcaaagaaagttaatgacaacagttgaggataaaaacgttttcaatattgcaattgacggaaattttgatgattgtcaaaatattgttaagcaaatgttttcggatttagatttttctaaatcaataaatatgtcaggggttaattctattaattgggctagaataattgcacaagctgtttattatttttatacttatttcaaacttgatagtaataaacctatatctttttcagtccccacaggaaactttggagatgtttttgcaggatatcttgcaaaacaaatgggattaccaatagataaacttattgttgcgactaatgaaaatgatattttgcatagagcaatctcaaatggtgattatgtttctaaaaaagtaaaagaaacgtcttctccaagtatggatatccaattagcaagcaattttgagagattaatttattatgtgaatagttctaattctgaaattacttcaaatataatgaaaaaagt

SEQ ID NO: 286410 - DNA, 450 bp, Unknown
  Bacterial polypeptide expressing nucleotide sequence isolated from the Sargasso Sea
gatgaaatatataagtacaagaagcaaagaaaaagaatatagttttggagaagtttttttaaaagggctcgctgacgatggaggtctttatgttccaaaatcaataaaaaaatataactcagccgaactgtctgaattaaaaaaattaaattataataaattatctactgaaataataaaccaatttttaggtgactttatctcaaaagaagaacttttatctctaattattaaatcatattcaacatttagagaaaaagaggttgtgaaaatatcgaatgttgggggaataaaattattagaactatttcatggaccaactttggcatttaaagatattgcaaatgcattcattggaaatttatatgaatattatctagggaaaaatgaccaaaaaattaatataattgttgcaacttccggagataccggagcagcagcaatagatgc

SEQ ID NO: 286411 - DNA, 819 bp, Unknown
  Bacterial polypeptide expressing nucleotide sequence isolated from the Sargasso Sea
aggactttttattccaaatcaaataaaaaagtataatgaagcagagattaaaaaattaagtatcttaaattatgttgatctagcaacagaaataatattcaatttttgctcatcaagtttagaaaagaataaattaaaaaatattattaaaaaatcatacaaaaacttttcttctgatgaggttgtacaactaaagaagtttggaaatttaaatttaatagaactttatcatggtcctacattggcctttaaagatatagcaatgcaagttctaggaaacatgtatgatgaatttaatatttcctcaaataaaaaagtaaatattatagtggctacatctggtgatactggttcagcagcaatcgcagcattaaatgatagaaaaaatattaatttatttgttttgcatccacatgaaaaaatttcaaatatacaaagaaaaataatgacaactattggatccagcaatgtttacaatattgctatcaaaggaacattcgatgattgtcaaaaacttgtcaaagaaatgttttctgaaaataattttagagaaaaaattaatatgtcaggtgtaaattctataaattgggcaagaataatttgtcagattgtatattacttttattcttattttaaatttcaaaataaaaaagttagtttcgcagttccaactggtaatttcggggatgtttttgcaggatatgtagctaaaaaaatggggttaccgattgaaaaattaatagtagccactaatgaaaatgatattttagaaagagttataaatacaggtgaatataaaccgactacagtaaaaccatc

SEQ ID NO: 286412 - DNA, 686 bp, Unknown
  Bacterial polypeptide expressing nucleotide sequence isolated from the Sargasso Sea
gatgaaatatataagcacaagaagtaacgaaaaagaatacagttttggagaagtttttctaaaaggtcttgctgatgatggaggtctttatgtgccaaaatcattaaaaaagtatagcaaagaagaattattaaagctcaaaaattttaattataatgaattatcttctgaaataataagccaattttcagcagattttatctcaatagaagaactttcgtctttaattaaaaaatcatattcaacatttagagaaaaagaggttgtaaaaatctcaaatgttggagagatgaaattattagaattatttcacggaccaacgctagcatttaaagatgttgcaatgcaattcattggtaatttgtatgaatattatttgaagaaaaatgacaaaaaaataaacatagtagttgcaacttctggcgatacaggtgcagcagccattgatgctattaaaggaaaagctaatttaaatatatttgtcctgcatccaaataatagaatttcctctgttcaaagaaaaatcatgactaccgttgaagacaataacgttttcaatattgcaattgatggaaactttgatgattgccaaaatatagttaaaggtatgttttctgatcttgagttttctaaatcaataaatatgtcaggtgtgaactcaataaattgggcaagaattattgctc

SEQ ID NO: 286413 - DNA, 671 bp, Unknown
  Bacterial polypeptide expressing nucleotide sequence isolated from the Sargasso Sea
aatgagatacgtaagtacaagagacacatcaaaaacttttgaatttaaagacgttttcattaaaggtcttgccgatgacggtggcttatttattccagaaaaggtagtgaaatatcatgaaagtgaaatcagagatttaaaaaaacttagttattctgagttagctaaaaaaattgtttatccatttattggtaattttatgtctgaggctgaattaagcaacattattgataaatcttactccacatttagaaaagataacgtcgttgatttaatgaagcttgaagataaaaaggtattagaattgtttcatggtcctactttagcttttaaagatgttgccatgcaacttttaggtaacttttacgaatattatctaaaagatggaaatcaaaaaattaatattgttgttgccacatctggagatactggtgctgcagcaattgatgcaattaaaggtaaaaaaaatgttaatatttttgtgcttcatccagaaaatcgtgtttcaccagtgcaaagaaaattaatgacaacaggtaaacatgaaaatgtatttaatatagccgtaaaaggaaattttgatgattgccaaaatctagttaaatcaatgttcgcagataagcagtttttcaatgatatcaaaatgtcaggggtaaattctattaattggg

SEQ ID NO: 286414 - DNA, 787 bp, Unknown
  Bacterial polypeptide expressing nucleotide sequence isolated from the Sargasso Sea
agcacaagaaataatcagaaaaattttacttttaaagacgtttttcttaaaggtttggcagatgatggaggtctttttgtgcctaaatcaattaaaaaatttaaaaaagaggagttagacaatttaaaaaaccttaattacaatgatttagcggctgaaataatctatccgtttataggagatttcatgtctaaagatgacttaatctctatgatttcaaaatcgtactcgaatttcagatctgatgatgttgtaaaaatctctgatctaggaaatctaaaagttttagagctatttcatggccccacgcttgcttttaaagatattgcaatgcaattaataggtaatttttatcaatatcacttaggacgtgatcaaaaaaaaattaatataatagttgcaacttcaggtgatacaggtgcagctgctatagatgccctaaaaggaaaaattaatttaaatgtttttgtattgcacccaaataataaaatttcacctgttcaaagaaagttaatgacaatacatgatgatagtaatgtgtttaatattgcagtaaagggtaactttgatgattgtcaaaatttagtaaaagcaatgtttaatgacgaaaaattttcaaaagcgattaatatgtcaggtgtaaattcaattaattgggcaagaattattgctcaatcggtgtattatttttacgcttactttaaagttggaaatggtcagcctttatctttttctgttccaacaggaaactttggtgatatttacgctggctatttagccaaaaaac

SEQ ID NO: 286415 - DNA, 817 bp, Unknown
  Bacterial polypeptide expressing nucleotide sequence isolated from the Sargasso Sea
ccaaaaacattaaaaaaatttagtgctgaggagttaataaagcttaaaaatttaaactataatgcattatctgcagagataattagtctattttcagaagattttatctcaaaagaagaactttcatctttaattaataaatcatattcaacatttagagagaaagaagttgttaaaatctcaaatgttggagagataaaattattagaattatttcatggtccaacattagcatttaaagatgttgcaatgcaattaataggaaatttatatgaatattatctaagtaaaaatgataaaaaaattaacattgttgtagcaacatctggagatacaggtgcggcggctatagacgctattaaaggtaaatctaatttaaatatttttgttttacatcctaataaaagaatttcttcagttcaaagaaaattaatgactacagttgaagaaaaaaacgtttttaatattgcaatagatggaaattttgacgattgtcaaaatattgtaaaacaaatgttttctgatttaaaattttctaaatctataaatatgtctggagtgaattcaataaattgggcaagaattattgctcaatcagtatattatttttacacatattttaagttaaataaggagagtgtttctttctcagttcccacaggaaactttggtgatgtttttgctggttatatttcaaaaaaaatgggactaccaattgataaatttatagttgcaacaaatgaaaatgatattttgtatagagctatctcaaaaggagagtatatttcaaaaaaggtaaaagaaacaatttcaccca

SEQ ID NO: 286416 - DNA, 709 bp, Unknown
  Bacterial polypeptide expressing nucleotide sequence isolated from the Sargasso Sea
atgagatatgtaagcacaagagataatacaaaagaacacacttttgaagatgttttcatcaaaggtttagctgatgatgggggactttatgtacctacatctttaaaaaaatttagctcagatgaattgtcagagcttaaaaatcttaattataatgatttatctactgaaataataaatcaattttcatcggactttatctcaaaagatgatctttcatcattaattaaaaaatcttattcaacttttagattaaaagaagttgttaaaatatcaaacattggagatctcaaattattagaattatttcatggtcctacattggcttttaaagatgtggcaatgcagtttattggtaacttgtatgaatattatttaagtaaaaacgataaaaaaattaatattgttgtggctacatcaggtgatactggtgctgccgctatagatgcaattaaaggcaaatcaaatttaaatatatttgttttacatcctaataacagaatctcaccagttcaaagaaaattaatgacaacagttgaggatgaaaatgtttttaatattgcaattgatggaaattttgatgattgtcaaaatattgttaagcaaatgttttcggatttaaatttttcagaatcaataaatatgtcaggagttaattctattaattgggcaagaataattgctcaagccagtttattatttttacact

SEQ ID NO: 286417 - DNA, 870 bp, Unknown
  Bacterial polypeptide expressing nucleotide sequence isolated from the Sargasso Sea
ttcatggaccaactttagcttttaaagatattgcaatgcaattcattgggaacctctatgaatattatttaagtaaaaataataaaaaaattaatattgtagttgcaacttctggagatacaggtgcagcagccatagatgctattaaaggtaagtcaaatttgaatatttttgtacttcacccaaataatagaatttcatctgttcaaagaaaaataatgacaacagtagaagaaaaaaatgttttcaatatagcaatagagggaaattttgatgattgccagaatatagttaagagcatgtttgcagacctagagttttctaagtctataaatatgtcaggagttaactcaataaactgggctagaataattgcccaagcagtatattatttctactcgtattttagattagataaagaaaatatatcattttcagttcccacaggaaattttggagatgtttttgcaggctatcttgcaaaacaaatgggattaccaattgataagttaattgttgcaacaaacgaaaatgatattttgcatagagctatttcaaaaggagattatgtttcaaaagaagttaaagaaacattatcacctagtatggatattcaattagcaagtaactttgaaagattaatttactatgtaaataattcagattcttcaaaaactgcagaaattatgaaaaaagttaagcaaaattcctatcaaattgaaaagaacaatttggatataattcaaaaggattttttatctgaaagttgtagcgaacaagaaactctagatattattaaaaaaaattatgaagaaaataatattatattagaccccgcatactgctgttggattaggggctataaataaa

SEQ ID NO: 286418 - DNA, 797 bp, Unknown
  Bacterial polypeptide expressing nucleotide sequence isolated from the Sargasso Sea
aatgagatacgtcagcactagaaatacaacaaaaacatatgaatttaaggatgtttttattaaaggtcttgctgatgatgggggactatttattcctagttcgcttccaaaatatagtgaaaaagaaattcaagaactaaaatctcttaattattcagatttagctaaaaaaattatttttccttttataggaaattttatggataaaaatgaattgtccaaaataattgataagtcttattctgtttttagaaaagaaaatgtaattgatttcattaaaataggggatcgatcagttttagaattatttcatggtccaacattagcctttaaggatgttgccatgcaacttcttggaaatttttatgaattttatttaagtaagcaaaatgaaaaaattaatattgtggttgccacatcaggagatacgggggcggcagctatagatgcaattaagggaaaagaaaatttaaatatttttgtgttacatcctgataatcgtgtttcttctgttcaacgaaaaataatgacggctggaaaatataaaaatgtatttaatattgctattaaaggaaattttgatgattgccaaaacttagtaaaatcaatgttttctgactcaaaattttctcaagatattaatatgtcgggtgtaaactcaattaactgggcaagaattattgctcaatgtgtttactatttttacagctattatttgattgaagatcagagtgagcctacaaacttttcggttcccacaggaaattttggagacgtttatgctggttatttagcta

SEQ ID NO: 286419 - DNA, 505 bp, Unknown
  Bacterial polypeptide expressing nucleotide sequence isolated from the Sargasso Sea
attgtgtattcctgttggaaacgctggaaatattacagcttattggaaagggtttaaagagtataatgaaaaatttggttttaaattaccaaaaatgtatggttttcaagctgaaggtgcctctccgatagtaaaaaatgaaattgtagaaaatcctgaaacgattgcaactgcaatcagaattggtaatcctgcttcttgggataaagctaatgaagctgttactgattcaattggtgcaattaaagctgtatccgatgaagaaataattaattcttatgtaaatcttgcaaggcaagatggaatcttttgtgagccagcttctgcagccggtattgcgggtttaatcaaatactcaaaaaactatgattttaaaggacaaaaaatcgtatgtgttgtaacaggtaacggtcttaaagacccttcaacttctgaaaaacatgcaagttcaaatatatttgaagtagattcaagccttgatgatgttctaaaaattattcattag

SEQ ID NO: 286420 - DNA, 556 bp, Unknown
  Bacterial polypeptide expressing nucleotide sequence isolated from the Sargasso Sea
atgaaatacgtaagtactagaaataactcaaaagaatttaattttagcgaagtttttataaaaggacttgctgatgatgggggcctttatgttccaaaattgataaaaaaatatagctcagcagaaatatcaaaattaaaaaacttaaattataatgaattatcaactgaaataataagccaattttcaggagattttatctcaagagaagaactttcatctttaattaaaaaatcttattcaacatttagagaaaaagaagtggttaaactttcaaatgctggagaaataaaattattagaattatttcatggaccaacattggcatttaaagatgttgcaatgcaattcattggaaatttatatgagtattatctaagtaaaaatgacaaaaaaataaatatagttgtagcaacctctggtgatactggtgcagctgctattgatgcaattaaaggaaagtctaatttaaatatatttgttttacatccaaataatagaatttcttctgttcaaaggaaaataatgactactgtggaagaaaaaaatgttttca

SEQ ID NO: 286421 - DNA, 892 bp, Unknown
  Bacterial polypeptide expressing nucleotide sequence isolated from the Sargasso Sea
tttcatggaccaacactagctttcaaagatgttgcaatgcaatttattggaaacttatatgaatattacttaagtaaaaatgataaaaaaatcaatatagttgttgcaacttctggagacacaggagcagcagccatagattcaattaaaggaaaatcaaatttaaatatttttgttttgcatccaaataacagaatttcatcagttcaaagaaagataatgacaactgttgaagaaaaaaatgttttcaatattgcaattgatggaaactttgacgattgtcaaaatattgtaaaacaaatgttttctgacttagaattttcaaaatccataaatatgtctggtgtaaactcaataaattgggcaaggattattgctcaaactgtatattatttttatgcatattttaaattagataaagatactgtttcattttcagtaccaactggaaattttggtgatgtttttgcaggctatcttgcaaaaaaaatgggattaccagtagataaattaattgttgcaacaaacgaaaatgatattcttcacagagctatctcaaaaggagattatgtttcaagagaagtaaaagaaacattatcgcccagtatggatattcaattggcaagtaattttgaaagattaatttattatataaataattccgactctataaaaacagcaggtattatgaaaaaaattaagcaaaatacttataaaattgaaaaggataatttagaaataattcaaaaagattttctatcagaaagttgtaatgaaaaagaaactcttggtattattaaaaaaacttatgaagaaaataatatcatattagatccacatactgccgttggagtgggggctgcaaataaattatcttttaatgattgtgtag

SEQ ID NO: 286422 - DNA, 445 bp, Unknown
  Bacterial polypeptide expressing nucleotide sequence isolated from the Sargasso Sea
atgaattatattagcacaagaaataatcagaaaaactttacctttaaggacgttttcctcaaaggtttggcagatgatggagggctttttgtgcctaaatcaattaaacaatttaaaaaggaggaattagataatctaaaaagccttagttataaaaatttagcggctgaaataatttatccgtttataggagatttcatgtctaaagatgatttaatctctatgatttcaaaatcgtactcaaattttagatctaatgatgttgtaaaaatctctgatttaggcacattaaaagttttggaactatttcatggtcctacacttgcttttaaagatatagccatgcagctaataggtaatttttatcaatatcatttaagccgtgatcaaaaaaaaattaatataatagtggcaacctcaggcgacactggtgcagccgctatag

SEQ ID NO: 286423 - DNA, 743 bp, Unknown
  Bacterial polypeptide expressing nucleotide sequence isolated from the Sargasso Sea
aatgttatataacagcacaagaggagaaagccctatagtgcctttttcagaggtacttttgggagggctggctccagacggaggtctctatatgcctcaaacattccctaaattctccattgaagaaattgaaagttggtcaagtcttcctttccaccaattagcttcgaaaattctttatccctatgtagaaactgaaatagacaaaagtatttttttaaaactattagaagaggcatacacatcttttgatgaagaagatgttgttaagttaaaggagattgaagagaatcactgggtcttagaattatttcatggccccacactagctttcaaggacgttgctatgcagctattgggagtactacttaatcactttgcaaaagagaagggtgaaaaaatagttgttcttggagctacttctggagatacaggagcagcagcaatttctgcttgtgcgagacatgaaaatgttgaagtttacattctgtatccgcatgaaaaggtaactgagtttcaaaggaaacaaatgacaacaactcaatctcaaaatgtgtacccactagcaatagaaactgatttcgatggctgccaaaacatagttaaaaaaatgtttcttgatgaggatttccaacatactaaagtaaggtttattgctgcaaattctataaattgggcaaggtgcatgactccatcagtatatttcttttggtcttacctaaaactaaaagaaataaaagaag

SEQ ID NO: 286424 - DNA, 930 bp, Unknown
  Bacterial polypeptide expressing nucleotide sequence isolated from the Sargasso Sea
cgccgatgccgacttcaagaagatcctcgaagaaacctacggggtgttcgagcacaatgctgtcgcgccgctgcgtcagctcaacggcaacgagtgggtgttggagctgttccacggcccgaccctggcgttcaaggatttcgccctgcagttgctcggccgtctgctcgatcacgtactggccaagcgcggtgagcgcgtggtgatcatgggcgcgacctccggtgacaccggttcggcggccatcgaaggctgcaaggcctgcgacaacgtcgacatcttcatcatgcacccgcacaaccgcgtgtccgaggtgcagcgccggcagatgaccaccatcctcggcgacaacatccacaacatcgccatcgaaggcaacttcgacgactgccaggagatggtcaaggccagcttcgccgaccagggcttcctcaagggcacgcgcctggtagcggtcaactcgatcaactgggcgcggatcatggcccagatcgtctactacttccacgccgcgctgcagctcggcgcgccggcgcgttccatcgccttctcggtaccgaccggcaacttcggcgacatcttcgccggctacctggcgcgcaacatgggcctgccggtcagccagctgatcgtcgccaccaaccgcaacgacatcctgcaccgcttcatgagcggcaatcagtatgtgaaagaaaccctgcacccgaccctgtcgccgtccatggacatcatggtctcgtccaacttcgagcgcctgctgttcgacctgcacggccgcaacggcgcggccatcgccagtctgatggacagcttcaagcagggcggcggtttcagcgtcgacgaagatcgctggaccgaagcgcgcaagttgttcgattcgctggcagtgaacgacgagcagacctgcgagaccatcaccgaggtgtacaa

SEQ ID NO: 286425 - DNA, 655 bp, Unknown
  Bacterial polypeptide expressing nucleotide sequence isolated from the Sargasso Sea
aatgaattatataagtacaagaaataacaagaaaaaggtatcttttgaacatgtctttttgaaaggtttgtcagaagagggtggacttttcgtgcctgataaattaaaaaaatttgaccacaatgaactaatagaactagaaaatttagattataaaaatcttgcatttaatattattaaattttttactggggattttataaaagaaacagatttaaaatatcttattgataaatcatattcaagttttagagaagagaatgtcattaaactaaataaaattgaacagaattatctgcttgaattatatcatggacctacactagcatttaaagatgttgcaatgcaattaattggtaatttttatgaatattatttaaaaaaaaacaataagcgaattaatatcatagtcgcaacttcaggtgatacaggcgcagcagcaattgatgcaattggagggaaaaaaaatataaatatatttgttctacatccaaacaataaaatttcatcagtccaaagaaagttaatgacaacaactgaacataaaaatgtatttaatttagcaattaatggcaattttgatgattgtcagaatttggttaaatcgatgttttctgacaatagctttgcaaatcaattaatatgtcaggagtaa

SEQ ID NO: 286426 - DNA, 673 bp, Unknown
  Bacterial polypeptide expressing nucleotide sequence isolated from the Sargasso Sea
atgaaatatgtaagtacaagagataactcaaaagaatataattttgaggaagtatttattaaagggctggcagatgatggaggtctttatgttcctacatttttaaaaaaatatacacatcaagatttattagaacttaaaaatttaagttataatgagttatctactaaaataataagtcaatttttatcagattttatatctaaagaagatctttcatctttagttaagaaatcatattcaacatttagagaaaaagatgttgttaaaatttctagcattggaaaattaaaattattagaattatttcatggccctacattagcttttaaagatgttgcaatgcagtttataggaaatttatacgaatattatttaagtaaaaatgataagaaaataaacatagttgttgcaacttctggagatacaggtgcagcagctataaatgcaataaaaggaaaatcaaatttaaatatttttgttttacatccaaataatagaatttcgtcagttcaaagaaaattaatgactacagtagaagaaaaaaatgtttttaatattgcgatagatggaaactttgatgattgtcagaatatagttaaaagcatgttttctgatttagaattttcaaaatctataaatatgtcaggagtaaattcaatcaattgggcac

SEQ ID NO: 286427 - DNA, 931 bp, Unknown
  Bacterial polypeptide expressing nucleotide sequence isolated from the Sargasso Sea
ccaatttttaggagattttatctcaagagaagaactttcatcattaattaaaaaatcatattcaacatttagagaaaaagaagtggttaaactttcaaatgttggagtaacaaaattattagaattatatcacggcccaacattggcatttaaagatgttgcaatgcaatttattggtaatttatatgattatcatctaagtaaaaatgacaaaaaaataaacatagtggttgcaacttctggtgataccggggcggcagcaatagatgcaatcaaaggaaaatctaatttaaatatatttgtcttacatccaaacaataaaatttcttctgttcaaagaaaaataatgaccactgttgatgacaaaaatgtatttaatattgcaattgatggaaactttgatgattgtcaaaatattgtaaaacaaatgttttctgatcttgagttttctaaatctataaatatgtctggagtaaactcaataaattgggcaagaattattgctcaagcagtatattatttttattcgtattttaaattagggaaagaaacaatttctttttcagttccaactggaaattttggtgatgtttttgcaggctatcttgcaaagaaaatgggattaccaattgataaactaattgttgcaacaaacgaaaatgatattttgcatagagcgatttcaaaaggagattatgtttcaaaagaagttaaagaaacattgtcacctagtatggatattcaattagcaagtaactttgaaagattaatttattatgtaaataattctgattctgaaaaaacagcagaaatcatgaaaaaagttaagcaaaattcttatcaaattgaaaagaaagatttagatataatacaaaaggattttttatctgaaagttgtaatgaacaagaaacgttagatattataaaaaaa

SEQ ID NO: 286428 - DNA, 673 bp, Unknown
  Bacterial polypeptide expressing nucleotide sequence isolated from the Sargasso Sea
atgaaatatataagcacaagaagtaataaaaaagagtacagtttcggagaagtttttctaaaaggtctcgccgatgatggtggtctttatgtgccaaaatctctaaaaaattatagcaaagaagaattatcaaatctcaaaaatttaacttataacgaactatcaactgaaataataagccaattttcaggagattttattttaagagaagaactttcgtctttaattaataaatcatattcagcatttagagaaaaagaggttgtaaaaatctcaaatgttggagaaataaagttattagaattatttcacgggccgacattggcatttaaagatgttgcaatgcaatttatcgggaatttgtatgaatattatttgaagaaaaatgacaaaaaaataaacatagtagttgcgacttctggagatactggtgcagcagctattgacgcaattaaaggaaaatctaatttaaatatatttgttttacacccaaataatagaatttcttcagtacaaagaaaaataatgacaactgttgaagataataatgttttcaatatcgcgatagatggaaattttgatgattgtcaaaatattgtaaaacaaatgttttctgatttagagttttctaaatctataaatatgtcaggagtaaactcaattaattgggcaa

SEQ ID NO: 286429 - DNA, 907 bp, Unknown
  Bacterial polypeptide expressing nucleotide sequence isolated from the Sargasso Sea
tgatgatgtgcttttagagggattggccagtgatggagggttatatgtgcctgaaaagtggcctaagctaagtaagtcagaatttgctaatctaaaagatttatcatacccagaaatggcactggaaattatgtgtccctatattgaggatgcaatcccgagagaaatattaaagaatatattgattgaagcttatgctaatttttccaattcccaaatagcgccaataaagcaaatcgatgattcaacttggttgcttgaactttttcatgggcccacactcgcgtttaaggactacgccctgcaagtggtcggaaaattatttaattatgtgctagagcagaaacagaagacggttactattattggggcgacctcaggggacacaggatctgctgcaatagaagcttgcaagaaccaagccgcaattactctctttatgttgcatcctagaggacgtgtctcggaagtacagcgtcgacaaatgacgactgttgaatcttccaatatacataatattgcactcgagggtacctttgacgactgtcaggatatggttaaattattattctctgaccagaagatgcgagagaaatataatttatcggctgtaaattctataaactgggcacgtatactatctcaaatagtgtactatttttgggcaggcatctccattcaagacattaataaaaaactaatttttattgttccaactggaaacttcggcaacatttttgctggctatgccgcccataagatgggattgcccgtccaaaaatttatagtagcttcaaatgaaaacaacattcttacccgctaccttaatacgggtaatatgacagctttagatgtaaagcctactatagcacccagtatggatatacaaatttcaagtaatttttga

SEQ ID NO: 286430 - DNA, 697 bp, Unknown
  Bacterial polypeptide expressing nucleotide sequence isolated from the Sargasso Sea
gaaattttatttgctggcttagcaaatgatggaggcctatttattcctgaaaattggccaaatataaatcataaagatattaatcgaaatgtaagttatgaggacttaacagaaattattttatctccatttattggtgacgaaatagagtccgatcaattgaagaggattattaaagaagcgtattcaaataactttacagaaagtggccgtgtatcattcaaggagcttaatacaaacgaaataatcgtggagctattcaatggcccaactttagccttcaaagacttcgcaatgcaattacttatccctctttttgatcattttttagaaaaagaaaagaaaagaataaatcttatagtagcaacatcaggtgacacaggatcagccgctatcaacgctgtaaaaaaaagtaaaaacataaatattttctgtttatatcctaagggtaggatttcagaatttcagagaaggcagatgtctacttttaatcaggaaaatatttttctttgtgaagtagaaggaacttttgacgactgtcaaaaaattgttaaagatattttgaaggatacagattatagtatgcataataatatatcagcagttaattcaattaattgggcaagaattatcattcaatcagtatattacttttatacatttattaattttactgaaagggcttccaataaagtta

SEQ ID NO: 286431 - DNA, 886 bp, Unknown
  Bacterial polypeptide expressing nucleotide sequence isolated from the Sargasso Sea
gatgaaatatataagcacaagaagtaaagaaaaagaatatagttttggagaagtttttctaaaaggacttgctgatgatgggggtctttatgttccaaaatcgataaaaaaatataactcagcagaactatcaaaactcaaaaacttaaattataatgaattatctactgaaatagtaagccaattttcaggtgattttatctcaagagaagaactttcatctttaattaaaaaatcatattcaacgtttagagaaaaagaagtggttaaactttcaaatgttggagaaacaaaattattagaattatatcacggcccaacattggcatttaaagatgttgcaatgcaatttattggtaatttatatgattattatctaagtaaaaatgataaaaaaataaacatagtggttgcaacttcaggagatactggtgcggcagcaatagatgcaatcaaaggaaaatctaatttaaatatatttgttcttcatccaaacaataaaatttcttctgttcaaagaaaaataatgactactgttgatgacaaaaatgtatttaatattgcaatagatggaaactttgatgattgtcaaaatatcgtaaaacaaatgttttctgatcttgagttttctaaatctataaatatgtcaggcgtgaactcaataaattgggcaagaattattgctcaagcagtatattatttttattcatattttaaattagggaaagaaactatttcattttctgtacccacaggaaattttggtgatgtttttgcaggctatcttgcaaagaaaatgggattaccaattgataaactaattgttgcaacaaatgaaaatgatattttgcatagagcgatctcaaaaggagattatgttcaaaag

SEQ ID NO: 286432 - DNA, 886 bp, Unknown
  Bacterial polypeptide expressing nucleotide sequence isolated from the Sargasso Sea
atgaattatatttctaccagaaataaatataatatttctgataataattttagtaaaattactatggaaggtttagctcctgatggaggactatacgtgcctgataactttccatttttaacatctaaagaaatatataaaatggctaacttaagttattcagaattatttactgaaataatttataaattttgtggaagttgcgtaaataagtctgaaatttatgaaattgctagagattcatataaagattttgagggtaaggatttagctccactaaatgattataatgataatataaaaatattagaactataccatggtccaacattagcttttaaagattttgctttacagtttttaagtagaatttttaatctatttttagagagaggtaataaaaatataaatataattggagcaacctctggagatactggttcagctgcaattgaagcgtttaaaaataacccaagagctaatataatcatattacaccctaaagataaagttagtgaatttcaaagaagacaaatgactactattaaagctaataatgtttttaacattgctttagatggaaattttgatgattgccaagcaatagttaaaaagcttttagttgatagtgaatttaatgaaaagtataaacttgcgtcaattaattctattaattggggaagagtcttagcccaagtagtttattatttttattctgcattaaaggtattaaaacataataatttagaaagtataaacttttctgttccaacaggaaattttggagatgcatatgcaggatacattgcaaaaaaaatgggattaccaattaataaaattattattgcaacaaatagtaatgatattttatcaaaattttttcaga

SEQ ID NO: 286433 - DNA, 651 bp, Unknown
  Bacterial polypeptide expressing nucleotide sequence isolated from the Sargasso Sea
gatggaatatataagcactagaaacaattcagatcatttttcatttaaaaacgtatttttgaaaggtttagctgatgatggaggtctttttgttccaaagtcaatcaaaccatttagtaaagatgaattaagcaaactaagtggtcttaattataataaattagcagccgaaataattttcccatttattggtgattttatgactaaagaagagttaatttccacggtatcaaaatcttattcaaaatttagagcagacgatgttgtaaaaatctctgatttaggaaatttaaaagttttagaactttatcacggcccaacacttgcttttaaagatattgcaatgcaattaataggaaatttctatcaatatcatttaggaaatgatcaagctaaaattaatattattgtagcaacatcaggagacacaggtgcagctgctatcgatgctttaaaaggaaaaaaaaatttaaatgtttttgtattacatccaaataacagaatttcaccagtgcaaagaagactgatgacaatccatgaagaaaaaaatgtttttaatattgctatcgagggaaactttgatgactgtcaaaatttagttaaagcaatgtttaatgatgaaaaattctctagctctattaatatgtcggg

SEQ ID NO: 286434 - DNA, 755 bp, Unknown
  Bacterial polypeptide expressing nucleotide sequence isolated from the Sargasso Sea
gatggaatatataagcactagaaacaattcagatcatttttcatttaaaaaagtatttctaaaaggtttagctgatgatgggggtctttttgttccaaagtcaatcaatccatttagtaaagatgaattgaacaaactaggtgatcttaattacaatgaattagcagccgaaataattttcccatttattggtgattttatgactaaagaagaattaatttccacagtatcaaaatcttactcaaattttagagcagaggatgttgtaaaaatctctgatttaggaaatttaaaagttttagaactctatcacggcccaacacttgcttttaaagatattgcaatgcaattaataggaaatttttatcaatttcatttagcaaatgagcaaaaaaaaattaatattattgtagcaacttcaggagacacaggtgcagctgctattgatgctttaaaaggcaaaaagaatttaaatgtttttgtattacatccaaataacagaatttcaccagtgcaaagaagactgatgacaatccatgaagaaaaaaatgttttcaatattgctattgagggtaactttgatgactgtcaaaatttagtgaaagctatgtttaatgatgaaaaattttctagttcaattaatatgtcaggtgttaattcaattaattgggcaagaattgttgctcaagctgtttattatttttatgcttattttaaaataggcaatggacaacctctatctttttctgtcccga

SEQ ID NO: 286435 - DNA, 835 bp, Unknown
  Bacterial polypeptide expressing nucleotide sequence isolated from the Sargasso Sea
tactcaacgtttagagaaaaagaagtggttaaactttcaaatgctggagaaataaaattattagaattatttcacggtccaacattagcatttaaagatgttgcaatgcaattcattggtaatctgtacgaatattatttaaataaaaatgacaaaaaaataaatataattgttgcaacttctggagatactggtgcagcagctattgatgcaattaaaggaaaatctaatttaaatatatttgtcttacatccaaacaataaaatttcgtctgttcaaagaaaaataatgactactgtgaaagaaaaaaatgttttcaatatcgcgatagatggaaattttgatgattgtcaaaatattgtaaaaaaaatgttttctgatcttgagttttctaaatctataaatatgtcaggtgtgaactcaataaattgggcaagaattattgctcaagcagtatattatttttattcatattttaaattagataaagaaactatttcattttctgttccgacaggaaactttggtgatgtttttgcaggttaccttgcaaagaaaatgggactaccaattgataaattaattgttgcaactaacgaaaatgatattttacatagagctatctcaaaaggagattatatttcaaaagaagttaaagaaacatcgtcacctagcatggatattcaattagcaagtaactttgaaagattaatttactatgtaaataattctgattctaaaataacagctgatataatgaaaaaagttaaacaaaattcttatcaaattgaaaagaacaatttagatattattcaaaaaggattttttatctgaa

SEQ ID NO: 286436 - DNA, 733 bp, Unknown
  Bacterial polypeptide expressing nucleotide sequence isolated from the Sargasso Sea
atgaactatattagtacaagaaataaccgaaaaaacttcacttttaaggatgttttcctcaaaggtttggcagatgatggaggattatttgtacctaaatcaattaaacaatttaaaaaagagaaatttgataatttaaaaagtcttagttataatgatttagcagctgaaataatttatccatttataggagatttcatgtctaaggatgaattgatcgctatgatttcaaaatcatactcaaattttagggctaatgatgtcgtaaaaatctctgatctaggaaatttaaaagttttagaactatttcatggtcccacacttgctttcaaagatatcgcaatgcaattgataggtaatttttatcaacatcatttaggaagtgatcaaaaaaaaattaatataatagtagcaacttcaggtgacactggtgcagctgctatagacgctttaaaagggaaaagtaatttaaatgtttttgtattgcaccctaataataaaatttcaccggtacaaagaaaactaatgacaatacatgaagagagtaacgtatttaatattgcggtagaaggtaattttgatgactgtcaaaatttagtaaaatcaatgttcaatgacgaaaaattttcgaaagcaattaatatgtcgggtgtaaattcaattaattgggcaagaatcattgctcaatcggtgtattatttttatgcttacttcaaagttggaaatggccaac

SEQ ID NO: 286437 - DNA, 790 bp, Unknown
  Bacterial polypeptide expressing nucleotide sequence isolated from the Sargasso Sea
atgaactatctctctacgcgcggcgccggagccggcgagcgccataccttttccgagattctgctgggcggccttgccaaagacggcggcctgtacttgccggcggaatatccgcgcgtcacggcggacgaactgacgcgctggcgcacattgccgtacgcggatctcgccttcgagatcctgtcgaaattctgcgacgacatccccgccgaagacctgcgcgcactgacgcgcaagacgtacacggctcagacgtactgcaacgtgcgcgacgacgaaagcgcggcgcagatcacgccgttgaagacgctgggcgtggagaacggcgcgccgctgtcgctgctggaactgtcgaacgggccgacgctggcgttcaaggacatggcgatgcagttgatcggcaatctgttcgagtacgcgctggccaggcatggtgagacgctgaacattctgggcgcgacctctggcgacaccggcagcgctgcggagtatgcaatgcgcggcaagaagggcattagcgtgttcatgctttccccgcacaagaagatgagcgcattccagacggcgcagatgtacagcctgcaggacccgaacattttcaacatcgcggtcgagggcgtgttcgacgacgctcaggacatcgtgaaggcggtttcgaacgaccacgcgttcaaggcgaagtacaagatcggcacggtcaattcgatcaactgggcgcgtgtggtggcgcaggtcgtgtactacttcaagggctactttgccgcgacgaagtcgaacgacgagcgcgttt

SEQ ID NO: 286438 - DNA, 1125 bp, Unknown
  Bacterial polypeptide expressing nucleotide sequence isolated from the Sargasso Sea
aatgaattattttagcactaggaacaaatctttaaaattcagctttaaagatattttcttaagaggacttgctccagatggtggattatttttacctgaaaaattgaaaatttataattcagatgaactagatgaattgagtggcatgtcttataatagcttagctactgaaattatttataatttttgttctgatcattttaaaaaagatcaattatcagagttaataaagaaatcttacaaaaattttgaagtagatgatgttgtgcatctaaataaaataactaaaaacaattgtaataatgttttggaactttttcatggaccaactttagcttttaaagatatagccatgcaagttattggaaatatgtatgatgaattggaggtggcaaaagataataaagttaacgttgtagttgctacatctggcgatacaggttcagctgcaatttcagctttaaatgatagaaaaaatattaatgtatttgttttacacccaaataataaaatttcaaaaaatcaaagaaaaataatgacaacaattgggtcaaataatatttacaatattgcaatagatggttcatttgatgattgtcaaaatatggtgaagtcgatgtttaacgacaatcaatttagagaaaagattaatatgtcaggtgttaattcaattaattgggcaagaataatgtgtcagattgtttattatttttatgctgctttaagattaaatagaacaaaatttgccccgattgaaaaaccaagatcacaaattactttttcagttccaacaggaaattttggagacgtgtatgcaggctatatcgcgaaaaaaatgggattgaatattgataaattaattgtagcaacaaatgaaaatgacattttaaaaagagttattgaaacaggagaatataaaccagaaaaggtaaaaacttcagtaaccccaagtatggacatccaagtagctagtaattttgagcggttgctttttgatttagttaaagaagatgataaaaaagtttcaaactacatggagcaactatcttcaaaaggaagatttaaattgaatattgaagaattaaaaattttacaggaaaatttcatcgctgagtcaatttcagg

SEQ ID NO: 286439 - DNA, 1369 bp, Unknown
  Bacterial polypeptide expressing nucleotide sequence isolated from the Sargasso Sea
atgaaatatataagcacaagaagcaaagaaaaagaatacagttttggtgaagtttttttaaaaggccttgccgatgatggaggtctttatgttccaaaatttataaaaaaatataactcagcagaactatcaaaactcaaaaacttaaattataatgaattatctgctgaaataataagccaattttcaggagattttatctcaagagaagaactttcatctttaattaaaaaatcatattcaacatttagagaaaaagaagtggttaaactttcaaatgttggggaaacaaaattattagaattatttcacggtccaacattagcatttaaagatgttgcaatgcaattcattggtaatttatataattattatctaagtaaaaatgataaaaaaataaatatagttgttgcaacttcaggagatactggcgcggcagctattgatgcaattaaaggaaaagctaatttaaatatatttgttctacatccaaataatagaatttcatctgttcaaagaaaaataatgactactgtagatgacaaaaatgtatttaatattgcaattgatggaaactttgatgattgtcaaaatatcgtaaaacaaatattttctgatcttgagttttctaaatctataaatatgtcaggtgtgaactcaataaattgggcaagaattattgctcaagcagtatattatttttattcatattttaaaataggaaaagaaactatttctttttcagttccaacaggaaactttggtgatgtttttgcgggctaccttgcaaagaaaatgggattaccaattgataaactaattgttgcaacaaacgaaaatgatattttgcatagagctatttctaaaggggattatgtttcaaaagaagttaaagaaactttatcaccgagtatggatattcaattagcaagtaactttgaaagattaatttattatgtaaataattcggattctgaaaaaacagcagaaattatgaaaaaagttaagcaaaattcttatcaaattgaaaagagcaatttagatataattcaaaaggattttttatctgaaagttgtaatgaacaagaaacattagatattattaaaaacaatcatgaagaaaataatataatattagaccctcatacagcggttggagtaggggctgcaaaaaaactatcttttaatgattgtgtagttttatcaacagcacatccatgtaaatttccagatgctacaaataatgcgataaataaacatgaaaaattgcctaaggaacttcagcatgtactcgataaaaaagaaaattttcaagtattaaaaaataatactaatgatgtaaaaaactttattaaaagcaaagtttgag

SEQ ID NO: 286440 - DNA, 1148 bp, Unknown
  Bacterial polypeptide expressing nucleotide sequence isolated from the Sargasso Sea
tatgaaatatgtaagcacaagagataattcaaaagaatataattttgaacaagtatttattaaaggattggcagacgatggaggtctttatgttccaatgactttaaaaaaatatagtcctcaagaattaaatgaactcaaaaaattaaattataacgaattatctactgagataataaatttattttcatcagattttatatctaaagatgaattatctactctaataaagaagtcttattcaacatttagagaaaaagaagttgttaaactttcgaatgttggagaaataaaattattagaattatttcatggtccaacattagcttttaaagacgttgcaatgcaattcattggaaacctttatgaatattatttaactaaaaataataaaaaaattaatattgtagttgcaacttctggagatacaggtgcagcagccatagatgctattaaaggtaaatcaaatttaaatatttttgtacttcatccaaataataaaatttcatctgttcaaagaaaaataatgacaactgtagaagaaaaaaatgttttcaatatagcaatagaaggaaattttgatgattgccagaatatagttaagagtatgttctctgacttagaattttctaaatcgataaatatgtctggagtgaactcaataaattgggcaagaattattgctcaagcagtatattatttttattcgtattttaggttagataaaaaaactatatccttttcagtacccacaggaaatttcggagatgtttttgcaggctatcttgcaaaacaaatgggattaccaattaataagttaattgttgcaacaaacgaaaatgatattctacatagagctatctcaaaaggagattatgtttcaaaagaagttaaagaaacattatcacctagtatggatattcaattagccagtaactttgaaagattaatttattatgtaaataatttagattcctcaaaaactgcagaaattatgaaaaaagttaagcaaaattcctatcaaattgaaaagaacaatttggatataattcaaaaggattttttatctgaaagttgcaatgcaaaagagacattggatataattaaaaaaaaatatgaagaaaataatataatattagatccacata

SEQ ID NO: 286441 - DNA, 717 bp, Unknown
  Bacterial polypeptide expressing nucleotide sequence isolated from the Sargasso Sea
tatgaactatgtaagtacaagaaatagtaaaaatgagcttaattttaaagatgttttcattaaaggtttagctgacgatggtggattatttgtcccaaaaaacgttaaattattaaactctgaagatttagataaattaagaaaccttagctacaatgatttagcttgtgaaattctaaacctattttgttcagattttataaacaaaaaagatcttaaaactattattacaaaatcgtattcaacttttagggaaaaagaagttgtaaaaattagtaatttaggaagcataaaacttcttgaattatatcatggtcctacccttgcatttaaggatattgcaatgcaatttataggaaacttatatgattattatttaagtaaaaataatgattttttaaatgtagtagtagctacatctggtgatacaggagcagctgcaattgatgcaattaaaggaaagaataatatgaatatttttgttcttcatccaaataataaaatatccaaagttcaaagaaaattaatgacaactggcaatgaaaagaatgtttataatattgctattgatggaaattttgatgattgtcaaaatttagttaaagcaatgttttcagatcttgaattttcaaaaagtataaagatgactggagtaaactcaataaattgggcaagaataattgctcaggcagtttattatttttatacttgctttaa

SEQ ID NO: 286442 - DNA, 1375 bp, Unknown
  Bacterial polypeptide expressing nucleotide sequence isolated from the Sargasso Sea
atgaattatgtcagtacaagaaataatctgaaaaacttcacttttagggatgttttcctcaaaggtttggcagatgatggagggctttttgtgcctaaatcaattaaaaaatttaaaaaagaggaattagataatctaaagagccttagttataataatttagcagcagaaataatttacccatttattggagatttcatgtctaaaaatgaattgatctctattatatcaaaatcatattcaaatttcagatctagtgatgttgtaaaaatatctcatttaggcaatttaaaagttttagaactatttcatggcccaacacttgcttttaaagatatcgcgatgcaacttattggtaatttatatcaataccatttaaagcgtgatcaaaaaaaaattaatataatagtagcaacttcaggtgatactggtgcagctgcgatagatgctttaaaaggaaaaagcaatttaaatgtttttgtattacacccaaacaataaaatttcaccagtgcaaagaaaactgatgacaatacatgaggagagcaatgtatttaatattgcagtaaagggtaattttgatgactgtcaaaatttggtaaaagcaatgttcaatgataaaaaattttctaaagaaattaacatgtcaggtgtaaattcaattaattgggcaagaattattgctcaaacagtgtattatttttacgcttactttaaaattggaaatggtcaacctttatctttttctgttccaacaggaaactttggtgatatttacgctggctatttagccaaaaaactaggtcttcctattgataaactaatcgttgctacaaataaaaatgacatactgcacagagctatatctggtggtgattatagtcaaaagaaggtggaggaaacgaatactccaagtatggatatacaaatagcaagtaattttgagaggcttttatatgacgtcaaagattgtaactcagaagttacaaaagatgtaatgggtgaaataaaaaataacacttataaaattgataaaaacgacttagacaaaatcaaaaagaattttatatctgaaatgctcgatgaaaacgaaactgttgaaatgataaaaactattaatgatgaacatcagatggtggttgatccacatactgcagtaggtattggtgcagcgagaaaattagggttagaaaaaaattgtgttgtattatccactgcacacccatgtaaatttccaaaagcaatagaagatgcaattttaaaaactgaaaatttaccagaaagtctcaaatatgttaatgacagaaaagaaaaatttgaacttctgtcaaatgatattgaaaaagttaaaaaatatgtaatgaattcgatatgaa

SEQ ID NO: 286443 - DNA, 1051 bp, Unknown
  Bacterial polypeptide expressing nucleotide sequence isolated from the Sargasso Sea
atgctctataaaagtacaagaggagaaagtccattagtgcctttctctgaagttttgcttggaggtttggctcctgatggcgggctgtatatgccagaaaattttcctaaattctcacttcaagagataaaaagctggtctgaattacctttctaccagctagcacataaagttttatatccatttgttgaagaagagatagatgaaacagtcttttctgacttactgagggaggcctatgagacttttgatgaaaaagacgtagtgaatctccataaattagaagaaaacagatgggttttggaattatttcatggacctacattggcatttaaagacgtagccatgcaacttttaggggttttactcaatcattttgctaaggagaaaggagagaaaattgtagttcttggtgctacatcaggtgatacgggtgccgcagctatttctgcctgttcaagacatcagaatgtggaagtttatattttgtatcctcatgaaaaagtaactgaatttcaaagaaaacaaatgactaccactcagtctaaaaatgtcttccctctagcggtagaaagtgactttgatggctgtcaaaatattgtaaaacaaatgttcctagataaagagttgcataatgataacgtaagatttattgctgctaattctataaattgggctagatgcatgacccagtctgtttattttttttggacctatttaaagttacctaaactaaaaagaaatataaccttttcaatcccgtctggtaattttggtcatgcctatgctggatggacagcaaaagaaatgggcttgccaatagagaaattgctcattgcaaccaataccaatgatgtactacatcaaacattttcaacaaataattatgctaaaacaaatgttgttcagacattagcacctagcatggatatttctgtagccagtaattttgaaagactactttataatctatacgacgatgactcttctttgcaagcaaagaatatgcgttcttttccagaaaagatctatagatataccagaagataaa

SEQ ID NO: 286444 - DNA, 798 bp, Unknown
  Bacterial polypeptide expressing nucleotide sequence isolated from the Sargasso Sea
tatgaaatatttaagcaccagaaatagtaaattgcaagaagggtttatagatattctttcacaaggactttctaaggatggaggactttttctaccaagaaattggccatcaatagatatcaataaacttagaaataaatcttatgaagaagttgcctttaatataattaatccttttgttgggggtgaaatttctgaagatgaattatataaagttatttttagtacatataaaaatttttctcacaataaaattgcccctttagtaaaaatagatactaataaacatattttagaattattttatggaccaaccttagcttttaaagattacgctatgcaatttttgggaaatattttttccaatgttatgcaacataaaaataataaaataacaattttaggagcaacttcaggagatacaggctcagctgctattgaagcttttagaggaaaggaaaaaattaatgtatttatcttacatcctcataaaaaagtttcagaagttcaaagacgacaaatgacaactgttctagataaaaatatatttaatatagcaattgaaggaaactttgatgattgccaaagaatagttaaagatttatttcttgatcaagaaactcaaaataaaacatcttttacagccataaattctatcaattgggctcgtttaatggctcaaatagtctattatttttggggatatttacaattagaagaaaaaaaagttagctttattgtaccttccggtaattttggaaatatattttctgctcatattgctcaaaaaatgggttt

SEQ ID NO: 286445 - DNA, 1132 bp, Unknown
  Bacterial polypeptide expressing nucleotide sequence isolated from the Sargasso Sea
gcaaaagaatgtggttaatttaaaaaagataggaaaaatttctctcgtagaactttttcatggcccaactttggcctttaaggatattgccatgcaaccaattggcaatatttatgaaaaatttatcaaggtagataataaaaaaattaatattattgttgctacatctggtgatacaggatcagcggcaattgcaggtttgaatggaaaatccaatattaacgtctttgtattgcatccggacaacaaaatttcaaacgttcagagaagactgatgactacggttgactctaaaaacatttttaacattgctgtgaaaggaaattttgatgattgtcaaaggttggttaaagatatgtttgcagataaaaattttaaagaaacaataaatatgtctggtgttaactctattaactgggcaaggatagcttttcagattgtttattatttttttgttggtttgaaatttttaaacaaacctataagcttttctgttcccacaggtaattttggtgatgtctatgctggttatattgcgaaaaaaatgggcttaccaattaaaaaacttatagttgcaaccaatgaaaacgatatcttaagcagagttataaactcaggaaaatataaaccttcaacaacaaaaccatctatatctccaagtatggatatacaggtagcgagtaattttgaaagacttctatatgatgtcgttggcaaagatgatttgaaggtaaaatcattaatggaaaaactaaaaaatgaaggaggctattctttgagcgagaaagaaataagccatataaaaagtgatttttccgcatcaactatttcagatagatcgaccaaggaaactttgaagagagtttataaagaaaaccaggtgttaattgatccacatacagcaacagcatttaaatcagcagaaattcactcaacgggtgaggaaatgttggttttgggtacagcacatccttgtaaatttcctgagtcagttaaagaagcaactggagtcgagccaaaaattccagaaagcataaaaaatattttaaacaagaaagaaagctatgctaaacttgatgataatattgatgttattaaaagtcatattttggaaagaataaatgaaagttaa

SEQ ID NO: 286446 - DNA, 642 bp, Unknown
  Bacterial polypeptide expressing nucleotide sequence isolated from the Sargasso Sea
catgaaatatgtaagtacaagaaataatttaaaagaatatagttttaaagacgtttttattaaaggcttagctgatgatggtggcctttatgtaccaaaatcattaaaaaagtatggtactcaagaattatcaaaactaaaaaatttaaattataatgaattgtctactgaaataattaaccaattttcttctgagtttataacaaaaaacgaactttcatctttggtttctaaatcttattcaacatttagagaaaaagaggtggtaaaaataactgaggttggagaactaaaattattagaattatttcacggtccaactttagcttttaaggatgtggcaatgcaatttattggaaacttatatgaatattatttatctaaaaatgataaaaaaattaatatagttgttgcaacttctggagatactggagctgcagccataaatgcgattaaaggaaaatctaatttaaacatattcgtcttacatcctaataatcgaatttcctccgtacaaagaaaattaatgactacaattgaagaaaaaaatgtattcaatattgcaattaatggaaattttgatgattgccaaaacatagttaaaagcatgttttcagatttagagttttctaaatcaattaa

SEQ ID NO: 286447 - DNA, 1015 bp, Unknown
  Bacterial polypeptide expressing nucleotide sequence isolated from the Sargasso Sea
tatgaaatacgtaagcacaagaaacaactcaaaagaatataattttgaacaagtatttataaaaggattagcagatgatggaggtctttacgttccaacatctttaaaaaaatacagtactcaagaactacaagaactcaaaaaattaagttacaacgaattatctactgagataataaatctattttcatcagattttatatctaaagaagaattatcctctttaattaaaaattcatactcaacatttagagaaaaagaagttgttaaactttcaaatgttggggaaataaaattattagaattatttcatggaccaactttagcatttaaagatgttgcaatgcaattcattggaaacttatatgaatattatttaagtaaaaataataaaaaaattaacatagtagttgcaacttctggagatacgggtgcagcagccatagatgctattaaaggaaaatctaatttaaatatttttgttttacatccaaataataaaatttcatctgtgcaaagaaaaataatgacaacagtagaagaaaaaaatgttttcaatattgcaatagaaggaaactttgatgattgccagaatatagttaagagcatgtttgcagacctagaattttctaagtctataaacatgtcaggagtaaactcaataaattgggctagaattattgctcaagctgtatattatttttactcatattttaaattagataaagaaactgtttcattttcagtacccacaggaaactttggtgatgtttttgctggctatcttgcaaagcaaatgggactaccaattgataaactaattgttgcaactaatgaaaatgatatcttgcatagggctatctcagaaggagattacgtatcaaaagaagttaaagaaacattatcacctagtatggatattcaattagcaagtaactttgaaagattgatttattatataaataattcagactctaaaataacagctgatattatgcaaaaaattaaacaaaat

SEQ ID NO: 286448 - DNA, 885 bp, Unknown
  Bacterial polypeptide expressing nucleotide sequence isolated from the Sargasso Sea
aatgctgtataaaagcactagaggccaatctccagaagtatccttttcggaagtattacttggcggtctagcaccagatggtggcttatacatgccaactaatgtcccgaaattttctatccaagagattaatagttttaaagatctacagttccatgagttagcaactgaaatactttttccttttgttgagggcgatatagagaagtcagattttagtagattggttgaagaaacttataaagtttttgaagtggatgatgttgtagagctaattgaattagagaacaatcgtcaagtcttagaactattccatggcccaactctagcttttaaagacgtagcaatgcagctcttaggttctttgctaaatcattttgccaaagaacaaggaaaaaagatcgccgttttaggggcaacctctggagatactggtgctgctgcaatctctgcgtgtgcgagacatgcaaatgtagaagtttttatactttatcctcataacaaggttaccgacatacaaagaagacagatgaccactaccggttctacaaatgtttaccctttagccattcaaagtgattttgatggctgccaatctattgttaaggaaattttcttagataaagattttcgtattgatagcacgaagtttatcgcagctaattctataaattgggctagatgcatgactcaatcggtttatttcttttgggcctatttaaaactaaggcatttagaacaagatttaatattttcagttccttctggaaattttggacatgcttacgctggatggacagcaaaagaaatgggactcccaataaaaaaactaatgattgcgactaatagtaacgatgttctgcataagtgtttcagaaaatcatt

SEQ ID NO: 286449 - DNA, 803 bp, Unknown
  Bacterial polypeptide expressing nucleotide sequence isolated from the Sargasso Sea
aatgagatacgtaagtacaagagacacatcaaaaacctttgaatttaaagacgttttcattaaaggtcttgccgacgatggaggcttatttattccagaaacattagtgaaatatggtgaaaaagaaatcagagatttaaaaaaacttagttattcagagttagccaaaaaaattgtttatccatttattggtaattttatgtctgaaggtgaattgagtaaaattattgataaatcttactcaacatttagaaaagataacgttgtagatttcataaagcttggagacaaaacagtattagagctatttcatggtcctactttagcttttaaagacgttgcaatgcaactattaggtaatttttacgaatattacctaaacaatgaaaatcaaaaaattaatatagttgttgccacatctggagacactggtgctgcagcaattgatgcaattaaaggtaaaaaaaaagttaatatttttgtgcttcatccagataatcgtatttcacctgtgcaaagaaaattaatgacaacaagtaaatatgaaaatgtatttaatattgctataaagggaaattttgatgattgccaaaacctagttaaatctatgtttgctgataagcagttttcaaatgatatcaaaatgtcaggggtaaattctattaattgggcaaggattattgctcaaagtgtttattatttttatagttatttatcagttgaaaatacaggtgaaccaacaaatttttcagtaccaacaggaaattttggagatgtttatgctggatatttagccaaaaaaa

SEQ ID NO: 286450 - DNA, 1176 bp, Unknown
  Bacterial polypeptide expressing nucleotide sequence isolated from the Sargasso Sea
aatgctttattttagtacacgagatacccaaaagaagttcacctttgaagaaataattctgaatggtcttgcagaggatggcggtttgtatattccagagcaaactccgatatttaccaaaaatgatataaataggttgctttgttctgactacgaaacaattgcatacgaaattataaaacaatttacaggagaaacatttacaactgaccttcttaagagaatgattcatgactcctataaatcatttaggagtgattttgtaacaccattgaaagaagttgatggctcattatcgatattagaattatttcatggcccaactcttgcatttaaagatttggcaatgcaattgttatcacgcatgattgaagaggtgctatctcgcacgaattctaaagcctccataatatgtgcaacatctggtgatacagggggtgcagcggtaacttcattcgcaaataaaaaaaatatcaaactatttgttttatatccaaaaggcagaatatctgaagtccaaagaaggtttatgtcaaccgtcaaggctgaaaatataaaagtaatatcgattaatggcaattttgatgattgccagaatattgttaaaactttatttagtgacagatattttgcaaaaaatgttagtttgacggcagttaattcaataaactgggcaaggataatgatacaaatagtctattattttagcgccttctcacaatacaagagattagaaaagaatataaattttatagttccaactggtaattttggagatatatttgcaggttacattgcgaaaaaaatgggtctgccaatccaaaagctagttattgctacgaatgttaataatattctagaaaggtgtctaaaaacaggcaagtatgaagcttttgactccatacagacaaactccccatcaatggatattcaaatatcaagtaattttgagaggcttctttttgatttattggatatgagtccaagagtcgtggaaaaaaaaatgagtgaattaaaggaaagtggtaagtttgagcttagcaaatcagagctggagtcttttaaaaataatttcgatgccggatcgctcgatcaagatgaaacagttaaaataataaaagatatttataatagaacacatcaaattattgatccccatactgcaattgctgttgg

SEQ ID NO: 286451 - DNA, 771 bp, Unknown
  Bacterial polypeptide expressing nucleotide sequence isolated from the Sargasso Sea
aatgagatacgtaagtacaagagacacatcaaaaacctttgaatttaaagacgttttcattaaaggtcttgctgatgatggcggcttatttattccagaaacagtagtgaaatataatgaaaatgaaatcagagatttaaaaaaacttagttattcagagttagctaaaaaaattgtttatccatttattggtagttttatgcctgaaactgaaatgagtaaaattattgataaatcttactccacatttagaaaagacaatgttgtagatttcattaagattggagacaaaacaatattagaattatttcatggtcctactttagcttttaaagatgttgctatgcaacttttaggtaacttttacgaatattacctaaacaatgaaaatcaaaaaattaatattgttgttgctacatctggagacactggtgctgcagcaattgatgcaattaaaggaaaaaaaaatgttaatatttttgtgcttcatccagataatcgtatttcaccagtacaaagaaaattaatgacaactggtaaacatgaaaatgtatttaatatagctataaaaggaaattttgatgattgccaaaacctagttaaatctatgtttgcagataagcagttttcaaatgatatcaaaatgtcaggggtaaactctattaattgggcgaggattattgctcaaagcgtttattatttttatagttatttattggttgaaaatacaggtgaaccaacaaatttttcagtaccaacaggaaattttgg

SEQ ID NO: 286452 - DNA, 1318 bp, Unknown
  Bacterial polypeptide expressing nucleotide sequence isolated from the Sargasso Sea
aatgaaatatacaagtacaagaaataactcaaaagaattcacttttggcgaagtttttataaaaggacttgctgaggacggaggtctttatgtgccaaaatcattaaaaaaatataatgaaaaggaactattagaacttaaaaacctaaattataatgaattatctactgaaataatcaatttatttttagaggattttatttcaagagaagaactttcatctttaattaaaaagtcatattcaacatttagagaaaaagaggttgttaaaatttcaaatattagagaactaaaattattagagttattttacggaccaacgttggcttttaaagatattgcaatgcaatttattgggaacttatacgaatactacttaagtaaaaatgacaaaaaaataaatatagttgttgcaacatctggagatacaggcgcagcggctatagatgcaattaaaggaaaatctaatttaaatatatttgtcttacatccaaataataaaatttcaccagtgcaaagaaaattaatgacaaccgtagaagaaaaaaatgtttacaacattgcaatagatggaaattttgacgattgtcaatatgttgtaaaacaaatgttttctgatcttgaattttctaaatctataaatatgtcaggagtaaactcaataaattgggcaagaattattgcccaatgcgtatattacttttactcatattttcagttagataaaaagattatttcattctcagttccaacaggaaactttggtgatatctttgcaggttatctttcaaagaaaatgggattaccaattgataaattaattgtcgcaacaaatgaaaatgatattttacatcgagctatctcaaaaggagactatgtatcaaaggaagtcaaagaaacaatttcacccagcatggatatacaattagcaagtaattttgaaagattaatttattatgtaaataattctgactctgaaaaaacagcagagattatgaaaaaaattaaactaaataattatcaaattgatagtcaaagtttaaaaataattcaaaaagattttttatcagaaagctgtaatgaggaagaaacattaaaaattattaaacaaaattacgaagaaaacaatataatattagatccacatacagcagttggagtaggggctgcaaaaaaactatcttttaatgattgtgtagttttatctactgcacatccatccaaattcccagatgctacgaagaaagcaataaaaaagcatgaaaatttacctaaggaacttcaaaatgttcttgataaagatgaaaatttccaagta

SEQ ID NO: 286453 - DNA, 1279 bp, Unknown
  Bacterial polypeptide expressing nucleotide sequence isolated from the Sargasso Sea
gatgaagtatataagcacaagagacaaatcaaaaaactttgaatttaaagatgtttttattaaaggccttgctgatgatggtggtctttttataccagagactttacacaaatattcagagtctgaaataagtgattttaaaaaactaagttattcagatttagcaaaaaaaattattcatccatttataggtaattttacttcagagggtgagttaagtaaaataatagaaaaatcctactcagttttcagaaaagataatgttattgatcttattaaagtaggtgaccgctctgtgcttgaattgtttcatggtccaaccttagcttttaaagatgtagcaatgcaactcttgggtaatttttatgaatattatttgaataacgaaaatgaaaagattaatattgtagttgccacatcaggagacactggtgcagctgccattgatgcaattaaagggaaaaagaatttaaatatctttgttcttcacccgcataatcgtatttcaccagttcaaagaaaattaatgacaactggaaaagatgagaatgtattcaatattgctgtaaaaggtaacttcgatgattgtcaaaatttagttaaatccatgttctctgataaagaattttctaataagataaacatgtctggtgttaattcaattaattgggcccgaattattgcgcaaagtgtatattatttttattgttattttttagctgaggatgacaatcagccaataaatttttcagtaccaactggaaattttggagatgtatatgcaggttatttggcaaagaagttgggtcttccaattaataaattaatagtagccacaaatcaaaacgacattttacatagagctatttcaaaaggtaaatatgaggctgaacacgtctctgaaactatttcaccaagtatggacattcaaattgcaagtaattttgagcgactaatttatgatttaaatagtcatgatagttcacaaactttagatgatatgaaaaatattaaagagaatggtaaatatacaatcgacgaggagaaattaaaaaaaattaataaagattttttatcagcaagaatgagtgagcaggaaacactagatgtgataaaaaatatctatgaaaaatttaatatagttttggatccacatacagccataggatatggagcttttgataaacatgatttaaaagggaacaatattgttcttgcaacagcacatccatgtaaatttccaagatgcaattttaaaggctataaatttgaaatctga

SEQ ID NO: 286454 - DNA, 1072 bp, Unknown
  Bacterial polypeptide expressing nucleotide sequence isolated from the Sargasso Sea
tatgaagtacatatctactcgtgggaaagctccagttttaaattttgaggaagcaatgttaacaggcctggcaagagacggtggtctgtacgttcctcaatcaatcccaaacttttctccagatgatatatcatcgatgtcagatttaagttatgaggagatagcctttaaagttatattaccctttgttggagattgtttttctgatgatgaattaatcaaaatcataaacaaagcctatactgaatttgggcatatagagcgtgctcctcttgttgaattagaaagtaaccatttccttctagaattatttcatggcccaactctggcctttaaagattttgctatgcaactaattggtcagttttttcaagttgcattagaacgtaaaaaatcaagagtaaccattgttggtgcaaccagtggagatactggtagtgctgcaattgaagcctttcgtgggttagatgccgtagacgtttttattttataccctgatggacgtgtttcagatgtccagagaaggcagatgacaacgccttctgaaaataatgttcatgcaattgcaatcaatggtcattttgatgactgccaagcccgtttgaaggacatgttcaatgattttgagtttcgagatggagttaatttagctggtgtgaattcaataaactgggcgcgggttttagcccaagtcgtttattacttttcctcagcggttaagctgggagctccaaataaaaaaattagttttagcgtgcctaccggaaattttggagatatttttgctggttttattgcaaaaaaaatgggcctctcaattgatcgccttgtgatagctactaaccaaaacgatattctgcacagatgcctaagttctggtgtttataaaacagatagagttttaccaagcataagcccatctatggatatccaagtgagttccaactttgagcgagcgcttttttatgctacggattgtaatgctagtgaagtttcgaatttgatggggcaactcaaaagcactggtcaattcactatttctggaagtgttttagaaatattgcgagaaaac

SEQ ID NO: 286455 - DNA, 1453 bp, Unknown
  Bacterial polypeptide expressing nucleotide sequence isolated from the Sargasso Sea
catgaactacatctccacgcgcggcgccggcatcggcgagcgccacacgttctccgacatcctgctcggcggtctcgcgaaggacggcgggctctacctgccggcggaatatccgaaggtgtccaccgatgagctcgcgcgctggcgcgcgctgccgtacgcggatctcgcgttcgagatcctgtcgaagttctgcgacgacgtgccggccgacgacctgcgcgcgctcacgcgccgcacgtacacggccgacgtataccgcaacacgcgccatggcgagaacgcgtccgatatcacgccgctgaagacgctcggcaccgagaacggcgcgccgatctcgctgctcgaactgtcgaacggcccgacgctcgcgttcaaggacatggcgatgcagctgctcggcaacctgttcgagtacacgcttgcgaagcatgggcagacgctgaacattctcggcgcgacgtccggcgacacgggcagcgcggctgaatacgcgatgcgcggcaaggccggcgtgcgcgtgttcatgctgtcgccgcacaagaagatgagcgcgttccagacggcgcagatgttcagcctgcaggatccgaacatcttcaacctcgcggtcgaaggcgtgttcgacgactgccaggacatcgtgaaggccgtgtcgaacgatcacgcgttcaaggcgcagcagaagatcggcacggtcaactcgatcaactgggcacgcgtcgtcgcgcaggtcgtgtactacttcaagggttacttcgcggccactcggtcgaatgacgagcgcgtgtcgttcacggtgccgtcgggcaacttcggcaatgtctgcgcaggccacatcgcgcggatgatggggttgccgatcgcgaagctcgtggtcgcgaccaacgagaacgacgtgctcgacgagttcttccgcacgggcgcgtatcgcgtgcgcagcgcggagaacacctatcacacgagcagcccgagcatggacatctcgaaggcatcgaacttcgagcgcttcgtgttcgacctgctcggccgcgatccggcgcgcgtgatgcagctgttccgcgacgtcgaggagaagggcggtttcgatctcgcggcgagcggcgatttcgcgcgcgtcgccgagttcggcttcgtgtcgggccgcagcagccacacggaccgcatcgcgacgatccgcgacgtgttctcgcgctacgacacgatgatcgatacgcacacggccgacggcgtgaaggtcgcgcgagagcatctcgacgcgggcgtgccgatggtcgtgctcgagacggcgcagccgatcaagttcggcgagacgattcgcgaagcactcgatcgcgaagccgagcgtccggccgcattcgacgggctcgaggcgctgccgcagcgtttcgaggtcgtgaaggccgatgcgcagcaggtgaaggacttcatcgccgcccatacgggcgcatga

SEQ ID NO: 286456 - DNA, 745 bp, Unknown
  Bacterial polypeptide expressing nucleotide sequence isolated from the Sargasso Sea
atgaagtacgtcagcactagaaattctaatataaaatattcatttgaagaaatttttttcaaaggtcttgctgatgatgggggtttatttataccagaaaatttttataaattaagtaaggatgaaattttaaaattttcaaaattatcttttcaggaaatttctgaatttatattttcaaagtatacaggtgaaacttttaaaaaagacgaattaaaccaaataataaataatgcatacaaaaattttagatgtcaaaaaattgtagatgttaaaaagtataaaaatattaatttagtacagctattccatggcccaactctggcatttaaagatattgcaatgcaagttttaggacaaatgtataataatcttttaattaaaaacaaaaagaaaattaatattatcacagctacatccggcgacacaggtgccgctgctataaatgcttttaaagataatgaaaaaataaatatttttgttttacatcctaataataaaatatcagatgttcaacgtaaattaatgacaactacagcctcaaagaatgtatttaatatagcaataaatggaaactttgatgattgtcaaaatttagtcaaagagatgtttgttgatagtatattttcaaaaaaaataaatatgtcaggcgtaaattcaataaattgggcaagaatagttgctcaaactacttattatttcttcgtatatgcacactttgctaagtccaacaaaatgatttaat

SEQ ID NO: 286457 - DNA, 685 bp, Unknown
  Bacterial polypeptide expressing nucleotide sequence isolated from the Sargasso Sea
aatggaatatataagtacaagaaataatcagaaaaactttacatttaaggacgttttcctcaaaggtttggcagatgatggaggactttttgtaccaaaatcaattaaactatttagtaaagaagaattaaatcatttaaacagtctgagttataatgatttagcagctgaaataatttatccctttattggagatttcatgtctaaagatgaattgatctctactatatcgaaatcttattcaaattttagatctaaggatgtcgtaaaaatctctaatttagaaaatttaaaagttttagaattatttcatggtccaacacttgcattcaaagatattgctatgcaattaataggtaatttttatcaataccatttgggacatgatcaaaaaaaaattaatataatagtggcaacgtcaggtgataccggtgcagccgcaattgatgcattaaaaggaaaagataatttaaacgtgtttgtgttgcacccaaataacagaatttcaccggtgcaaagaagattaatgacaatacatgaagagagcaatgtttttaatattgcaatagatggtaactttgatgattgtcaaaatttagttaaagcaatgtttaacgatgaaaaattttctaaaacaattaatatgtcaagggtaaattcaatcaactgggcaagaataattgct

SEQ ID NO: 286458 - DNA, 1387 bp, Unknown
  Bacterial polypeptide expressing nucleotide sequence isolated from the Sargasso Sea
aatgaggtatagaagcacaaggggcagcgattactttgggtttagagaagttttatttgctggtttagcaaatgatggaggcctatttattcctgaaaattggccaaatataaatcataaagatattaatcgaaatgtaagttatgaggacttaacagaaattattttatctccatttattggtgacgaaatagagtccgatcaattgaagaggattattaaagaagcgtattcaaataactttacagaaagtggctgtgtatcattcaaggagcttaatacaaacgaaataatcgtggagctattcaatggcccaactttagccttcaaagacttcgcaatgcaattacttatccctctttttgatcattttttagaaaaagaaaagaaaagaataaatcttatagtagcaacatcaggtgacacaggatcagccgctatcaacgctgtaaaaaaaagcaaaaatataaatattttctgtttatatcctaagggtaggatttcagaatttcagagaaggcagatgtctactgttaatcaggaaaatatttttctttgtgaagtagaaggaacttttgatgactgtcaaaaaattgttaaagatattttgaaagatacagattatagtatgcataataatatatcagcagttaattcaattaattgggcaagaattatcattcaatcagtatattacttttatacatttattaattttactgaaagagcttccaataaagttaatttttctgtcccaactggtaactttggagacatttatgctggttatgtttcatataaaatgggattaccaatcaataaattaatagtggctactaacgaaaacgatattctaaatagatttatgaagtcaggagtatatgaatctaaaacagtcataaaaacatcaagtccaagtatggatattcaggtagcaagtaattttgaaagattactttttgatatacttaatcaatcaaatactgaaacaaaagtatcaatggaaaattttgaagaaagtggaaaaatatcaatatctgaggaaaatttagaaaaagttcgagaggtatttagctcgaatagttcttcgatggatatcgttcaaaacacaatcaaatccgtgaaagataatttttcatatgttattgacccccacactgctacaggactggatgcatcaagatttgaaaaagatatggataggcttaattttgttttggctacagctcaccctgtaaaattttctgaggttgttgaaaaatcaataggtgaaggtttaaatttaatgagtaaatacaattacttatttgatgctgaagaaaaaatgtataaaatggaaaataacacaattcgaattaaagaattcattagggagcagataagctag

SEQ ID NO: 286459 - DNA, 1117 bp, Unknown
  Bacterial polypeptide expressing nucleotide sequence isolated from the Sargasso Sea
gttgaaagaagttgaaaaaggaaactatttattagaactttttcatgggccaacccttgcttttaaagattttgccatgcttttattagctcaattttttgaaacttctttaagtaagaaaaataaatcaataactatattaggcgctacttcaggagatactggtagtgccgcgattgaagcttttaagaataataaacattgcactgttttcatattatttccaaaaggaagagtatctgaaatacaaagaaaacaaatgacaactgttgatagcgcaagcatttatgcaattgaaattgacggaacttttgatgattgtcaaaatcttgtgaaacatctattccaaaatcttgaattcaaagaagaggtgagtcttggtgcaattaattcaataaattgggcgcgcgtagcagcccaaattgtttactatttttcaacatttcagcaattacaatcaaatagagtttctttttcagtaccaacaggaaattttggagatgttttagccggatgggtcgcaaaaaaaatgggattacctattgataaattaattgttgcaacaaatgataatgatattttagatcgagcgatatctactggtgactactttcaagaagaagtaaaggctactacgtctccaagtatggatattcaaatttcaagtaattttgagaggttattgtttgaatctttagatagggacccagaaaaattaagaaatctatttaaagaattaaaggaaaataatggttttagaataggtaatgatactcttacctatattagaaatgattttaaatcaggtaaggcaagtgaagaaaaagtaaaagatacgatttcacggattcataaatcttctaatataattcttgatccacataccgcagtagggttttatgcatctgcaagtgaattaaatttcgatgtaccgatggttaatttaggaacagcccatcctgctaaattttctaaagcggttattaatgcaataggttttgaaccagaaattcctgatagactaaaaaatataattaataaaaaagagaagtttactcaattagataataattcagaatctttaataagttttataagaaagcactcaaatgtttaa

SEQ ID NO: 286460 - DNA, 1135 bp, Unknown
  Bacterial polypeptide expressing nucleotide sequence isolated from the Sargasso Sea
atcatattcaacatttagagaaaaagaagttgtaaaaacctcaaatgttggagagataaaattattagaattatttcatgggccaacattggcatttaaagatgttgcaatgcaattcattggtaatttgtatgaatattatttaaataaaaatgacaaaaaaataaatatagttgttgcaacttctggagatacaggtgcagcagccatagatgcaattaaaggaaaatctaatttaaaaatatttgttctacatccaaataacagaatttcttctgttcaaagaaaattgatgactactgttgaagaaaaaaatgttttcaatatcgcgatagatggaaattttgatgattgtcaaaatattgtaaaacaaatgttttctgatctggggttttctaaatctataaatatgtcaggagtaaactcaataaattgggtaagaattattgctcaagcagtgtattatttttactcatattttaaattaggcaaagaaactatttctttttcagttccaacgggaaattttggtgatgtttttgcaggttatcttgcaaagaaaatgggattaccaattgataaactaattgttgcaacaaacgaaaatgatattttgcatagagcaatttcaaaaggagattatgtttcaaaagaagttaaagaaacactgtcacccagcatggatattcaattagcaagtaacttcgaaagattaatttattacgtaaataattctaactctgaaaaaacagcagaaattatgaaaaaagttaagcaaaattcttatcaaattgaaaagaaaaatttagatataattcaaaaggattttttatctgaaagttgtaatgaacaagaaactttagacattattaaaaaaaattatgaagaaaataatataatattagatcctcatacagcagttggagtaggagctgcaaaaaaactatcttttaatgattgtgttgttttatcaacagcacacccgtgtaaattcccagatgctacaagtaatgcaataaataagcatgaaaaattaccaaaagaactccagcatgtgcttgataaagaagaaaattttcaggtattaaaaaataatacagaagacgtaaaaagatttgttaaaagcaaagtttaa

SEQ ID NO: 286461 - DNA, 591 bp, Unknown
  Bacterial polypeptide expressing nucleotide sequence isolated from the Sargasso Sea
tatgaaatatgtaagcacaagagataattctaaagaatacagttttgaagacgtttttataaaaggtttagcagacgatggaggcctttatgttccaacatctttaaaaaaatatagttctaaagaattgcaagaactcaaaaaattaaattataatgaattatctactgaaataataaatttattttcgtcagattttatctcgaaagatgaactgtcatcattaattgaaaaatcatattcaacttttagagaaaaggaagtggttaaattatcaaatgtcggagaaataaaattattagaattatttcatgggccaacattagcttttaaagatgttgcaatgcaatttattggaaacttatatgaatattacttaagtaaaaataaaaaaaaaattaatataatcgttgcaacttctggagacactggtgcagcagccatagatgcagtcaagggaaaatcaaatttaaatatttttgttttgcatccaaataacaaaatttcatcagttcaaagaaaaataatgacaactgttaaagacaaaaatgttttcaatatagcaatagatggaaattttgatgattgcca

SEQ ID NO: 286462 - DNA, 1243 bp, Unknown
  Bacterial polypeptide expressing nucleotide sequence isolated from the Sargasso Sea
atgaactatgtaagtacaagaaataataaaaatgagcttaattttaaagatgtttttattaaaggtttagctgacgatggtggattatttgtccctaaaaatattaaattattaaagtctgaagatttagataaattaaaaaaccttagctacaatgatttagcttgtgaaatcctaaacccattttgttcagattttataaataaagaagatcttaaaaatattattacaaaatcttattcatcttttagagaaaaggaagttgtaaaaattagtaatttaggaagtttaaaactacttgagttatatcatggtcctacccttgcatttaaggatattgcaatgcaattcataggaaacttatatgattactatttaagtaaaaaaaatgattttttaaatgtagtagtagctacatctggtgatacaggagcagctgcaatcgatgcaattaaaggaaaaaataatatgaatatttttgttcttcatccaaataataaaatatctaaagttcaaagaaaattaatgacaactggcaatgaaaaaaatgtttttaatattgctattgatggaaattttgatgattgtcaaaatttagtaaaggcaatgttttcagatctcgaattttcaaaaagtataaagatgactggagtaaactcaataaattgggcaagaataattgctcaggcagtctattatttttatacttattttaaacttacttctagtaaacccttatctttttcagttcctactggaaactttggagatgtttttgctggttatcttgcaaagaaaatgggtttgccaatagataaattaattgttgcaacaaatcaaaacgacattttgcatagagcaatttcaaaaggaaagtatatatcaaagaaagttgaacaaacaatttcccctagtatggatattcaactagcgagtaattttgaaaggttaatttactatattaataattctaattcagaaattactgcagaaattatgaaaaaaattaaagagaacgtttatcaaattgaaaaaattaatttagaaagtattcaaaaagattttgtttctgaaagctgcgatgaaaaagaaactttagatataataaaaaaatactacgaaaaaaataatgtgatcttagatcctcatactgcagttggagtaggggttgcaaataagttatctttaaatgattgtgttgtcttatcaactgcacacccatgtaaatttccagatgcgacag

SEQ ID NO: 286463 - DNA, 1390 bp, Unknown
  Bacterial polypeptide expressing nucleotide sequence isolated from the Sargasso Sea
atgaagtatatcagtacacgaggcagatgttcaccacaaaactttgagcaagttctcctgaccggattggcgccagacggaggattattcgttcctaaaaaattaccaaccgtttctgttgagcaaattagagcaatgggttctcttagttatgcggatttggcgttagatcttgtaacgccatttgtagatggtgaaattcctacggcggacctaaaaactattattgatcggagttatgaggcatttgatcatcctgaagttgctccgatgacgcagctatcagaaagagaatatcttctcgaactttaccatggtccaacgttagcctttaaagattttgcgcttcaagtattaggaagactcttagattatgtattagagagaaatgatcaacgagttgttattctcggagcaacgtccggagatactggctctgctgcacttgagggctgtcgtcactcagagcgggtagagatctatattcttcatccctaccaaagagtttcggatgtccagagaaagcaaatgaccaccgtctcggggaagaatgtttttaatttagcaattgagggaaattttgatgattgtcaaaggattgtcaaggcggcttttgccgatcaatcattcttgcccaatgacaaaagcctcgtagcagtcaattcgattaactgggctaggatattaatgcaaatcgtatactatttttattcagccttaaaattaggtgcgccagataagagagtttcattttcggtgccaaccggaaacttcggagatatctatgcgggttatttagccaagtgtatggggcttcccattgatagattgatagttgctacaaataaaaatgatattcttcatcggtttatcagtgctaacgagtacgcaaagtctcaactgaccaaaactttctcgccgagtatggatatattggtctcctcaaattttgaacgatatttatatgatttatttgcaaaggatccgagtgcagtatctgagttcatgcaacattccggagaaaaacctttgagcgtaacttcacaacagtgggcgcagatgaatgagtgtttcgatagctctagcgttgatgataatactacttgtcaggttatcaatgagttgttcaacaaagattcagtgctagtagatccccatactgctgtaggcgtgcagtcagggagggattgtttcgaaaattctcgctctcctattgtcacgctggcgacggctcacccagctaaatttagcgaggctatacaagcagccgggttaaataagccaaagttgcctgagcatcttaaggacttgtttagtcgagaggagcgttacactattcttcacaatgatttgttggcagtaacggattttatccgtaagcactcttaaa

SEQ ID NO: 286464 - DNA, 586 bp, Unknown
  Bacterial polypeptide expressing nucleotide sequence isolated from the Sargasso Sea
atgaggtatgtaagtactagaaataattctaaagaatacaattttgaaaatgtttttttaaaaggtttggctgatgatgggggcctttatgtgccaaaatcattaaaaaaatatagcactaaagaattatctgagcttaaaaatttaaattttaatgaattatctactgaaataattagtcaattttcatcagattttatctcaaaagataaacttaaatctttagttaaaaagtcatacttaacatttagagaaaaagaagtggttaaaatctcaagcgctggagagctaaaaatattagaattatttcacggtccaacattagctttcaaagatatagcaatgcaatttattggaaacttgtacgaatattatttaagcaaaaatgacaaaaaaataaatattgttgttgcaacatcaggagacactggtgcagcagccatagatgctatcaaaggaaaatctaatttaaatattttcgttctgcatccaaataataaaatttcatctgtacagagaaaaattatgacaactgttgaagaaaaaaatgttttcaatattgcaatagatggaaattttgatgatg

SEQ ID NO: 286465 - DNA, 1101 bp, Unknown
  Bacterial polypeptide expressing nucleotide sequence isolated from the Sargasso Sea
gtgatcgatttgttctgggattatttcacggtcctaccttagcttttaaagatattgctatgcaacttttaggaaatttttatgaatactatttaaataatcaaaatgaaaaaataaatatagtagttgcaacatctggagatacgggtgctgctgccattgatgcaattagaggaaaaaagaatttaaatatttttgttcttcatcctcacaatcggatttcaccagttcaaagaaaactaatgacaactggaaaaaatgagaatgtatttaatattgctattaagggtaattttgacgactgtcaaaatttagttaaatccatgttttcagataaagaattttctaatcagataaatatgtctggtgtgaattcaatcaattgggcccgaattattgctcaaagtgtttattatttttattgttacttttcagttgatgataacaacaaacaaataaatttttcagttccaacaggaaattttggagatgtttatgctggttatttggcaaaaaaattaggtcttccaataaataaattgatagtagcgacaaatcaaaatgatattttgcatagagctatatctaaaggcaaatacaaggccgaacatgtctctgaaacaatttcgccaagtatggatattcaaattgcaagtaattttgaaagattaatttatgatttaaataaccatgatagttcccaaactttagatgatatgaaacatattaagcataatggtaaatatataattgacgatgacaaattaaaaaaaattaatcaagattttttatcagcaagaatgagcgagcaggaaacactagacgtaataaaaaatacctataaaaaatataatatggttttagatccacacacagcaataggttatggtgcttttgataaacaaaatttaaaaggcaacaatattgttctcgcaacagcacacccctgtaaatttccagatgcaattttaaaggctataaatttgaaatctgatttaccagatgaactaaagtttgttttggatgaaaaagaaaaatatagtataatagataacaatcttaaaaaaattaaacaatatattttgggtaaaattttatgaa

SEQ ID NO: 286466 - DNA, 625 bp, Unknown
  Bacterial polypeptide expressing nucleotide sequence isolated from the Sargasso Sea
catgagatacgtaagcacaagagataattcaaaagaatacagttttgaagatgttttcatcaaaggtttagctgatgatggaggactttatgtgcctacatctttaaaaaatttaagctcaggtgaattgtcagagcttaaaaatcttaattataatgatttatctactgaaataataaatcaattttcatcagactttatttcaaaagatgatctttcatcattaattaaaaaatcttattcaacttttagagaaaaagaagttgttaaaatatcaaacattggatatctaaaattattagagttatttcatggtcctacattggcttttaaagatgtggcaatgcagtttattggtaacttgtatgaatattatttaagtaaaaatgataaaaaaattaatattgttgtggctacatcaggtgatactggtgctgctgctatagatgcaattaaaggcaaatcaaacttaaatatttttgtcttacatcctaataatagaatttcaccagtgcaaaggaagttaatgacaacagttgaggatgaaaatgttttcaatattgcaattgacggaaattttgatgactgccaaaatattgttaagcaaatgttttcggattttaat

SEQ ID NO: 286467 - DNA, 1384 bp, Unknown
  Bacterial polypeptide expressing nucleotide sequence isolated from the Sargasso Sea
atgagatacgtaagtacaagagacacatcaaaaacctttgaatttaaagacgtttttatcaaaggccttgctgatgatggaggcttatttattccagaaaaattaacgaaatatactgaaaatgaaattaaagactttaaaaaactaagctactcagagttagccaaaaagatcgtttatccatttgtaggtaatttcatgtcacaagctgaattgagtaaaattattgataagtcttactctgcatttagaagagataatgttgtagatttcataaagcttggagatagaactgtgttagaactgtttcatggtccgactttagctttcaaagatattgctatgcaacttttaggtaacttttacgagtattacctaaataatgaaaatcaaaagattaatattgttgttgctacatctggagacactggtgccgcagcaattgatgcaattagaggtaaaaaaaatgtcaatatttttgtgcttcatccggataatcgtgtttcaccagttcaaagaaaattaatgacaacaggtaaagacgaaaacgtatttaacatagccataaagggaaattttgatgattgtcaaaacttggttaaatcgatgtttgcagataagaaattttcaagtgacattaaaatgtcaggtgtaaactctattaattgggcgaggattattgctcaaagtgtttattatttttatagttatttatcagttgaagatgcaagtgaaccaacaaatttttcagtgccgacaggaaattttggagatgtatatgcaggatatttagccaaaaaaatgggcttgccgatagataaattgattgttgcaactaatcaaaatgatattttacatagagcaatctcaaaaggtagttatgatgtggaaaaggtttcagaaactatttctcctagtatggatattcaaatagctagtaatttcgagagacttatattcgatcttaataatgaggatgataaacagactacattagatatgaaaaatattaaagagaatggaaaatatctaattggcgatcataaattaaataaaattagagaaaattttttatcagctagtctgagtgagaatgagactttggaggttattaaaaaggtgtatgaaaaattttctgtagttttagatccacacacagcaattggatatggtgctttcgacaaacaaaacctaagaggaaataatattgtactagcaactgcacatccatgtaaatttcctgacgctgtttccaaagctattaatttaaaatctgatttaccaaaagaactcgagtttattttgaatgaaaaagaagattatgatatattagaaaataatttagaaaaaattaaaaactatattataggtaaaacaaaatgaa

SEQ ID NO: 286468 - DNA, 1393 bp, Unknown
  Bacterial polypeptide expressing nucleotide sequence isolated from the Sargasso Sea
aatgcgttataaaagtacaagaggcgaaagtcctgaagttactttttcagaggtattattaggtggtttagctccagacggcggtttgtatatgcctgaagcttttcctcaattttcaattcaagaaatacaaagttggtctgagctgtccttcgatcaactggcatcaaagattttatatccattcgtaaaagaagaaatcgatgaagatacttttttagacttattgaaagatgcatatagtacttttgacgagaaagatgtagtcaaattagaaaagcttgaagacaatcgttgggtattggaactgtttcatgggcctacattggcttttaaagatgtagccatgcagttactaggagtcttactcaatcactttgctaaagagagaggacaaaaaattgttgttctaggcgccacatccggtgatacaggagcggcagcaatatcggcttgttcgaggcacgaaaatgtggaggtttatatcttatatcctcacggaaaggtgacagattttcaaagaaagcagatgaccaccacccaatcccaaaatgttcatcctattgctgtaaaaagtgattttgatggatgtcaggacattgtaaaaaaaatgtttctcgatgagaatttcaaagatgataaggttaggttcatagcggcaaattccataaactgggcaagatgtatgacacagtcagtttattttttttggtcttatttaaagatgattgaattgaaagaagatataacattttcaattccttcaggtaattttggtcatgcttacgcaggatggacagctaaacagatgggtttgccaataaagagattattaattgcaacgaataaaaacgatgttttacatcaaaccttttctacaaataattactctaaaacaggagttgttcaaaccttagctcctagtatggatatttcagtagccagcaattttgaaagacttctctacaatttatatgacgataattcctctatacttgcagaaaatatgcgctcttttcctgcgaaaagtatagatattccccaagcaaaaaaggagttagttgctagtttttttaatagttttcgaagtgatgatgaagaaattattcaagagattaaagaaacttttacaagacatgattatttgctggatcctcataccgctacaggagttcgagctagtaatgggattgtgaataaggaagaactagttataacaatgggaacagctcaccctgccaaatttacggaagctatagaaaaagcactacctagttatacttcagaactacctaataaggttgcaaaagcttttgaacaagaagagatatttactatccttccggatgattatcttgagattaaacaatttattctttcgaaggctctataa

SEQ ID NO: 286469 - DNA, 1378 bp, Unknown
  Bacterial polypeptide expressing nucleotide sequence isolated from the Sargasso Sea
aatgaactattttagcactagggataaatctttaaaatttagttttaaagacattttcttaagaggacttgcaccaggtggagggttatttttacctgctgaaattaagaagtataatcaagaagaacttaataatttaagtcaactaaattataacgaacttgctacagaaattatcttcaatttctgttcaggtgaaattaaaaaggaagaacttagctcactgatacaaaaatcttatagtaggttcaaagataaagaagtagtaaatttaaaaaagattggagagatcgatctactcgagctttatcatgggcccactttagcttttaaagatattgcaatgcaggtaattggcaatttgtatgactacttagaagttgctaaagataaaactgtaaatgtcgtagtagctacatcaggagatactggttcagcagctattgcagcattaagtaatagaaaaaatataaatctttttgttctgcatccgcataataaaatttctaatattcaaagaaaaataatgacaacaattggtggtgccaatatttataatattgctattgagggttcatttgatgattgtcaaaaaattgtaaaagagctctttaatgatgatagttttagatcaaaaataaacatgtctggcgtaaattctatcaattgggcaagaattgtttgtcaaattgtttattatttttattctttctttaaattaaaaaaaaacaatattagcttttctgtaccaactggtaattttggagatatctatgctggatatgtggcaaaaaaaatgggtttaccaattaataaactgatagttgctacaaataaaaatgatattttacaaagagttattaatacaggtgaatataaacctgatacagtgaaagcaaccatcacaccaagcatggatatccaagttgctagtaattttgagaggctactttattatatattagatgaaaacgatagtaaggtagggtcattaatgaatgatctatcatcaaaaagtttatttaatttagaaaaaaaagaaatcgatagaataaaaaaagattttgaagcagtaaaagttacagatgaagagacagtatctataatcgatgagatatataaagagcataaatttataattgatccccatactgctactggcgtaggcgcagcaaaaagttttaaaaatttaggagatatagtagttcttggtacagctcatccttataagtttaacgatacaataaaaagagctataggtaaaaatttagacttacctgaacatctaaaattgaatatagataaaaaggaaacatttgatattattgggaattcaaattcagaagtaaaaaattatattttgggcaaaatacaatga

SEQ ID NO: 286470 - DNA, 478 bp, Unknown
  Bacterial polypeptide expressing nucleotide sequence isolated from the Sargasso Sea
catgagatatgtaagtactagagataattctaaagaatatagtttcgaagatgtttttattaaaggtttggctgatgatgggggtctttatgtgccaaaatcattaaataaatacaacactgatgaactatctaaatttaaaaatttaaattacaatgagctatcaactgaaataattaatcaattttcatcagattttatctctaaagaaaaactttcatcattaattaataaatcctattcaacatttagagaaaaagaagttgttaaactttcaaatgttggagagattaaattattagaattatttcatggaccaacactggcatttaaagatgttgcgatgcagttcattgggaatttgtatgaatattatctaagtaaaaatgacaaaaaaataaatatagtggttgcaacttctggagatactggtgcagcagctattgatgcgattaaaggaaaatctaatttaaatata

SEQ ID NO: 286471 - DNA, 1312 bp, Unknown
  Bacterial polypeptide expressing nucleotide sequence isolated from the Sargasso Sea
aatgaaatatattagcacaagaaataatcagaaaatttttacttttaaagatgttttcctcaaaggtttagcagatgatggagggctatttgtacctaaatcaattaaacaatttaaaaaagagcaattagataacttaaaaagccttagttacaatcatttagcggctgaaataatttatccatttataggagatttcatgtctaaaaatgaattaatctctatgatttcaaaatcttactcaaatttcagatctaatgatgttataaaaatctctgatctaggaaatctaaaagttttagaactttttcatggccccacacttgcttttaaagatattgctatgcaattaataggtaatttttatcaatatcatctagaacgcgatcaaaaaaaaattaatataatagtagcaacttcaggtgacactggtgcggctgctatagatgctttaaaaggaaaaagaaatttaaatgtttttgtattgcacccaaataataaaatttcaccggtacaaaggagactaatgacaatacatgaagagagcaacgtatttaatattgcagtagagggtaattttgatgattgtcaaaatttagtaaaagcaatgttcaatgacgaaaaattttctaaagcaattaacatgtcaggtgtaaattcaattaattgggcaagaattattgctcaatcggtgtattatttttatgcttactttaaagttggaaacgttcaacccttatctttttctgttccaacaggaaactttggtgatatttatgccggttactttgcaaaaaaactaggtcttccaattgataaactaatcgtagctacaaataaaaatgacatacttcacagagcaatatctggtggtgactatagtcaaaagaaagttgaggaaacaaatactccaagtatggatatacaaatagcaagtaattttgaaaggcttttatatgatgtaaaagattgtaactcagaaattacaaaaaatataatggctgaaataaaaaataatacttataaaattgataaaaatgatttagataaaattaaaaagaattttatatctgagacacttaatgaaaatgaaactgtcgaaatgataaaaaaaattaatgatgaacatcagatggtagttgatccgcatactgcggttgctattggtgctgtgagaaaattaggattggaaaaaaattgtgttgttttatcaactgcgcacccgagtaaatttccaaaagcaattgaagatgcaatcttaaaaaatgaaaatttaccagatagtcttaaatatgtttatgatagaaaagaa

SEQ ID NO: 286472 - DNA, 1222 bp, Unknown
  Bacterial polypeptide expressing nucleotide sequence isolated from the Sargasso Sea
cttgaaatatattagcacgcgggggattgccccggaattagattttgatgatgttctgatcacagggttagctcgagacggtggactttacgtgcccaaagagtggccaaaatttagcaagaatgaaattgaatccatgcgggaattatcgtacgcggacctatcaattcaagttatgaaaccatttattggcaatggtatctcaagtgatgattttgatgcgctggtccgtgatacctatgacaaatttggacacccagctgtagcaccgttgaagcagttagaaaataacctgtggctattagagttgtttcacggtccaacgcttgccttcaaagactacgccatgcagatccttggagggttatttgatgaagcacttcaaaggcgcaaaaagcgaacaacaatagttggtgcaacatcgggcgatacagggtcagctgctattgaagcttgcagaaatagggaagcgattgatatttttatactgtttcccaaaggaagggtctcgaatattcaacaaaggcagatgacaacggttgatgccttaaatgtccatgcgatcgctttggagggtacctttgatgactgccaagacatggttaaatcattgtttaatgatctggaatatcgagataaatataatctttcggcagttaattcaattaactgggcgagattattgccccagatcatctactatttttgggctgcgttagcattgggggtccccaatcgtaaagtaagtttctcggtaccttcaggaaactttggcaacgttttctctgcctacgcggcaaaagcactaggattaccaattgagaacttggtagttgcaactaacacaaacgatattctgtcgcgatttttcaattctggtaaaatggaaatcaagcaggtcagacctagtttgagtccaagtatggatattcaggtgtctagtaattttgagcggcttttatttgatttatgcgaacgtgatggttcactaacaaatgaaataatagaaaattttcgaaccaatggctattttgacattgaaacggagttaatcgcgagaagagcaaatattttctcagctcttagtgtggacgatgacacgaccttagctagaatcgaaaaaactcataaggatacaggtgagataatagatccacatagcgcggttggattagaagcagcgcatcacattagatcatctggattagtgtctcccggaaat

SEQ ID NO: 286473 - DNA, 1078 bp, Unknown
  Bacterial polypeptide expressing nucleotide sequence isolated from the Sargasso Sea
cttgactttacatggacccactttagcttttaaagacattgcaatgcaagtgattggaaatatgtatgatcacttgggagttgctaaagataaaactgtaaatattgttgttgccacatcaggagatactggatcggcagctattgctgcattaagtaatagaaaaaatataaatctttttgtactgcatccacataataagatttccaatattcaaagaaaaattatgacaacaataggtggagataatatttataatattgctattgagggatcatttgatgattgtcaaaaaattgtaaaagaactttttaatgaagatggttttagagcaaaaataaatatgtcaggtgtaaactctattaattgggcgagaattatttgtcagattgtttattatttttattctttctttaaattaaaaaataataaagttagcttctctgtgccaacagggaattttggagatatctatgctggatatgtagcaaaaaaaatgggtttaccaattaacaaacttatagtcgctacaaataaaaatgatattttacaaagagtaattaatacaggtgaatataaacctgatactgtaaaaccaaccatcactccgagcatggatattcaaattgccagcaattttgaaaggcttctttactatatattagatgaaaaagatagcagggtaggatcgctaatgaacgaactatcatcaaaaagtttatttaatttagaaaaaaaagaaatcgataaaataaaaaaagattttgaggcagtaaaagttacagatgaagagacagtaaatattattgatgaaatatataaagagcataagtttgtaattgatccccatactgctacaggggtaggagcagcaaaaaatttcaaaaatttaggtgatatagttgttcttggtacagctcatccttacaaattcagcgacactataaaaaaagctatagggaaaaatttaaactcacctgaccatttaaagttgaatatagataaaaaggaatcatttgatattattggtaattctaatttagaagttaaaaattatattttaggtaaaatacaatga

SEQ ID NO: 286474 - DNA, 1078 bp, Unknown
  Bacterial polypeptide expressing nucleotide sequence isolated from the Sargasso Sea
ttattagagttatttcatgggcctacattggcttttaaagatgtggcaatgcagtttattggtaacttgtatgaatattatttaagtaaaaatgaaaaaaaaattaatattgttgtagctacatcgggagatacaggtgcagctgccattgatgcaataaggggtaaatcaaacttaaatatttttgttttacatcctaataatagaatttcaccagtacaaagaaagttaatgacaacagttgaggatgaaaatgttttcaatattgcaattgacggaaattttgatgattgtcaaaatattgttaagcaaatgttttcagatttagatttttctaaatcaataaatatgtcaggggttaattctattaattgggcaagaatcattgcccaagctgtttattatttttatacttatttcaaacttgatagtgataaacctatatctttttcagttcctacaggaaactttggagatgtttttgcaggatatcttgcaaaaaaaatgggattaccgatagataaacttatcgttgcgactaatgaaaatgatattttgcatagagcaatctcaaatggtgattatatttctaaaaaagtaaaagaaacgctatctccaagtatggatatccaattggcaagtaactttgaaagacttatttattacgtaaataattctaattctgaaattacatcaaatataatgaaaaaaattaaacaaaatgaatacaaaattgataaatcaaacttaggtattatacaaaaagattttgtttcagaaagttgtaatgaaaatgaaactttagaaattataaagaaaaattttgagaaaaataatattattttagatccgcatactgcagttggagtaggtgctgcacacaagctatcatttaatgattgtgtagttttgtctactgctcatccatgcaaatttccagctgcaacagataatgctataaataaacatgaagaactacctaaagagcttcagtatgttcatgataaagaggaaaaatttcaactattaaaaaatgataaggaagcagttaaaaattttgttaaaagtaaattatgaa

SEQ ID NO: 286475 - DNA, 1309 bp, Unknown
  Bacterial polypeptide expressing nucleotide sequence isolated from the Sargasso Sea
gatgagatacattagcttaaatcataattcacagcctgtagacttcaaaacagctgtaatgaatggcttagctcctgataagggactatattttccagaagaagtaattagtcttccaaaaaaaattattgataatattaaatcaatagatgatcatgaattgtgttatgaagttattaaaggatatataggcgaagatttctctaaagacgaattaattcaaattattaaaaaaacaatagattttaagattccattaaataagattggagataatccaatatattctttagaattatttcatggtccaactcttgcttttaaagatattggtgcaaaatttttggcattatgtatggataaaataaaaaatgattttaactcaaaaggaatcaccgttttagttgccacatcaggagatacaggtggagctgttgcaaaagggtttgaaggtttagatggaattaatgtatgtattctttaccctaaagggagaataagtgaagttcaagaaaagcaaataactacaaatgataaaaatataattgcttttgaagttaatggggattttgatgattgccagaaaatggtaaaagatgcatttaatgatcttgaaataaaaagtaaaattacattgacatcagctaattcaataaatattgcaagatggctaccccaaatgttttattattttttagcaataaaaaaaatggataatgaaaatgataatattttttctgtcccaagtggaaattttggtaatatatgcgcaggtattctaagtaaagaaatagggttaaatataaagttatttctagcctctacaaatattaataaaacagttcctgaatatttagaatcaggtatatatagtcctgaaaaaacaaagccaacaatttcaaatgctatggatgtatcagacccaagcaattttgttagaattcaaaaaatatttaacaatgatatccaaaaaataaagaagatcataaaagcttttagctttaatgataatcaaacaagggaggctattaaagatgtttacaatagaaataattatttaatggatcctcatagtgctattggttatcttggtattaagagttatctgtcaaataattcaacaaattcaagtggcattttcttatcaactgctcatccaataaaatttaaagaacaagtagaaaagagcataggaaaggaaattcctatgccatcaagattgaagggtattatgggaaaaagtaagagaagtattgagattaaaagctataatgatttaaaagatcaactactaagtaaggttaattaa

SEQ ID NO: 286476 - DNA, 1029 bp, Unknown
  Bacterial polypeptide expressing nucleotide sequence isolated from the Sargasso Sea
aatgaagtatagaagcacaagaggaactaatgaggagacgttcaagaaagttctttttgctggtttagcagaggatggtggactttacgtaccaatgaattggcctcaaatagatgttaataaaatagataagaatattagctacaaagaccttacaaaattaatactttatccatttgttaaggattttatttctataattgaactggaaaacattattaatatttcctattcaaagcagttctcatcggaaaacctagtatcatttaaagatcttagtgataacgaaatactggttgaattatttaatggtcctacacttgctttcaaagattttgcaatgcaattacttattcctttatttgatcattttttagaaaaagaaaagaagaaaataaatttgattgtcgctacttctggcgatactggatctgcagcaattaatgcagtaaagcaaagtaagaacataagtatattttgtttatatcctagtaaaagaatttcagattttcaaagacgtcaaatgtcgactgtgacagaaagcaatatttttttgtgtgaaattgacggtacatttgatgactgtcaaaaaattgtaaaagatattcttaaggatactcagtacagttctgaaaataatatatctgcagtcaattcgattaattgggcgcgaatactaattcaatgtgtgtactattattatacatatataaattattttgatgcatctagaccaacagttaacttctctgttcctacaggtaattttggtgatatttatgcaggatatgtagcctataagatgggactaccaataaataaattaataattgctacaaatgaaaatgatatcttacacagatttataaatacaggaatctaccagacagaaagtgtaaaaaaaacaacaagcccaagtatggatatccaaatagcaagtaattttgaaagacttttgtttgatatcatgagtcagtcaaatgaaaaaacagcatcagcaatgtatttattgaagaaaagggaaaatta

SEQ ID NO: 286477 - DNA, 1164 bp, Unknown
  Bacterial polypeptide expressing nucleotide sequence isolated from the Sargasso Sea
gagaagaactgtcgtctttaattaataaatcttatgcaacatttagagaaaaagaggttgtaaaaatctcaaatataggagaactgaaattattagaattatttcacggtccaacattagcttttaaagatatttcaatgcaattcattgggaatttgtatgaatattatctaagtaaaaataaaaaaaaaataaacatagttgtagcaacttctggagatacaggtgcagcagctatagatgcaattaagggaaaatctaatttaaatatatttgttttacatccaaataataaaatttcttctgttcaaagaagaataatgactacagtggaagaaaaaaatgtttttaatattgcaatagatggaaattttgatgattgtcaaaatattgtaaaacaaatgttttccgacctagagttttctaaatctataaatatgtctggagtgaattcaataaattgggcaagaattattgctcaagcggtatattatttttattcatattttaaattaggtaaagaaactatttctttttccgttccaacaggaaacttcggagatgtttttgcaggctaccttgcaaagaaaatgggattgccaattgataaattaattgttgcaacaaatgaaaatgatattttacatagagccatttcaaaaggagattatgtttcaaaaaaagttaaagaaacattgtcaccaagtatggatattcaattagcaagtaattttgaaagattactttactatgtaaataattcagactctgaaaaaacagcagaaattatgaaaaaagttaaacaaaattcttatcaaattgaaaagaacgatttagatgtaattcaaaaggattttttatctgaaagttgtaatgaacaagaaactttagatatcattaaaaaaaattatgaagaaaataatataatattagatcctcatacagctgttggagtaggggctgcaaaaaaactatcttttaatgattgtgttgttttatcaactgcacatccatgtaaatttccagatgccacaaaaaatgcaataaataagcatgaaaaattacccgaagaacttcagcatgtgcttgataaaaaagaaaattttcaagtattaaaaaataatacagaagatgtaaaaaattttgttaaaagcaaagtttagt

SEQ ID NO: 286478 - DNA, 445 bp, Unknown
  Bacterial polypeptide expressing nucleotide sequence isolated from the Sargasso Sea
atgagatacgtaagtacaagagataattcaaaagaatacagttttgaagatgttttcatcaaaggtttagctgatgatggtggactttatgtgcccacttctctaaaaaaatttagtccagaagagttatctgaactcaaaaggctaaattataacgacttatctactgaaataataaatcaattttcatcagattttatttctaaaaatgatctttcatctttaattaaaaaatcatattcaacttttagagaaaaagatgttgttaaaatttcaaatattggtgatttgaagttattagagttatttcatggtcctacattggcttttaaagatattgcaatgcagtttattggaaatttgtatgagtattatttaagtaaaaatgataaaaaaattaatattgttgtggctacatcaggtgacacagggggcgccgctatag

SEQ ID NO: 286479 - DNA, 842 bp, Unknown
  Bacterial polypeptide expressing nucleotide sequence isolated from the Sargasso Sea
actgttctcagggttatcggtatcgattgagtcagggatccgagtgaaatacgtaagtacaagaggttcagcgccagaaaaaacttttagtgaagctttgttgacaggtcttgctgatgatggaggtctatacgttccagatgtatggccctcattagaaatttcaggtgatggtgattacttagaaacagcctttgaggtgatgagtctttttacagcagaaagccttgatcaaataacgttcaaaaaaattatagatgaggcctataagtccttcgatgtccaagaaattgttccgttgattgaattagatgagcagattttcttgatggaactatttcatggtcccactcttgctttcaaagacatagctctccaattggtcggagggctattcgattatgagttaaatagtcgtggtgagcatcttacgatcgtgggtgcaacttctggtgatacaggttctgcagcaattgaagcttgtaaaggtcgccagaatttagacatagttattcttcatccctcaaacagagtttcagaggtgcaacgaagacagatgactacagtcgattcttttaatgtgcataatgttgccattgagggaacttttgacgactgtcaagacttggttaaagccatgtttaacgatcttgaatatagaaagaaattgaaattaggtgcggtgaattcaattaactgggcaagagttatggctcagattgtttattacgtggtggcatccgaaagattagggtcgcatgataagccagtaattttttcagttcctactggaaattttggaaatgtattcgctggtcacgcagcgagaaattgtggtctta

SEQ ID NO: 286480 - DNA, 1384 bp, Unknown
  Bacterial polypeptide expressing nucleotide sequence isolated from the Sargasso Sea
atgaagtatataagcacaagagacaaatcaaaaaactttgaatttaaagatgtttttcttaaaggtcttgctgatgatggtggtcttttcatcccagagtctttacacaaatattcagagtctgaaataggtgattttaaaaaacttagttattcagatttagcaaaaaaaattatttatccatttatcggtaattttacttcacagggtgagttaagtaaaataatagaaaaatcctactcagttttcagaaaagataatgttattgatcttattaaagtgggcgaccgttccgtgcttgaattgtttcatggtccaaccttagcttttaaagatgttgcaatgcaactcctgggtaatttttatgaattttatttaaataatgaaaatgaaaagattaatattgtagttgccacatcaggagatactggtgcagctgccattgatgcaattaaagggaaaaaaaacttaaatatatttgttcttcatcctcataaccgtatttcacctgttcaaagaaaattaatgacaactggaaaagatgagaatgtatttaatattgctgtaaaaggtaatttcgatgattgtcaaaatttagttaaatccatgttttcagataaagaattttctaatcagataaacatgtctggtgttaattcaattaattgggcacgaattattgcgcaaagtgtatattatttttattgttattttttagccgaggatgacaatcagccaataaatttttcagtaccaactggaaattttggagatgtatatgcaggttatttggcgaagaagttgggtcttccaattaataaattaatagtagctacaaatcaaaacgatattttacatagagctatatctaaaggcaaatatgaagccgaacatgtctctgaaacaatttctccaagtatggacattcaaattgcaagtaattttgagagattaatttatgatttaaataatcatgatagttcgcaaactttagatgatatgaaaaatatcaaacagaatggcaaatatacaattgatgttgagaaattaaaaaaaattaatcaagattttttatctgcaagaataagtgagcaggaaacgcttgatgtgataaaaaatatctatgaaaaatttaatatggttttagatccacatacagctataggatatggagcttttgacaagcatgatttaaaaggaaacaatattgttcttgcaactgcacacccatgtaaatttccagatgcaatattaaaagctataaacttaaaatctgatttaccagatgaattaaagtttattttggatgagaaagaaaattatggtataattgaaaataatctcaaagaaattaaacaatatattttaggaaaaattaaatgaa

SEQ ID NO: 286481 - DNA, 1378 bp, Unknown
  Bacterial polypeptide expressing nucleotide sequence isolated from the Sargasso Sea
aatgaaatatatttctacaagaggaaaagcacccgagttaggttttgaagatgtacttttgtctggccttgctaatgatggtgggctttatattccaaaagaatggccaaaactagattttaagagtcttcctacaacctcttattctgaacaggctgcatatgttatctatccttttgttagtgaatttttgaaatatgaggagcttcagggcattacagataaggcttatagtcaatttccaaataaagaagcaataggattaaaagaagttgagaaaggtaattatttgctggaactctttcatggcccaactcttgcttttaaagactttgcaatgcttttattggcacaattttttgaaacttcattaagaagaaaaaatcaatcaataacgattttaggtgcaacttccggagatactggtagtgcagcaatagaagcttttaagaacaataagcactgtaccgtttttatattattcccgaaaggtagagtatctgaaattcaaagaaagcaaatgactacagcagaaagctcaactatttttccaattgaaatagacggaacttttgatgattgtcaaaacctagttaaaagtttgtttcaagatcttagattcaaagaggagatgagccttggagctattaattcaatcaattgggctcgtgtagctgcacagattgtttattatttttcaacatttcagaaacttaaagcagataaagtttcgttttctgtaccaacaggaaattttggagatgttttagcaggttggatcgctaagaaaatggggttaccgattgataaattaattgttgctacaaatgataatgatattttagatcgagcaatttcaaatggtgattatttccaagaaaaggtaaaagcgactacttctccaagtatggatatccaaatttcaagtaattttgaaagactgttatttgagtctttaaatagggatgcaaacaaattaaatattttatttaataaactgaaaaatgataatggctttaatatagatgactctgctctttcatatataagaaatgactttgaatctggaaaagcaaacgaaaatcaagttaaagatacaatttcaagaatttataattcttctgatatcatattagatcctcatactgctgtaggattttgtgcatcctcggatttatcagatgatgatactccaatggttaatttaggcactgcccatcctgcaaaattttctaaagcagtatttgaagcaattaaagttgaacctgaaattcctaatagattaaaaaaagtcatcaataaaaaagaaaaatttgttgaacttgaaaataatgaagaacttttaattaattttataagagagaacacaaatgtttaa

SEQ ID NO: 286482 - DNA, 499 bp, Unknown
  Bacterial polypeptide expressing nucleotide sequence isolated from the Sargasso Sea
tatgaaatatataagtactagaaataataaaaaagagtttgattttaaaacagtttttttaaaaggactagctgatgatggaggtctttttataccaaaatcacttaaaaaatatagcaatgaagatctccaagaacttaaaaaattaaattataatcaattatctatagaaattataaatcaattttcttctgactttattacaaaagatgaactttcctcattaattgacaaatcatattctacatttagagaaaaagaggtagttaaaatttcaaatattggaagtcttaaattactagaattatttcatggaccaactttagcttttaaagatattgcaatgcaatttattggaaatttgtatgagtactatttatctaaaaatgatgaaaaaattaatattgtggtcgcaacatccggagatactggtgcggcagcgatagatgctattaaaggaaaaaataacttaaatatatttgttttacatccaaaataa

SEQ ID NO: 286483 - DNA, 1006 bp, Unknown
  Bacterial polypeptide expressing nucleotide sequence isolated from the Sargasso Sea
atgagatacgtaagtacaagagacacatcaaaaacctttgaatttaaagacgttttcattaaaggtcttgcagatgatggaggtttatttattccaaaagcatttgtgaaatatggggaaaatgaaattagagatttaaaaaaactaagttattcagagctagcaaaaaaaattgtttatccatttattggtaattttatgtctgagtctgaaatgagtaaaattattgataaatcttactccacatttagaaaagataacgttgtagatttcataaagattggagacaaaacaatattagaattatttcatggtcctactctagcttttaaagatgttgccatgcaacttttaggtaacttttacgaatattacctaaacaatgaaaatcaaaaaattaatattgttgttgctacatctggagacactggtgctgcagcaattgatgcaattaaaggtaaaaaaaatgttaatatttttgtgcttcatccagacaatcgtgtttcaccagttcaaagaaaattaatgacaacaggtaaatatgaaaatgtatttaatatagctataaagggaaattttgatgattgccaaaacctggttaaatctatgtttgcagataagaagttttcaaatgatatcaaaatgtcaggggtaaactctattaattgggcgaggattattgctcaaagtgtttattatttttatagttatttactggttgaaaatacaggtgaaccaacaaatttttcagtaccaacaggaaattttggagatgtttatgctggatatttagccaaaaaaatgggcttgcctataaataaattaattgttgcaactaatcaaaacgacattttacatagagcaatatcaaaaggtagctatgaagcagaaaaggtttcagaaactatttctcctagtatggatattcaaatagctagtaattttgagagacttatattcgatcttaataatgaggatgataaacagacttcattagatatgaaaa

SEQ ID NO: 286484 - DNA, 509 bp, Unknown
  Bacterial polypeptide expressing nucleotide sequence isolated from the Sargasso Sea
aatgaggtatagaagcacaaggggcagcgattactttgggtttagagaaattttatttgctggcttagcaaatgatggaggcctatttattcctgaaaattggccaaatataaatcataaagatattaatcgaaatgtaagttacgaggacttaacagaaattattttatctccatttattggtgacgaaatagagtctgatcaattgaagaggattattaaagaagcgtattcaaataactttacagaaagtggctgtgtatcattcaaggagcttaatacaaacgaaataatcgtggagctattcaatggcccaactttagccttcaaagacttcgcaatgcaattacttatccctctttttgatcattttttagaaaaagaaaagaaaagaataaatcttatagtagcaacatcaggtgacacaggatcagccgctatcaacgctgtaaaaaaaagtaaaaacataaatattttctgtttatatccaaagggtaggatttcagaat

SEQ ID NO: 286485 - DNA, 1375 bp, Unknown
  Bacterial polypeptide expressing nucleotide sequence isolated from the Sargasso Sea
atggaatatattagcacacgaaataatcaaaaaatttttacttttaaggacatttttttaaaaggtttggcagatgatggaggtctatttattccaaaatcagtaaaaccatttagcaaagaggaaataaacaactttaaaaatcttagctacaatgatttggctgcagaaataattaatccatttattggagattttatgtctaaagatgatttaatctctctaatatcgaaatcatactcaaatttcagaactaaaaatgttgttaacataaataaattaggaaatttaaaagttttagaacttttccacggtccaacacttgctttcaaagatattgcaatgcaactgataggtaatttttatgagcatcatttaaattttgagcaaaaaaaaattaatattgtggtggcaacttcaggtgataccggtgcagctgcaatagacgccttaaaaggaaaaaaaaatttgaatgtttttgtatttcatccaaataatagaatttctccagtacagagaaaattaatgacaacttgcgaagcgagtaatgtatttaatattgcaatacagggaaactttgatgattgtcaaaatttagtgaaagcaatgtttaatgacgaaaagttttctaaatcaattaacatgtcaggtgtaaactcaatcaattgggcaagaattattgctcaagctgtctattatttttatgcttactttaaggttggaaatggtcagcctctatctttttctgttccaactggaaattttggagatatctatgccggttacttagcaaaaaaacttggtcttccaattgacaaactggttgttgctacaaataaaaatgacatactacatagagcaatatctggaggcgattattctcaaaagaaagttatggaaacaaatacaccaagcatggatattcagatagcaagtaattttgagaggctcttatatgatgtaaaagattgtaactcagaagttacaaaagatttaatgattaaaattaaaaacaatacttataaaattgataccgaggatttaggcaaaatacaaaagaattttatatctgaaatgcttgatgaaaatgaaactattgaaatgataaaaaaaattaatgatgaacatcaaacggtcgttgatccacatactgcagtggggataggtgccgtaaaaaaattaggaatagaaaaaaattgtgttgtattatcaactgctcacccatgtaaatttccaaaagcaatagaggatgcaatttctaagactgaaaatttaccaaatagtcttaaatacgttaatgagagaaaagaaaaatttgaacttctttcaaatgatattcaaaaagttaaaaaatatgtaatgaattcgatatgaa

SEQ ID NO: 286486 - DNA, 1122 bp, Unknown
  Bacterial polypeptide expressing nucleotide sequence isolated from the Sargasso Sea
aaaatctaaaaaaaaatgaaaaaattatagagttattcaatggtcctacacttgcatttaaagattttgcaatgcaattaataataccaatttttgattactatttgtccagtaaaaaagaaaagctcaatttaattgttgcaacctctggggatacagggtctgcagcaattaatgcagtacaaaaaagttcaaaaataaatatcttttgtctttttccaaaaaatcgaatttcagattttcaaaaaaagcaaatgaccacagttcatggaaataatatatttccgattgaaattgatggaacatttgacgactgtcaaaacattgtaaagtcaattctgattgataaaagcttttcaaatgagttctctatagcagctgtaaattctataaactggtcccgcgttatggcacaaattatttattatttttattcattaattaaaaatgatatttctgaaaaagatttaattaatttttcagtcccaactggtaattttggagatatatacgcaggttatgtggctataaaaatgggattaccagccaataaattagtcattgcaactaatgaaaatgatatcttagatagatttattaagtctggaaattattcaataaacgaagtagcaaaaacttctagcccaagtatggatattgcaatagcgagtaattttgagcgcttgctctttgaactaaataataaatcagcagagaagacatcaaaatatatggatgacttaagaacaaataatggatttgatgtttctgaagatcaagtaaatttagtaaaaaaattatttgcttctaagcgtataaatcaagatgaggtagaaaatctaatcaaaaatacatatgacgaatttaattatgttatagacccacataccgctattggtttaggtgcttcaagagaaataaataatgaagatgaatataattttattttaggaacagctcacccactgaaattttcgaaaactgtagaaaaagctatagaaaaaaatatatacagcagtgataaaactaatggggactttaaagaagaagagaagttttttagttttgaaaattcagagagcaaagtaagggaaataattaaaaataatgttaataaataaa

SEQ ID NO: 286487 - DNA, 1306 bp, Unknown
  Bacterial polypeptide expressing nucleotide sequence isolated from the Sargasso Sea
atgaactattttagcactagagataaatctttagaatttagctttaaagatattttcttaagaggacttgcaccaggcggagggttatttttgcctgctgaaatcaagaagtatagtcaagaagaacttaataatttaagtcaactaaattataacgaacttgctacagaaattatctttaatttctgttcaggtgaaattaaaaaggaagaacttagctcactgatacaaaaatcttatagtagttttaaagataaagaagtcgtaaatataaaaaaaattggaaatataaatcttctcgaactttatcatggacccactttagcttttaaagacattgcaatgcaggtaattggcaatatgtatgaccatttagaagtcgctaaagataaaactgtaaatgtcatagttgctacatcaggagatactggttcagcggctatagctgctttaagcaatagaaaaaatataaatctttttgtactacatccgcataataagatttcaaatattcaaagaaaaataatgacaacaattggtggagctaatatttataatatagctattgagggttcatttgatgattgtcaaaaaattgtaaaagagctttttaatgaaaatagttttagatcaaaaataaatatgtcaggcgtaaattctatcaattgggcgagaattgtttgtcaaattgtttattatttttattctttctttagattaaaaaaaaacaatataagcttttcagtaccaactggtaattttggagatatctatgctggatacgttgcaaaaaaaatgggtttaccaattaataaacttatagtcgctacaaataaaaatgatattttacaaagagttattaatacaggtgaatataaacctgataaagtgaaagcaaccattacaccaagtatggatatacaagttgccagtaattttgagaggctgctttattatatattagatgaaagcgatagtaaggtagggtcattaatgaatgatctatcatcaaaaagtttattcaatttagaaaaaaaagaaatcgataaaattaaaaaggattttgaagcagtaaaagttacagatgaagagacagtatctataattaatgaaatttataaagagcatcaatttataattgatcctcatactgctactggagtaggagcagcaaaaagttttaaaaatttaggagaaatagtcgttcttggtactgctcatccttacaagtttaacgatactattaaaaaagctataggaaaaaaattagattcacctaagcatttaaagttgaatgtagataaaa

SEQ ID NO: 286488 - DNA, 673 bp, Unknown
  Bacterial polypeptide expressing nucleotide sequence isolated from the Sargasso Sea
tatgaaatatatttctacaagaggaaaggctcccgagttaggttttgaagatgttcttttatctggacttgcaaatgatggtggtctttatattccaaaagaatggccaaagttagactacaaagagctacctacaacatcgtattctgaacaggcagcatatgttatctatccttttgttaaaggttttttaagttatgaagaattaaacgacattgctagtcaggcttataatcattttccttcgaaagaagcaattaggttgaaagaagttgaaaaaggaaactatttattagaactttttcatggaccaacccttgcttttaaagattttgccatgcttttattagctcaattttttgaaacttctttaagtaagaaaaataaatcaataactatattaggcgctacttcaggagatactggtagtgccgcgattgaagcttttaaaaataataaacattgtactgttttcatattatttccaaaaggaagagtatctgaaatacaaagaaaacaaatgacaactgttgatagcacaagcatttatccaattgaaattgacggaacttttgatgattgtcaaaaccttgtgaaacatctattccaaaatcttgaattcaaagaagaggtgaggcttggtgcaattaattcaataaattgggcgcgcgta

SEQ ID NO: 286489 - DNA, 682 bp, Unknown
  Bacterial polypeptide expressing nucleotide sequence isolated from the Sargasso Sea
gatggaatatataagcactagaaataattcagatcatttttcatttaaaaacgtatttctgaaaggtttagctgatgatggaggtctttttgtaccaaaatcaatcaaaccatttagtaaagatgaattaaacaaactaagtagtcttaattacaatgaattagcagccgaaataattttcccatttattggtgattttatgactaaggaagagttaatttctatagtatcaaaatcttattcaaattttagagcagaagatgttgtaaaaatctctaatttaggaaatttaaaaatcttagaactctatcatggcccaacacttgcttttaaagatattgcaatgcaattgataggaaatttttatcaatatcatttaggaaatgagcaagaaaaaattaatattattgtagcaacttcaggagatacaggtgcagctgctattgatgctttaaaaggcaagaagaatttaaatgtttttgtattacatccaaataacagaatttcaccagtgcaaagaagactgatgacaatccatgaagaaaaaaatgttttcaatattgctattgagggtaactttgatgactgtcaaaatttagttaaagccatgtttaatgatgaaaaattttctagttcaataaatatgtcaggcgttaattcaattaattgggcaagaattgtt

SEQ ID NO: 286490 - DNA, 451 bp, Unknown
  Bacterial polypeptide expressing nucleotide sequence isolated from the Sargasso Sea
gatgagatacattagcttaaatcataattcacagcctgtagacttcaagacagctgtaatgaatggcttggctcctgataagggactatattttccacaagaaataattagtcttccaaaaaaaattactgataatattaaatcaatagatgatcatgaattgtgttatgaagttattaaagaatatataggggatgatttctctaaagacgaattaaatcaaattattgaaaaaacaatagattttaagattccattaaataagattggagataatccaatatattctttagaattatttcatggtccaactcttgcttttaaagatattggtgcaaaatttttggcattatgtatggataaaataaaaaatgattttaactcaaaaggaatcaccgttttagttgccacatcaggagatacaggtggagctgttgcaaaaagggtttga

SEQ ID NO: 286491 - DNA, 1375 bp, Unknown
  Bacterial polypeptide expressing nucleotide sequence isolated from the Sargasso Sea
atgaactatattagtacaagaaataatcagaaaaactttacttttaaagatgttttccttaaaggtttggcagatgatggggggctatttgtgccacgactaatcaaaccatttaaaaaagaggaattagataattttaaaaaccttagttacaatgatttagcgaccgaaataatttatccatttataggagatttcatgtctaaagatgacctaatctctttgatttcaaaatcatactcaaatttcagatgtgatgatgttgtaaaaatttcagatctgggaaatttaaaagttttagagctatttcatggccccactcttgcttttaaagatatcgcaatgcaattaataggtaatttttatcaatatcatttaggacgtgatcaaaaaaaaataaatataattgttgcaacttcaggtgatacgggtgcagctgccatagacgctttaaaaggaaaaaataatttaaatgtttttgtcttacaccctaataataaaatttctccggtacaaagaagactaatgacaatacatgaagagagcaatgtatttaatattgcggtggagggtaattttgatgattgccaaaatttagttaaagcaatgtttaatgacgaaaaattttctaaagcaattaatatgtcgggtgtaaattcgattaattgggcaagaattgttgctcaatcggtttattacttttatgcttactttaaagttggaaacggccaaccactttctttttctgttccaacaggaaactttggtgatatttacgctggctacttagcaaaaaaattaggtcttccaatcaataaattaatagtagctactaataaaaatgacatactgcacagggccatatccggtggtgattatagtcaaaagaaagtagaggaaacaaatactccaagtatggatatacaaatagcaagtaatttcgaaaggcttttatacgacataaaagattgtaactcagaagttacaaaagatgtaatggctgaaataaaaaataatacttataaaattgataaaaatgatttagataaaattaaaaggaattttatatctgaaatgcttaatgaaaacgaaactgttgaaatgataaaaactatcaatgacgaacatcagatggtagtggatccccatactgcagtgggcattggtgctgttagaaaattaggattggaaaaaaattgtgttgtattatcaactgcacacccatgtaaatttccaaaagcaatagaagatgcaatttcaaaaactgaaaatttaccagaaagtcttaaatatgttaatgacagaaaagaaaaatttgaacttctttcaaatgatattgaaaaagttaaaaaatatgtaatgaattcgatatgaa

SEQ ID NO: 286492 - DNA, 1233 bp, Unknown
  Bacterial polypeptide expressing nucleotide sequence isolated from the Sargasso Sea
catgagatacgtaagtacaagagataattctaaagaatacagttttgaagatgttttcataaaaggtttagctgatgatggaggactttatgtgcctacatctttaaaaaaattcagctcagatgaattgtcagagcttaaaaatcttaattataatgatttatctactgagataataaatcaattttcatcagactttatttcaaaagatgatctttcatcattaattaaaaaatcttattcaacttttagagaaaaagaagttgttaaaatatcaaacattggagatctcaaattattagagttatttcatggtcctacattagcttttaaagatgtggcaatgcagtttattggtaacttgtatgaatattatttaaataaaaatgataaaaaaattaatattgttgtggcaacatctggtgatacaggagctgccgctatagatgcaattaaaggtaaatcaaacttaaatatttttgtcttacatcctaataatagaatttcaccagtacaaagaaagttaatgacaacagttgaggatgaaaatgttttcaatattgcaattgacggaaattttgatgattgccaaaatatagtaaagcaaatgttttcagatcttgatttttctaaatcaataaatatgtcaggggttaattctattaattgggcaagaataattgcgcaagctgtatattatttttatacttattttaaacttaatgaagataagcctatttcattttcagttccaacaggaaactttggagacgtttttgcaggttaccttgcaaaacaaatgggattaccaataaataaactaatcgttgcaacaaatgaaaacgatattttgtatcgagcaatctcaaatggtgactatgtttcaaaaaaagtaaaagagacattgtccccaagtatggacattcaattagcaagtaattttgaaagattaatttattatgtaaatagttctaattcagaaattacatcagatataatgaaaaaaattaagcaaaatgaataccaaattgacaagtcaaatttggatatcattcaaaaagattttgtttcagaaagttgtaatgaaaatgaaactttagaaattataaagaaaatttttgagaaaaataacattattttagatccgcatactgcagttggagtaggtgctgcacaaaagttatcatttaatgattgtgtagttttatctacagcccatcctgtaaattccag

SEQ ID NO: 286493 - DNA, 1369 bp, Unknown
  Bacterial polypeptide expressing nucleotide sequence isolated from the Sargasso Sea
atgaaatatataagcacaagaaacaatgaaaaagaatacagttttggagaagttttccttaaaggtctagcagatgatggaggtctttatgttccaaaatcattaaaaaaatatagttcagcagatttattaaagctcaaaaacttaaattataatgagctctctactgaaattataagccaattttcaggagatttcatatcaagagaagaactttcacttttaatcaaaaaatcatattcaaaatttagagaaaaagaagtggttaaaatttcaaatgttggagagactaaattattagaattatttcacggaccaacattagcttttaaagacattgcaatgcagttcattgggaatttgtatgaatattatctaaaaaaaaacgataaaaaaataaacatagtggttgcaacttctggggacactggcgcagcagccattgacgcaattaaaggaaaatcaaatttaaatatctttgtcttacatccaaataatagaatttcatctgttcaaagaaaaataatgactactgttcaagacaacaatgttttcaatattgcaattgatgggaactttgatgactgccagaacatagttaaaagtatgttttctgacttggaattttcaaaatctataaatatgtctggagtaaactcaataaattgggcgagaataattgctcaagcggtatattattttttctcgtattttaaattgggcaaagaaataatttcattttctgttccaacaggaaactttggtgatgtttttgcaggttatatagcaaagaaaatgggattaccaatcgataaattaattgttgcaacaaacgaaaatgatattttgcatagagcaatttcaaaaggagattatgtttcaaaagaagttaaagaaacattctcaccaagtatggatattcaattggcaagtaactttgaaagattaatttattatgtaaataattctgattctgaaaaaacagcagaaattatgaaacaagttaagcaaaattcttatcaaattgaaaagaacaatttaaatataattcaaaaggattttttatctgaaagttgtaatgaacaagaaactttagatattataaaaaaaaattatgaagaaaataatatcatattggatcctcatacagctgtaggagtaggggctgtaaaaaaactatcttttaatgattgtttagttttatcaactgcacatccttgtaaattcccagatgctataagcaatgccataaataagcatgaaaaattaccaaaagaacttcagcacgtactagataaagatgagaattttcaagtattaaaaaataatacagaagatgtaaaaaaatttattaaaagcaaaatttaga

SEQ ID NO: 286494 - DNA, 1297 bp, Unknown
  Bacterial polypeptide expressing nucleotide sequence isolated from the Sargasso Sea
tatgctttttcatagcactagaggtaaagataaagataaaacttttgaacaagtcttaatgcaaggccttgcaaaagatggcggtttatacatgccaaataactggcctagagtagatatacataagttaaaagattttgataattttattgatgttgctaaagaaatagtccctttatttactgattcatcttttcatagggctgaggttgagacgctgcttgatgacacttggcatgactttgataaaaaagacttgattgatatttttgaagttgatgattcaatttcaatattagaattgtttcatggaccgacatctgcttttaaagattttggattgcaattagctgctgctttttttaataaaactttgcaaatgcaaaataaaacagctgtagtttttggagctacatctggagatactggttcagctgcaatagatgcatgtaaagaatttgagttaataaaaagctttatattaatacctgaaggcaacatgtcagaaattcaaagaaagcaaatgacaaccgttaacaaggaaaatgttttccctattctagcaagtggaaccttcgatgattgtcaggatatagttaagaagggttttcgtgagagaacttttttaagagatgatcaatacttattggctgttaattctataaattgggtaagaatcataggtcaaatatgctattacttttatgcctcattaaaaatgaataaattatcagaaccattaaatttttctgttcctacaggaaattttggaaatgtttttgcatgttacgctgcatcaaaaatgggcatgccattatcaaaaatagttgtggctgttaattctaatgacattcttgatagattttttagaaacaatgattattctaagcttaaggttaatgaaactatatcaccaagcatggatataagtgtagcaagtaattttgaaaggttgctatatgatttttatcttgattgtaattcagacttatgctctaggctatattcaaaatttccagaagaaagcatacaaattaataagtctatttggaataaaacatctgatttatttataagttacagttctgacgatgcctctacttataaatgtatgcagttttattataaaaattttaattatattatggaccctcatactgcagtcgcggcagatgcagttaaaagattcaaagaaaaattgcaaggaaataccataatactatctacggcacatccggcaaagtttccattagctcttgagaatgctggtatattaataaaaaatctaccaaaaaaa

SEQ ID NO: 286495 - DNA, 1390 bp, Unknown
  Bacterial polypeptide expressing nucleotide sequence isolated from the Sargasso Sea
atgctttataacagtacaagaggagaaagcccaatagttcctttttcagaggtgctattgggaggactggccccagacggaggcctatatatgcctcaaacattccctaaattctctattgaagaaattgaaagttggtcaaatcttcctttttaccaattagctgcaaaaattctgcatccctatgtagaaagtgaaatagacgaaagtagttttttaaaactattagaggaggcgtacacatcttttgatgaagaagatgttgttaagttaaaggagattgaagagaatcactgggtcttagaattatttcatggtcccacattagctttcaaggatgttgctatgcagctattgggagttttacttaatcactttgcaaaagagaagggtgaaaaaatagttgttcttggagctacatctggagataccggagcagcagcaatatctgcttgcgcgagacatgaaaatgttgaagtttacattctttatccgcatgaaaaggtaactgagtttcaaaggaaacaaatgacaacaactcaatctcaaaatgtttacccactagcgatagaaactgatttcgatggctgccaaaacatagttaaaaaaatgtttcttgatgaggatttcctacatactaaagtaaggtttattgctgcaaattctataaattgggcaaggtgtatgactcaatcagtatacttcttttggtcttacttaagactaaaaggaaaaggagacctgaccttttcaataccttcgggtaattttggtcatgcatatgctggctggactgcaaaagaaatgggattgccaataaaaaggcttatcatagcaaccaatgaaaacgatgttttacatcaaactttttctaacaacctctatgccaaaacaaatgttgttcagacccttgctcctagtatggatatttctgttgccagtaattttgaaagactgctctataatttatatgataacgattcgtcattacttgcaaaaaatatgcgcgcctttccggaaaaaagtattgatattcctgatagtaagatagatgcagtttctaatttttttaaaagtcattgcagcaatgatcaagagataatcaagcaaattatcaatacacatcaaaagatcggttacttaattgatccacatacagccactggggttagggcgagtaatgaaatatcaccttcaaatgaacccgtcataacaatgggaactgctcatcctgctaaattttcagaggctattgagcaagccattccagactatcattcatctcttcctaagaaagttgaaaaaacatttcaacaggaagagcaattcaatattttggaagaaaattacgaagagattaaaagttttgttctctctaaagcactttaat

SEQ ID NO: 286496 - DNA, 987 bp, Unknown
  Bacterial polypeptide expressing nucleotide sequence isolated from the Sargasso Sea
aatgaattatattagtacaagagataatcagaaaaactttagttttaaagatgttttcctcaaaggtttggcagatgatgggggactatttgttcctaaatcaattaaaccctttaaagaggaagaattagataacttaaaaaaccttagttacaatcatttagcggctgaaataatttatccatttataggagatttcatgtctaaagatgatctaatttctttgatttcaaaatcatattcaaatttcagatctgacgatgttgtaaaaatatcagttctaggagatttaaaagtattagaattgtttcacggacctacacttgcttttaaagatatcgcaatgcaactaataggtaatttttatcaatatcatttaggccgtgatcaaaaaaaaattaatataattgttgcaacttcaggcgatacgggtgctgctgccatagacgctttaaagggaaaaaataatttaaatgtttttgtgctacaccctaacaataaaatttccccagtgcaaagaagactaatgacaatacatgaggagagtaatgtatttaacattgcggtggagggtaattttgacgattgccaaaatttagtaaaagcaatgtttaatgacgaaaaattttctaaagcaattaatatgtcgggtgtaaattcaattaattgggcaagaattattgctcaatcggtgtattatttttacgcttactttaaaataggaagcggccaaccactatctttttctgttccaacaggaaactttggtgatatttacgctggctatttagcaaaaaaactaggtcttccaattgataaactaatcgtagctacaaataaaaatgacatactgcacagagctatatctggtggcgattatagtcaaaagaaagttgaggaaacaaatactccaagtatggatatacaaatagcaagtaattttgaaaggcttttatacgatgtaaaagattgtaactcagaagtaca

SEQ ID NO: 286497 - DNA, 1387 bp, Unknown
  Bacterial polypeptide expressing nucleotide sequence isolated from the Sargasso Sea
gatgaaatatataagtacaagaaatagttcaaaaagtttaccttttgaaagtgtctttattaaaggccttgctgatgatggtggactttttttaccagagaaagatttcaaatttgatgaaaaagatttgtcaaaattacaaagcatgagttatcatgagctcgccactgaaatcgttcacaagtttactggagatttcattgaaaaagataatttatacaaattagttaaaaaatcttactcgtctttcagatcagaagaagttgttaaattaagaaaagttggaaatttcaacatattagaattatttcatggcccaacattggcttttaaagatatcgccatgcaattaattggtaatttttatgaatattatctatcaaaaaatgaaaactttataaatataatagttgctacatctggtgatactggagcagctgcaatagacgcaataaaaggaaaaaaaaatcttaatatttttgttcttcatccacataatagaatttcttcagttcaaagaagaataatgtgcactgttaaagaaaaaaatgtttttaatatagccataaaaggtaattttgatgattgtcaaaaccttgttaaagcaatgtttgttgaccaaaatttctctaaaaagattaatatgtctggtgttaattcaataaattgggctaggatagtagcgcagacggtttattattttttttgtttcttttcattaaaatccaaaaagttaaatttttctgttcccacaggaaattttggagacatttatgcaggatatctcgcaaaaaaaatgggtctaccgatagataaattaattgttgcaactaatcagaacgatatattgcacagagctatttctaaaggcgattacacatcaaaaaaagtttctgaaactttttcacctagcatggatatacaacttgctagtaattttgagagacttatatttgagattcaaggatgtaattcagacaaaacaaaaaatataatggataagataaaagagaataattacaaattagatgaaacttctttaaataaaattaataaagattttttatccgaaaaactcagcgaggatgaaacaattaatgaaataaaggaagtatttaaaaatcataatatagttttagatccacatacagctataggttatggagttgcaaaaaaacttaaacaagacaatagctgtataatcttatcgactgcacatcctagtaaatttccagaagctattaaaaatgcactagggaaaaatgaagaacttcccccagaattaagaaatgtattaaaagagaaagaaaaatttgagattttagaaaatagcttagatcaagtaaaaaattatattttaaaaaaaatagatgaaattaaaaattaa

SEQ ID NO: 286498 - DNA, 1273 bp, Unknown
  Bacterial polypeptide expressing nucleotide sequence isolated from the Sargasso Sea
tctggagaaagaattttcaaatttaaaagcgttgtcatatgtcgacttggcaacagagataatatacaaatttataggagatttttgttcaaaggaaaagcttcacgaaattgttaaaaaatcttattcatcatttagtgaaaaggaagtggtaaaaattagaaaagttgaagattttcagatattagaactttttcatggtcccacgctagcttttaaagacgtagcaatgcaacttattggtaatttctacgaatattacttaagcaaaactagtgaaaaaataaatattattgtagcaacctcaggggatacaggggctgccgcgattgatgctgttaaaggaaaaaaaaatataaatatttttgttttacatcctaataaccgaatatcgccagttcaaagaatgttaatgactacaaatccatcaaaaaatgtttttaacattgcagttgagggtaactttgatgattgtcaaaaactagttaaacaaatgttttctgatcatgagttttccaaatctattaatatgtctggtgttaattcaattaattgggctagaatagttgcgcaatcagtctattattttttttgttattttaaattagataaaaaagaaaaggtttcattttctgttcctactggaaattttggagatgtttatgctggatatttagcaaaaaaaatgggtctaccaattgataaattattggtagcaacaaatgaaaacgatattcttcacagggcaatatcaaaaggtgattataaaaccaacaaagttcaagagacaatttctccaagtatggatattcaggtcgcgagtaattttgagagattgttatttgatatctataataatgactcaaaaaaagttattgaaactatgaatgatattaaaaataataaatttaatttagaccaattttcattaaaaaaaatacaaaaagattttatttctggaagtcttaatgaaaaagaaatcctagaaacaattaagcatatatataaaaataatagaattgtaattgatcctcatacagctataggagttggagcagttaaaaaatataatgagaaaaattacattgttttagctacggcacatccatgtaaattccctaatgctattttaaaggccattgataaaaaagaagaattaccaaatcatctcaaaggaatattaaatcaaaaagaagaatatgaggtatttcaaaataatattgagaatttgaaatcttatataaaaaaaattgtaaatgaaattaaagattaa

SEQ ID NO: 286499 - DNA, 1006 bp, Unknown
  Bacterial polypeptide expressing nucleotide sequence isolated from the Sargasso Sea
atgagatacgtaagtacaagagacacatcaaaaaactttgaatttaaagacgttttcattaaaggtcttgccgatgatgggggcttatttattccagaagcagtagtgaaatataatgaaaatgaaatcagagatttaaaaaaacttagttattcagagttagctaaaaaaattgtttatccatttattggtaattttatgtctgaggctgaattaagtaatattattgataaatcttactctacatttagaaaagataacgttgtagatttaatgaagcttggaaacaaaacagtattggagttatttcatggtcctactttagcttttaaagatgttgccatgcaacttttaggtaacttttacgaatattatctaaataatgaaaatcgaaaaattaatattgttgttgccacatctggagacactggtgctgcagcaattgatgcaattaaaggtaaaaaaaatgttaatatttttgttcttcatccggataatcgtgtttcaccagtgcaaagaaaattaatgacaacaggtaaaaatgaaaatgtatttaatatagctataaaaggaaatttcgatgattgccaaaacctagttaaatctatgtttgcagataagcagttttcaaatgatatcaaaatgtcaggggtaaattctattaattgggcaaggattattgctcaaagtgtttattatttttatagttatttattagttgaaaattctggtgaaccaacaaatttttcagtaccaacaggaaattttggagatgtttatgctggatatttagctaaaaaaatgggcttgcctataaataaattaattgttgcaactaatcaaaacgacattttacatagagcaatatcaaaaggtagttatgaggcggaaaaggtttcagaaactatttctcctagtatggatattcaaatagctagtaattttgagagacttatattcgacctaaataataaggacgataaacagacttcattagatatgaaaa

SEQ ID NO: 286500 - DNA, 1123 bp, Unknown
  Bacterial polypeptide expressing nucleotide sequence isolated from the Sargasso Sea
aatgaattatattagtacaagaaataatcagaaaaattttacttttaaagatgttttccttaaaggtttggcagatgatggaggtcttttcgttccaaaatcaattaaacaatttaaaaaagaggaattaaataatctaaaaaacctcagttacaatgatttagctgctgaaataatttatccgtttataggagattttatgtctaaagatgacctaatctcgatgatttcaaaatcgtactcaaatttcagatctaatgatgttgtaaaaatctctgatctaggagatctaaaagttttagaactatttcacggtccaacacttgcttttaaagatatcgctatgcaactaataggtaatttttatcaatatcatttaggacgtgatcaaaaaaaaattaatataatagtagcaacttcaggtgacactggagcagctgcgatagatgctttaaaaggaaaaagcaatttaaatgtttttgtattgcacccaaataataaaatttcaccagtacaaagaagactaatgacaatacatgaagagagtaacgtatttaatattgcagttgagggtaattttgatgattgtcaaaatttagtaaaagcaatgttcaatgacgaaaagttttctaaagcaattaatatgtcaggtgtaaattcaattaattgggcaagaattattgctcaatcggtgtattatttttacgcttattttaaagttggaaatggtcaacctttatctttttctgttccaacaggtaactttggtgatatttatgctggttacttagcaaaaaaactaggtcttccaattgataaactaattgtggctacaaataaaaatgacatacttcatagagcaatatcgggcggcgactatactcaaaagaaagtagaggaaacaaatactccaagcatggatatacaaatagcaagtaatttcgaaaggcttctatatgacataaaagatagtaactccgaagttacaaaagatgtaatggctaaaataagaaataatacttataaaattgataaaagtgatttagataaaattaaaaagaattttatatctgagatgcttgatgaaaaagagactgtagaaatgataaagataattaataat

SEQ ID NO: 286501 - DNA, 446 bp, Unknown
  Bacterial polypeptide expressing nucleotide sequence isolated from the Sargasso Sea
gatgaaatatataagcacaagaagtaaagaaaaagaatacagttttggtgaagtttttttaaaaggtcttgctgatgatggaggtctttatgtaccaaaatcaataaaaaaaaatagtaaagaagaattattaaagctcaaaaatttaaattataatgaattatctgctgagataataagccaattttcaggagattttatttcaagagaagaactttcatctttaattaaaaaatcatattcaacatttagagaaaaagaggttgtgaaaatctcaaatgtcggagaaataaagttattagaattatttcacgggccaacattggcatttaaagatatcgcaatgcaatttattgggaatttgtatgaatattatttaaagaaaaatgacaaaaaaatgaacatagtagttgcaacttctggagatactggtgcggcagcaatag

SEQ ID NO: 286502 - DNA, 1369 bp, Unknown
  Bacterial polypeptide expressing nucleotide sequence isolated from the Sargasso Sea
atgaaatacgtaagtacaagaggtgaagctaaagaagcttcttttgaggatattttagcttcaggtacagcttctgacggagggttatttgttccatctgtaattcctaagcttgaaagcacagtcatagatgatatgaaaaacttatcctatatagaaatagctgagattgttatcagtccctttatcggcgattttctaaaaaaagatgaattgcaaaagataatttcagatgcatataaaaattttgaaaccaatgatgtagttcaaattaaagattacgaatttgggcatgttttagaattatttcatggcccaacactggcatttaaagatgttgccatgcaacttttaggcaggtttctaaacgcagcctcagagaagttaggaaaaaaaatagttatcttaggagcaacaagtggcgatactggatctgcagccattgcagcatgtcaaaactttgaaaacttacattcctttatattctttcctgatggaaaaatatctgaagtacaacgaaaacaaatgacaacctggaataaagataatgtcgaagcggtttctgtaactggaaatttcgatgactgccaagactttgtaaaaaatatgtttgcggacacctcagaaaataaagatattctctttgcgtccattaactcaataaattggactagaattcttgctcaaactgtatatttcttttatttaagttcaagaattgataaaaaagagattaatgtttcaatcccatctggaaactttggtcatgcatacgctggctggtatgcaaaaaagatgggtcttaatcttaataagataaacattgccactaatagaaataatgttcttgatgtctttttcaaaaataatatttatagaaaactcaatacactggaatcattggctccaagtatggatatttcgtctgctagtaattttgagagattggtgtttgattcgttgggtggaaatggaatcgagacacaaaaattaatgaaacaattcaagaaagatggcttttctatcgccaataagctttataaagatctctgtaatgtttttgaaagtcattcggttgctgatgaagaaattctggaggaaattgaacttctttatgaaatgacaggggatatttttgatccacacactgcaattgggattaaaaatattcgtgaaggaggcgctgaaaattatgtctgttttgcgacagctcacccttcaaagtttattgataccataaaaaaggttatacctgatttttccgatactcctaaacgactacaaaaattcttagattcagaagaaaaatatgaaaccatgaattacaatttctcagatttgaaagaattcatatttgataagatttaaa

SEQ ID NO: 286503 - DNA, 497 bp, Unknown
  Bacterial polypeptide expressing nucleotide sequence isolated from the Sargasso Sea
tataaagcgttttatcgcagcaactaacttaaacgacacggtacctcgctaccttaaaaccggcgagtgggaacctaaggcgacggttgcgaccatgtctaacgcaatggatgtgagtcagcctaataactggccgcgaatagaggcgcttattgagcgtggctatatcgacaaagcgtgtcttaaaggtgagatggttgacgaagaatatacgcagcttgctatgcgtcaattagcgcaacaaggctataccagcgagccacatgccgcgattgcctatcgcgcagtaagtcacgacttagaagacggcgaaattggtttgttcttaggaacagcgcacccggctaagttcagagaaaccgttgaaaacgtgctaggtaatccaatcagcttaccgaaagcgttggccgatgtagcaggcgaagacagcttagcggtagacttgccagcgtcttatgatgcacttaagcagcatatgatggatttgcttaagtaat

SEQ ID NO: 286504 - DNA, 1315 bp, Unknown
  Bacterial polypeptide expressing nucleotide sequence isolated from the Sargasso Sea
aatgaattacattagtacaagaaataatcaaaaaaacttttcttttaaagatgttttcctcaaaggattagcggacgatggaggactttttgttcctaaatcaattaaacaattccaaaagggagaattagataatctaaaaaatcttagttacaatgatttagctgctgaaataatttatccatttataggagatttcatgtctaaagatgatctaatgtctatgatttcaaaatcatattcaaattttagatctgacgatgttgttaaaatttcaagtctcggagatttaaaagtattagaactatttcatggacccacacttgcttttaaagatatcgcaatgcaattgattggtaatttttatcaataccatttagaccgtgatcaaaaaaaaattaatataatagtagcaacctcaggtgatacgggtgcagctgccatagacgctttgaagggaaaaaataatttaaatgtttttgtattacaccccaataataaaatttcacctgtacaaagaaggttaatgacaatacatgaggagaataacgtatttaatattgcagtagagggcaactttgatgactgtcaaaatctagtaaaagcaatgttcaatgacgaaaaattttctaaatcaattaatatgtctggggtaaattcaattaattgggcaagaattattgctcaatcagtttattatttttacgctttctttaaagttggaaatggtcagcctttatccttttctgttccaacaggaaactttggtgatatttatgctggatatttagcaaaaaaattaggccttccaattgataagctaatcgtagctacaaatagaaatgacatacttcatagagccatatcaggcggcgactatagtcaaaagaaagttgaggaaacaaatactccaagtatggatatacaaatagcaagtaattttgagaggcttttatatgatgtaaaagattgtaactcagaagttacaaaaggtgtaatggctgaaataaaaaataatacctataaaattgataaaaacgatttagataaaatcaaaaagaattttgtatctgagatgcttgatgaaaacgaaactgttaaaatgataaaaactataaatgatgaacatcagatggtagttgatccgcatactgcagtaggtattggtgctgttagaaaattagggttggaaaaaaattgcgttgtattatcaactgcacacccgtgtaaatttccaaaggcaatagaagatgcaatatcaaaaactgaaaatttaccagaaagtcttaaatatgtttatgacagaaaagaaaaa

SEQ ID NO: 286505 - DNA, 1372 bp, Unknown
  Bacterial polypeptide expressing nucleotide sequence isolated from the Sargasso Sea
aatggaatatataagtacaagaggtgataataagaaattttccttcagtgaggtatttctcaaaggtcttgctgatgatggaggcctttttatacctttgaatatcaaaaaatttgatgagagcaaaatgaactctctaaaaaaattaaattatatagatctagctaccgaaattatttatttatacactggtgattttttaagcaaaaaagaattaaacgaaattgtaaaaaaatcatattctaattttagagaagaggatgttgtcaaaatagttgagctaaatcaattaaaaatcttggaattgtttcatggaccgactctagcttttaaagacattgcaatgcagttaattggaaacatgtatgagcatcttttaaaatcaaataatgaaactataaatatagttgttgcaacatccggagatactggtgcagcagcaattgatgcaattaaaggaaaatctaatttaaatatatttgttttacatccaaataatagaatttcctctgttcaaagaaaaattatgacaacagtagaggaaaaaaatgtttttaatattgcaattgatggaaactttgatgattgtcaaaatattgtaaaacaaatgttttctgatcttgagttctcaaaatctataaatatgtcaggggtaaactcaataaattgggcgagaataattgctcaagcggtatattatttttatgcacattttaaattagaaaaagacaatatctctttttcagttccaacaggaaattttggagatgtctttgcaggatatcttgcaaaaaaaatgggattaccaattgataaattaattgttgcaacaaatgaaaacgatattttgcatagagccattacagaaggagattatatttctaaagaagttagagaaacattatcccctagtatggatatccaattagcaagtaactttgaaagattaatttactacgtgaataattccaattctgaaaaaacagcagaaattatgaaaaaagtgaaaaagaattcttataaaattgaaaagagagatttagatataattcaaaaagattttttatcagaaagctgcaatgaaaaagaaactttaggaattattaagaaaaattacgaggaaaatggtgtggttttagatccacatacagccattggagtgggcgctgcacaaaaattatctttgaatgattgtgtagttttatcaactgcacatccgtgtaaatttccagacgccacaaacaacgcgattaataaacatgaaaaactaccaaaagaacttcagcacgtacttaataaaaatgagaattttcaagtactaaagaatagtacggatgaagtaaaaaaatttattaaaagtaaaattttataa

SEQ ID NO: 286506 - DNA, 1309 bp, Unknown
  Bacterial polypeptide expressing nucleotide sequence isolated from the Sargasso Sea
tttggcagatgatggggggctattcgttccaaaatcaattaaaccctttaaaaaggaagaattaaataatctaaaaaaccttagttacaatgatttagctgctgaaataatttatccatttataggagatttcatgtctaaagatgatctaatctctttgatttcaaaatcatattcaaatttcagatccgacgacgttgttaaaatatcagatctaggagatgtaaaagtattagaattatttcatggacctacacttgcatttaaagatatagcaatgcaactaataggtaatttttatcaatatcatttaggccgtgatcaaaaaaaaattaatattatagtagcaacttcaggagatacaggtgcagctgccatagacgctttgaagggaaaaaataatttaaatgtttttgtattacaccccaacaataaaatttcgccagtgcaaagaagactaatgacaatacatgaagagagtaatgtatttaacattgcagtggagggtaattttgacgattgccaaaatttagtaaaagcaatgtttaatgacgaaaaattttctaaagcaattaatatgtcgggtgtaaattcaattaattgggcaagaattattgctcaatcggtgtattatttttacgcttactttaaaattggaaacggccaaccactatctttttctgttccaacaggaaactttggtgatatttacgctggctatttggccaaaaaactaggtcttccaattgataaattaatcgtagctacaaataaaaatgacatactgcacagagcaatatctggtggtgattatagtcaaaagaaagttgaggaaacaaatactccaagtatggatatacaaattgcaagtaatttcgaaagacttttatacgacgtcaaagattgtaactcagaagttacaaaagatgtaatggctgaaataaaaaataacacttataaaattgataaaaacgacttagataaaatcaaaaagaattttatatctgaaatgcttgatgaaaacgaaactgttgaaatgataaaaaccatcaatgatgaacatcagatggtagtggatccacatactgcagtaggcattggtgctgtgcgaaaactaggattggaaaaaaattgtgttgtattatcaactgcacacccatgtaaatttccaaaggcaatagaagatgcaatatcaaaaactgaaaatttaccagaaagtcttaaatatgttaatgacagaaaagaaaaatttgaacttctttcaaatgatattgaaaaagttaaaaaatatgtaatgaattcgatatga

SEQ ID NO: 286507 - DNA, 1354 bp, Unknown
  Bacterial polypeptide expressing nucleotide sequence isolated from the Sargasso Sea
atgaaatacataagcacaagagatgataaaaaagagtactctgctgagcaggtacttaatttcggcctagcaccagatggaggtctatttattccaaatgaaattcctaaatttagtagcaatcaaataaatgcactaaaagcaaaaaattattttgaaatagcaaattttattttaaccccttttttatcagatttatttgaagccccaacaattaaaaagattatcgaagaggcttatagtaaatttgataaagaaattgttacaatatcaaacataggtgacaacgatctattgaatttatttcatggtccgacactagcttttaaagattacgctatgtgtttgttagcaaaaatatacgaatactatttaaagaaactagatagaaaattagtagtgatcggagcaacttctggcgataccggttctgctgcaattcaagcctttaaagatattgaaaatattagtatttttatttttcaccctcataactccacatctctattccaaagaaaacaaatgacaacgagtggaggtaataatgtttttaatattgccctaaatggaagctttgatgattgtcaaaatttagtaaaaaaactatttagagatagagatataaataataaatatagcttcactgcagtgaattcaattaattggtttagggtgttgccacaatcaatttattatgcttggtcatgtcttaatcataatattgataattttgttgtaccaagtggtaattttggaaatatatattctgctcatttgctaaagtcaatgggatttccaataaataaattaatcgttgctacaaacgagaataatattttacatcgaattataagcaataatgatctacatctctacaatgttgtaaaaactaatagcccgagcatggatataacaatatcaagtaattttgaaagacttttagcagagcaccttggaccaggagcaacaaatgagctttttcaaaatattcaaaacaatgaacataataaaaaattagaaagttctattcataagtcattatctgagaaatttttatctgagagtgcaacctctaaagaggtcgaaaatcaaattaaaattacatatgaaaattacaaaattttattagacccccatacagctgttggtatagtatgtgcggaaaaattaaatttaaaaaaagcaatgtgccttgcttgtgcccatccagtaaaatttcaggaaactgtccaaaaggcattaggtaacaatgtaaaatatgataaaaacatagaatttcttaatgatgaaaaatttgcaattttagacaacaattacaaggaactaggagattatatagaagcacatgcctaat

SEQ ID NO: 286508 - DNA, 1369 bp, Unknown
  Bacterial polypeptide expressing nucleotide sequence isolated from the Sargasso Sea
atgaaatatataagcacaagaagcaatgaaaaagaatatagttttggagaagtttttctaaaaggtcttgccgatgatggaggtctttatgttccaaaatcattaaaaaaatatagcaaagaagaattattaaatctcaaaaatttaaattataacgaactatctgttgaaataataagccaattctcagcagattttatttcaagagaagaactttcgtctttaattaaaaaatcatattcaaaatttagagaaaaagaagtggttaaattttcaaatgtcgaagaaataaaattattagaattatttcatgggccaacactagcatttaaagatgttgcaatgcaatttatcgggaatttgtacgaatattatctaagtaaaaatgacaaaaaaataaacatagtagttgcaacttctggagatactggtgcagcagctattgatgccattaaaggaaaatctaatttaaatatatttgttttacatccaaataataagatttcatctgttcaaagaaaaataatgacaaccgttgaagataataatgttttcaatatcgcgatagatggaaattttgatgattgtcaaaatattgtaaaacaaatgttttctgatttagagttttctaaatctataaatatgtcaggagtaaactctataaattgggcaagaattattgctcaagcagtatattacttttattcatattttaagttaggcaaggaaactatttcatattccgttccaacaggaaattttggtgatgtttttgcaggttatcttgcaaagaaaatgggattaccaattgataaattaattgttgcaacaaatgaaaatgacattttacatagagcaatctcaaaaggagattatgtttcaaaagaagttaaagaaacattgtcacctagcatggatattcagttagcaagtaactttgaaagattaatttactatgtaaataattctgactctgaaaaaacatcagaaattatgaaaaatattaagctaaattcttaccaaattgaaaagaataatttagatattattcagaaagattttctttcagaaagctgcaatgaacaagaaacattagatataattaaaaaaaattatgaagaaaataatataatattagacccacatacagctgttggagtaggggctgcaaaaaaactatcttttaataattgcgtagttttatcaacagcacacccatgtaaatttccagatgctacaaataatgcaataaataagagtgaaaaattaccccaggaacttcaacatgtccttgataaagttgagacttatcaagtcttaaaaaataacactgaagatgtaaaaaattttgttaaaagtaagttgtgat

SEQ ID NO: 286509 - DNA, 892 bp, Unknown
  Bacterial polypeptide expressing nucleotide sequence isolated from the Sargasso Sea
atgaagtatgtaagtacaagagataattcaaaagaatatagttttgaggaggttttcattaaaggccttgctgatgatggaggactttatgtgcctacatctttaaaaaaattcagctcagatgaattgtcagaacataaaaatcttaattacaaagatttatctattgaaataataaatctgttctcatctgattttatatcaaaagaggatctttctcagttaattaaaaaatcttatttaacttttagagaaaaagaggttgttaaaatctcaaatcttggtgatctaaaattgttagaactttttcatggaccgacactagcttttaaagatgttgctatgcaatttattggtaatttgtatgaatattacttaactaaaaatgataaaaaaattaacattgttgtggctacttcaggtgatacaggggcagctgctattgatgcaattagaggtaaatcaaatttaaatattttcgttttacatcctaataatagaatttcaccagttcaaagaaagttaatgacaacagttgaagatgaaaatgttttcaatattgcaattgatggaaattttgatgactgccaaaatattgttaaacaaatgttttcagatttagatttttctaaatcaataaatatgtcaggggtaaattctattaattgggcaagaataattgcacaagcagtttactatttttatacctattttaaacttaatgttgataaacctatttcgttttcagtgccaacaggaaactttggagatgtttttgcaggttatcttgcaaaaaaaatgggattacccatagacaaacttattgttgcaacaaatgagaatgatattttgcatcgagcaatttctaaaggtgatttatgttcaaaaaaag

SEQ ID NO: 286510 - DNA, 1120 bp, Unknown
  Bacterial polypeptide expressing nucleotide sequence isolated from the Sargasso Sea
attgaccttattaaagtgggtgatcgttctgtgcttgaattatttcatggtccaaccttagcttttaaagatgttgcaatgcaactcttgggcaatttttatgaatattatttaaataatgaaaatgaaaagattaatattatagttgccacatcaggagatactggtgcagctgccatcgatgcaattaaagggaaaaaaaacttaaatatatttgttcttcatcctcataaccgtatttcaccagttcaaagaaaattaatgacaactggaaaaaatgagaatgtattcaatattgctgtaaaaggtaacttcgatgactgtcaaaatttagttaaatccatgttttcagataaggaattttctaatcagataaacatgtctggagttaattcaattaattgggcccgaattattgcgcaaagtgtatattatttttattgttattttttagctgaggatgaaaatcagccaataaatttttcagtaccaactggaaattttggagatgtatatgcaggttatttggcaaagaagttgggtcttccaattaataaattaatagtagccacaaatcaaaacgatattttacatagagctatttcaaaaggtaaatatgaaactgaacatgtctctgagactatttcaccaagtatggatattcaaattgcaagtaattttgagagattaatttatgatttaaataatcatgataattcacaaactttagatgatatgaaaaatatcaaacagaatggtaaatatacaatcgacgatgataaattaaaaaaaattaatcaagattttttatctgcaagaatgagtgagcaggaaacactagatgtgataaaaaatatctatgaaaaatttaatatggttttagatccacacacagctataggatatggagcttttgataagcatgatttaaaaggaaacaatattgttcttgctactgcacacccatgtaaatttccagatgcaattttaaaagctataaacttgaaatctgatttaccagatgaattaaagtttattttggatgagaaagaaaattatggtataattgaatataatctcaaagaaattaaacaatatattttaggaaaaattaaatgaa

SEQ ID NO: 286511 - DNA, 1315 bp, Unknown
  Bacterial polypeptide expressing nucleotide sequence isolated from the Sargasso Sea
ttttataaaaggacttgctgatgatggtggtctttatgtgccaaaatctttaaaaaaatatagcaaagaagaattattaaagcttaaaaatttaaattataatcaattatcaactgagataataagtcaattttcagcagactttatagcaagagaagagctttcatctttaattgaaaaatcatactcaacatttagagaaaaagatgttgttaaaatttcaaacttaggggaaataaagttattagaattatttcatgggccaacactagcatttaaagatattgcaatgcaatttattgggaatttgtatgaatattatttaaataaaaataacaagaaaataaacatagtggttgcaacttctggagatacaggtgcagcagccatagatgctattaaaggaaaatctaatttaaatatttttgttttacatccaaataatagaatttcttctgttcaaagaaaattaatgacaactgttgaagaaaaaaatgtttttaatattgcaatagatggaaattttgatgattgtcaaaatattgtaaaacaaatgttttctgatcttgagttttctaaatctataaatatgtctggagtgaactcaataaattgggcaagaattattgctcaagcagtgtattatttttattcatattttaaattaggaaaggaaaacatttctttttcagttccaacgggaaacttcggtgatgtttttgcaggctaccttgcaaaaaaaatgggattaccaattgataaactaattgttgcaacaaatgaaaatgatattttacatagagccatttctaaaggagattatgtttcaaaagaagttaaagaaacattgtcacctagcatggatattcaattagcaagtaattttgaaagattaatttactatgtaaataattctgactctgaaaaaacagcagaaattatgaaaaaaattaagcaaaattcttatcaaattgaaaaaagcaatttagatataattcaaaaggattttttatctgaaagttgtaataaacaagaaacattagacattattaaaaaaaatcatgaagaaaataatataatattagatccacatacagccgttggagtaggggctgcaaaaaaactatcttttaatgattgtgtagttttatcaacagcacatccatgtaaatttccagatgctacaaataatgcaataaataagaatgaaaaattacctgaggaacttcaacatgtacttgataaaaaagaaaattttcaagtattaaaaaacaatacagaagatgttaaaaactttgttaaaagcaaagtttaa

SEQ ID NO: 286512 - DNA, 867 bp, Unknown
  Bacterial polypeptide expressing nucleotide sequence isolated from the Sargasso Sea
aatgaaaaatagaggcttaatcgatagatataaacattttttacctgtgaacgattctacacctataatttcaatgggagaaggaaacacaccattagttacttctcaatcattatataaagatattggatgtaaaaatctttgctttaaactcgaaggctctaatccgactggctcatttaaggacagaggaatggtttttgcagtatctaaggcaatagaagaaggtaaaaaaagaattatttgtgcttcaacgggtaatactagtgcatcagcagcggcttatggagcaagatacggattagaaacatttgtttttattcctgatggtaaaatagcaatggggaaactatctcaagcaatgatttatggagctaaaattatttcgataaaaggtaattttgatgaagcattaaaagctgtgattagtatttcagaggaatttaatattggacttgttaattctcttaatccatacagaattgaaggacaaaaaacgggatctttcgagatagtagatgaaataaatgattcaccagattacttgtttattcctgttggaaatgctggaaatataactgcatactggaaagggtttaaggagtataaaaatcataataaaatcaaaaaactgcccaaaatgatgggttttcaggcggcgggagctgcaccaattgttattggaaagccggtaaaaaatcctgaaacaatagctactgcaataagaattggtaatccagctagttgggaaaatgcagaaaaagcaagagacgagtctggtggtactataggaatggttgaagataaagaaatattgagtgcctatatgaaattatcaaatgaagaaggcattttctgtgaaccatc

SEQ ID NO: 286513 - DNA, 1375 bp, Unknown
  Bacterial polypeptide expressing nucleotide sequence isolated from the Sargasso Sea
aatggaatatataagtacacgaaataatcagagaaactttacttttaaggacgttttcctcaaaggtttggcagatgatggaggactttttgtaccaaaatcaattataccattcagtaaggaagatttaaatcatcttaaaaatctaagttataatgatttagcagctgaaataatttatccatttattggagatttcatgtctaagaatgagttgatatctataatatcgaaatcttactcaaattttagatccaatgatgttgtaaaaatctctaatttaggaaatttaaaagttttagaattgtttcatggtccaacactcgcattcaaagatattgctatgcaattaataggtaatttttatcaataccatttaggacatgatcaaaaaaaaattaatataatagttgcaacttctggcgatactggtgcagctgcaattgatgcattaaaaggaaaagataatctaaatgtttttgtattgcaccccaacaataaaatttcaccggtgcaaagaagattaatgacaatacatgaagagggcaatgtatttaatattgcgattgagggtaattttgatgattgtcaaaatttagtaaaagcaatgtttaatgatgaaaaattttctaaaacaatcaatatgtcaggcgtaaactcaatcaactgggcaagaattattgctcagacggtatattatttttatgctttttttaaaattggaaatggacaacctctttccttttctgttccaacaggaaactttggagatatttatgcaggctacttagcaaaaaaattaggtcttccaattgataaattaatcgtagctacaaataaaaatgacattcttcacagagcaatatctggaggcgattatactcaaaagaaagttgaggagacaaatacaccaagtatggatattcagattgcaagtaactttgaaagacttttatatgatgtcaaagattgcaactcagaagttacaaaggatgttatgagtaaaattaaaaataataactataaaatagacaaaaatgatttagataaaattaaaaagaattttatttctgagatgcttgatgaaaatgaaacccttgaaataataaaaataattaatgatgaataccaaatagcagttgatcctcatactgcagttggtattggtgctgtgagaaaattagggttggaaaataattgtgttgtattatcaactgctcatccttgtaaatttccaaaagcaattgaagatgcaatctcaaaaactgaaaatttaccagatagtcttaaatatgttaatgatagaaaagaaaaatttgaagttctttcaaatgatattgcaaaagttaaaaaatatataatgaattcgatatga

SEQ ID NO: 286514 - DNA, 618 bp, Unknown
  Bacterial polypeptide expressing nucleotide sequence isolated from the Sargasso Sea
aatggaatatataagcacaagaaataataagaaaaactttacttttaaggatgttttcctcaaagggttggcagatgatgggggactttttgtgccaaaatcaattaaaccatttagtaaagaagatttaaatcatcttaaaagtctgagttataatgatttagcagctgaaataatttatccttttattggagattttatgtctaaagatgaattaatctctactatatcgaaatcttactcaaattttagatctaacgatgttgtaaaaatctctaatttagggaatttaaaagttttagaattatttcacggtccaacactcgctttcaaagatattgcaatgcaattaataggtaatttttatcaatactatttaggacatgatcaaaaaaaaattaatataattgtagcaacatcaggtgataccggtgcggctgccattgatgcgttaaaaggaaaaaataatttaaacgttttcgtgttgcacccaaataatagaatttcaccagtgcaaagaaaactaatgacaacacacgaggacagcaatgtatttaatattgcaatagatggtaactttgatgattgtcaaaatctagtaaaagcaatgtttaatga

SEQ ID NO: 286515 - DNA, 1291 bp, Unknown
  Bacterial polypeptide expressing nucleotide sequence isolated from the Sargasso Sea
atgcaattaacaaataccaaagtcgcttcacaacaagttagttttttggatgcagtgcgtattggtttgggtgagcagcaagggctgtttttcccaacccagtggccaagcctggatattgacacattattagagctgccttttgtcgagcgtagtgccaaagtactgcaagctttaataggtgacgagcttcctgctgaacaaatccatcagatggtgagcaacgcttttcagtttccggctcctttagcgcaagtgactgatgatttggcctgcttagagttattccatggccccactttagcttttaaagactttggtggccgctttatggcacaggcgttaatacaggcgcaaaagcagcagaatgtcagcaaaaccactattgtcaccgccacttcaggtgatacaggtgctgctgtagctcatgctttttatcagcaagctggcgtggatgtggtgattttatttccaaaaggaaaaatcagcccattacaagaaaagctgtttactaccttaggtcataatatccataccctggcggtagaggccgattttgaccagtgtcaggccttagtaaaagaggtgtttaacgaccgtgatttagtgaaacagctgaatatcaactcagcgaactccattaatatcagtcgtttatttgcacaaatctgttattactttgaagctgtggctcaggtgccaaaagataaacgcgatcaaattgttatcgctgtgcctagtggtaactttggtaatctgacggcgggtttgattgccaaagtcttggggttacctatcaaacgtatgatagcggccactaacttaaacgacacagtaccacgctattggaaagaaggtcagtgggcaccgaacaagactgtggccaccttatccaatgcgatggatgtcagcgcaccaaataactggccacgggttgaggctttattggctcaaggtaaaatctgccgcgacgatttagaagctgtgatggtggatgaagaagatacccaagtgtcgatgcgtcagctggcgcatttaggttatgtcagcgaacctcatgctgctattgcctacaaagcgttaaaacgcagcttgcaggacggcgaatttggtattttcttaggcactgcccatccggctaaatttaaagagcaggtcgaaaatatccttggcagccctatcgctctgccgcctgaattagcagcagttgcatcagaggcaagtttaagtgcagatatggcgccggattttgtacaattacgccaattcttactgactctggataaataag

SEQ ID NO: 286516 - DNA, 1276 bp, Unknown
  Bacterial polypeptide expressing nucleotide sequence isolated from the Sargasso Sea
atgaatctttacaatatcaaggacaggagtgaacaggtgagcttcgcccaggcggtgcgtcagggtctgggccgcgaacagggtctgttcttccccgagcggcttgagccgctggccgacgtcgatgccctgctggatctgccgctggtggagcgctccgcccgcatcctcagccacctgctgggggacgaagtggccgcgcctcaggtgcatgagctggtgaaggccgccttcaccttcccggcgccgctagtgaagctcaaagatggcacctatgccctcgaactgttccacggcccgaccttggcgttcaaggacttcggcggccgctttatggcccagtgtttggcggcgttcagaaccaatgacaagatcaccatactcaccgccacctccggtgacaccggcgccgccgtggcccacgccttctacggactggaggggatcgaggtggtgatcctctaccccaagggcaagatcagccccttgcaggaggcgctgttctgcaccttagggggcaacatccgcaccatcgccattgacggcgacttcgatgcctgccaggcgctggtgaagcagtccttcgacgatgaggagctgaaaaaggccattggcctgaactccgccaactccatcaacatcagccgcttgctggcccaggtttgctactacttcgaggcggtggcccagctgccgaaagccgatcgtgccaaggcggtcatcagcgtgccgtccggcaactttggcaacctcaccgcaggccttatcgccaaggcgctggggctgccggtgaagcgctttatcgccgccaccaacgccaacgataccgtgccgcgctacctgaaaaccggccagtgggagccgcaccagacagtggcaaccctgtcgaatgccatggatgtgagtcgccccaacaactggcctagggtggaagagctgtgccgtcgcaacggctgggcactggaaaccctgggttctggcatgcgcagtgatgcccaaactcgcgatgcgctgaaacgcctgcatgagctggattacctgtgcgaaccccacggggcgattgcctgggatctgctgggcgaacagctggctgaagatgaagtgggggtcttcctctgcaccgcccatcccgccaagttcaaggagtcggtggacgagatcctggggctggacgtgccgttgcccggcccgctcgccaagcacgccgtgctgccgctcttgtcccacaacctgccggcggagtttgccccgctaagagccttcctgctcggttaag

SEQ ID NO: 286517 - DNA, 264 bp, Unknown
  Bacterial polypeptide expressing nucleotide sequence isolated from the Sargasso Sea
tatggaactgacaacacgcacgctcccggaacgcaaacatattgctctggtagcgcacgatcactgtaaacaaatgctgcttaactgggttcgccgccatcagtctttgctggaaaagcacgccctgtcggcgaccggcaccaccggtaacctgatccagcgcgaaacgggtctggaggtaaacgccatgctgagcggcccgatgggcggcgatcagcaggtcggcgcacagatttccgaagggaagattgatgtgctgatctt

SEQ ID NO: 286518 - DNA, 250 bp, Unknown
  Bacterial polypeptide expressing nucleotide sequence isolated from the Sargasso Sea
aatgaaaactatagctttagttgcacatgatgggaaaaaggctgaattgctggcttgggtaaaacaacatgctgatttttttcaggataaacaactggtggcgacaggtaccacgggtcgtttactgaatgaggctttaaacaaagaagtactatgtttggccagcggtcctttgggcggcgaccagcaaataggtgctttaattgctgagcagaaaattgactggctggtatttttttgggatccatta

SEQ ID NO: 286519 - DNA, 508 bp, Unknown
  Bacterial polypeptide expressing nucleotide sequence isolated from the Sargasso Sea
gatggcaactggggttgacgaaacagccaaccacgatggcgctaccggcaccgccattaatcttttacaggcggaagctttatttcaagagagcccccaactggcgaccatcctgcgagtggccggcatatacggaccggagcgcggctacctttaccgtcagtttctaaaagatgaagccgtgattacccaaggcggctcgcgctggatcaacatgattcaccgggatgatgtcgtcagcgctctggttactgcattgaacatccccccgggcatttacaatacgagcgatgatgagccactgacccaacgggcgttctttgagtggttggctaaggagctggacaaaacagtgccgccagaaggcgaagtgcaaaaacgcaaacgtgcggtgaccaacaaacgtgtgtgcaatgccaaactcaaggcaaccgactggcaattgaaatacccgaacttccgggaaggctacggcgcattgatcagtgaagagcagggcgggcactaa

SEQ ID NO: 286520 - DNA, 427 bp, Unknown
  Bacterial polypeptide expressing nucleotide sequence isolated from the Sargasso Sea
atgaaaactatagctttagtagcgcatgatggaaaaaaggctgagttgctggcctgggtaaaacaacacgctgatttttttcaggataagcaattggtagcgacaggcaccacaggtcgtttactgaatgaagcgttaaacaaagaagtattgtgtctggccagcggtcctttgggcggcgaccagcaaattggagctttaattgctgagcagaaaattgattggctggtgttcttttgggatccgctgtcgtcccagcctcatgatcctgatgttaaggcgctgatccgtttagctgtggtgtggaatatccctgtggcctgtaataaagccacagcggattttattgttacatcagccttagtcggacaggactatcagcgcactgtgccggacttttcagcccacaacaacagattgccctgag

SEQ ID NO: 286521 - DNA, 427 bp, Unknown
  Bacterial polypeptide expressing nucleotide sequence isolated from the Sargasso Sea
atgaaaactatagctttagtagcacatgatggaaaaaaggctgaattgctggaatgggtcaggactcatgctgatttctttcaggataaacaactggtggcgacaggcaccacgggtcgtttactgaatgaggctttaaacaaagaagtactatgtttggccagcggtcctttgggaggtgaccagcaaataggtgctttaattgctgagcagaaaattgactggctggtatttttttgggatccattatcgtctcagcctcatgatcctgatgttaaggcgctgatccgtttagctgtggtatggaatattcctgtggcctgtaataaagccacagcggattttattgtcacttcaaaattagtagggcaggactatcagcgcactgtgccggatttttctattcacaacaacaggttgtcttaat

SEQ ID NO: 286522 - DNA, 364 bp, Unknown
  Bacterial polypeptide expressing nucleotide sequence isolated from the Sargasso Sea
atgacgatagccttaatcgcacatgatggcaaaaaagctgagatggttcagtttttattggataataaagactatttagagcacagcaacttattggctacggggactacaggctcacacattgagcgagcaaaactatcagttaagaagctgctttctggcccgctaggaggggatgcacagatagctgcccttgctgcagagaagcaagttgatatggttattttcttccgagacccgttggataagcatccacatgaaccggatgttcagatgctgatgcgcctctgcgatgtgcataacatcccactagctacaaaccctgctactgcacgcttactattgcaagcgagcggggcttagt

SEQ ID NO: 286523 - DNA, 745 bp, Unknown
  Bacterial polypeptide expressing nucleotide sequence isolated from the Sargasso Sea
actggtgcacaaggcgcaacaggagcacagggtgctactggcgcacaaggcgcaacgggaaccacaggtgcacaaggcgcaacaggagcacagggtgctactggcgcacaaggtgctacgggaaccaccggtgcacaaggcgcaacaggggcacaaggtgcccaaggatcaaccggttatggttttacaaatactgcacaaacaattgatggagaaaaaacatttacatctaaaacacatatgcagaaactttcagcaactgatgtatctggtataaatattcaatttactggtaagttatataactcaacaggtcaagatgtaatgcaaataattactggtgcaactggttcattcactggtgaacaaggaccacaaggtgaagatggttttaggggtacacaaggtaaaaccggagcgcagggtgaacagggtgaccctggattaggtgctactggtgttacaggagcacaaggcgcaacaggaactactggtgccacaggagcacaaggcgcaacaggaactactggtgccacaggagcacaaggcgcaacaggagcacaaggcgcaacaggagcacaaggcgcaacaggagcacaaggcgcaacaggagcacaaggcgcaacaggagcacaaggcgcaacaggagcacaaggcgcaacaggagcacaaggcgcaacaggagcacaaggcacaacaggaactactggtgccacaggagcacaaggagctactgatttcaagg

SEQ ID NO: 286524 - DNA, 874 bp, Unknown
  Bacterial polypeptide expressing nucleotide sequence isolated from the Sargasso Sea
tctgagcacaaccagcaagctggccgagcatttcagcccaagcgagattgcaggactctccgaacagctgaacttcgagagttacgaggccggaacggtcctgatgaaagagggagagccggcgtgcagtttgctgctactgatttcaggcgaaatacggctgacgcatgatcagattgaactcagactgcttcaaccaggcgaattttttggtgagtcgttgttcactgaagaagggagtcgctttgccaatgcaaccagcactagccccgtcacaattgcgcgtctgagcctcaatcacttctataaattagttgaacaagcccccgtggcagcacgaaagtttaaacaattttttgccgcacaccatctcaacgaagtgcatgaaaaagaaggcctcagcttcgttgaccatcgcaactatctcggattagtagcacataatgaaatgaaagatagtttaatggaatttgcccgcactcatacggaaaaattgaaacgctttcaccttgtcgcaaccgggacgacagggattaaattgtatcaagaaactggattaatgctgtccagaaaagtagcttctggcccacttggaggagatcaagcaattggcaagatgatctcagagaacaacattcttggcttggtatttttccgagatcctctttcagctcacccccaccatgccgacattgaagcattgggacgcctctgcgatgtctaccaagtaccgatggccaccaatccgggtggagccgctgcattgctcaattatcttctggtagaccaccctgaagagccagtgatacccaatcgagtcctcgagaaatacaaaaacgcacaaaagaaagtcgtggagaaatccgtcgcttga

SEQ ID NO: 286525 - DNA, 394 bp, Unknown
  Bacterial polypeptide expressing nucleotide sequence isolated from the Sargasso Sea
gatgagcaaaccccgcatcgcattgattgcgcacgacgcgaagaaggacgagatcgtcgcgctcgcgggcgaattccgcgcgacgctcgcgcaatgccggctggtggcgaccggcacgaccggcggccgcatcgcggacgcgcacgggctcgaggtcgagcgcaagctgtcggggccgctcggcggcgacctgcagatcggtgcggagctggccgacggccgcatcgacatcgtcgtgttcctgcgcgacccgatgaccgcgcagccgcacgaccccgacatcaccgcgctcgtgcgcgcatgcgacgtgcacgacgtgccggtcgcgaccaacgtcgccaccgcgcggatgctgctcgacgacctggcgcgcaacatgcaggacatttgctaa

SEQ ID NO: 286526 - DNA, 770 bp, Unknown
  Bacterial polypeptide expressing nucleotide sequence isolated from the Sargasso Sea
gctggggctgcacgccgtgggtcgcacgcacgatgccatcgtcgctgcgggcatgctgcaggggtaccgcccgctggtgcgctatccctacgggcgcgacggtgggctgatgaaagtggtggcagaggtggtgggcatgggggaagggcgcacgctcgacggcgcgatttacctcaccgaccctgtggacccttcttccatcttccccgaggcgctggccctcaagcggcagtgcgtgatccatggcaagccgtttctctccaccgtggccagcgcacgcgactggatcgaaatggagcgcatccacgccgggctggcgcccgacccacaggccgaccggttccatgaccatggcaaccagacgctggcgctgattgcgcacgacgcgtgcaaacaggccatgcttgacttcgcggatcgcaactttgatgtgctgtcgcagtttcgccaccgggtggccaccggcaccacgggccagcgactgaacgccctggcgtggagcaagggctggccccaggggaagccctgggtgcagcgcttcaacagcgggccgctgggtggcgacgcgcagattgccgacctggtgctggagcgccgttgccaccgggctgttttctttgaggacccgcatgtggcgcgccagcacgaggccgacatccagttgctggagcgcgccgtgaccaccgccacgcacgacgcggtgtgtgtcaccgtgccgggcgtggcgcagcgctggtgcgacgccgtgcgcctgcgcgcagggcgctgat

SEQ ID NO: 286527 - DNA, 391 bp, Unknown
  Bacterial polypeptide expressing nucleotide sequence isolated from the Sargasso Sea
catgaccacccgcattgcgctgatcgcgcacgatcacaagaaagacgacatcgtcaaactggccggcgaatacgtcgatacgctgaggcgctgcgacatcatcgcgaccggtaccaccggcacgcgcattagcgacgcgcatggcctcacggtcgagcgcatgttgtccggcccgcatggcggcgacctgcagatcggcgcgcaactcgcggaagggcgagtggacatggtgatctttctgcgcgacccaatgacgccgcagccgcacgaaccggatatcaacgcgctggtgcgtgcctgcgacgttcacaatattccgtgcgccaccaacatttccaccgcgcgcatgattctcgacgtgctgaccttgcgcctcacgcagcaggtctga

SEQ ID NO: 286528 - DNA, 817 bp, Unknown
  Bacterial polypeptide expressing nucleotide sequence isolated from the Sargasso Sea
ttgaaaaaattttgggaaattatgcactcgaattcagtaacaagaagcacaaatgtaatttgcattggagggggagtcctttgtgatgtagttggatttgcaactagcacttataaaagaggtgcaaatttactattaattccaaccacacttctcgcgatggttgatgcttcacatggtgggaaaaatggagttaataataattatggaaaaaatcaaatagggacattttatttacctaacgaggttttagtttgtgttgaatttttaaattcgctaaataaagaggacattaatactggtttaattgaggctatcaaggctggttttataggaaataagaaaattttagatttagtttatggagatgcaccaattttccatgataaggatttaatccaattagctattgatgtgaaaacaaaaattacaaaggaagacttaaaagaatccgacaaaagaatgtatttaaattttggtcatacaataggacacttaattgaatctgattcaaactatgtaatttcacacggtcaagccgttggtatcggaatattgattgctttagaaatttcagaaaaagaatataatttggatcaatcatatagaaaaaattatatgacttttttaaataactctagtctcaaaagtcattataaatttcaaaaatcaagaagtgaacttataacgatattaagtaatgataaaaaagtaaataatgcaaagattaactttgttttgttagaagaaatagaaaaaccagtgcttaaagaggtagatattgagcaagcaatggagttgataataaatgagtaaa

SEQ ID NO: 286529 - DNA, 958 bp, Unknown
  Bacterial polypeptide expressing nucleotide sequence isolated from the Sargasso Sea
caggtggccgtgctggtgcccaccaccctgctcgcccagcagcactacgacaacttccgcgaccgcttcgccaactggccggtgcgggtgagggtactgagccgcttccgctccgccaaggagcagaccgccgtgatgaaagagctggccgagggcaaggtcgacatcatcatcggcacccacaagctgctcggcgccgagctcaccttcaaggatctggggctgctcatcgtcgacgaggagcatcgcttcggggtgcgccagaaggagaagatcaaggcgctgcgagccgatgtggacatcctcaccctcaccgccacccccattccgcgtaccctcaacatggcgatgtcgggcatgcgggatctctccatcatcgccaccccgcccgccaagcggctcgccatcaagaccttcgtgcgccagcaggagccggcggtcacccgcgaggcggtgctgcgggaattgaaacgtggcggccaggtctactacctgcacaacgacgtggagagcatcgagaagtgcgcggcggatcttgccgagctggtgccggaggcgcgtatcggcatcgcccacggccagatgcgcgagcgcgagctcgagcgggtgatgtcggacttctaccaccagcgcttcaacctgctggtctgcaccaccatcatcgagaccggcatcgacgtgccgagcgccaacaccatcatcatggatcgggcggatcatctgggattggcccagctgcaccagctgcggggccgggtcggccgctcccaccaccaggcctatgcctacctgctcaccccccatcccaagctgatgaccaaggatgcagccaagcgcctggaagccattgcgtcccttgaagatctgggcgccggctttgcgctggccacccacgatctggagatccgcggcgccggcgaactgctcggtgacgatcagagcggccagattgaatcgg

SEQ ID NO: 286530 - DNA, 952 bp, Unknown
  Bacterial polypeptide expressing nucleotide sequence isolated from the Sargasso Sea
tggtatacatgttgactttattgaatgtgaatttaactataacgacttacttctcttgcctatcgatagaatatctttaatacaaaaatatgtgggttcatcagatactaaaaaattagataccttaagaacaaaagcttggtcaggcaaggttaagaaagctagaaaggtcgctcaaaccactgcccgagaaatacttagcctttatgcacaaagaaaatctgttaaaggacatagtttcaaaataaattataaagaactatctgaatttgaagatacatttcagtttgaagaaacaatagatcaaaaaaatgcaatccttgatacatataatgatatgcaatcaatatcaccaatggatagattaatatgtggtgatgtaggttttggtaaaactgaaatagcactaagagccgcctttctatgctctatgaatataaaacaaacagttataatcgcacctacaacacttcttgcgcaacagcaccttgaaacttttcgtaatagatttcaaaattttcctattagagttgaagggataacaagatttacaaaaaaaattgaacttgataaaatagttaaagatttttcaaaagataaggttgatataattattggaacacataaaattttttcaaaacaaagttatttaaaaaatataggattaataatagtcgatgaagagcataaatttggagttacacataaagaaaaaattaaacaattaaaaaaagggattgattcattaagtatatccgcaacccccatccctagaacattacagctatctttaagcggattaagagaaataagtctcttagctactccaccaaaggaaaggcttagtattgaaacttatatagaagaatttgatttatcattaataaaagatgtagttgaatttgaacttaaaagggatggtagagttttttttgttcataatgaaatacta

SEQ ID NO: 286531 - DNA, 502 bp, Unknown
  Bacterial polypeptide expressing nucleotide sequence isolated from the Sargasso Sea
ttttgttggttagaagaaaatgcttataaattatttaatctaaataaattcattttagaaaaagctatctataattcaattatgattaaacttttttatgttaaaaaagatgaaaaagaattattatcaaataataattctagagcaatgctaaatttcggacatactattggacatgcaatagaaagtcattattattataaaaaatataatcatggtgaagcaatttcaataggaatgataactgaagctaagatttctaattaccttgggatactatcaactagtgagttagaaagaataataaaacattttaaaaaatgtaaactaaaaatatatgataagatattaattgataaaattctaattgaaagattaataaaagataagaagaactttctaaacaatattaatttttcattaatagataaaattggaagctctatattttataaaaaattagataaaagaaaagtttataaaattttacaaaatatttaaa

SEQ ID NO: 286532 - DNA, 673 bp, Unknown
  Bacterial polypeptide expressing nucleotide sequence isolated from the Sargasso Sea
ttgggaatttcaaataaattttggcaaaaatatgctaggatcattttatcaaccagatctggtaatttcagatacatcgttacttaaatctttaccgagaagagaaataatttgtggatatgcggaaatcttaaaacattcattgattaaaaataaaaaattttttttatttttagataaaaacttaataaatattttagaattaaaaaaaaattttatcgagaaagctatcatggagagttgtaaaataaaaaaacaagtagttgaaaaagatgaaaaagaaatgaattttagaaaaactttaaatctaggccatacatttggtcacgcttatgaagcaactttgaactattcaaaaaaattaaatcatggagaagctgttttatatggtattttttctgcaactaaatttagtaataaaataaatttattaaaaggatatgattataaattaataatgtctcatttatctaaattaggttttattaatttaaataaattttttaagaaaaaagatataaataaaattgttggttttatgatgtctgataagaaaaatgatgataaaaaaattaatcttataactttaaaaaagattggtgccataaacatattgggccaattcaacgttattaaagttaaaagatttattaattctcaattagttaaataa

SEQ ID NO: 286533 - DNA, 658 bp, Unknown
  Bacterial polypeptide expressing nucleotide sequence isolated from the Sargasso Sea
atggaaaaatcttattggatctttttatcaacctaaattggtaataagtgatgtatcatttttaaaaagcttgcctaagagagaagttgtgtgcggatatgctgaaatattaaaacattctttaattttaaaaaccaacttatttgcttggttaaatttaaattctaataaaattttgaacgaacgtaactcagactttctaaaaatagctatttataaaagttgtaaaattaaacttcactttgttaaaaaagatacaaaagaaaaaaatcagagaatgattttgaactttggccatacatttgctcatgctattgaagccaaaaataaattttctaaaaaaattaatcatggtgaggcagttttaatgggtatgatgcttgctgcaaagctttcacttcttaaaaaaattacttcagaaaaaaatgttaataatttaatgcatatttataaaaaaaataatcttaattataaattagacaaattttttaaaaagaaagattttaataaaataataaattttatgcttaatgataaaaaaaataatgatgaaaaaattaatcttattttgcttaagaatataggaaaaactacaaatccaggccaatataaattaaatttaagagagatgaaaaaaatatttccaagaattatataa

SEQ ID NO: 286534 - DNA, 687 bp, Unknown
  Bacterial polypeptide expressing nucleotide sequence isolated from the Sargasso Sea
ccactactctactctcaatggttgatgcatctattggaagcaaaacaggaattaatttaaattcaataaaaaaccaaattggacttttttcagatccgctttctgttatagttgatacagagtatttaaaaactctttccaaaagagaaattaatagtggatatgctgaaatattcaagcactcaattatatctaattcaaattttaaaaaattggttgaaaatcctaatcttgcttttgatgaagatattattgctagttccattgaattaaaaaacaaagttgttaagaaagataagtttgaaaatgatgtcagaaaacacttaaattttggccatacaattggacatgctgttgaatccctttttatgaacaaaaaaaacaaactattacacggtgaagctatagccattggtatgatttgtgaatcttacatctcctccaaaatatatggtttagaaatagatagagcaaatgaaataaaaaaccatttaaataagttctttaataaagtgagcttttctaagaaagatattgatgaaatatgtagtcttattaaatatgataaaaaaaatcatttgaatattccaaaatttgttttacttaaaaatctaggtttagtcgaaactgatgtaaatgttgatttgaatttaatagctgattcttttgattattatacagtttaat

SEQ ID NO: 286535 - DNA, 621 bp, Unknown
  Bacterial polypeptide expressing nucleotide sequence isolated from the Sargasso Sea
aatgaaaaaaatattatttaaagaaatgcaagaagaagtgttactaatttcatctgaaagtatagacaatctatttgattcaataccaacagatactaagtgctgtgtattagctgataaaaaagttttagatatgcatgattcactcagaaaagagatagaaaataaaaattttctaatctatgaaatttcaaatcctgaagaagaaaaaagcatcaattcatacactgagattgttgattttcttagctccaaatcttttaaaagaaacgatcgcattgtaggtcttggtggtggtgctatcacagatttagctggatttgtatcttcaacctatatgagaggtttagattacatacaaatacctacttctttgcttgcccaagttgatgcttcgattggaggcaagactgctattaactatggaaaaataaagaactttattggtacattctataacccatcgaaaattataatttgctctaaatttttaaaaactttaaatgaacaagaatttttaaatggacttgctgaagtattaaaacatgccttaataacatcagatgtcgccgtagataaattaattaaaagacatgcacaaataagtaatagagaaacagc

SEQ ID NO: 286536 - DNA, 511 bp, Unknown
  Bacterial polypeptide expressing nucleotide sequence isolated from the Sargasso Sea
aataaaacctttttttaacttcttaaataataattataaaaaaatatataagctagatgaagattatattattaaagtggttacaacttgtgccaccacaaaagctaaaatagtaaaagatgacgaacttgaaggtggtataagagcattattaaattttggtcatacttttggacatgctatcgaagcatcaaaaaattataaaggcattcttcatggagaggcagttagtatagggatgaatatagcttcagcaatatctgcagatcaagagttaatatctcatgaagattattgtgaaatagaggatatgattctaagattaggtttgcccacacaaataccaaaaaaaatttcctcagtatcaataatgaaacatcttggacatgataaaaagaaagtgtctggtaaaaatagatttattcttttgaacaatataggtagtgcttttatatcggatcaactggataataaatatttagaagatttgtctaaaaacttcatcagttaa

SEQ ID NO: 286537 - DNA, 255 bp, Unknown
  Bacterial polypeptide expressing nucleotide sequence isolated from the Sargasso Sea
cccatggatcgccttgtgtgtggcgatgtcggattcggtaagacagaggtcgcaatgagggcagcgtttgcttcggtttgcagtggaacgcaagtgtgtgtcttggtaccgacaacacttctcgctcagcagcactttgaatcgttccgagaccgttttgccgattggcctgtgaccattgaagtattgagccgattcaaatccgcaaaagagaccaaggctataatcgagcgtgcaaacaatggccgggtcaaa

SEQ ID NO: 286538 - DNA, 403 bp, Unknown
  Bacterial polypeptide expressing nucleotide sequence isolated from the Sargasso Sea
atggaggctatacttgtggttaaaagacttcaggtcaaatcaaacttaaaaaattactatgttgatttgaatgtaaattttaaaaaaaaactcctaagcgagtttaaaagaaatgattttttaattatagataaatttatatttttcaaatacaagctagatataactttgaaaaaaaataaaaaaaatattttactagtaactgctcaggaaaagtcaaaagaatattcaaatttatctaaagttatagaatttttaataaagaatggatttaaaaaaaattcaaaaataattgctgtcggtggtggaattactcaagatatagcgtcttttgtatcgtccataatatttagaggtgtggaatggattttttttccaactacactattagcgcaggctgata

SEQ ID NO: 286539 - DNA, 370 bp, Unknown
  Bacterial polypeptide expressing nucleotide sequence isolated from the Sargasso Sea
aaggaggttggaataagggctatattaaatttcggacatacttttggtcacgctattgaagcgcataataattttaaaaatattactcatggggcagctattactcttggcatgattatagctgcaaaagtttctttttatgaagggcacttaaaggattatcaattagataatcttattaatatgattcaatcattaggcttaaaaactgattataaaaaatataaatattcaagtctgagaaagtttatgggatctgataaaaaagttcaggatggaaaattgaatcttattcttattgataaaaattttaatgcatttaaaacatcaaattttgataaaaaaaatattaaaaaagctctaacttaag

SEQ ID NO: 286540 - DNA, 516 bp, Unknown
  Bacterial polypeptide expressing nucleotide sequence isolated from the Sargasso Sea
ttattaatgatttaaatttttttaagtggctagacaagaattacatgaaaatttttaacttagaaaacaaaacaattatatatgcaatatataaaagtattaaaataaaatctagatttgtaacttctgatactgcagaagttttgactaataataattcaagagcaatgttaaactttggtcatacttttggacatgctttagagaatttttacaaatatgataaacttactcatggcgaggcaatttcaattggaatgattgttgcttctaaactatcaaacaaaataggtactttaaattcagatgacttgaataaaattattaaacattttaataaagtaggcttgccaatttttgatgttaacgtaaaaaacaaaaaaataattaacattgttactaaagataaaaagaatataagtgaaaaaatcaatttaattcttataaaaaaaattgggcaagcttattacttaagaaaccaaaatattaataatatatttaaattgctagattaaa

SEQ ID NO: 286541 - DNA, 328 bp, Unknown
  Bacterial polypeptide expressing nucleotide sequence isolated from the Sargasso Sea
gtggaaaccctctgtggctatgggacctggctgcatggggaggcggttgccattggcatggtggccgtgggtgaactcgccgcactgcggggcagctggagtcatgacgatgctgagcgccaacgccggctgatcgacagcgccggactccccacggcctggccggatctctcagccgatgcggttttaaacagcttgcagggggacaaaaaggtgcgcgacggtcgcctgcgcttcgtgatgcccaccaacatcggaaccgttgagattcgcgatgacgtcagtcgcgacgagatcctgagctgccttgagcgcctgaaaggctgaa

SEQ ID NO: 286542 - DNA, 647 bp, Unknown
  Bacterial polypeptide expressing nucleotide sequence isolated from the Sargasso Sea
ttttttgagtttaaaaaatcaaataggagtatttaatatgccaatagatgttatacttgactctgtttatctcaagactctttccaaagaagaatatttaaatggatatgctgaaatattcaagcatagttttctaacagattcaagcgatctaagctttaattcattaattaagttagatttttttaatgatgttgacttcataattaataagtattcagatataaagaatcaaattgtaaaatttgataaatatgaatccaattcaagaaaggttctaaatcttggtcatacaattggacatgcacttgaatcttattcgtatttatccaacagtttagataaattaaaacatggtgaagccataataataggtcttataactgaactgtatatatcaaacaaactaaatgatttctctcttgatacagtagataaactaaaagaagtatcattaaattattttagtaaaattaacctaacagataatgacttaaaaagtatctatgatcttatgatttttgataaaaagaatgataaaggatctgttaactttgttcttttagataaagctggaaagccaaagattgatcaaaaggttgactatgatatttttattgaagcatttacctactacaataactaat

SEQ ID NO: 286543 - DNA, 632 bp, Unknown
  Bacterial polypeptide expressing nucleotide sequence isolated from the Sargasso Sea
gatggaggttttaccagtgcatgactttaaaatagaatcttcaattcacgattatgaagtaaggtttattgctgatgcacctagcgtgctgaaaaatgaaattcaagatggtgatgttattataattgataatattgtaagaagactatatcctgatttattaaacggtttagatgacaatacagttgtcataggtcttgatgctcgtgaagataagaaaagttataaagggttgattcctattattcaaggtttaatcaataatggattcaggaagaaccatagacttatcggcattggtggaggaattattcaggacattactgcttttacagcatcaataatgtatcgcggtgtaaaatggatattctttccgactactttacttgcccagggagatagctgtattggtagtaaaacgtcgattaattttggagaatacaaaaaccagataggtggattttatcccccgaataaaatctttattaatttaaactttcttgatacactttcatcagcggatttgcagtcaggcttgggtgaaatgtgccattattttatagtagctggagaaaaagactttaaagagtataagaggcattatgaagatgcacttatggataataaaatat

SEQ ID NO: 286544 - DNA, 649 bp, Unknown
  Bacterial polypeptide expressing nucleotide sequence isolated from the Sargasso Sea
actgaacacttcaatattaataaaaaaaaattacgttttaacatttgtaaaaaaaattgcaaaaaaaaatgaaaaagtgttttgcgttattgattcaaaaattaaaaataaatttaattttaaaaaagaaaaaaatataaaaattataactattcattgtggagaaaaaataaaaacaattaatagctacaaagaccttgctgaaaaattaattaaaagtaatgtaaatagaaaatctgtacttattgcaattggaggtgggtcattaggtgatttagcaggatttatctcaagtacagttttaagaggtttagatttttttttgatacccactacacttttatctcaagtagatagctctataggaggtaaaaatggaataaatacaacctacggaaaaaatatgcttgggactttctatcaaccaaaagaggtattaattgatatttctgttttaaatactttaccaaataaagaaataaaatcaggatatgcagaaataattaaacatgctttaattaatgattataattttttttgttggttagaaaaaaatatagataaattacttaacctgaataaatctattttagaaaaagcaatttataaatcgataatgataaaacttttttatgtaagaaaagatgaa

SEQ ID NO: 286545 - DNA, 577 bp, Unknown
  Bacterial polypeptide expressing nucleotide sequence isolated from the Sargasso Sea
cagagaatttctttctggttattctgaaatagttaaatacgcccttttgggtgatcgtgttttttttgattggttgcaaaagaataagaaaaaactattaatgcgccatcaatcaacattaaatgaagctattaaacgatcatgtttggcaaaatctaagttggttacgcttgatgaaagagaaaacggtcagcgtgccttattaaatttggggcatacgttcgggcatgcgcttgaggctgcgacaaatttttcggatcgtttaatacatggtgaagctgtatcgataggatgtgttttagcttttgaattaagtgtagatatggggttttgcagtaaagaggactgtgacgaagttaaagcccactttagggatcttggcttaaagacagatattgaacagatcgaaggaccactgcctagggcagaccgccttttagaactaatgcttaatgacaagaaagttaaacgtgggaacctgaatctaattctcgttgagcagattggagcagcgttcgtttccgagaacatcaacataccgatattaatgacttttttacaaaaaaagtttggctag

SEQ ID NO: 286546 - DNA, 697 bp, Unknown
  Bacterial polypeptide expressing nucleotide sequence isolated from the Sargasso Sea
actgttatctatggttgatgcctcaataggtggtaaaaatggtattgatttgggtgttttaaaaaatcaaattggtgtttttaaaaatcctaatttgattttaattgatgagttatatcttgactcactgcctttgaatgaatttaaaagtggtttttctgaaatgttaaaacatgcattaattagtgatatcaattattgggaaaaattaaagtattttgatttttacaaaaaaaaagaaatattgactctaattaaaaaatcaattgaaattaaaaaagatattgtcctaaaagatcctttagaaagaaacttacgaaaaactttaaattttggccatactataggtcatgcaattgaatcttattttatggaatcatctaaaaatgaaattctgttacatggagaagctattggaattgggatgattatagagtcttatctttcacataaatactgtaatcttaatatgactgaagtagatgatataaaaaaagtatttaataaaatatttcaaaaagttaatttcaataattctattattgaatcaatttatgacctattgatttatgataaaaaaaacagctatggaaaaattaattttgttttaattaaaagaatcggcgaaccaacaattgatttagaagttagcaaaaaagcaataatagaaggttttgatttttatatggaaaagtag

SEQ ID NO: 286547 - DNA, 526 bp, Unknown
  Bacterial polypeptide expressing nucleotide sequence isolated from the Sargasso Sea
tatgtgtttgataaaaaataagagtttttttaaattcatagataataattattctaaaattattcaacaaaatactgattgccttttaagaactatttttacatgtgcatctatcaaagctcaagttgtgaaggaagatgagcttgagagtggaataagagcgatactaaactttggtcatacttttggacatgctattgaagcctccaagaattataaagggatcctccatggtgaagctatcagtgtgggaatgaacattgcatcagctatttctgctgatcaaggatatttaactcatgatgaatattgcaacattgaagatatgcttctaaatatgcaaatgccaactatgatcccaaaaaagataacatcagcatctataatgaaacatattgggtatgacaagaaaaaaatatctggtaaaaatagatttattttattggataaaattggaaatgcttttataaacgacaagttagacaataaatacctaaaagagatatctaaaaacttcatcagataa

SEQ ID NO: 286548 - DNA, 685 bp, Unknown
  Bacterial polypeptide expressing nucleotide sequence isolated from the Sargasso Sea
aatacaacaattaatgcaattggcaattatcatcacccaagcaaaataattatcgatactgatttgataaagaatctacctgatagggagcttaaatcaggtcttggtgaagtaattaagtatagcgttcttggaaattctgaaattacaaagatgctcaatagtttaaaatatgatgaaatcattaaattaaacaatcttaaaaaattgatcgagctgtgtctaaagcaaaaagctgaatttgttactggtgatattcgagaacaaaataaaagacttttactaaatttaggtcatacaattggtcatgccttagaagtaaattctatagtagatggaaatgaacaacttcgtcatggagaaggggtggcgctaggaattattgccatttcaaaagttgcagtcgaagtgggttatttagatacgcaagatttagaaaaaatttcagcgctggtgaataaatttggcttgccaacgcttgtttcaccggagttatttgcatgtaaccgggatctgcttatagaaaaatgtgttgtctctgcatttaaagataaaaaaagaactacatcaggacttcgtttaattttaccaacttcttctagtggtgagtgtaaaatttttcctactgactcaaaggaccttcttcaaaaaggaattgaatttgtaatcgagaattctcaatgaa

SEQ ID NO: 286549 - DNA, 418 bp, Unknown
  Bacterial polypeptide expressing nucleotide sequence isolated from the Sargasso Sea
gataaaacttttttatgttaagaaagatgaaaaagaatccttattaaatagtagctcaagagcaatgttaaattttggacacacaattggacatgctatagaaagttactataattataagaaatttaatcatggagaagcaatttctataggaatgattaccgaagcaaaaatatctaattatcttggtttgctttcatctaatgaacttgatagaataattttacattttaaaaaatgtaggcttaagatatttgataaaatattaaaagaaaaaaaactaataaaaataataactaaggataaaaaaaattttaaagacaatataaatttttcgcttataaataagattggaagttcaatattttacaaaaaactagacaacaaaaaagtttataaaattttacaaaatatatag

SEQ ID NO: 286550 - DNA, 447 bp, Unknown
  Bacterial polypeptide expressing nucleotide sequence isolated from the Sargasso Sea
ctattctaaaatcatgtaaaattaaaaggtctattgttgaagaagatgagtttgaaaaaggaaatagggcattattaaatcttggtcatacttttgggcatgcaattgaaggctatctaaattatgatgggaccatattgcacggagaagctgtttcgattggaattataatggcttttaaattatctttaaaaatgggttattgttctgaaaatgattacaagagggttttagaacattttaatgttgtaggactgccaacttcaataaaacttcacaaatgtaaaatatttgatcctcttaaactttggaaaataatgcaaaatgataaaaaaatgtataaaaatcatctaaattttattttacctgataaaattggcaaatgcacaattagaaaagagatcaaaaaaagtgaagttttatcgctccttaatgaagaactataaa

SEQ ID NO: 286551 - DNA, 325 bp, Unknown
  Bacterial polypeptide expressing nucleotide sequence isolated from the Sargasso Sea
ctgcggctcacccagaccaaaacgacccacgttctcgttttgtgcgaccaggtcgtgcacgggctgtaccagaatcagatacaaacgctgctcgatgacaccgccgtagctggccgatccttttatgtccacgtgattccaaacggtgagccggtcaaacacatctccttcaaggccgaaatcgaagaaaaaatgctgtcgctgcacttcccgcgaggcaccagcgcgctggtcgcgctgggaggtggggtgattggcgacctcgggggcttcgtggcggcgacgtacgctcggggcatcccggttatccaggtgcccaccacca

SEQ ID NO: 286552 - DNA, 487 bp, Unknown
  Bacterial polypeptide expressing nucleotide sequence isolated from the Sargasso Sea
agataaaaattctaaacttatatttaatttagattatactataatatctaaagcaattcacaaaagtattacaataaaaagaaaatttattttaaaagacgaaaaagagaaattaaaaaataaatactctagagcaatacttaattacggacatacttttggacatgctttggaaacatattataaatataataaaaaattaacgcatggagaggctatatctgttggtatgattattgcggcaacactttcaaacaaattaaattatttatctttaaaagacctccaaataataaaaaaccactttagatccactaaacttcctataaaagatgaaaaaatgttttgcacagaaatttataaaataattaaaaaagataagaaaaatattgatggcaaaacaaatttgattttattaaatgcgattggaagtgcatttttaaataatagactcaatatagacaatattagaaaattagttaaataa

SEQ ID NO: 286553 - DNA, 429 bp, Unknown
  Bacterial polypeptide expressing nucleotide sequence isolated from the Sargasso Sea
tatggcagaaatatcagctggaaaagcctcttcaaagtatcaaattcatattgctggcaaaaatttaccaaaatccgttttaaataagcatattggtaaaaaaaataaagttcttattatttctgacgaaggggttcctaaaaaacatatagattcaatcaaaagcataatcaataataaaaacaaacatgttctgatattagaacaaggagaaaaatctaagtctttttcatctttccaagaaataatgaataagctctttgagcttaattttgataggtctgactgccttatagggttaggcggaggcgtggttggtgatataactggattttgtgcagctacttttttaagaggcatcgattatattcaaattcccacaacactattatcccaagtagattcatccgttggaggcaaaacagcaat

SEQ ID NO: 286554 - DNA, 412 bp, Unknown
  Bacterial polypeptide expressing nucleotide sequence isolated from the Sargasso Sea
aaaagctaaaatagtaaaagatgacgaacttgaaggtggtataagagcattattaaattttggtcatacttttggacatgctatcgaagcatcaaaaaattataaaggcattcttcatggagaggcagttagtatagggatgaatatagcttcagcaatatctgcagatcaagagttaatatctcatgaagattattgtgaaatagaggatatgattctaagattaggtttgcccacacaaataccaaaaaaaatttcctcagtatcaataatgaaacatcttggacatgataaaaagaaagtgtctggtaaaaatagatttattcttttgaacaatataggtagtgcttttatatcggatcaactggataataaatatttagaagatttgtctaaaaacttcatcagttaa

SEQ ID NO: 286555 - DNA, 531 bp, Unknown
  Bacterial polypeptide expressing nucleotide sequence isolated from the Sargasso Sea
taataaaaagtaaaaaattttttttatttctggataagaatctgaaaaaaattttgaaattagaaaaaaaaattattgaaaaagcaattttagagagttgtaaaataaaaaaacagatagttgaaaaagatgaaagagagaaaaatattagaaaaagtttaaatttaggtcatacttttggacatgcttacgaggcgaccttgaactactcaaaaaagttaaatcatggggaagctgtattatatggcatatattcttcaataaacttaagtaaaagattgaaaacaataagtaataaagattaccaattgatttcctcccacttagctaaattacattttgatgatttaaataaattttttaataaaaaagatttgaataaaattttaagttttatggttactgataagaaaaacacctcgaaaaaaatcaattttataaccttaaaaaaaattggtgttgtaaacattaacaatcagctaaacactgattatgtaaaaaagtttattaatttgttcttacttaattaga

SEQ ID NO: 286556 - DNA, 412 bp, Unknown
  Bacterial polypeptide expressing nucleotide sequence isolated from the Sargasso Sea
aatggttaaaataaagattaacttaaaatatgatagctactatatttttctcaagcataatatttttgatcacataatcaagttccataaaaaacattatactgactgtaaagctattataattaccgaccataatgttaagaaactttatttgaaagatttaactaatagattttatattaaaaatataacggtaaacagctattctgttttaaatggtgaaaaaagtaaatctttcaaaactctagagtctctagcagaaaaaattataaaaaaaggaataaatagaaatgatattatttatgcttttggaggcggagttataggtgatttaacaggctttttatcttctatactattaagaagggataaagttcattcaaataccaactactcttttatcccaagttga

SEQ ID NO: 286557 - DNA, 658 bp, Unknown
  Bacterial polypeptide expressing nucleotide sequence isolated from the Sargasso Sea
attaatacaaaatatggaaaaaatttgcttggaacattctatcaaccaaaagaagttctaattgatatttctgttttgaatagtttgtcaaaaaaagaaataaaatctggatatgcagaaattattaaacatgccttaataaatgattatatttttttttgttggttagaaagaaacacaaataaattatttaatttaaacaaatctattttagaaaaagcaatttataaatcaataatgataaaactttattatgtaaaaaaagatgaaaaggaagctttattaaatagtaattcaagagcaatgctaaattttggacacacaattggtcacgctatagaaagccactataattacaaaaaatttaatcatggagaagcaatttctattggaatgattactgaagcaaaaatatctaattatcttggattgctttcttttaatgaattagaaagaataattgtacatttcaagaaaaataaacttaaaatttttgatgatatattaaaagaaaaaaaaataattaaaataatattaaaagataaaaaaaattttaataacaatattaatttttctcttatcgataaaatagggagttcaatattttacaaaaaactagataagaataaagtttataaaatcttacaaaatatataaa

SEQ ID NO: 286558 - DNA, 643 bp, Unknown
  Bacterial polypeptide expressing nucleotide sequence isolated from the Sargasso Sea
gggtcattttatcaaccaaaactcgttgtttcggatatatcatttttaaaatctttgccaaaaagagaaattctttgtgggtatgcagaaatttttaagcactcaataatttcagataaaatatttttttattttttagataaaaacattaaaaaaatcctacacttgaagtcgcccttcattgaaaaatcgatctacaaaagttgtataataaaaaaaaatgtagtcgaaaaagattttaaagagaaaaatttgagaaaaattttaaattttggtcatacttttggtcacgcttatgaatcggctcttggatattcttcaaaacttaaccatggggaagccgttatattgggaatatctagtgctgctaaatttagtcaacaaattaaaatgctgaataaaaatgattataatttaatttcagaacatattaaaaaaataaatagtcaacttaagctcaaaaatttttttaaaaacagcaatataaaaaaaatagcttcatttatgtctaatgataaaaaaaattcagacgaaaaaataaatttaattcttataaaaaaagtcggaaaagtgaatatacatcataaatttaatttaaaaaaaatagaaagttttttttcaaactatttcaatgttatttgaa

SEQ ID NO: 286559 - DNA, 79 bp, Unknown
  Bacterial polypeptide expressing nucleotide sequence isolated from the Sargasso Sea
aatggatgaatttgataaaaatttaagacttaaactaaattatggccacacttttggacatgctattgagaaattaact

SEQ ID NO: 286560 - DNA, 469 bp, Unknown
  Bacterial polypeptide expressing nucleotide sequence isolated from the Sargasso Sea
tgatttttttaatgatgttgacttcataatcaataagtattcaaacataaagaatcaaattgtaaaaattgataaatatgaatctaattctagaaaggttctaaatcttgggcacacaattgggcatgcattagaatcttattcacatttatcaaatagtttagatgagttaaaacatggggaggcaataatagttggtcttataactgaactgtatatatcaaatagactaaatgacttccctttagatacagtagataaattaaaagaagtatcactaaagtattttagaagaattagtctgacagggagtgacttaaaaggtatatatgatcttatgatttacgataaaaagaataataaaggctctgttaatttcgttctattagataaaagtggaaaaccaattattgatcaaaaggttgataatgatatttttattgaagcatttgcctattacaatcagtaa

SEQ ID NO: 286561 - DNA, 353 bp, Unknown
  Bacterial polypeptide expressing nucleotide sequence isolated from the Sargasso Sea
gatcgaaacgcacatgggctatggtgtgtggttgcatggggaagccgtagcggctggcaccgtgatggcattggatatgtcgcagcgcctgggctggatcagcgcccaagagcgcgatcgcggtatccgcctgttccagcgtgccggtttgccggttgttccgcccacggagatgaccgaggcggatttccttgaacatatggcgatagacaagaaagtgatcgacggtcgacttcgactggtactgctgcgccacatcggcgatgccgtggtgaccgacgattatccaaaagagattctacaggccacgctgggagcggattaccgcgccctggcccagctcaaaggttaat

SEQ ID NO: 286562 - DNA, 655 bp, Unknown
  Bacterial polypeptide expressing nucleotide sequence isolated from the Sargasso Sea
gatctgagttcggagaaagctacggatagattgatctgcggtgatgtagggttcggaaagacagaggtcgcacttcgtgcggcactcgttgcggtccaaaatcgaaaacagatcgccgtgctggtgcctacgacgcttctcgcgcaacaacattttgacacgttcaagaatcgtttcgcgaactggcctgtgtccattgcgagcgtcagtaggatgaattcaaacaaagacaacgcgatcgttgcagaggaatgtaaatctgggaagctcgatatcgtgatcggcacgcataaactactaggcccagaatttatcttcaaaaatctaggtttggtaatcatagacgaagaacaccgctttggagttaaacaaaaagagagtatccgggcgctgcgggccgaggtcgacattttggcaatgaccgccacaccgattccaaggaccctgaatatgtcgctctccgggataagggatctatccatcatctcgacaccaccagaaaatagattaccagttaagactttcgtaaagcccttcagagagcacctggtccaagaggccattcgaagagaaattctgagaggcggacaagtatttttgattcacaacgatgtcaagacgatcgagctatctgccgaaattgtcaggaagctgg

SEQ ID NO: 286563 - DNA, 901 bp, Unknown
  Bacterial polypeptide expressing nucleotide sequence isolated from the Sargasso Sea
acactcaacgatctgagttccgagaaagctacagatagactgatctgcggtgatgtagggttcggaaagacagaggttgcacttcgcgcggcactcgtcgccatccaaaatcgaaaacagatcgccgtgctggtgcctactacgcttttagcgcaacaacattttgataccttcaagaatcgttttgcgaactggcctgtgtccatcgccagcgtcagtaggatgaattcaaacaaagaaaatgcaatcgctgctgagggatgcaaatctggcaagctcgatattgtgataggcacgcacaagctattgggcccagaattcatcttcaaaaatctgggtttagtaatcatcgatgaggaacaccgctttggcgtaaaacaaaaagagagtattcgggctctgcgggccgaggtcgacattttagcaatgacagcaacaccgattcctaggaccctaaatatgtcgctctctggtataagggatctatccataatctcaacaccgccggataacagattaccagttaagactttcgtaaagcccttcagagagcacctggtccaagaagccattcgaagagagattctgagaggcgggcaagtattcttgattcacaacgacgtcaagacgatcgagttgtctgccgaagtcgtccgaaagctggtgcccgaggcccgaatcgggatcgcccacggccagatgcgcaaaacccaactcgagacgattatgtccgattttcaccaccgaagatctaacgtgctgatttgtagcacgatagtagagaacggccttgatattccaaatgcaaatacaatcattatacaacgcgccgataagcttggtctttcacagctgcaccagttaaggggtcgggttgggcggagtaatcgcccaagcgtat

SEQ ID NO: 286564 - DNA, 451 bp, Unknown
  Bacterial polypeptide expressing nucleotide sequence isolated from the Sargasso Sea
aaagcaattttagagagttgtaaaattaaaaaacaaattgttgaaaaagacgaaaaggaaagtgatctaaggaaagctttaaatttgggacatacttttggacatgcttatgaggcaacactaaattattctaaaaaattaaaccacggtgaagcagttctttatggaattttatctgctgcaaaattaagtaagaaactaaaaatgttaaaaaaaaatgaatttcaattaataatttctcatttatcaaaattaaattttactgatctaagcaggtttttctcaaaaaaacatttaaataaaattgtcaattttatgctaacagataaaaaaaacttttctaaaagtattaatataataactttaaataaaattggtagagcaaatacaaaaaagcaatttaaatcttttaaaatcaaaaaatttatcagttcagaattactgaaataaa

SEQ ID NO: 286565 - DNA, 813 bp, Unknown
  Bacterial polypeptide expressing nucleotide sequence isolated from the Sargasso Sea
catttttcaaacaaataatcatgatttagcagatattggagaaagcgagagaaaagtagttgttgtagacaaaaatgtatatgaactctataaagacgatctaaatagctattttaaaaacaataagattagcaacaagctcctggttgtagattcatctgaatcaacaaaaacttttgataatgcagataatgtaattaaattctttgaagatataaaaatactcagacgaagtgagccagtaatagcaataggaggcggagttctattagacttagttggcttttgctgcggtatttataggagaggaataccttacgtaaaaataccaaccacactccttgctttagtagatgcttctgtaggtgcaaaagtagcagtgaatcacttaaatcgaagaaatagaatcggtatgtattatcctgcttcattaacacttcttgataaaagctttataaaaacacaaaatgatcgagacataattaatggtattgcggagatctttaaactcgcaataattaaatccgaagagctttttaagttattagagcaaaatgcagagcaacttattaaagataaatttcaatatggcgcaatacctgtaagagtaattaatttagctattagtgacatgatcgatgaactaagcccaaatttatgggaaaagaagcttgataggtgtgttgactttggtcactcctttagtccatttgttgaaatgaaaaatattcctgacttgcagcatggagaagctgttgctttggactgtatattttcttcgtgtatttcctttaatcgaggctatatttcaaa

SEQ ID NO: 286566 - DNA, 567 bp, Unknown
  Bacterial polypeptide expressing nucleotide sequence isolated from the Sargasso Sea
tagatacattaccatttaatgagaaggtttcagggttaggtgaaataataaaatatgcagctataaatgatcgtagtttcataaataaattgcatgaatgggttaaagatattgaaagttttccctatactgaagcgattgaaagatgttgccggataaaagctgaaattgtcacaaaggatgaaaaagaaattgatttaagaagattgctgaactttggtcatacaattggtcatgcattagaatcgtattttggatttcgaaagttacgccacggcgaagcagtttcttttggaatgatgtgttctgcatggatctccttgaaaaaagggtttatagatacagaggaatataatttgttaattgaaattattaaccaattgccactacccaaactaagcaaagtagatcctgataaaataatgcattatatcaattttgataagaagaacgagaacggaaagcttaactttgtactcttggatggattgggcaaagccaaagtgtctcaagatgtatcgagtttagaaatattagaatcgttaaaggtgttaagtgaatgttaaa

SEQ ID NO: 286567 - DNA, 886 bp, Unknown
  Bacterial polypeptide expressing nucleotide sequence isolated from the Sargasso Sea
ttactgaaacagattcgcgacgtttcctctgttcgcggaaatcaactagttgtcgctgctagcggcgatgggtcagctcaaagagttgcttcaacactgcgttcagaaaacatagaggttgatgtcagcgaagacgagattctcgaaagtttggagaaagatgtcgttgtaacggcctccttagaatatggatttattgctcccgaaattgggcttgcagttctgaccgagagagatatcaccggacgtcggagaactcacagagttgctcgaacgagaaattccgcgcagaggacatttgaagacctgcagaccggcgattttgtggtgcaccatcaccatggagtggcgaaatattcgggaatggaacatcgacgtcttatgggttcggaacgcgactatctagtccttgacttcaagggttccgacaagctctatcttccgagtgatcaagtagctttgatccgtccgtatgtaggcggtgaactcccttccttaagtcgtatgggcggaattgagtttgccaaacagaagcaacgtgttcgtagcgcagtatctgaaattgctcaagagctcgttctgctttatcagtcacgaattcaaagtcctggacactcgttcccttctgagactccgtggatgagagaactctctgattcgtttgtatttgaagagacgccagatcagatgactgccattcaggaagtcttgaacgatatggagtcgtctcacccaatggacaggcttatctgtggtgatgtgggatttggtaagaccgaagtagcaatgagagcagcattcagcgcggtcgccgatggcaaacaggttgccgtccttgttccaacaacactattagctcagcaacatcaccaaacgttcgaagaaa

SEQ ID NO: 286568 - DNA, 490 bp, Unknown
  Bacterial polypeptide expressing nucleotide sequence isolated from the Sargasso Sea
atgaccattcaatcacacaagggtccctacgatgtctattttcaagaagatgcgttgagagaactcaataaccaacccgctgactcgcgtcacttcatcattgatcaaacggtggcggacttatattcagatgccctcgacaatgtgatgaaaagccattcagtactgacgttagaagccaccgaagagacgaaaacccttgataagtttacaggctacgtcgagcacctagtatcaaagggtattcggcggaatcacaccctggtggcgatcggtggtggcattatccaggacaccacgtgctttcttgccgccacactgctccggggtgtccgttggaccctttatcccaccacccttctttctcaggctgattcttgtatcgggtctaaaagttccattaatgtcgggcggactaaaaatattgtcggtacgtttacgccgccaaataaggtcgttgtaacaacgcggtttttggatacttggcaga

SEQ ID NO: 286569 - DNA, 490 bp, Unknown
  Bacterial polypeptide expressing nucleotide sequence isolated from the Sargasso Sea
ctagaaaataattataataaaattttgagtttaaacaaaagtgccatagaatatgcaatttataaaagtattagaataaaatcgaagtatgtaacagaagataggaatgagcttttaataaacaacaaatcaagagctatattaaattttggccacacttttggacatgctctagaatctatatatgcttacagcaaaaaaattaatcatggagaggctatttctattggtatgacagtggcatgtaaaatttcaaatcaattaaattttttagaccaaaatgacttgaaaaaaattataaaacattttaaaaatgttggtttaccaacacatgacaaacaaataaaaaataaaagaataatttctataattcaaaaggacaaaaaaaataaaaacggtaaaattaacttaatattattaacaaaaattgggagttcattttatttgcaaaatgttaacccaacaaaaatacttaaaattttaaattaaa

SEQ ID NO: 286570 - DNA, 460 bp, Unknown
  Bacterial polypeptide expressing nucleotide sequence isolated from the Sargasso Sea
atgaaagctattcttaaatcatgtaagattaaaagatctattgttgaagaagatgagtttgaaaaaggaaatagagcattattaaatcttggtcatacttttggacatgcaattgaaggttacctaaattatgatggtagcatattgcatggagaagctgtttcgattggtttgataatggcttttaaattatctttaaaaatgggttattgttctaaaaatgattatgaaagggttttagaacattttaatgttgtgggactgccaacttcaatgaaacttcacctagataaaatttttgaccctcttaaactttggaaaataatgcaaaatgataaaaaagtgcataaaaatcatctaaattttattttgcctgatagaattggtaaatgtagaattagaaaagaaattaaaaaaagtgaagttttatcactccttaatgaagaactaaaaacatgac

SEQ ID NO: 286571 - DNA, 542 bp, Unknown
  Bacterial polypeptide expressing nucleotide sequence isolated from the Sargasso Sea
agaattcaaatctggaatagcagaaataattaagtatgggctaatttataacaagaaaatattcaatatttttgataagcagcatcagcaaattctgaaaagaaaccatagagtaatcgaagagcttattcatgagtctgttaaaacaaaagcaaaaattgtcactgaggatgagagagagttaggcataagagcaatattgaactttgggcatacctatggtcacgcaatagaagcaataaataattacaaaaacattctacatggagaagctgtggctatgggcatgagaatggcttctaaaatgtctatgttagagggtcacttaaatgaaaaggcttataaaaaaataattaatgtttttgaggctcttaactttcctaaaaatacatcaaataattattcagacctaaagaagtttattttgagtgacaagaaagtcaaaggtgggaatattaatttaatacttttaaaaggaattggcctgtcattccagactcaaaaatttaattttgagaatttcaaaaaatctttttcttagg

SEQ ID NO: 286572 - DNA, 556 bp, Unknown
  Bacterial polypeptide expressing nucleotide sequence isolated from the Sargasso Sea
aattttaaaacattcattaatacacaacagaaaatttttcttttggctaacatcaaatgcaaaaaaaatgattgctttaaaaaataaaaaactattaaatttagcaattataaaaagctgtaggataaaatctgaaattgttaataaagatgaaaaggaaaaaaatttaaggatgattttaaattttggtcatacatttggacatggttttgaagcagttaaaaaattttctaataaattaactcatggagaggctgtgctactaggtatgataattgcatgtaaattatcattcgaaaaaaaattgttacctaaaaaagatttaattttaatagaaaaacattataaagacttgggtctacctatgaacattaaaaattttttaaaaaaaaatgaagttaataaattgcttaatttcatcagtaaagataaaaaaaattttaacgaaaatataaatttaatcctttgtagaaaaattggtaaaacttctaaacctaatgattattctttcagtaaaatatttcttaaaaagtttttgttttctttatataattaa

SEQ ID NO: 286573 - DNA, 495 bp, Unknown
  Bacterial polypeptide expressing nucleotide sequence isolated from the Sargasso Sea
ggttagaaaaaaatgcaaaaaaattacttgatttagatcaatctatcttagaaaaagcagtttataaatcaattttaataaaactattttatgtaaaaaaagatgaaaaagaatttctattagacaataattcaagagctatgctaaattttggacatacaattggtcacgctattgaaagttattataattataaaaaatttaatcatggtgaggcaatttctattggtatgattactgaagcaaaaatgtcaaattatcttgatttattatcctcaaatgaattagaaagaataatttcacatttcaaaaaatgtaaacttaaagtaaatgatattatattgaaagataaattattaattaaaaaaataattaaagataaaaaaaattttcaaaaaaatattgttttctctctaatagataaaataggcagttcgattttttacaaaaaattagataagaacaaagtatataaaattttacaaaatatataaa

SEQ ID NO: 286574 - DNA, 434 bp, Unknown
  Bacterial polypeptide expressing nucleotide sequence isolated from the Sargasso Sea
tatgaaaccaattaaattaaaaattgaaacaaaaacacaaaaatatccaataataattggatcaaatttaattactaacttttcaaaaataattaagaataattctttaatatttaatcaatgtcttcttgtagttgataaaaatgtgccaaaaaaatttatcactaaaataaaaaactcattaaaaaaaaataaaatatatatatgtttttttaatgccagcgaggctaataaaagctttggtattataaataaaattctagaaattttattaaataaaaacttttctagagatgactgcttaatttcgataggcggaggtattacaggtgatgtaagtggttttgcatctagtatctttaaaagaggtatgaaatttataaatataccaacaacacttttatcccaagtagattcttcgattggtggtaaaa

SEQ ID NO: 286575 - DNA, 357 bp, Unknown
  Bacterial polypeptide expressing nucleotide sequence isolated from the Sargasso Sea
ttggacatacttttgggcatgcgttagaaactatcggcaataataagctttatactcatggtgaggcagtggctttaggtatgctcgcagcgacgaaactttcagaaagtatctcagatttagatcctaaggtttttgatagagttcattccacgataaaaaacactggcataaaagtgaaactcaagaaaaaaatcttcccaaaaaaattaattaaattgatgcagtccgacaaaaaaaagaataacagccagcttaaatttattttgctcgaaaaaattggaaaggcaaaaattaaaagcgtcagtaatgaagtaacaatagagaatgctataaaaaatagcttattttattagt

SEQ ID NO: 286576 - DNA, 499 bp, Unknown
  Bacterial polypeptide expressing nucleotide sequence isolated from the Sargasso Sea
aataattattctaaaattttaaatttgaagtctccttttatcgaaaaagcaatttcagaaagttgcaaaattaaaaaaaatatagttgaaaaagatgagaaagagaaaaatttaagaaaaattttaaacctagggcatacatttgctcatgcttatgaagctaaactctcatattcaaaaaaacttaaccacggggaagctgtgatattaggaattataagctctgctaaattcagttttgaaaacgggatactaaaaaagagagattatgaagaaatagttaaacatataactaatttgaaaataccattaaatttgaataattatttcaaaaaaaaagatataaactcaataattaaatatatgaaattagataaaaaaaataattcttctaatattaatttaattttaatcaaaaaaattggtcacataattcttaattcaacatttaatcagtcaaaaatcagaaaatattttaataaagaattaattaattaat

SEQ ID NO: 286577 - DNA, 334 bp, Unknown
  Bacterial polypeptide expressing nucleotide sequence isolated from the Sargasso Sea
catgtggtggaaaccctttgtggttacggcacctggctgcacggcgaggcagtggccatcgggatggtggcggtggggcagttggccgtgaaccgcggcagctggacggcggacgaggccgggcgccagaagcagctgatccagcgctgcgggctaccgacggcctggccggatctggatcctgacgccgtgctgcgcacccttcagggagacaagaaggtgaaagacggtcgcttgcgctttgtgctgcccacggccatcggcagagtggagatccgcgatgacatcagccgggacgagatcctgcattgtctggatcagttgcgaggctgaa

SEQ ID NO: 286578 - DNA, 523 bp, Unknown
  Bacterial polypeptide expressing nucleotide sequence isolated from the Sargasso Sea
aatgattagtgtaaaccttggtaaccgctcatatccaattatcgttaaaaatggtgtcattaattctttaagctcatatttgaataatagtggagaaaaatggattctaatttctcaggactcaatcatgcaatattacggtaataagctttacgatcatttattgggccatggttttaaaatcacaaaggtgtcaattaaagatggagaatcatccaaagatctcgcgatctacacggatattatctctactatgctcgagaagaattttgatagatcatccgtcgtattgtcattgggcggtggagttgttggcgatattgctggttttgtttcagctacttatatgaggggagtaagatatcatcaaattccaactacactgttagccatggtagactcatcaattggtggtaaaactggactaaatttttcaaaaaccaagaatataattggatcgatttaccagccttctagcgtaattattgatcctgagatactaatgacccttccaagagaagag

SEQ ID NO: 286579 - DNA, 406 bp, Unknown
  Bacterial polypeptide expressing nucleotide sequence isolated from the Sargasso Sea
aataaaaacaaaggcaaaaattgtaactaaggatgaaagagaatctggtatcagagcaatactaaactttggacacacattcggacatgctattgaagcatataaaaaatacaaaaatataactcatggcgctgctatcatacttggaatgattattgcctctaaattatcactttatgagggatatataaaagatgatcagttaaaaaaagtgttagatattattgattcattagaattagaatctgactatagcaaatataattatgcaaaattaaagccgtttatggctaaagataaaaaagtttctaatggcaaactaaatttagttatgattgataaaaactttaatggttttttaacatcgaaatataacttaaaaaatataaaaaaaattttaggttaa

SEQ ID NO: 286580 - DNA, 485 bp, Unknown
  Bacterial polypeptide expressing nucleotide sequence isolated from the Sargasso Sea
gggtgaacttgttaagtatcattttttaggcggagggcaactggactctcttcctctcgacgagcgggtagccgcatgtgttcgaattaaagcagaggtagttgcgtctgacgaacgagaaggcggtggtagggcattgctgaactacggacatactttggcgcacgctttagaaattgaagggagctttgacctccgtcacggcgaggctgtcgccattggtattgaatacgcggccatgcttgcccacgagatgggacgtatcagtgacgcgtcgttggaggaacatcgccgcgttctgcacgcctatggtttaccccgcggtctacctgctggatcgaacccagacagaatcgtgaaattatttggtcgggataagaaagcaaaaaatggtttcaccttcgtcctagacgggcccgaaggtctagaagtcgtagaaggcatacctgaaaacctattaagaaaaatattagagagaatgtagg

SEQ ID NO: 286581 - DNA, 858 bp, Unknown
  Bacterial polypeptide expressing nucleotide sequence isolated from the Sargasso Sea
aaaacaagtaaagcagagccctgcattgaaagtgggagttggcgcaaggactttctatcgatgtttccatatgagttaaccaatgctcagtcaagggttaaaagcgaaataaataaagaccttattaaatctgaacccatgatgagattggtccaaggtgatgttggttcaggaaaaactgcggttgccgttcttgcggcaacaaaagcgttagattcaaattttcaagctgcatttatggcgccaactactttgctagctcagcaacatttcgaaaatataaaaaatttttttccaaatcatattgatgaaattgaactgctgacgagtggtcttactaagagcgttagaaaaaaaacccttgagaaaattaagtcaggaaaaattaagtttattgttggcacgcatgcaatctttcaggcagatgttgtgtattgcaatcttgcattggcaataattgacgagcagcatcgttttggtgttaaccagagacttgcactgttaaaaaaaacagaaaaccagaatatccatccccatcaacttaccttaacagcaacccccataccaagaactttatcaatgagcatttatgccaacatggatgtttcggttattgatgaaatgccgccaggcagacaaccaatcattacttcgatgctgtcaatgaaatctaaggaaaatcttatatctagaactagcgaggcaatctctaaagatagtctgatttattggatatgtcctctggttgaagaatctgaaacattagacttaagttcagtaactcaaacacatgaaattttatgcgatgaattcggtgtggataaagtcggtttagtacacggcaagctttcaaaagat

SEQ ID NO: 286582 - DNA, 861 bp, Unknown
  Bacterial polypeptide expressing nucleotide sequence isolated from the Sargasso Sea
agtttcgagttaactcaagatcaacaactggcaattgaagccgttctcaatgatctgaagtcagacaaggcaacggatagattagtttgcggcgacgttggctttggaaaaacagaagtcgcaatgcgagctgcctttgttgctgttaaatcaggtaaacaggtagtgattttggtaccaaccactctgcttgcgcaacagcattacgacactctgaaagatcgtttcgcacagtggccctttattatcgagctagttagtaggctacgctccaagtcagaaatggacaagatcgcgcttggatgtgcttccgggaaagtggatattgtcgtgggcactcacaaattatttggagaagaatttaaattcaaagacctaggcctagttgttattgatgaagagcaccgctttggggtccgtcagaaagaactcatgagggcatttagagctcaggccgatgttttaactttgactgccaccccaataccaagaactctgaatatgtcgctaggaggaatcagagatctttcgattattgccaccccaccagcgaaacggttgtcgattaaaaccttcgtgcaagaaaagagatccgatctgattaaagaagccattaacagagaactcatgagaggaggacaagtattttttgttcataacgaagtcaaaacaattgagctaatcgcccaaactctctcagaacaagtgaccgaagcacgaatcggagtcgggcatggacagatgccgaaaaagcaacttgagcaagtgatgggagatttttaccaacgtaaacttaacgtgcttgtttgcacgacaattatcgaaaatgggatcgacataccaaatgccaacactatcatc

SEQ ID NO: 286583 - DNA, 427 bp, Unknown
  Bacterial polypeptide expressing nucleotide sequence isolated from the Sargasso Sea
atgaaaaaaataataattaataatcaaaatttaaattcaaaaatatttattgaaaaaaattcaataaaaaaatatttaaaattagaacttaagaaaaataataaaatatttattataatagataaaaaagtttatagttcctgcaagttcttatttaaaaaaagaaataatttttttattataaaaatagctagcaatgaaaaaataaaatcttttaattattataaaaaaataaataattatttattaaaaaataatattaatagatcttcaacattggtagcaataggtggtggaactataggtgatctttgtggtttcattgctagcactattttaagaggtgttagatttgtttcaatacctaccactcttttatctcaagttgatagctctattggaggtaaaaatggaattaatacttcct

SEQ ID NO: 286584 - DNA, 786 bp, Unknown
  Bacterial polypeptide expressing nucleotide sequence isolated from the Sargasso Sea
aacaaccgcgccattagatcaaggaatgctcgcccgcaatgaaaacctcgccgttatcactgagagtcaactttttggcaaaagagttacccaacgccgtatgcgacgaaaagcctcagagaatgtagaacttattctcaaaaacctcgcggaattaaaggtcaatgatgccgttgttcattttgaacatggagttggaagataccgcggattggagaccataactactgatgaccaggcgacggagtttctggtcctggaatatgcgaaagccacaaagctttttatcccggtcacctctttacacctaatcagtcgatacagcggaggtgaacagaaatctgtcatacttgacacgcttggaaacgaaagttggaggaaatctaaaaaaaaggcggctgaaaagatacatgacgtcgctaccgagttactggaggtttatgctaaacgagaagcccgaagtggtttcaaatacaaattagatcaagccgagtatagtaagttttcgtcagcatttaccttcgaagaaactcctgatcaggcgaatgcgatcgagagtgttattacagatatgcaaagtgatcgaccaatggatcgacttatctgtggggatgttggtttcggaaaaacagaagtcgcaatgcgagcggcttttctagcagttaaaaacagcaagcaagttgttatattggttcctacaacgctgcttgcacagcaacactatgaaagtttcagagatagattttctggctggccgattatcgtagaacaggtttctcgattcaa

SEQ ID NO: 286585 - DNA, 673 bp, Unknown
  Bacterial polypeptide expressing nucleotide sequence isolated from the Sargasso Sea
ggttaattcacctcaggggaaaaatttaataggaactttttatcaaccagattttgttgttacggatgtttcaactttagaaaaattaccaaatagagaaatggtatgtggttatggtgaaatacttaaacattcttttattctagataaaagtttttttaattggttggacaataatggtagaaaaataattataaaaaaagataagaacataattaaaaaagctatagtgcatagctgtaaaattaagtctaaaattgttgaaaaagatgaaaaggaaaaaaatttaagaaaagttttaaactttggtcatacatttgcacatggttttgaagccgcccaaaatttttcaaaaaagttaaatcatggtgaagccgtattgcttggtatggcaatcgctagtaaattttcttatgaaaaaaaaatcttatcttacatagaattaactaaaataataaatcattaccgttatttaaatttaccacttagtttaggaaaaatatttaaaaaaaaagaaataaacaaaataatctattttatgcagaaagataaaaaaaacctaaacgagaaaattaatctaatacttattaaaaagattggtaaaattaataaacctattggaaacgcatattcaagtaatgatattaagaattttttatattcgcaaatataa

SEQ ID NO: 286586 - DNA, 682 bp, Unknown
  Bacterial polypeptide expressing nucleotide sequence isolated from the Sargasso Sea
atgttaaatggcagactacataaagcaggtggagatgatggacatggatgtggatggaaattcaaaggtgcatttcaccaaccttggtacgattgtattttagaaaactggggaataagtaaaagagctagtgtaaataaagaattaattgatgaactagtttcaaaggggactcctagaaatcaaatttttatgtcaggtttatcttgtggtggaattgatacattgagacacaaaggtctttacccagaagatttcaatgcaacaattgcttttatgcctaactgttgggatagaagacccgatacacctcttcgaaaaatgcagatcgatgaattaaaaagttttgagagaattgatgcattagtttttcatagtcctgttgatggcgagggagattggagaagtaatagcatttggatgaaaaaagatttgggaaatattcctggtatactatgggtcgatacccctggacatacaggaaaagatattgttattaatggaaaaaagtgtggaattaaagataagatgaaaggtgggtgggaagaagcttggcctgaaggaaaagaaaaactaacaagtgaaaaaaaattcattaaagttgataaaaaattatacaaagaaatgaagaaaaaaggtgcaggacactacttagtttcatattcttgttttaattattatc

SEQ ID NO: 286587 - DNA, 2260 bp, Unknown
  Bacterial polypeptide expressing nucleotide sequence isolated from the Sargasso Sea
atgcatcctaatgatttatttcttcaaagcgaaaaagaaatacagaaaattaaggatagatgctcagttctgattcagccggagaaactgcccgactctgataaaagcataagattgaactttaacactgaagcaataaatttaagaatggcgggtaaaaatttgtctgatagagaaaaattgcttcaatacactaaagaaaattctatggaaaaagttttgatatcagctcccacaaaaaataaaggatcaatgatcaatgattttttaaaatccgagggaataagagtaaataagatcgaagaatggggtgaattccttaataacggcaaaggaatttatataacccctaaaattctaagcaacggtttttcgataaacgataaaaacaccgcaattattggagaaactgatttatttgggcaacgatcaaaacgtcatgtgggcacaagaaaacgacagaaccctgaggctattattgaaaacttgaaagacttaagaataggaacccttgttgtgcatagagattatgggattggaaaatatgatggattaactaaattaactgtagatgaagttgaatcagagtacatctgtatcaattatgctaggggtgatttactgcaattaccaataactcagatggagaaaatctctaggtatattggtgacggcaatgatgagagcttattgagttatcttggcagcgaccaatggaagaaaatttgtagtaaagcaaaaattaaagcgcaagatgtagctgctgaacttctagaactctatgcaaaaagaaacttaaccataggaaagaatcaatctatcaatcagcatgaatatcagcaattctgctctgggtttcattacattctaaccaaagatcaagctctagcaatcagtcaggtattggatgatatgtcctcatctaagaaaatggatagattagtttgtggggatgttggttttggaaaaaccgaggtagcattaagggcaggtttttgctctgtgatgaatggcaatcaagtggtgatcatggtaccaacaactcttcttgctcagcagcactatgaaacctttcaagaaagatttagtgattggccagttaacatagagctcctgtctagaactcagactttgaaaaaaagagaaaaaataatcggcactattagatctggtgaaaccgatattattattggcacacatgctgtcttatcagaaaagatggcctatcccaacatcggtctagttattgttgatgaagagcatagatttggtgtcaggcataaagaacaattaaaaaaaatgaagcactctgttgattatttggccatgacagcaacaccgataccaagaactctaaatatggctatcggagaacttaaagatatttctatgatatcaacaccgccagaaagtcgtttagccgttagaacatatataaatcgctgggaagatgcattgattaaagaagcatgtcagagagaaattaatagaggcggtcaaatactttttgttcacaataaaattgaagatattgagaaaattgtggatcgattgaaagcttttcttcctggtatttccgttgagatagctcatgggaaaatgagggaaaaaagactagaagagatcatgatgaaatactataacaacgaattcagcttactagtggcaaccacaattatagaaagtggacttgatataccaaacgcaaacaccattattataaataatgctgatcgatttggtttagctcaactgcatcaattaagaggaagggttgggcgttctgagagacagtcatatgcttacttattgacaccccccaaacaacagctatctgcagatggaatcaagcgtcttgaagcaatagaggcaattgaggatcttggtgtaggatttattttggctactcatgatctagagataagaggtgctggagaaatccttggtgatgaacaaagtgggcaaattcaaaaaattggattctcactttataaagatttattagaagaagctattaacacatacagaaaagatgacaaggaagaacaaagttcttttatgacagatatcaatttaggaatcccaaatctaatcacagaagattatatgcctgatgtgcatctaagattaatgttttacaaacgtatttctgctgcaaaagatggggcgcagataacaaccataaaaaaagaattaaaagatcgttttggaaatttgcctgaatttaccttaaatcttctgcaaatcactaaacttaaac

SEQ ID NO: 286588 - DNA, 3496 bp, Unknown
  Bacterial polypeptide expressing nucleotide sequence isolated from the Sargasso Sea
atgacacatatttcagccctaacaccgcccgttgtaaaaaatggcactcaaatgcaaactctgtcgtgtatcaccggagtgggtcaagtggtcaccctcgccagcttgatacgccaacacccaggcaccacgctcattgtcaccagtgacacaccaacggcattgagtctcgagttagagcttaattatttattagcgaacaccaccattaaggtgcggctgtttcctgaccgtgaaaccctgccctacgacagtttttcaccccatcaggatttgatctcccagcgtttagaaaccctatcgcaaatatcccatgctgagcacagcgtggttatcgtgccggtgacaacactgatgatgcgcttgccgccgaaatcctatttaagctccaatgtatttgtgcttaaaaagggcgataaatatcagctccatgatgtgcgccagcaattaaccgatacgggctatcatttagttgagcaagtttacgaacatggcgagtttgccattcggggctcaattctcgatatcttccctaccggcgtgaatatgccgctgcgtatcgagcttttcgatgatgaagttgaaaccattcgccatttcgacccagagacccagcgctcatccacacccgtcgatgcggtgcgattattaccggcaaaagaatttccaaccgatagcagtgctatcgaaggctttagacaacgctatcgccgccgttttgaggtgatcgttaaagagccagagtcggtttatcaattggtgagccgaaatttgatgcccgctgggattgaaaactatctgccactgtttttcgatgaggtcgcgacgctatttgattacctgccgaaggacactcagttagtcaccttgggcgatatcgaaaaatccgctcgcgcccatttgcatgaagtggaaacacgatatgaagaccgacgggtcgatccgctacgaccactgcttgcccctaaagaactgtatttactgatagaagaattatttgccgcctttaagccgctacctcgctatcaatttgtggccccaaatcctgacaccaatggtgctgcggcgcaaattgatgcaagagccttgcctgaggtaagcgccaatcacaaattaaagcagccgttaatcgcactgcaggattatgctgagcaggcgccgaggatgctgtttagcgcagaatctgaaggccgccgtgaagcgctgctcgaactcttgggtaaaatccagttaaagcctacggtatttagtcattttgatgagtttattaaaactgataccaaacttggcttgatcgtttcgcccttatcccgtggttgtgtactgggactcggtgcacaaactgccgtcagcatcatctgcgaaactgagctcttcggccagcggatttcacagcagcgtcgccgcgaaaaacagcgtcagatcagtaacgataccttaatcaaaaacttagccgagctgaaagttggccagccgatcgtacacttagagcacggtgttgccctttaccaaggtttagtcaccctcgatactggcggcattgttgctgaatatttgcaacttgagtactcaggtggcgataagctctatgtccccgtttccaatttacatttaattagccgttatagtgttggcaccgatggggaaacgcatcttaataaactcggtaacgacacttgggctaaggcaaaaaataaagccattgaaaaaatccgcgatgtggccgcagaacttctcgatgtctatgcacgtcgccaagctcgtccgggtgagagctgcgaaatcaatgacgaagaatacgcccaattcgctcaaggttttccctttgaagaaaccgtcgatcaagaaagtgccattcatgcggtgttagctgacatgcaatcgccaaccgcaatggacagattagtttgtggtgatgtgggctttgggaaaaccgaagtcgcgatgcgcgccgcctttgtggcggtgaatgcgggtaaacaagtggttgtgttggtacccaccacattactcgcccagcagcactacgaaaactttaaggacagatttgccgactggccggtggtgattgaagtgatgtcacgctttagaaccgccaaagagcagacccaagtgctaaaacagctcgaagaaggcaaagtcgatatcgtgattggtacccataagctgctgcaatccgaggctaaatttgagaatttaggcctacttatcatcgacgaagaacaccgattcggtgtcagacaaaaagagaaaattaaagcactgcgggccaatgtggatattttgaccctcaccgccacaccgatcccccgcaccttaaatatggcgatgtcagggatgcgcgacttatcgattattgccacacctcccgctaagcgtttggcggtgaagacctttgtgcgcgaatccgatcccgcgacggtgcgcgaggctatattgcgtgaaatcctccgtggtggccaagtctattacctgcacaataatgtcgaaaccattgaaaaatgtgcccaagacattagtaccttgttacccgaagcgcgggtggtggtcgcccatggccaaatgcgtgagcgggatcttgagcgggtgatgtcggacttttatcaccaaagattcaacgtgttagtctgtaccactattatcgaaaccggtatcgacgtccctagtgcaaacaccattattatcgaacgcgccgacacctttggtttagcccagttgcatcagctacgtggccgtgtgggtcgctctcaccatcaagcctatgcgtatttgatgacgccacatcctaaacgtatgactagcgatgctcgcaaacgtctcgaagccatcgatgcccttgaggatttaggtgccggttttatgctcgccacccaagatttagagatccgcggcgcaggcgaactcttaggtgatgagcaaagcggccatatctcaaaaattggctttagcctctatatggaaatgcttgaatcggcggtcaaggcgctcaaacagggtaaagagccatcgctggcgcaaatgctcaatcagcaatgtgaaatggagctcagaattccggccctattacctgaagactatgtcggtgatgtgaatattcgtctgtcgctctacaagcgtatcgccagttgtgacagcgaagaagccttagacgaacttaaagttgagcttatcgaccgctttggtttgctgcccgaggccactaaaaacttgatggaaatgactctgtataaacatcaggcaactcggctaggggcaactaaaattgaggtacacgccaagggtggcagtatcgaatttagccaagatcataatatcgacccaggctttatcattggattactgcaaagtcagccacaaatctatcgaatggacgggccgaataagttaaagttcatgctcagcgccgaaacggcaaaagagaggctcgcgttagtcaagctcttgctcgaacaactatctcaacatcaatcgcaacatcgtcttggagataaatagt

SEQ ID NO: 286589 - DNA, 850 bp, Unknown
  Bacterial polypeptide expressing nucleotide sequence isolated from the Sargasso Sea
ttggttaatgaagaaacaaaaaatattacaacagttgataaaatttgggaaattatgcactcgaattcagtaacaagaagcacaaatgtaatttgtattggagggggagtcctttgtgatgtagtgggatttgcgactagtacttataaaagaggtgcaaatttactattaattccaaccacacttctcgcgatggttgatgcttcacatggtggaaaaaatggagttaataataactatggaaagaatcagataggtacattttatttacctaacgaggttttagtttgtgttgaatttttaaattccttaaataaagaagaaattaatactggtttaatcgaggttattaaggctggctttattggaaataataaaattttagagctagtttatggagatgactcagtttattccgacaagagtttactccaactagctattgatgttaaaacaaaaattacaaaggaagacttaaaagaatccaatacaagaatgtatttaaattttggtcacacaataggacacttaattgaatcagattcaaactatcaaatttcacatggtcaagctgttggcattggaattttgattgctttagaaatttcagaaaaagaatacaatttagatcaatcatatagaaaaaattacatgacttttttaaataactctggtcttaaaacttattataaatttagaaaaacaagaagtgaacttataacgatattaagtaatgataaaaaagtaaataatgaaaagattaattttgttttgttagaagaaatagaaaaaccaatccttaaagagatagatattgagcaagcaatggaattgataataaatgagtaaa

SEQ ID NO: 286590 - DNA, 508 bp, Unknown
  Bacterial polypeptide expressing nucleotide sequence isolated from the Sargasso Sea
tggttagaaaaaaatggtaaaaatattctaaataaagacaagaaagacttagagtatgctatttatatatgttgtaaatctaaggcagatatagttaaacaagatgaaaaagaaaaagcacaaagagcgttattgaaccttggacatacttttggtcattcatttgaaagaatagcaaattttaaaaggttttcccatggtgaagctatcgccctaggtattatattagcctttaaattttcttttgaactaaaattgtgtaaagtagaagactttaatagagtttataatcattttattgatgttaaattacctagcgaaataaatcatttatttaaaatgaagattaaggcaaatgatgttatagaatcaatgaagttagataaaaagactatagatagagcaataaaactaatattagtaagaggtataggcagtgcatttattagtaatagagttaatgaaaaaaaacttagcttatttttaaagaataatggattcgactaat

SEQ ID NO: 286591 - DNA, 611 bp, Unknown
  Bacterial polypeptide expressing nucleotide sequence isolated from the Sargasso Sea
gggagcattttataacccgagcctagtaatagtttctacatacttcttaaataccctgtctgatgaagaatttaaatctggtcttggtgaagtggttaaatatgcactaataggaaataaaaaattaagatctattattgaaagaaattctcagcaaataataagtagagaggaatcggtcttaaaatcaataattgaagagtcaattaaaactaaatcaaaaattgtaactaaagatgaaaaagaaaatggtatcagagcgatattaaattttgggcacacttttggtcatgcaattgaggcttataaaaactacaagggcatcacccacggagcagcaattacacttgggatggtaattgcttcaagaatatctttttatgagggatatataaaaaattatcaacttgataatgttataaatttaatctcctcaataggtttaagaactgactatagtaaatataattatattcaactcaaaaaatatataaaatcggataaaaaaattaaaaatggtaaattaaatctagttttaattgataaaaattttaatgcctttacaacatctaaatttaataataagaatattttaagagcttttaattaag

SEQ ID NO: 286592 - DNA, 448 bp, Unknown
  Bacterial polypeptide expressing nucleotide sequence isolated from the Sargasso Sea
ttggaaaaagcaatttataaatctattatgataaaacttttttacgtaagaaaagatgaaaaagaatccttattaaatagtcactctagagcaatgttaaattttggacatacaattggtcacgccatagaaaatcactataattataaaaaatataatcatggagaagcaatttctataggaatgattactgaagcaaaaatatctaattatcttggtttgctttcagctactgaacttgatagaataattatacattttaaaaaatataagtttaaaatttttgatagaatattaaaagaaaaaaaactgataaaaataataagtaaagataaaaaaaatttcaaagataatattaatttttcactgataaataaaattggaagttctatattttatgaaaaactaaacaaggataaagtttataaaattttacaaaagatataaa

SEQ ID NO: 286593 - DNA, 607 bp, Unknown
  Bacterial polypeptide expressing nucleotide sequence isolated from the Sargasso Sea
tatcttttttaaaagtcttcctaaaagagaattcatttttgtggattttggagaaatattaaagtactcacttataaaagatcaaaagttttttaattttataaaaaaaaattcaaaacaaattttaaaaggaaacgacttaaatattttaaaatacctagttttaagaagttcaagaaacaaggttcattttgtagttgcagatgaaaaagagtccaacaaaagaatgattttaaattttggtcatacatttgcgcatggaatagagtcttcaaataatttttcaaaaaaaattaaccatggagaagctgtgcttatcggaatgctattagctacaaaactatctttttataaaaatatttgttctttaaaaactatgcaggaaattgaaaaaatttatattttaaacaaactgccctcaaaactaaataaatatttgaacaataaacaaattaataatatttctaaactaatggttaatgacaaaaaaaatgatgatgaaaaaataagtttgatacttttaaaacgaataggcaaaactaccacgccaggtaaaataaaaatgtctgttgataaagtaggtaatttcttaaaaaagattagttaa

SEQ ID NO: 286594 - DNA, 355 bp, Unknown
  Bacterial polypeptide expressing nucleotide sequence isolated from the Sargasso Sea
aatgatcttaaattttgggcatactattggtcacgcaatagagtcatttacaaaatatgaagaattattacatggtgaagcaattttttatggaatgaagtgcgcattgtatttatccaataaatttggagatttaaataatgatgattacaaaaaatcttgccaattgttatccaagtttgatttaccgagacttaacatcgataacaaagatatttttattaactttgtaaaaaatgataaaaaatttagaggtgaaaacattagatttattttactggatgaaattggaaaatctagaattagcgaggatatttcatttgatcaaattgaagaaagtttgagtgtgctatga

SEQ ID NO: 286595 - DNA, 562 bp, Unknown
  Bacterial polypeptide expressing nucleotide sequence isolated from the Sargasso Sea
aaagacattatcagataaagaatacaaatcaggtcttggtgaaatagtaaaatattctttaattggtaataaaaaattaaagaaaataattgaggaccgatcacaactaatagttgataaagatgagtcaactttaaaagttttaatagaagaatctataaaaacaaaatcaaaaattgttacaaaggatgaaaaagagtcaggtataagagccatattaaattttggacacacatttggccacgcaattgaagcgtataataattataaaaatataacgcacggagcagcaattacactaggcatggtgattgcttcaaagttatcattttacgaagggcatattaaagattatcagctagacaatatcataaacatgattgagtcccttggactaaatacagatcatagcaattatagttactctaaattaaaaaaatatatggcatcagataaaaaagttaaagatgggaaacttaatttaattttaatagataaaaaatttaatgcctttaaaacttcaaaatataatatcaaaaatatcacaagtgccctaaattaa

SEQ ID NO: 286596 - DNA, 1681 bp, Unknown
  Bacterial polypeptide expressing nucleotide sequence isolated from the Sargasso Sea
cgaagaatttagtttcgagttaactcaagatcaacaactcgcaatcgaagctgttctcaatgatctgcagtcagacaaggcaatggatagattagtttgcggcgacgttggctttggaaaaacagaagtcgcaatgcgagctgctttagttgctgttaaagcaggtaaacaggtagtgattttggtacccaccactctgcttgcgcaacagcattacgacaccctgaaagatcggttcgcacagtggccctttattatcgagctagttagtagactacgctctaagtcagaaattgacgaggtcgcgcttggatgcgcttccgggaaagtggatattgtcgtgggcactcacaaattatttggagaagaatttaaattcaaagacctaggcctagttgttattgacgaagagcaccgctttggggttcgtcagaaagaactcatgagggcatttagagctcaggccgatgttttaactttgactgccactccaataccaagaactctgaatatgtcgctaggaggaatcagagatctatcgattattgccaccccaccagcgaaacggttgtcgattaaaacgttcgtgcaagaaaagagatcgcatctgattaaagaagccattaacagagaactcatgagaggaggacaagtattttttgttcataacgaggtcaagacaattgagctaatcgcccaaactctctcagagcaagtgaccgaagcacgaatcggagtcgggcatggacagatgccgaaaaagcaacttgagcaagtgatgggagatttttaccaacgtaaacttaacgtgcttgtttgcacgacaattatcgaaaatgggatcgacataccaaatgccaacactatcatcatcgatcgagctgataagtttggtctagcgcagctgcatcagttgagaggaagagttggtagaagcagcagacaagcctacgcttatctactcactccagagcctgaagctcttacgccagacgccacaaaaagactcgacgcaatagaagctgcaggagaattgggaatcggcttcactcttgctacccaggacatggaaatcaggggtgccggccaattactaggtgaggaacaatctggtcagatggaatccattggtttctccctttatatgcaaatgcttaataaagctgtcgaggacatcaaccaaggaaagattcctgacctcgataatccgctgaatgaagttgccaaagagattaacctgcattgttcagccatcatcccggatacatatctcccagacgtccatcatcgactcatgttttacaaaagactggctaacgccaaaaccgagaatgaactcgatgctcttcaaatcgaaatgatagaccgtttcggaatactgcccgaagcgttgaagagactttttgtgatttctgcgctcaagctgctgtgtgaatcgcatggaatgcaaacagtcgaaattggtcaggaaaaaggcaagcttgtcttcgccgacaccacaactattgaccctctcgcaatagtacagttagtccaggaagacagtaatacttaccaattcgaaggcacctccactcttgtaaccaatcatcaattagactcatttgaagatcgcactcgattcctcgaagagctaatcaacaaattaaccaattcttcttctgaagccgtcaatgcataa

SEQ ID NO: 286597 - DNA, 211 bp, Unknown
  Bacterial polypeptide expressing nucleotide sequence isolated from the Sargasso Sea
aatgtcaaccttaactgtggaacttggagaacgtagctatcctatacagatagaggccgggctgctttcgcaacctggcctttttagtgcctatataaaaggcccacttgccgtcattgttaccaacgaaactgttgccccactgtatttagaaaccgctaaagcggcgtgtggtaatgttcaggttgaaaccattattttgccggacggc

SEQ ID NO: 286598 - DNA, 469 bp, Unknown
  Bacterial polypeptide expressing nucleotide sequence isolated from the Sargasso Sea
aacaccaatcgaatattggcattggagcctgaaatcatgactcatctgatcgagaggtgttgtcaaattaaagctgaaatagtctctgaagatgagagagaaggatcaataagagcaatattaaattatggccatacttttggccatgcaattgagagccttactgattatagcgtctacactcatggtgaggcagtttcaatcggcatggttatggcagcgagcatggctgaaagaatgggaatgctttcacaggatgataagacagacataaccagactccttgaatctgtaaatctaccaaccaagaagcctgatctaaatagcaatgattttctcgaaagtatgaaacgcgataaaaaagtccaagatggtgaaataaggttgatattattagagagcattgggagagccatcatcagcaataattaccccaatgagattttgatggaaaccatattggaataat

SEQ ID NO: 286599 - DNA, 2419 bp, Unknown
  Bacterial polypeptide expressing nucleotide sequence isolated from the Sargasso Sea
tctgtcttttggattagttaacaatacaaatgcacaagacggagcatttgctattgaagaaatcactgtaacagcaagaaagaaggaagaatcaatatttgaaactcctcttgcgattacagctgtcgatgcagcagagattaaagctgcaggctttaagaacattcttgatgttcaaaagactgctccaggtctcttcatcgaatcaatgaataatgaaaatggtcgtgttgtggtaatgccaagattcagaggtgttacatttgatgcaacttcaccgcttcaacgtacgtcatcagtatttgtagatggcttgatcgtaacttcaggacttcacagtcttccgattactcaagttgagcgggttgaaatcatcaaaggcccacaatcagcactatttggacgtaatacatattctggcgccattaatatcgttacagccaaacctggtgacgagtttaaaggttcaatcgaatatgattatgctaataagagtggcgcatcagctactgggttcttcgaaggccctataggtgatatggtcggagcaagactgaactggtcttataccgataaagacggccactatatgaatgacaacgctttgcttgaagcacctcaaagattgggtgatgaacagagtcttgcattgggcgccttaatcgacatcaatccttctgatgacttgaatatcactcttagagcttcaagatacgaagatttagatggtccaggtgcttatgcggttgctggtggattggatgaacacaacttctgtgctcaacctaccagtaatgtaactggctggacttgcttcacagaaaatggtttggagtcaatttatcaaggtaaccttcaaataccgacttctcttggagcttcaacaagtctttataactggaatcgtgcgatgtcacatttgcaacctggcggaagcagaagtggttattacccaattggtgatcatacttttactgaccttaaatttaacggttatggacttataagagatggcgaaagaatgtcagtaacaatctcatacgacatctctgacagcatgaacttaaatgtagcctatggatcaaatgatgatgattatcttcttttccatgactttgatgcggatgctggatttggattccacacagctgcagcaagggtgactgaagatgaaacatttgaagtaagattgtctggaaccaatgatcagtttgactggtcaatcggtgccactcaggtcgatcttatgacaaagactcatggcggattctttgacggacgttctccattcttttcatactggtttgctgatatcggtaatccagatggcgcaacatctatattgaccgcagatacttttggagtatttgcctcaattgattatagattgaacgacagcatgactttggttgctgaaatcagacgtcaagaagatgaagtagctgacaataagattaatgcttctgcaggtaaaaatatttcacctgcgacatttaaatcaacgttgccaagactcgttcttaagaatgatttatccgacaactcaatgatttacgtgagctacagtgaaggtacgcttcctggtgggtttaacccagaggttgctgctaagctaaatactcctgagcaaatcgctacatttaattcagatgttcctggtatcggggaaacatatggtgaggaagaacttaccaatatggaatttggttggaagaaaacctctgatgacggacgttttgctatgacgcttgctatgttcagcatggaaagaaaagatcaggtttattctggttttggtgtcattccagcagatttaaattgtgaccctacaggaaatgtaccaacatgtacggtggctttcagcggaaatgggacttcatctgatattgaaggtttggagtttgatttcacatgggcagcatctgaaaacacaactgttcaaggtggtgtaggttacactagagcgaagattgctagcttcccagctggtgctgactgcggtgattatgatgatgtatttggtaactcaaattgtgttggccaatctgcagctcgttaccctgagtggcaaggttcattggttgtaaccaacgaacgagaaatgtctttcggtaatctatacatgagaggcgaaatgtactacacaggtaactattatgatgaagtaacaaatatgtctgttatacctaacgcaacagaagttaacttgcgtgcaggggtaagaatggacaacatcagtattgaagcatatgttgcgaatttaactgatgaagatgctccattgggcggtaataacatcgctgacaccagtaactttgtaagaacaaatactttctcttacaactttgctgtagaaagtactcatattcatcttagagataagagagaatatggacttcgtgtaacgtataacttctaa

SEQ ID NO: 286600 - DNA, 979 bp, Unknown
  Bacterial polypeptide expressing nucleotide sequence isolated from the Sargasso Sea
ctggcgttagtcagtgaaaacgaattatttggtcataaagttacacagcggcgtaagcgtaaacacagccagcaaatctccggcgataccatcatccgcaatctggctgagttgtcagtaggtcaacctgtggtgcatctgcagcatggtataggccgttatcagggcctgcaggtgctggatgccgctggcattagtgccgagttcgtgaccattgaatatgcaggtggcagcaagttgtatgtgccagtgtcatcactgcatttaatcagccgttatacaggttctgatcaagacaatgctcctctgcataaactcggcaatgacagctgggaaaaagcccggcgtaaagcagcagagaaggtgcgggatgtggcggcagaattgttggacgtctatgcccagcgcgccgcccagactggttatggttttaaaatcgaagcagaacaatacgaaatttttgccgacggtttcccttatcaggaaacagtcgatcagctggatgccattgccgcagtgcttgccgatatgcaggccgagcgtgctatggacagactggtgtgtggggatgtaggttttggtaaaactgaagttgcaatgcgcgctgcttttgttgcagtcaatgacaataaacaagtggcggtgttagtgccgaccacacttttggcgcaacagcattttgaaaacttccgggaccgttttgccaactggccagtgaaagtggcagtcttgtcgcgttttatcagtgccaaagaacaaaaagccatattggaagaagccgaacaaggcaaagtggatattttaataggcacccataaactgctgcaggacgatattcgttttaaagatctgggcttattgattgtcgacgaagaacaccgctttggtgtgcggcaaaaagataaaatcaaagcgctacgcgccaatatcgatattctgacgttaacggccacccctattccacgaaccttaaatatgt

SEQ ID NO: 286601 - DNA, 383 bp, Unknown
  Bacterial polypeptide expressing nucleotide sequence isolated from the Sargasso Sea
gatgcgaacccttccggttgaattaccggggaaagaatacaagatcgaaatcggtgccggaaatctgcgggactccctgctttccgccatccgtcagtttgatccggaacgggtggtgaacgtgacgaactacactctggaacaattctacccagcccaaatcaaaaagcttcttgaaccggaaggttatcagaatgacacctgtatcctgcccgacggtgaggcatacaagaacctggaaacactccaacggatttacgatttcctgatggagaaaaaggccaatcggggaaccgtgatggtggctttcggaggaggagtgatcggggacatggccggttttgctgcggcgaccttcatgcggggaatcaaaatgatccagg

SEQ ID NO: 286602 - DNA, 3484 bp, Unknown
  Bacterial polypeptide expressing nucleotide sequence isolated from the Sargasso Sea
aatgacacaaatttcagccctaacaccgcccgttgtcaaaaatggaactcaaatgcaaaccctgtcgtgtctcgccggggttggtcaagccgttaccctcgccagcctagttcgccaacacaagggcacgacgctgatcgtcaccagtgatacgccgacggcattgagtatcgagttagagctcaactatttgttggcaaaaagcgccattaaggtgcgactgttccctgaccgtgaaaccctgccctacgacagtttttcaccccatcaggatttgatttcccagcgtttagaaaccctgtcgcaaatcacccaagccgagcaccgcgtagtgatagtaccggtgacaacgctgatgatgcgcctaccgccaaaatcctatttaagctccaatgtgtttgtgctgaaaaagggcgataaatatcagctccatgatgtgcgccagcagttaaccgacacgggttatcacttggttgaacaggtgtatgaacatggcgagtttgccattcgtggctcgattctcgatatcttccccaccggtgtgaatatgccgctgcgtatcgaactgttcgatgatgaagtcgagaccattcgccatttcgaccctgaaacccagcgctcgtccactccagtggatgcggtgcgtctgttacccgccaaggaattccccaccgacagcagcgccatcgaaggttttaggcagcgctatcgccgccgctttgaggttgtagtcaaagagcctgagtcagtgtatcaactggtgagccgcaatttgatgcccgccggcattgagaactatctgccactgtttttcgatgaggtcgcgacactgttcgattacctgccgaaggacacacagttagtcaccttaggcgatatcgaaaagtctgcccgtgcccatttgcaagaggtggaaacccgctatgaagacagacgggtcgatccactgcggccgctgttggcacctaaagagctgtatttactgattgaagaattatttgctgcctttaagccgctgcctcgctatcagtttattgcgccgcaacccgatgccgccgctggcgcagtgcagattgatgccagtgtgttgcccgaggtaagcgctaatcacaagttaaagcagccactgattgcgctgcaagagtacgccgaacatgcaccgcggatgctatttagtgccgaatcggaaggccgccgcgaagccttgctcgaactcttaagtaaaatccagttaaaaccagcgttattcggtcattttgatgagtttattcaaagtgatgccagccttggcttaatcgtatctcccctctcccgtggttgtttactcgggctaggaaagcaaaccgccgtcagcatcatctgcgaaaccgagctctttggtcatcgcatctcccagcagcgccgccgtgaaaaacaacgccagatcagcaacgatactctgatcaaaaacttagccgagctcaaagtcggccagccaattgtgcacttagagcacggtgtggcgctgtatcaaggcttagtcaccttagatactggcggattagtggccgaatacctacagctggaatactcgggcggcgataaactctatgtgccagtgtctaacctgcacatgatcagccgctacagtgtcggcgccgatggcgaggctcacctcaataaactcggtaacgacacttgggccaaggcaaaaaacaaagcgatcgaaaaaatccgcgatgtggccgccgagctgctcgatgtctacgcccgtcgccaagcacgccccggtgaaagctgcgacatcaacgacgaagagtatgcgcaattcgcccagggtttccccttcgaagaaaccgtcgaccaagaaagcgccattcatgccgtgcttgccgatatgcaatcccccgtcgccatggaccgcctcgtctgcggtgatgtgggctttggtaagaccgaagtcgcgatgcgcgccgcctttgtggcagtcaatgcgggtaaacaggtggtggtactagtgcccaccacgctactcgcccagcagcactacgaaaattttaaggacagatttgccgactggccggtggtgattgaggtaatgtcacgctttagaaccgccaaagagcaaactcaagtgctgaaacagcttgaagaaggcaaagtcgatatcgtcattggcacccataaactgctgcaatctgaagctaagtttgaaaacttaggcctgcttatcatcgatgaagaacaccgattcggcgtaaggcaaaaagagaaaatcaaggcgctgcgtgccaacgtggatattttgaccctcaccgccacgcccatcccccgcaccttaaacatggcgatgtcggggatgcgcgacttatcgattattgccacgccccccgctaagcgattggcggtgaagacctttgtacgcgaatccgatcccgccaccgtgcgtgaggccatactgcgtgaaatccttcgtggtggccaagtgtattatttgcacaacaatgtcgaaaccattgagaaatgcgctcaagatattagtaccctgctacccgaagcgcgggtggttgtggcccatggccaaatgcgtgagcgggatcttgagcgggtgatgtcggacttttatcatcaaagattcaacgtgttagtctgtaccactattatcgaaaccggtatcgacgtccccagtgcgaatacaattattatcgaacgcgccgacaccttcggtttagctcagttacatcagctgcgtggtcgcgtcggccgctctcaccatcaagcctatgcgtatttgatgacgccacatcctaaacgcatgaccagcgatgcccgcaaacgtctcgaagccatcgatgccctcgaagatttaggcgcaggctttatgctcgctacccaagacttagagatccgcggcgcgggtgagctattgggcgatgagcagagcggccatatttcaaaaatcggctttagcctctacatggaaatgctggagtcggcggtcaaggcgctcaaacagggtaaagaaccatcgctggcgcaaatgctcaatcagcaatgcgagatggaactaagaattcctgcgctattgccggaagactatgtcggtgatgtgaatattcgtctgtcactctataagcgcatcgccagttgtgacagtgaagaagccttagatgaacttaaggttgagcttatcgaccgcttcggtctgctgcccgatgccaccaaaaacctgatggaaatgaccctgtataaacatcaggcaactcggctgggggcgactaaaattgaggtacatgccaagggcggcagcatcgaatttagtgatgatcatgtgattgatcccggctttatcattggattactgcaaagtcagccacaaatctatcgaatggatgggccgaataagttaaagttcatcctcaatgccgaaacggcaaaagataggctcgctttggtcaaactcttgctcgaacaactatcgcaacatcgtcttggagataaatag

SEQ ID NO: 286603 - DNA, 1066 bp, Unknown
  Bacterial polypeptide expressing nucleotide sequence isolated from the Sargasso Sea
atgaaaaaaataatttttaagaatcaagaacaagaggtagaaattctttatcagaaagaaatttctaaaatctcagaaaatttccctgagcatggaaagatgttttttgtatgtgatgaaagagttttggaaaagaatccacaaatgaataaattgttagacgaaaatgtttatcttgttaaaagtcctgaaaaagagaaagatttacagtcaactattagaattcttaaattcctgaaagacaatgggtgcaacagaaatgaccatcttattgcaataggtggtggagctacgacagatttaggtggatttgcctcatcaatatatatgagaggaataaatttaataataattccaacatcgttactaggacaggttgatgcttcggtaggggggaaaacaggagtaaattttgaaagttataaaaatttagttggctctttttttaatcccaaaaaaattattgtctgtacaaattttttagaatcactagacgagcaagagtatctcaatgggcttgcagagatattaaaacacgcgattataacttcagataacgatgtcgatactttattaaaaaatattgaaaaaattactagccgtgataatgattttctagaagagcaaacaaaaagatctatagagataaaaacaaaaattgtcacagaagactttctggaagctgagcaaagaaaattcttaaattttggacatacatttgcccatggaatcgaatctataaatcaaaataatccaatacttcatggtcatgcggtaataattggaatgaaaatggctttagaattttcctatcaagagaaatttttagatgaagaaggttttacaaaatctaaaaatcttctaaatagttttaaatataatctaagtgatatagagctagatgcagataaaattctaagtgcaatggaattagacaagaaaaatgatggaaacggaataaatttagttttgctaaaaaaaattggcgttccttttttaagcaaatcaaatgaaccaaataaaattctaaaatttttaattaactttatagataactttgaataat

SEQ ID NO: 286604 - DNA, 240 bp, Unknown
  Bacterial polypeptide expressing nucleotide sequence isolated from the Sargasso Sea
taaactttggtcatacgtttggtcacgtcattgagcaaacgaattcatacaaaacaaacataaatcatggagaagctgtagctatgggaatgataatggcatcaaaattatcatcagcgatgaatttaatctcaataaatgaattaaataaaataattaatcattttaagtcattaaatttaccaactgaaattcccagatctttaaagcaaaaatctttcaataaaaaaatttattgat

SEQ ID NO: 286605 - DNA, 553 bp, Unknown
  Bacterial polypeptide expressing nucleotide sequence isolated from the Sargasso Sea
aatgaaaaaaatattatttgaagcaacgcaagaagaagtgttactaatttcatctgaaagtatagataatctatttgattcaataccaacagatactaagtgctgtgtattagctgataaaaaagttttagatacgcatgattcactcagaaaacagatagaaaataaaaatttcataatctatgagatttcaaatcctgaagaagaaaaaagtatcaattcatatactgagattattaattttcttagctccaaatcttttaaaaggaacgatcgcattgtgggtcttggaggtggtgctataacagatttagctggtttcgtatcttcaacctatatgagaggtctagattacatacaaatacctacttctttgcttgctcaagttgatgcttcaattggaggcaagactgctattaactatggaaaaataaagaacttcattggcacattctataatccgtcaaaaattataatatgctcaaaatttttaaaaactttaaatgagcaagaatttttaaatgggcttgcggaagttttaaaacatgcctta

SEQ ID NO: 286606 - DNA, 361 bp, Unknown
  Bacterial polypeptide expressing nucleotide sequence isolated from the Sargasso Sea
ttaggcataagagctatattaaactttgggcacacttatggtcatgcaatagaagcaataaataattacaaaaatgttttacatggggaagctgtagctatgggtatgagaatggcttctaaaatgtccatgttagagggtcacttaaatgaaaaaacttacaatagaataattaatgtttttgatgctcttaactttcctaaagatacatcaagcaattattctgatctaaagaaatttattttgagtgataagaaggtcaaaggtgggaatattagtttggtacttttaaaaggaattggtctttcattccagactcaaaaatttaattttgagaatttcaaaaaatcttttacttagg

SEQ ID NO: 286607 - DNA, 433 bp, Unknown
  Bacterial polypeptide expressing nucleotide sequence isolated from the Sargasso Sea
tatgaataaaaaaattattgtaaatactaaagaaaaaaaatatacaatagaaataaataataattttattttaaatagattaaaaaaaatttctaacaataaaagtaaattatttattattattgatacttcagtaaattatttactagataacttaaatttatcaaaaaatgtttgtatcattaaaattaaaggctcggaaaaaattaaagattttaaatcctatatttatataacaaaaaaaattttaaataataaagtaaatagaaattccaccattatagcaattggaggtggtactataggtgatttatctggttttattgctagcactattttaagaggcataaattatattttagttcctactacacttctttcgcaagttgatagttctatagggggtaaaaatggtattaatagcatttatgga

SEQ ID NO: 286608 - DNA, 439 bp, Unknown
  Bacterial polypeptide expressing nucleotide sequence isolated from the Sargasso Sea
ggcgatcttccgtagctgcgagaacaaggctcaggtcgttgcggatgatgaaaccgaacagggtaaccgtgcgttgctgaacctggggcatacttttggtcatgccattgagaccgccaccggttatagccagtggttgcacggtgaggcggtagcggtgggcatgttgatggccattcgcatgtccgctgagttgggctgggtgccggcagagctggagtcaaaagtggccactttgttgtctgcctggggcttgccggtggcggttcccgaagggatgacgccggaacaatttatggacctaatggccttggataagaaggttcataatggccagttgcgccttgtgttgctgcgtgagctgggtaaggctgtggtaacggcggattatgacggcgcggcattgcaaaaaacattggaggctttttgtggagcatga

SEQ ID NO: 286609 - DNA, 460 bp, Unknown
  Bacterial polypeptide expressing nucleotide sequence isolated from the Sargasso Sea
tatgagcaacacaaaaataatagttagtacaaaaagcaaatcatatccgatttattttggaaataatattttatctaaagttggtagtttacttaataaaaatctaccaaatgttaagaaggttacaattatagctgacaaaaaagtgcccacaatactattaagaaaactaaaaaaaaatttaaaaaaatataaagtaaaaatttatttttttaatgttagtgaaaaaattaaaaattttaatactgctcacaagctaattgaaaatttgcttaaagataatttaaatagatcagattgtataatagccttcgggggaggagttataggagatttggttggattcgtttcaagtcttactaaaagaggaataaagtttgtaaatattccaactacattactatctcaagttgatgcttcgattggcgggaaaacagccgtgaactcaataacaaggtaa

SEQ ID NO: 286610 - DNA, 499 bp, Unknown
  Bacterial polypeptide expressing nucleotide sequence isolated from the Sargasso Sea
atgaatagaatttttgtaaaaaataagaatacaaattatacaattattattggtaaaggatcattaggaaaattaaaagttcaagtaaataagttgtgtcctaaaactaaaaaaattggattaattttagataaaaatattccaaataattttaagataaaaattaagaagcagctgagaaaatacagtgtttatgtttatgaatttattcctaacgaaaaattgaaatcatttaaaaaagcaaacgatctgttggaaagactcattaagaataatctaagtagaaatgacacaatcataaccgtggggggcggtatcattggtgattttggaagttttgttgcaagtatttacaaaagaggaataaacttaatcaatattccctcaacacttttagctcaagtcgattcttcaattggaggaaaaacagcggttaattcagagggcggaaaaaatcttattggaaccttttatcaacccaagattggttttgagtgat

SEQ ID NO: 286611 - DNA, 532 bp, Unknown
  Bacterial polypeptide expressing nucleotide sequence isolated from the Sargasso Sea
tatgaaaaatcaggaaattaaatttaatagtttaaaacataattattcagtttttattgggaaaaatgttattaaattattaccaaagaaaatcaaaaatatttgccctaaagcaaggaaaatagctttaatagtagataccaaaatacccaaaaaattgaaaaaaacaataaaggataaattgagcaattatgaaattgtaaatttgccattttccgcgagtgaaaaaaacaagtcttttaaaaaagttgatttttacttaaataaaatactttcaaaaaattttaatcggtcagatattattattggagttggaggtggtattaccggagatgttgctggatttgttgctagtatttttaaaagaggaattaatttcataaatgttcctacaacattgctttcgcaggttgattctgccatcggtggaaaaacaggtgtaaattcgcaaaaaggaaaaaatttaataggttcattttatcaaccgagattagtaataagcgacacatcctttttaaattcattaccaaat

SEQ ID NO: 286612 - DNA, 475 bp, Unknown
  Bacterial polypeptide expressing nucleotide sequence isolated from the Sargasso Sea
ggtctgaattctgagctcctttgtgaaacggtgcatatttgttgtaaagctaaggcagaggtggtttcagctgatgaaaaggagtctggtaaaagagctttattgaatttaggacacacgtttggtcatgcaatcgagactgcaaccgggtatgggaaattattacatggcgaagctgttgcgatcggtatggttatggccgctgatctctcgagaaggttgggtatgcttgattcgagtacagccacagaaattcgaaatgctctggaaaatgagtttggtttctcagtcatacctcccgcctcaattacagccaatgactatattggccttatgagatctgataaaaaagcagagcaaggtaaggtaaagtttattttgttggaagcgataggtagcgccgttatcacgcaagacgttagtgaacaggctctgaaagaaacactaacttgcggcaaccgcctttgcatgtaat

SEQ ID NO: 286613 - DNA, 762 bp, Unknown
  Bacterial polypeptide expressing nucleotide sequence isolated from the Sargasso Sea
tttagtggatttgttggaagcattttaaagagaggtgtaaattttataagtataccaacgacattgttatctcaggtggatgctgctgtgggaggaaaaactggagtaaactccaaatatggcaaaaacctaataggagctttttctcaaccaaaattagtaattagtgatacatcttttttaaaaagtctatcaagaaaagaaatggtgtgtggttatgcagaaatattaaaacatgcggtaataaaagataaaaaattttttgactggttaaaattaaattcaaaatatattttttctcatcaccctaataaattaatttacgctattaaaaaaagctgtaatattaaattatttttcgttaataaagatgttaatgaaaaaaatttaagaatgattcttaattttggtcatacttttgctcatgctattgaagtaaaaaataattattcaaaaaatattacacatggagaagctgttctagcaggtatgattttggctacaaaactttcagtgataaaaaaagtttctaatataaacactttgaggaatcttttagagatttatacatcaaataatttagaatattcatttaataaatataaaaagataaaagaaattaataaattaattccttatttaaaaaatgataaaaaaaataatgatgaaaaaataaattttatactgttgaataaaattggtaaaacaactatgcctaataaatacaaaatttcaataaaagaattaaaaagacatattaga

SEQ ID NO: 286614 - DNA, 604 bp, Unknown
  Bacterial polypeptide expressing nucleotide sequence isolated from the Sargasso Sea
catgacaaaaattagcaaaattaaagttaatttaggaaacagatcttacccaatatacataggaaatgatttattttcatcttttgacaaacttatagaaggtttttcggaatactcgaaagtagtaattgtaagtgataataacgttaaaaaatcaataaataattttttttttttgctaaaaaaaaaaagtaataaaaacattgttactttctccttacctcctggagaaaaatcaaagagtttcaagtacttagaattattatgtgaaaaaattttagaaaaaagaattgatagaaaaacacttttagtatgtgttgggggtggggtaataggtgacttagtgggattaacagcaagtatattattgagaggtattgattttgttcaaatgcctacaactcttttatcgcaagttgatagttcagttggtggtaaaacagcaattaattcaaaacttggaaaaaatttaattggcactttttaccaaccaaaagcagttctgatatcattgaatacacttcaaagcttgccatatagacaaattatttccggatatgcagagattttaaaatattcacttattaaagataacactttcttt

SEQ ID NO: 286615 - DNA, 670 bp, Unknown
  Bacterial polypeptide expressing nucleotide sequence isolated from the Sargasso Sea
gactctgcttattggtgggaagacaggaataaacttaaaagatggtaaaaatttggttggaagaatttatcaacctatagctgtagaaattgataccaattttttgtcaactttaccagacagggaactgcaagctgctcttgcagaggtagtaaaatacggttttatttatgacagagaattttttgattttgtagttgctaattcaactgaaattcaaaataaagatatagatgttttacaaaaaataattatccaatgttgcgaaataaaaagtgatattgtaagtgaagatgaaaatgagaatgaacttagaatgattttaaattttggtcatactgttgggcatgcaattgaatcattcactgattacaaaaatttattacatggagaagcaattttttatggtatgaagtgtgcattatatctttcaaacaaatttggaagtttatcagatgaagaatacgatatatcaacccgattgatatctaaatttgaattaccaaaacttgatattaataacagaaagatttttattaattttgtcaagaatgataaaaagtttagagaaaagaaaattaggtttattttgttagatgagataggtaaatcaagaataagtgaagatatcacttttgatcaaattgaagaaagtttgggcgttttatga

SEQ ID NO: 286616 - DNA, 691 bp, Unknown
  Bacterial polypeptide expressing nucleotide sequence isolated from the Sargasso Sea
aaaacaggaattaatacaaaatttggaaaaaatctaatcggatcattttatcaacctagtctagtaatatcagatataaattttttgaattcacttccgaaacgagaaattatttgtggatatggtgaaatattaaaacattcaattataggaaacaaaaaatttttttactttctatcaaaaaatatttttaaaataataaaactgaaaaaaaattatattcaaaaatctatatatgaaagttgcttaattaaaaaaagaattgttgaaaaagatgaaaaagaaaaaaatttaagaaaattattaaattttggacacacttttgcacacgcatatgaagctgccttgaactactcaaaaaaacttaatcatggcgaagctgtaattttaggaattataagtgcctgcgaattcagttataaaaaaaaaatattaaataaaaaagaatatagattaatcttaaatcatattaacaaaattaataaatcattacgattaaataatttttttagcaaaaaggatataaataaaatcattaaattcatgataatagataaaaaaaatattagcgaaaaaattaatcttgttttattaaaaaagattggcctagctcactataaaaatttttataaagtaactgatgttcagaaatttactaaaaatcaatttaaaaatatttcaatcgaatgaa

SEQ ID NO: 286617 - DNA, 484 bp, Unknown
  Bacterial polypeptide expressing nucleotide sequence isolated from the Sargasso Sea
ctgataggcttaggtgcaataaagagtctcaaaaaacaaattgatttagtttgtccggatacaaaaaaagtggctttaatttttgataaaaaaataccaagtaaattgaaaaacacagttaagaaacaagttaaaaattatgaagtctatgtttatcaatattctgttaacgaaaagttaaaatcattcaaaaaagttaaccaattaaacgaaagtttactaaaaaaaaattttaatagaagcgatttaataatagcggttggtggtggtgttataggtgatttttctggatttgttgcgagcattttaaaaagaggaataaattttataaatttgccttctacattattatctcaagttgatgcttcaataggtggaaaaacaggaataaattctaaacaaggaaaaaatttaattggaaccttctatcagcccaaactggtaatcagtgaaactgaatttttaaaaagcttaccaagaagag

SEQ ID NO: 286618 - DNA, 543 bp, Unknown
  Bacterial polypeptide expressing nucleotide sequence isolated from the Sargasso Sea
aatgaagaaaattaatataaatacaaatttaggatcatacaaaatatatattggaaataaaattctaaataaggtggattttatacttaaaaaaaataatataatctcaaataaattcttaattataattgatagcaatgttccaaaaaaatataaaaaaatatttaaatcaaaatattttaaaaaaaaattcattatttcaattagatttaatgagagagagaaaaattacaattctgtagaaaaaattttagaaattttacaaaaaaaaaattttaatagaaatgattctattatatgtttaggtggcggtattgctggtgacctatgtggatttgcagcaagtatatttaaaagaggactaaaatttatcaatatacctacaactttattatcacaggtagactcatcaataggtggcaaaacaggttttaatacaaagtttggaaaaaatttgattggaacattttatcaaccttctattgttgtttctgatacagaaacactaaatagcctcagtcaacgagaaaatatctgtggtta

SEQ ID NO: 286619 - DNA, 689 bp, Unknown
  Bacterial polypeptide expressing nucleotide sequence isolated from the Sargasso Sea
tatgaaaataaatcgacttaaagcaaaagattattcaataataataggtaaaaattcaatatctaatttaactacggaaattaaaaatcattgtcctaaatgtaaaaaaatcgctgtaatcattgataaaaaaataccaaaaaaatttgtgcttaaaattaagaagaaattaaatagatataaagtatttattttttttatttcatcctctgaaaaaataaagaatttaaataaaaccaatttttttataaataatttacttaaatttaattttaatagatctgatctagttattgccgtgggcggaggtattattggggatatgactggttttgttgctagcatttacaaaagaggaattaattttataaatttgccaagcactcttctagcacaagtagactcttgtataggtggaaaaactggcgtcaattcaaaatacggtaaaaatcttataggttcattttacaatcctaaagtagtgattgtagaaatagagtttttaaaatcattgcctaaaagagaggtggtttgtggatttgccgaaattttgaaacattcaattataaaagacaaaagatttttttattttttaagaaagaacacacacaacattttatcactaaaaaataatattttagaaaaaagtattcttaagagttgtaaaataaaattaaattttactgaaa

SEQ ID NO: 286620 - DNA, 733 bp, Unknown
  Bacterial polypeptide expressing nucleotide sequence isolated from the Sargasso Sea
tatgaatacaaataaaattgcagttaaaacaagctctaagaactactcaattgtaattggaagaggtttgataggaaaagttgacaaaattttaaaagctaatcatttaaaatttgataagtgtttaatagttacagacaaaaatattcctcacaagtttaaaagacttttatacaaaaacctaaaaacaaataaactttttaaaatagcaataacagcctcagaaaaaaataaaaattaccgaacagttgaaaaaattcataaagttttatttgaaaaaaggtttaatagagaggattgtattatttcttttggtggagggattattggagatatagtaggattcgcatctagtacatttaaaagaggtatgaaatttgtaaatattcccacaactttactatctcaagtggactcatccataggaggcaaaacaggtgtaaataatgaatttggaaaaaatttgattggaaatttttatcaacctgatttagttgtttctgatatgagtattttagcttctttaccagaaagagaaattatttgtggatatgctgaaatatttaaaagtagtattatagataattttaacaattttctctatttagataaaaatttgaaaaaaattttaaaattaaaatctcctttcattgaaagatcaataatgaaaagctgtaatttaaaaaaaagaattgtagaaaaagatgagaacgagaaaaactttagaaaagta

SEQ ID NO: 286621 - DNA, 517 bp, Unknown
  Bacterial polypeptide expressing nucleotide sequence isolated from the Sargasso Sea
ttttttaattggttaaaagaaaatgtcggcaacctaacaaaactaaatcaggattgtctaatctatgcaattgaaaaatcttgctcaatgaaggcaaatatagttcaaaaagatgaaaaagagaaaggagatagagccttactaaattttggtcatacatttggacatgctcttgaaaaacactttacaaaaaatgaggtacttctgcatggagaggctgtagcaataggaatggcatatgcttcaaagttttcttcaaatattggtgtccttaagaaagatgaatgtgatgagattataaatcttatatctgatataggtttacctatatccataaatgacataaaaggtgagatcactaaagaagaaatattaaatttaatgaagtttgacaaaaaaagattaaaccaaaaaaatacattaattttattgaatagaattggtgaagcttttatcaataataatatttctgataaagaaataatagatttctttaatacggagaacatccaataat

SEQ ID NO: 286622 - DNA, 442 bp, Unknown
  Bacterial polypeptide expressing nucleotide sequence isolated from the Sargasso Sea
atgaaagttcaagaaataaaaattaataccaaatcaaaaaaatattctatctttataggttctaaattaataaataaattagacaaaattttaatatctcaaaaaatttcttttcctaaagtcatggttgttattgataaaaatataccttcaaaatttaaaacaacattgataagaaaattaaattctagatttataaaaaagtatatttttattgcaaatgaaaggaataaaaatcaaaaaaatgtaaatttaattcaaaatattttatttaaaaatagattcaatagagaagactgtatagttgcttttggaggaggtattactggagatgtagttggctattgtgcaagtatctataaaagaggaataaagtttatcaatattccaacaactttactttcccaagtagattcatcaattggaggtaaaaccggtataa

SEQ ID NO: 286623 - DNA, 490 bp, Unknown
  Bacterial polypeptide expressing nucleotide sequence isolated from the Sargasso Sea
atgaatgcaaataaaatttcaattaaaacaagcactaaggactactctattataattggaagagatttaataggtaaaattgataaaattttaaaagctaatagtctaaaatttgataaatgtttaattgttacagacaaaaatattcctaacaaatttaaaagacttttatacaaaaagttaaaaacaaataaactttataaaatagaaataactgcatcagaaaaaaacaaaaattatcggacaattgaaaaaattcatacagttttatttgaaaatagatttaatagagaggattgtattatttcttttggtggaggaattattggagatattgttggattcgcatctagtacatttaaaagaggcatgaagtttataaatataccctcaactttactgtctcaagtggattcatcaataggaggcaaaacaggtgtaaataataaatttggaaaaaatttggttggaagtttttatcaaccctgat

SEQ ID NO: 286624 - DNA, 686 bp, Unknown
  Bacterial polypeptide expressing nucleotide sequence isolated from the Sargasso Sea
tatatcaatggttgattcatccgtcggagggaaaccagcggtgaatcatcctaaaggcaaaaacttaattggagctttcaatcaacctaaagctgtttttattgatccagaaactttgaaaagtttgcccaaaagagaatttagtgccggcatggccgaagtaataaaatatggaatcataagagataaaaaactttttgaattcttagaaattggaaagaacaggaatgaacttataaatctaaaaaatgaatctttaattaaaataatcaatagttcgattacaacaaagtctcatatagtttcgcatgacgaacatgaacatggtattagagcgatattaaattatggtcattcttttggtcacgttattgaaaatatatgtggatacggcgaattccttcatggtgaggcaatatcaattgggatgaatattgcggggaaaatagctattaaaaaaggtttatggtctaaagaagaattagaaagacaacagaatcttttagaaagttacgatcttcctacagagatccccaaaataaataaagaagatgttctaacaatacttatgggcgacaaaaaagttcgtgatggcaaaatgagattcatcttaccaaaagaaattggcgaagttgatatatatgatgatgtagaagattcattatttttaaagtttttttcttaac

SEQ ID NO: 286625 - DNA, 451 bp, Unknown
  Bacterial polypeptide expressing nucleotide sequence isolated from the Sargasso Sea
atgaatacaaataaaatttcaattaaaacaagcactaaaaactactcaattataattggaagagatttaataggtaaaattgataaaattttaaaagctaatcgtctaaaatttgataaatgtttgatagttgcagacaaaaatattccttacaagtttaaaagacttttatacaaaaagttaaaaacaaataaactttttaaaatagaaataacggcatcagaaaaaaataaaagttacagaacaattgaaaaaattcatacagttttgtttgagaacagatttaatagagaagattgtgttatttcttttggtggaggaattattggtgatatagttggatttgcatctagtacattcaaaagaggcatgagatttgtaaatattccctcaactttactggctcaagtggactcatccataggaggcaaaacaggtgtaaataataaat

SEQ ID NO: 286626 - DNA, 583 bp, Unknown
  Bacterial polypeptide expressing nucleotide sequence isolated from the Sargasso Sea
tatgaagataactagatctattaaaataaagacagaaacaacatcctatgaaataaatataggagaagaatttcttagctcagagcatttaaaaaagtttgtaaaaaataaagaagtcctattaatttttgatccagaaataggggaaacaaaaataaaagatatcttaaataaggtagaaaagtccgagcctttgaattttaagagccttgagatgtcgtgcagtgagaaaactaaaaactttaattctgttacaaaaattcatgacacacttattgacgcctcctttagcagagactgtttactaataggggttggaggtggaatattaagtgatatcacaggttttgctgcttcaacataccaaaggggtgtaaattttcttcttataccaaccacattgttagctcaggtcgatgcttcagtaggaggaaaaactgctattaatcataaatcagctaaaaatatggtcggtgcatttcatcaacctattgaagttattatttctgcagattttttgaaatctttgccagaaagagagattagatctggtttagtcgaaatgataaaacatggactaatt

SEQ ID NO: 286627 - DNA, 545 bp, Unknown
  Bacterial polypeptide expressing nucleotide sequence isolated from the Sargasso Sea
tggcctattggggaatgctaagttctttgactggttagaacattatggtgatcaggttttagcattggagccagatgctctgcaacacgccgtttttacatcatgccgttccaaggctcgaatcgtagaggcagatgagctcgaagttggcaaacgtgccttgttgaatcttggccacacctttggccatgcatttgaggctgtcgccaaatttgatggtcgattgcttcatggtgaggctgttgcagctggcatggggctggcttttgacttatccgttgagttgggtctttgcactgagcaagttgccgatagatgtaaatcccatcttcaagcagctggcctgccatttgggcagtcaagcctgccagctggcaacgcaccagccgacattttgcttgaccatatgaaacatgacaaaaagactcgcaacgggatcatgcatttcgtgctagtacgaaacattggcgatgcttttgttcatagtgacgtccaagaggatattgtgaaaaaattactagaaagaggtttcaatgctgtctagc

SEQ ID NO: 286628 - DNA, 830 bp, Unknown
  Bacterial polypeptide expressing nucleotide sequence isolated from the Sargasso Sea
tttagtcttatcaatttgatgatgaataaaaaatttacaaaaaaatcacttttaatatctttaggcggaggtgtgataggtgatgtatctgctttagcagcaagcttatattatagaggtgttttatatttttatattccatcgacaatgacttctatagttgatagctgcatcggaggaaagacaggtattaattataaaaatattattaattcaattggaaattattatcatgcaaattcagtatttatttaccatgatatattaaaaaatattcctgatagagaatattattctggtattcctgaaattataaaatgcggtttattaaaaaaaaacaaaattataaatatattgctaaaatcaaaagatcagatcattaaaagagactataaaacattagaaagtttatgcacagaaactttgaaaactaaaattattttatttaaaaacgatatatatgaaaacggtataaggcttcatctaaactttggtcacacatttgcccactcttttgagatggcaacagaaaaattgttaaataaagaattaattagacatggtgaagcagtaggaattggaatgttatgtgaaattcttttatcatcaaaaaaaaaaaataaagtttataatttgttagaaaaaatattaaaacaatattcacttccaactagccttcaccaatatgatctaaatatttcaaaacaaaaaatgatcgaccaagtttataaagcaatatttcttgataaaaaaaaaattaataaattaccaagatacattggtttaaaacaatttataaactcatataaagaaattgaaatactggagaa

SEQ ID NO: 286629 - DNA, 727 bp, Unknown
  Bacterial polypeptide expressing nucleotide sequence isolated from the Sargasso Sea
atgaaaatatctaaaattaatgtgaaaaataaacatacgggatacaaaatcataattggtaatggtgtgataggtttgctaggtaaagagataaaaaaattatgtcctaaaactaaaaaaattgctttggttattgataaaaatattccttacaattttaaaaatcaaataaagaaaaatttaaaaggatataaaatatttatttatgattttttacctaatgagaatttaaaatcctttaaaaaagctaacagtttgttagaaaatttaataaaagaaaatcttagtagaagtgatactttgattactgtaggtggcggaattattggagattttggaagttttgtagcaagtatttataaaagaggtattaattttattaatgtcccatcaaccctacttgctcaagtagattcatcaattggtggaaaaactgctgttaattcaaccagaggaaaaaatttaattggtacattttatcaaccaaaacttgttattagtgaaattggtttattaaaaagtttgtcaaaaagaaatttagtgtgtggttttgctgaaattttaaagcacgcaataataaaagataataaattttttgagaaactaaataaaaattctgacaaaattttaaataaatttaatgttgatatattaaggaatataataaccaaaagctgccaaataaaattattttatgtaaataaagatgagaacgagaacaataaaa

SEQ ID NO: 286630 - DNA, 715 bp, Unknown
  Bacterial polypeptide expressing nucleotide sequence isolated from the Sargasso Sea
acttattccgacctccacactagcgatgaatgatgctgccatcggcggtaaaaccggtattgatctcccgcagggaaaaaatcttgtcggagccttcaagcaaccttccggagttatcgtggatgtagagctcttacgcacccttcctaaacgatcttatgttgaaggttttgcggagataatcaagcacggacttatcctagactctgaactctttgagtggcttgaagagaactcagccgaactattgagggagtcacctgatctaaatctcctcgcgaaaatcacagcacgctctgtcaggctcaaatcaatgatcgtgtccgcagatccgcacgagagcggtctccgtgcaattctgaactatggacatacgacggggcatgcgatcgaaaccgtcacttcgtacgaacagtatatgcatggcgaagctgtatctgtcgggatgatggcggccggctatatcggcagagatttagggaaaacaccacaagaattgctcgagagacagtctgacgcactcagaacctacgggctcccggtgtcggcaccaggtctaaatccgactgcggtgctggaggcgatgacccgggacaaaaaagttgtccggggagatattcgttttgtattgatcgataaagtcggccacgcattcctggaagattcgataccgatcgaattaattaaggacaacctgaagcgaataacaaagtga

SEQ ID NO: 286631 - DNA, 837 bp, Unknown
  Bacterial polypeptide expressing nucleotide sequence isolated from the Sargasso Sea
gaaaaaaattgcaaaaaaaaatgaaaaggtattttgtattattgatgcaaaaattaaaaataaattcaattttagaaaagaaaacaatgtaaaaattataactattcactgtggagagaaaattaaaacgattaattcttacaaaaaccttgctgaaaaactaattaaaaaagatgtaaatagaaaatctgtacttgttgctattggaggtggaacattaggtgatctagtgggatttatctcaagtacagtattaagaggtttagatttttttttaatacctactacacttttatctcaagtagatagctctataggaggtaagaatggaattaatacaaacttcggaaaaaatatgcttggaactttctatcaaccaaaagaggtattaattgatatttctgttctaaatagtttaccaaataaagaaataaaatcaggatatgcagaaataattaagcatgctttaattaatgattataattttttttgttggttagaaaaaaatatagataaattacttaacctaaataaatctattttagaaaaagcaatttataaatcaataatgataaaacttttttatgtaagaaaagatgaaaaagaatctttattaaatagtcactctagagcaatgttgaattttggacacacaattggtcatgctatagaaagcaattacaattataaaaaatttaatcatggagaagcaatttctataggaatgataacagaagcaagaatatctaattatctcggtttactctcgtctaatgaactttatagaatattattacattttaaaaaatgtaatctaaaaatttttgacaaaataat

SEQ ID NO: 286632 - DNA, 775 bp, Unknown
  Bacterial polypeptide expressing nucleotide sequence isolated from the Sargasso Sea
ttcaatatatgttttggttgactcaaataccaataaagaatgtattccaatttttaagaaacgtatttctaattcatttagttttatagttattgaaattgatgaaggagaagagaataaaaatattaactcatgccaaaaggtgtggactattctttctgataaaggtggagatagaaaaagtttggtgattaatcttggaggtggggtgataactgatataggaggttttattgcatccactttcaagcgaggaattgatttcataaatatcccaacaactctattgtcaatggttgatgcttcaattggaggaaaaacgggaattgattttggtaatcttaaaaatcagataggtgtaattaatgatcctaaactagtagtaattgatccattttttttaaatactctatctattaaagaattaagaaatggttattcggaaatgctaaaacatggattaattacagataaaaaatattgggataaggtttcagcaattctattagaaaaaaaagaaccgggaatagatgaaatattcacatccataaaaattaaaaacaaaattgtattagatgatccttttgaaaaaaataaacgaaaagttttaaattttggtcatactgttggccacgcaattgaatcatttttcatgaattcacaaactcataacaaacttagtcatggaaaatctatagcaataggaatgattattgaggcttatatttcttatgatttatgtaagcttaaaatttctgaagctaaagaaattaag

SEQ ID NO: 286633 - DNA, 673 bp, Unknown
  Bacterial polypeptide expressing nucleotide sequence isolated from the Sargasso Sea
tatgaaaattagtcgtttaaaagcaaaagattattcgattgtaataggaaaaaattctatattattattaaattcagaaattaaaaatcattgtccaaaatgtaaaaaagttgctttgatagttgatagaaaaatcccaaaaaaaatattaattcaaattaaaaaaaatttaaaaagatttaacatatttattttttttgtatcttcttcagagaaaatcaaaaatattaatcaaataaatttatttatcgacaaactgttacgacttaactttaatcgaacagatcttataattggtattggcggaggtattataggagatatggcaggctttgtttcaagtatatataaaaggggaattaattttatcaacttgcctagtacacttcttgcacaagtagactcatgtattgggggtaaaacgggagttaattcaattcacggaaaaaatttaattggatctttctacaacccaaaagttgtaatcatagagactgaattattaaagtcactaccaagtagagaggtgatttgtggctatgccgaaattttgaaacatgcaattattcaggataaaaaattttttaattttttgaataagcatactcagaatattctatctttgaacaacaaaattttagctgaaagtataaaaagaagttgtaaaattaaa

SEQ ID NO: 286634 - DNA, 377 bp, Unknown
  Bacterial polypeptide expressing nucleotide sequence isolated from the Sargasso Sea
tttgaaatataaaattattatttcaggaaatgctatatcaaaaaaaaatctcggccccattctaaaagagcataacaaagctctcataatttcagacaatggagttccattagatattacaaaaaaagttaaatctatttgcaaaaactatagcaaagttttttcagttgttttgacaaaaggagagcaagcaaaatccattcagaactttcaaaaaattttaaattttctagccgaaaataattttgaccgaaccgatataattatttcagtgggtggaggagttgttggagacatttctggttatgtggccagctcataccttaggggaattcaattcatccaaataccaactactcttcttgcgcaggttgact

SEQ ID NO: 286635 - DNA, 754 bp, Unknown
  Bacterial polypeptide expressing nucleotide sequence isolated from the Sargasso Sea
atgaatcaatcaaataaaattgtttataatataaacaataacaaacacgatattatatattcaaataatatactctcaactttatcgaaaaaaattaaggaactcgaaagtgaccaaaaaattttttttctttttgatgagaatatagataaaaaaataacaaaagaaatatttttgggcttaaaattaactggatgtaaaatatatcaaaaaaaaattaaaagtttaaaaaaaaataagaatcttaaaaatttaacaaatttaatcaatattttttctgatttatcattaacaaaaaaatccattgttttagtttgtggtggaggtgtagttggagatttggctgggttagcatctagcttatatagaagaggcttaatatatattaatataccatcaaccatgaccgctatggtagactcatgtttaggtggtaaaactggaattaatcatctaaaccaaattaatttgattggaacatattaccatccaagcagtattataatttacgataaaattataaaatcaataccaagtagagagtatattagtggtctgtcagaagttgtaaagacttacattctatcaaataattcaaatttaaaaaacatagagaataatgttaaaaaaattttaattaaagacaggtctcttgttaaaaaattaattcttaattctttaaagattaaattaaaatactttttaaatgatatatatgaaggcaacaatagacttttcttgaattttggtcata

SEQ ID NO: 286636 - DNA, 454 bp, Unknown
  Bacterial polypeptide expressing nucleotide sequence isolated from the Sargasso Sea
aaattaattgatttaaaattctcaagagattcattgattatttcttttggtggcggcataactacagatctcgcaggttttgtagcttctgtatatcttcgtggaattgaagttatgcatattcctaccactctgctggcccaggtcgatgcttcggtaggaggtaaaacaggtgttaacagtaaaaaatataaaaatatgattggtgcatttaagcaacctgaagcagtattaattgatacattttttcttaaatcactaagtaaaaggcatatagcagcaggttactcagaaataattaaacatgccctgatcaaagataaaagtctgttttctaaattagataactttgatcagaatattgaaaaaaaagcaaacattgccgagttatcagacctcatcaggagatcaactagaattaaggcaaatatgttgagcaagacgaaagagagaa

SEQ ID NO: 286637 - DNA, 463 bp, Unknown
  Bacterial polypeptide expressing nucleotide sequence isolated from the Sargasso Sea
atgaaaaatcagcaaattaaatttaaaagtaaaaagcagagctattctgttgttataggtaaaaatactttgcaaattttaccaaaaaaaataaagttattatgtccaaaaacaaaaaaaattgcattaatttttgataaaaatgttccaactaaatttaaaaaaagtctgaataaaaagttgaaaaattatagtctcttattcattccttttactgctaacgaaaaaaataagtccatgaatatggtaaatgaaatcttaaacatattgctagttaaaaattttaatcgaaccgacttagtaataagtattggtggcgggataacgggtgatgtagttggttttatcgcaagcattttcaaaagaggaattaattttataaatattcctacaacattacttgcccaggttgactcagctataggaggcaaaactggagtaaattccaagcatgaaaaaatct

SEQ ID NO: 286638 - DNA, 670 bp, Unknown
  Bacterial polypeptide expressing nucleotide sequence isolated from the Sargasso Sea
aacaggaataaataatgcttatggtaaaaatcttattggatcattttatcaacctgatttagttttatctgatattaatttactaaacacattaccttatagagaacttgtatgtgggtatgcagaaataattaaacatgctttaattcgaaataaaaaaaattttttttatttaaaaaaatatcacaaagaaatatttaaattaaaaagtccctttatagaaaaagcaattctagaaagttgtaaaataaaaaaaaacgtagtgcagaaagatgagagtgaaaaaaatttaagaaaaatacttaatttaggacacacatttgcccatgcttttgagtctgcgctcggttattcaaaaagacttaaccacggtgaagcagttataataggaattactgtcgcaacaaagtttagttatttatataataaattatccaaaatagattatataaatattaataatcatttcaaagatttaaggttgaatttaaaattcaataattttttttctgcaaaggatattaaaaaaatatgcaattttatgaaaatggataaaaaaaataattcaaagaaaataaatttagttttacttagaaaaattggtcaaacaactattgataaagattttgaagtaaaaaaaattgaaaaatttttaagaagtcaattataa

SEQ ID NO: 286639 - DNA, 646 bp, Unknown
  Bacterial polypeptide expressing nucleotide sequence isolated from the Sargasso Sea
atgaataaaagtataaaaataagaacgaaagaaaaaaaatacaatattgaaataaaatataatttttttaatagtaaattaaaatcaatcattaaaaaaaataataaaaataaaatatttataataattgatactaaattaaaatatttgctaaaaaaatttaaattagataaaaatgtaactatgcttgaaataaaagcttctgagaaaattaaaaattttgataactataaaaatttattaaataaaatgttatcaaaaaatattgatagaaattctataattattgcaattggtggtggtactataggtgatctaagtggctttgtagctagcactgttttaagaggtgtaaaattaattttaatcccatctactttattatctcaagtagatagttcaatcggtggtaaaaatggaattaataccagacacggtaaaaatttgattggaagcttctatgatcctgaagaagtttttattgatcctagtattttaaaaacattgccaaaaagagaacttaaatcaggatatgcagaaattattaaacatgctcttatatatgatctaaatttttttaaatggctggaaaataattataataaaattttgaatttaaacaaaagtgccataagaatatgcaatt

SEQ ID NO: 286640 - DNA, 444 bp, Unknown
  Bacterial polypeptide expressing nucleotide sequence isolated from the Sargasso Sea
tatgaaaatagttagaatacaagtaaaaaataagtatataaattatcccatatttgtaggaaataactcaataaaattgctacgacaacaaattaaaaaagtttgtccaactacaaaaaaagtagcaattatttttgataaaaatattccaataaaatttaaaaaaaaaatcaaaaaattacttaagggttataaaatttttaccagagaatatttaccaaatgaaaatttaaaatcttttagtaaagcaaatcaactatctgagtatttgttggaaaataattttaataggaatgatacaataatagctgtgggtggaggaattatcggagacttttctgggtttgttgcaagtattttaaaaagagggatgaattttattaacttgccttcgacgttacttgcacaagtagactcctctataggaggtaaaacaggaataaa

SEQ ID NO: 286641 - DNA, 718 bp, Unknown
  Bacterial polypeptide expressing nucleotide sequence isolated from the Sargasso Sea
atgaaattgaaaattaaaacaaacaaaaattattattctgtaattattggaaaaaatatttgttcaaaaataaatcaaatgatcttaaatgaaaaaatttattctcaaaaatttttacttgtttatgatagtaaagtaccaattaaaatgatcaaatctatagtaagtagatttaacaaaaaaaaaattgaaaagaaaaaaataatttttaatgaaaaaagtaaaaattttaaaactgtttcatctattgtaaaaattcttgaaaagaaaaattttagtagaagtgattgtttaatttctgttggtggtggtatatgtggagatgtgtgtggatttgcctcaagtatttttaaaagaggtttaaactttattaatgtgcctacaactttgcttagtcaagtcgactcagcaattggtggaaaaacaggaattaattctttatcaggaaaaaatatgataggatctttttatcaaccttcattagttatttcagacataaattttttaaaaagtttacctaaaaaagaaatgatatgcggatatgctgagatactaaaacattctctaataagtgacaaaatatttttcaaatttttaaaaaaaaattttaacaagattctaagtcataatcacaaatttttagaaatagcgatttataaaagttgtttaatcaaaaaacaggtggttgagaaggatgaaaaggaaaaaaatattagaa

SEQ ID NO: 286642 - DNA, 637 bp, Unknown
  Bacterial polypeptide expressing nucleotide sequence isolated from the Sargasso Sea
agtttttaccagccatctttagttttaattgatattaattttttaacaaaattgaatgatagagagatggcagctggttatgcagaaatcgtaaaatatagtttaatatttgatatcaaattctttaattggctcattattaatggaaaaaaggtaatgaataaaaataaagaagcattgattcacgcaatatttctaagctgcaaatgtaaatctaagattgtaagtcttgatgaaaaggaaaaaaatataagagccttactaaactttggtcatacgtttggtcatgccattgagcaaacaaattcatacaagaaaaacataaatcatggagaagctgtggctatgggaatgataatggcatcgaaattatcatcagcgatgaatttaatctcaataaatgaattaaataaaataattaatcattttaaattactaaatttaccaactcaaattcccagatcactaagaaaaaatctttcaataaaaatgtttattgatgttatgaataaagataaaaaaacaaaaaataataaaattaatttaattttacttaagaaaattggtaaagcttatcaaactaacaaatttgacactcaattactaaaaattattataaaagatgctatagcttaat

SEQ ID NO: 286643 - DNA, 526 bp, Unknown
  Bacterial polypeptide expressing nucleotide sequence isolated from the Sargasso Sea
tatgaaaattaatcgtttaaaagcgaaagattactcgatcataataggcaaaaactctatgactagtttagcctcggaagttaaaaacctctgtcctaagtgtaaaaaaatcgctgtgataattgacaaaaaaatacctaaaaaatttttaagtaaactcagaaaaaatttaaaaaaatataaattatttgttttttttgtttcttcctctgaaaaaattaaaaatttagacaaaactaatttattgttgaataaattacttaaacttaattttaatagatcggatctaatagtagctttgggtggaggtattattggtgatatgacaggttttgtagctagtatattcaaaagaggaattaattttattaatttaccaagcacacttctatctcaagtagactcttgtattggtggaaagacaggtgttaattcaaaatacgggaaaaatttaataggatcgttttacaatcctaaagtagtaatctcagatacggaattactaaagtctttgccaaaaagagaa

SEQ ID NO: 286644 - DNA, 642 bp, Unknown
  Bacterial polypeptide expressing nucleotide sequence isolated from the Sargasso Sea
taggcactttctatcaacctagattagtaatatcagatgtatcactattaaaaacactcacaaatagggaaattttatctgggtatgccgagataattaaatatggattaattatggataaaaaattccttaattggctgataaataatgaattaaaactgaagaagtttgacaagagatatttaattgaagctgtttttcattcttgcaaaaataaagcaaaaattgtatctaaggacgaaaaagaaaaaaatattagagcgatactaaacttaggtcatacttttggacatactattgaagctataaacaactaccataaatcattaactcatggagaagccgtttctatcggaattatgatggctttggatatgtcatctgtggaaggtaaaatctcaaatattaatattgatagtattagaaaccacttcaagagattaaagatgaaaacaagtatacctaataaaattaaaaatatgacaacactaagtaaatttaaagaaataatgaattctgataaaaaagttaagaagaaagatatttaccttatattgctaaaaaacttgggtgaagcttatttgactaacagatactcggcaaaaaacttagatagcataatagaaaagtatataaactaga

SEQ ID NO: 286645 - DNA, 532 bp, Unknown
  Bacterial polypeptide expressing nucleotide sequence isolated from the Sargasso Sea
atgtccaataagattaaagttgatttaggaaacaatagctataacatcagtttgattgagggtttcaaaaattcagttgtaaagtttgcatcgtcaacaaaatcacaatgtatgttaattactcaaaaagagattgtaagtctatataaagatgaaataaacgagctttctaatttacctaatgtaaatatttttttgattgatcaaggtgaaaaagcaaaatcatttgaatctatttctttaattgtcaatgagatggcaaaaaaacattttgataggtcatcattagtgtttgcagtaggtggaggggtagttggagatgttgcgggctttgcatcatcaatttttatgaggggaattaaatacattcaatatccaaccacattacttgcaatggttgattctgctataggaggaaagacaggaattaatttaaaggatggtaaaaatttggttggaagaatatatcagcctatagctgtagaaattgataccaattttttatcaacgttaccagctagagagctgcaag

SEQ ID NO: 286646 - DNA, 526 bp, Unknown
  Bacterial polypeptide expressing nucleotide sequence isolated from the Sargasso Sea
gatacaaaaatagttaaatatttaatactacaatctttggaaattaaaattaatcactttacaacagatgtatttgaaaaaaatacccgtctacttttaaattttggccatacatttggtcatgcatatgaaatggcgactgatgaattaatcaaaaaagattttttaagacatggtgaggctgttgctctaggaattatttctgaaatagcaatgtcctttttagaaacaagatcaaatagtaaaaaaaaaaaaatttacaaatctttagtagctgtaacaaatatattaaatgaattatcattacctactaaattaagttttcctcaaaatattaatagccaagaactgcaaaaaaaaatatatttttatgtttttaaagataaaaaaagaatatctgaaaagcccagatatataaattttgaggactctgggaaattaaatgctaaagaggtaaataattttgacaatattaataaagttatttactacctaatcaataaagtagatataaatattatttaat

SEQ ID NO: 286647 - DNA, 498 bp, Unknown
  Bacterial polypeptide expressing nucleotide sequence isolated from the Sargasso Sea
aatgaataaaaaaattaaatttaacataaacaaaaaaaaatattttgttgagattgaagtaaattctattaagaaaaaaatagataaaattattaaatctaataacaacataatttttttaatagataaaaaagtttttaatgtttttgaaaaagtaaaaaactataaaaaacaaaaatatatcactattagctgctcagaaaaaattaagtcttttcaagacttctcaaaattaagtaacaaaatacttagcatgggtgtggatagaaaaagtacactaattgctataggcggtggaacacttggagatcttgcagggtttatttcaagcacattgttaagaggagttgatcttgttttaatcccaacaacattgttatctcaggtagatagttcaattggaggaaaaaatggtatcaacactaaatatggaaaaaatcttataggtactttttatcaaccgactaaagtgattatcgaccctagcactttatcaag

SEQ ID NO: 286648 - DNA, 773 bp, Unknown
  Bacterial polypeptide expressing nucleotide sequence isolated from the Sargasso Sea
aaaaagaggattaaaatttattaatattcctacaacactcttagcgcaatctgatgcttcaataggaggcaaaacagcaattaatagtaaacaaggaaaaaatcttataggcacgttctaccaacctgaatttgtattaattgatgtatcagtgcttaacagtttaccaaaaagagaaataatttgtggatatggcgagatactaaaacattcgttaattatggataaaaaattttttttatggctttgcaacaatgcaaaaaaaataattgatgaaaaagataaaattttattaaataatgctatcgttaaaagttgtaaaattaaatctaaaataattactagggatgaaaaggaaaaaaatttaagaatggttttgaattttggacatacttttgctcatggatttgaaggtgcaaaaaattattcaaaaaaattaaatcatggtgaagctgtgcttttgggcatgtttgtcgcaagtcagttgtctcacaaaaaaaaattactttcattacaaaatttaattttaataaaaaaacattatctttccttaaatttgccgatgaaaattaggcagttttttaaaaaaagtgaagttaaccaaataattaattttatgaaaaaagataaaaaaaacgtagatgaaaaaataaatttaatcttaataaaaaatataggaaaagtgacaaagcccaataattttgccatcaatgctaatgagctaaaaaaatttttagtctcgcaaatatatttaataactattttattttaat

SEQ ID NO: 286649 - DNA, 753 bp, Unknown
  Bacterial polypeptide expressing nucleotide sequence isolated from the Sargasso Sea
aaagaggtataaatttcataaatattccaacaacttggctagcacaagttgactctgccataggtggaaaaacaggtgtaaattcaatttacgggaaaaatttaattggatctttttatcaacctaaactcgtaattagtgatacagattttataaaatctttgcctcaaaaagaagttacatgtggttatgctgaaattctaaagcatgccataatcaatgacttaaaatttttcaattggttaaaaaaaaatacaaaaaatatttttttaaaaaaaccaaaagaattaatttttgctattaaaaaaagctgtcaaataaaaatgttttttgtaaatagggatgtaaatgaaaagggtttaagaatgatacttaactttggtcatacatttgcacatgctattgaagtaaaaaataactattcaaaaaaatttactcatggtgaggctgttctctctggaatgatcttagcaacaaaactttcagttgtaaaaaaagtttgtaaaattaaaattcttaaggaaatagagcaaatttataaaaagaataatttatcgcatatattaaataaatttacgaaatctaatgagatcaaaagtttaattccttttttaaaaattgacaaaaaaaacgatgatgaaaaaataaattttattttattaaaaaaaattggaaaaactacaaagcctaatacttgtaaaatatctactggtgatttaaaaaagataactaaatttattgctcgatattaat

SEQ ID NO: 286650 - DNA, 574 bp, Unknown
  Bacterial polypeptide expressing nucleotide sequence isolated from the Sargasso Sea
atgaacaaaattaaggtagaaacaattaacaacccttatgaagtggttgttggatctaacctgataaaccaaaaggacttaaaagcgttagaaggtaaagaagtacttctagtcatagatgagaatataccaacaaaatttaaagatttaattgtggatgcactatcaagcttatcatctaattttcaatctttagaaattcgtgcttcagaagaaaataagagcggaaggaccctggatagcattcattctaaacttattgatgcaaggtttagcagagactgtgttctggtgggatttggtggaggaataacatgtgatatagcaggttttgctgctgcaacctatcaaagaggagtaaattttattctatttccaagtaccttgctctcgcaagtggatgcgtctgttggtggcaaaacggcaataaatcaccctcaaggtaaaaatatgatcggtgcatttcatcaacctattaaggtttttgctgatgtagaccttttgagctctcttcctaagattgaaataagcaatggtctttctgaggttatcaaacacgccttaatcaggacaa

SEQ ID NO: 286651 - DNA, 451 bp, Unknown
  Bacterial polypeptide expressing nucleotide sequence isolated from the Sargasso Sea
aatgaaattaaaagttaaaactaacaaaaataattatagtataattatcggaaaaaatctttactcaaagatatataaaataattttaaatgaaagaatatattctcaaaaatttttgcttgtttatgacagtaaagtgccagctcaaatgattaaatctattgtaagtagatttagcaagaatgaaattgaaaagaaaaaaattgtttttaatgaaaaaagtaaaaatttaaaaactgtttcatctattgtaaaaattcttgaaaaaaacaattttagcagaaatgatagtttaatttctgttggaggaggtatttgtggtgacgtatgtgggtttgcatcaagtatttttaaaagaggtttgaattttattaatgtacccacaactttgctgagtcaggttgactcagcgattggcggaaagacagggattaattctttatctggaaaa

SEQ ID NO: 286652 - DNA, 660 bp, Unknown
  Bacterial polypeptide expressing nucleotide sequence isolated from the Sargasso Sea
tatgaaaagcaataaattaattgtcaaaacaaagagcaaaacttacccgatttattttggtaataattttttaaatataacaggtagacttattaaaaaaaaacttccaaatgtaaaaaagatatgcatcatttccgataataaactacccaaaatattacttaaaaaattaacaaactcattgaaaaattatgatctaaagatttataaattatctgtaaatgaaaaaacaaaaaccttaagtgtagcaaataaaattaccgaacagcttttaaaagaaaattataacagaacggattgtgtaatttcttttggaggaggaatagtaagtgatttatcagcttttatttcaagtataattaaaagaggaataaaattcgttaatattcccacaacattattatcacaagctgattcatcaattggaggaaaaactggtgttaatactaaacaaggaaaaaatcttataggaactttctatcaacctgaatttgttttaaatgatacttttatgctaaacagccttccaataaaagaaatgattagtggatatggggaagttttaaaacatgcattaatagtagatagaaaattttttatatttctctccaaacacggcaaatcaataatattaaaaaaaaataattttaacctaaaaaa

SEQ ID NO: 286653 - DNA, 686 bp, Unknown
  Bacterial polypeptide expressing nucleotide sequence isolated from the Sargasso Sea
tggtggtaagactggtgtaaatactaaagagggtaaaaatcttattggaaacttttatcaaccaaaaatggttataagtgatacagagtttttaaaatctctatctaaaagagaaattatatgtggatatggagaaattttgaaacattcgcttatcatgaatgaaaatttttttaactatctagacaattactcttcagaaattttgaacttgaaaagtccatttatagaaaaagctattttcgaaagttgtaaaataaaaaaaacaattgttgaaaaagatgaaaaagaaaaaaaattaagaaagatattaaactttgggcatacttttgctcatgcttttgaggcggcattaggatactctaaaagactaaatcatggtgaagctgtaatattaggaattatcacggcactcaaatttagtttaaatttgaatttagttaagcaaaaaacatatgaccaaataattcaacatattcaaaaaatgaatcttccatcaaatctaaaaaattatttttcaacaaaagatctgaacaaaatattaaattttatgatgcaagataaaaaaaatatttcaaaaaaaataaatcttatattgcttaaaagaattggctcaacagttataaataatagatatgataatttgaaaattaaaaaatttttgaataaagaattaactaattaat

SEQ ID NO: 286654 - DNA, 271 bp, Unknown
  Bacterial polypeptide expressing nucleotide sequence isolated from the Sargasso Sea
agacgcatttgatctaaaaacactcatccttccagaaggagagaccgaaaagaatttagagactgttggaaaagcggttgaattcctatctgacagtggaatcgatagggattcatcaatcattgctttcggcggaggcgtgattggtgacatcacaggctttgtggcctcatcttatatgagaggcataaagttccttcaggtcccacccacactgttggcccaggttgactcctccgtagggggaaagacagggatgaatataagtacc

SEQ ID NO: 286655 - DNA, 629 bp, Unknown
  Bacterial polypeptide expressing nucleotide sequence isolated from the Sargasso Sea
gccaaagctggttgtttctgatatttctgttttaggctccctctctgaaagaaactggctgtcgggatacagtgaagtaattaagtatggtttggtaggtgacaaagactttttcatgtggcttgaaaagaattccagtaatattttaaatggtgattcagaaaagattaagtatgcagttggaaggtcctgcgaaatcaaggcatctgttgtagctcaggatgaaacagaaaaaagtagtaggactctcttaaatttggggcatacctttggtcatgctttagaggcttttacgggttactcggaaaaattaattcatggtgaagctgtctgtctaggatgtgttttggcctttaggctcagtaatagaatggctttgtgcacagatgaagatgtttatagagttgaaaatcattacaagaaaaatggtatgaaaactgaaatatctgactttgatataaaagcgattaatgccaaaaagattttgcagcttatgtcgcaagacaaaaaaactaaagatggtctgttaaatcttatattggtcaaaggtataggaaaagcttttatcgcaaaaaattttgataaagatattttagaatcatttttagttgagcaaattaactgctaga

SEQ ID NO: 286656 - DNA, 400 bp, Unknown
  Bacterial polypeptide expressing nucleotide sequence isolated from the Sargasso Sea
aaagagagaggagatagagccttactaaattttggtcatacatttggacatgctcttgaaaaacactttacaaaaaatgaggtacttctgcatggagaagctgtagctataggaatggcatatgcttcaaagttttctgtaaatactggcatccttaagaaagatgaatgtgatgagattataaatcttatatctgatataggtttacctatatcaataaatgacataaaaggtgagatcacaaaagaagaaatattaaatttaatgatgtttgacaaaaaaagaataaaccaaaaaaatacactaattttattgaatagaattggtgaagcttttatcaataatgatatttctgataaagaaataatagatttctttaatatggagaacatccaataat

SEQ ID NO: 286657 - DNA, 702 bp, Unknown
  Bacterial polypeptide expressing nucleotide sequence isolated from the Sargasso Sea
catgataaagggcgtgcatgaggtagcttacgacactatagaggtcgctgcggcttcaggtgggtatcaggtgttcgttggcccttctcttctagcttctgtgccggcggtggtggcgacctatgcacctgctcggcggcttgcggttatctcggatgacagggtcgggccgatccatggtgaaactgtagcggaggcacttagggacgcgggtcatgatataacttttcttacgtttccggagggagaagcatccaagaccaggaagttttggtccatcctcactgaccagatgcttgaagccgggttgcaacgcgactgtgcggtggtggctgtagggggaggtgtcaccacagacttagctggattcgttgccgctacgtttctcaggggcgttccagtcatccaagtgcccacgaccaccctttcaatggttgatgcctcggtcgggggtaagaccggcgtgaatgttcgcaatggcaagaatctggttggtgccttccatgcaccgagtgctgttgtcgcggatacagaggtacttggcacactggatccccggttcttggccgaagggcttgtggaggctgtaaagcacggagtgatattggacgaagaacacttcctagggatagcgaataggatacaagaactgatcctggctgatccgaaggagagcgccaggtgtgtaacagcatctgtgcg

SEQ ID NO: 286658 - DNA, 377 bp, Unknown
  Bacterial polypeptide expressing nucleotide sequence isolated from the Sargasso Sea
gcgcgagggtggcgtgcgggcgcacctgaattttggacacactttcggtcacgccatcgagcggattcagggttatggtgactggctccacggtgaggcggtggccgccggtatggtcctggccagtcggctttcagtgcttcggggcgggctggatgcagaggtggtcgaccaactgaccgcgttcaatgagtcggtaggtttaccggtcgcgcccccggccgatgtcaccgctcaggcaatgttggaggccatgagtagtgacaaaaaagtgagtggcggaaaagttcgctatattgtcttgtgtcggctgggtgaggcggtaatggctgaaaacgtcacggatgacgacgttgcgcgcgtgatagaggcctgat

SEQ ID NO: 286659 - DNA, 718 bp, Unknown
  Bacterial polypeptide expressing nucleotide sequence isolated from the Sargasso Sea
aatgaaaaaaattgaggtaggtataaaaggtaaccattatcaagtggttgtgggatctaatcttgtaaatcaagaaaacctacaaattttaaaagataaagaagtgcttctggttttagaccagaacatacctccgaaatttaaagatatgatgactaaagacctatcaggtttatcttctaaatttcataccatagaaattctcccatcggaagaaaataaaaatggggtaaccttggacaaaatacactctaagcttattagtaaaagatatagtagagattgctaccttgtgggtcttggcggaggaataacatgcgatattaccggttttgcagcagcaacatatcaaagaggagttaattttatcctgtttccaagcaccttgctttctcaagtagatgcctctgtagggggtaaaactgctataaaccaccctcaaggtaaaaatatgattggtgcatttcatcaacctaaacaagtttttacagacgtaagcctattaagttttcttccagatatggaggtaagtaatggtttgtctgaggttatcaaacatgccttaataagtgacaaagaatactttgaatggttggaaacgaatatggaagatattatttcgttagagcctaaagccttagaaagagctataactagatcaatagaaattaaagcagaaattgttgcaaaagatgaaaaagaaaaaggtataagaaag

SEQ ID NO: 286660 - DNA, 661 bp, Unknown
  Bacterial polypeptide expressing nucleotide sequence isolated from the Sargasso Sea
ggaggaaaaacaggagtaaatcatccaaaaggtaagaatttaattggagctttcaatcaacctaaagcagtttttattgatccagaaactttaaaaagtttgcccaaaagagaatttagtgcaggcatggccgaagtaataaaatacggagtaataagggataaagaacttttcgaatacttagaaattgaaaaaaacaaaaatgaacttataaatctcaaaaatgaatatctaattaaaataattaatagttcaattaaaacaaagtctcatgttgtttctcaagacgaacatgaaaatggtgttagagcaatattgaattatggtcattcttttggtcacgttattgaaaatttatgtggatacggcaaatttctacatggtgaggcaatatcaattggtatgaatattgcggggaaaatagcaattgaaaaagggttatggtctaaagaagaattagagagacagcgaattctcttggagagttatgatcttcctaccgagatccccaaaataaataaagaagacgttcttacaatacttatgggcgacaagaaagttcgtgatggcaaaatgagatttatattaccgaaagaaattggtgcagtggacatatatgatgacgtagaagattcattatttttaaagtttttttcttaac

SEQ ID NO: 286661 - DNA, 418 bp, Unknown
  Bacterial polypeptide expressing nucleotide sequence isolated from the Sargasso Sea
atgcaaaataaattttttataaataatagaaaactaaaaacatcaatattaataaaaaataattatatttctaaatttattatagacattgcaaaaaaaaacgaaaaggtattttgtgtcatggattcaaaaattaaaattgattttaagttaactaaacaaaaaaatataaaagtaatttctataaaatgtggagaaaaaattaaaacatttgatggctataaaaatcttgctgaaaaattaattaaaagtaatattaacagaaaatctgtgcttattgctattggaggaggaacattaggagatttaacagggtttgtagcaagtactgtattaaggggtttagattttttcctcataccaacaacacttttgtctcaagtagatagttctattggaggaaaaaatgggaattaac

SEQ ID NO: 286662 - DNA, 506 bp, Unknown
  Bacterial polypeptide expressing nucleotide sequence isolated from the Sargasso Sea
aatgaaattaaaagttaaaactaataaaaataattatagtataattattggaaaaaatctttgctcaaagatatataaaattatttttaacgaaagaatgtattctcaaaaatttttgcttgtttatgacagcaaagtgccagctcaaatgattaaatctataataagtaaatttaacaaggataaaatagaaaagaaaaaaattgtttttaatgaaaaaagtaaaaatttaaaaactgtctcatctattgtaaaaattcttgaaaaaaataattttagcagaaatgatagtttaatttctgttgggggaggtatttgtggagatgtatgtgggtttgcatcaagtatttttaaaaggggtttgaattttattaatgtacctacaactttactgagtcaggttgactcagcgattggcggaaagacagggattaattctttatctggaaaaaatatgatcggatctttttatcaaccctcattagttatttcggatatagattttt

SEQ ID NO: 286663 - DNA, 493 bp, Unknown
  Bacterial polypeptide expressing nucleotide sequence isolated from the Sargasso Sea
tggcttgagcggaacatggcggctctgcgcgcgctggacgccagtctcgtcacctacgcgatagagcgctcctgttccatcaaggctgaagtagtggcggcggatgagcgggaggggggcgtgcgtgcgatcctcaaccttgggcacacctttggccacgcgatagaagcgcatcaaggttatggcagctggctgcatggcgaagcggttggcgctggtatggcgatggctctggacctgtcttgccggcttggctggattacgggtgcagagcgaaatcgtggcgttgcgctgatcagtgcggcagggctgccgacggtgccgccgagcggtatggttgccgctgatttcgaacgtctcatgtcggttgacaagaaggtgctggatggtcagctgcgccttgtgctgttgcgtggcatgggtgaggccgttgtcacggctgaatttacggctgatgcgttgcgtcagtgtctcgtggggtttgaacaatgag

SEQ ID NO: 286664 - DNA, 790 bp, Unknown
  Bacterial polypeptide expressing nucleotide sequence isolated from the Sargasso Sea
atgataattgacaactattcaaatattaatcaaataattgcagagaattcatattcatcagttttcctattacttgatactaacacagatgatcactgtttagatttatttattaaaaaatcaaatataaaagactttaaaaaagttgtagtaaaggatggggaagaaagtaaaagtatagatacatgtgaatatgtatgggaatatttaaattcaaataatggagatagaaaaagccttttgataaatattggaggtggtgtagtaacagatcttggaggatttatagctagtacttacttaagaggtgttgattttataaatgttcctactacggttctttgtatggttgatgctgcttttggaggaaagacagggataaactttaagtctataaagaatcaaattggagtaattaacaaacctaaaggtgttttgattgatattgattatctggaaacacttagtaaagaagaatatatcaacggatttgctgaaatatataaacatagcttaattactgacaatgtagaacttcaatttaaaaaccttattcaatttgattttaaaaatgatataaaggatataatctataaatacagtagtattaaaaacaaagtagttgaattagatttacatgaatcaaattatcgaaaagtactaaatctaggccataccataggacatgcagtagaatcctattcaattatttcaaaagatatggataagttaaagcatgggcaggcaattgcagttggtttaataacagaactttattttcacataagat

SEQ ID NO: 286665 - DNA, 739 bp, Unknown
  Bacterial polypeptide expressing nucleotide sequence isolated from the Sargasso Sea
atgatatcctctaaaatattatttgtaaataatataaaatccgctttagcggattttttttcttctaataattattcaaaaattgcaattttagttgatgaaaatactgaaaagatttgtttaccttcaataatgaacaaaaatgaacttaataattttttaatcttaaagataagaagtggagaaaaaaataaaaatattaattcatgtataaaaatttgggataaattaactaacaacaaatttgatagaaactctttaataattaatctaggaggaggtgtaataaccgatatgggaggatttatagctgcaacatacaaaagaggaattgattttataaatattccaactactcttcttgctcaagttgatgcaagcgttggaggtaagctagggattgattttaataactataaaaaccaaattggtctatttaaagaatccaaatttacatttatagatacaaaatttttattaacattatctagaagagaattaaactctggatatgcagaaataattaaacattgtattattaaagacaaatctaaatttgatgaaatttataatcagaaaatagataaaaataattgggaaaacttaatcaaacattccttagatataaaatcaatgattgttgaatcagatttaaaagagaatggattaagaaaaattttaaattttggacataccattggacatgccatagaatcaacttacagacaaaagaaaaaaa

SEQ ID NO: 286666 - DNA, 1075 bp, Unknown
  Bacterial polypeptide expressing nucleotide sequence isolated from the Sargasso Sea
aatgaaaaaaatattatttaaagcaacgcaagaagaagtgttgctaatttcgtctgaaagcatagacaatctatttgattcaataccaacagatgctaagtgctgtgtattggctgataaaaaagttttagatatgcatgattcactcagaaagcagatagaaaataaaaattttataatctatgaaatttcaaatcctgaagaagaaaaaagcatcaactcatacactgagattgttgattttcttagctccaaatcttttaaaagaaacgatcgcattgtaggtcttggaggtggcgctatcacagatttagctggtttcgtatcttcaacctatatgagaggtttagattacatacaaatacctacttctttgcttgctcaagttgatgcttcaattggaggcaagactgctattaactatggaaaaataaaaaactttattggtacattctataatccatcgaaaattataatttgctctaaatttttaaagactttaaacgaacaagaatttttaaatgggcttgctgaagtgctgaaacatgccttaataacatcagataatgctgtcgatgaattaattaatagacatgagcaaataagtagtagagaaacagcaaccttgttagaaataatagaagaatctattcaaataaaggccaatattgttacagaagattttactgaaacaggcaaaagaaaatttttaaattttgggcatacttttgcgcatggaattgaatctgcaaacttaagtaaccctatactgcatgggcatgctgtaataatcggaatgatgatggcattagattatgcaaaacatattgaatcaattgatgttgatgctcacgagaagtctatgaaattgttaaaaagttttaattttgatttttcaaacataaggtttagtgcaaacgaaattattgaagcaatgaaaagtgataaaaagaatacaaatacaatcaatctagttttattgaaagatattggttcgccatatattcttgaagaagttaacgaagaaagattagctaattttattacaaactttatagaaaattttgaaaaataa

SEQ ID NO: 286667 - DNA, 1030 bp, Unknown
  Bacterial polypeptide expressing nucleotide sequence isolated from the Sargasso Sea
aatgaaaactgatctttatttatccatagccgaaaaaatcagttcagataaattttcatcaatatttattctagtagatgaaaatacagagcagttttgtttagaggttttcattaaaaaaagtggtattaaatcatttaataaaatcgttattgcttcaggtgaggaaaataaaaatattgatacatgtgtatccatttggggtcaacttaattcctacaaagctgataggaaatccttgttaattaaccttggtggtggagttctgactgatataggtggttttgcagcatcaacttatttaagaggaatagaatttattaatgtaccaactacactcttggggatggtagatgcagcacatgggggaaagacggggattgattttaaattattgaagaaccaaataggtgtttttaatcagccactagaggtattattagatgatgaatatttaaaaactttatcaaaagaggagtttattaatggttatgcggaagttgttaaacacagtctattaactgataaacctaacttaacttttaatagccttgtaaaacttgatttatttaaagatttagattttataattaatagttactcattagtaaagaatgaaattgtaaaatctgacaaatatgagtcgagtataagaaaagttcttaatctaggtcacacaattggacacgctgtagagtcttattctcatatttctgataaagtagatgatttgaagcatggtcaggctatcgtcataggtataataactgaactttacatctcatacaaaaaatttaaatttcctttaaaagatgttttagctgttaaagagcatctaaaaaaatatttcaatttaattcaattacaagaagatgacataattaatatatatgatctcatggtctatgacaagaaaaatgaagggagtaaaattaactttgtattattaaaagaaattggaaagccagtgattgatcaaattgtaaataaagacctcttcaaagagtcttttgaattttacattgaataa

SEQ ID NO: 286668 - DNA, 894 bp, Unknown
  Bacterial polypeptide expressing nucleotide sequence isolated from the Sargasso Sea
aatgaaagacgatcaatattcattactaaaagaaaagattaaatctaacgattttaatagtgtttttgtggttgtagatgaaaacacggataaatattgcctagagatttttatcaataaatctgaaataaataattttaataaaatagttatcaaatcaggtgaggaaaataaaaatattgatacatgcattaatatatggaaagaattaaattcacaaaaagcagacagaaaatcacttataataaatttagggggtggtgtactaactgatattggtgggtttgttgcgtcaacctatttaaggggaatagagtttataaatgttcctacaactttacttggcatggtagatgcggcacatggaggaaaaactggaattgattttttgagtttaaaaaaccaaataggagtgtttagtatgccgatggatgtaatactagactctgtttatctcaagactctttctaaagaagaatatttgaatggatatgctgaaatattcaagcatagttttataacagatataagtgatctaagctttcattcattaataaagcttgatttttttaatgatgttgacttcattattagtaagtattcagatataaagaatcaaattgtaagaattgataaatatgaatctaattcaagaaaggttctaaatcttgggcatacaattggacatgcacttgaatcttattcacatttatccaatagtctagataatttaaaacatggtgaagctataataataggtcttataactgaattgtatatatcaaacaaactaaatgatttctctcttgatacagtagataaactaaaagaagtatcgttaaattattttagtaaaattagcctaatagatagtgacttaaaagaatatttatg

SEQ ID NO: 286669 - DNA, 651 bp, Unknown
  Bacterial polypeptide expressing nucleotide sequence isolated from the Sargasso Sea
tatgcctaaatcatttagtgttggtaaagatacatcaaaatacaaagtagtaatctctaaaaattcactatcaaaaaaaaatcttgatccagtaattaataaaagtaataaagtaatgattgttactgattcaggaataccaaaaaaatatttaaaagaattaagatcgatcttaaaaaataaaaccttatatattcatattttagaaaaaggtgaaaactcaaaatcgtctcttaatttttttaaaatacatggaaaattatctgacctcaagtttgatagaacagactgtttgcttgctcttggtggtgggatggttggagatataactggtttttgtgctgcaacatatttaagaggtatcccatatattcaaattccaacaactttattatctcaggttgattcatcggttggagggaaaacagctattaatataaagcaaggtaaaaacttggttggtgcatttaataatcctgccttggtactgattagtacaaattatttaagtactcttccaaaaaaagaattcaagtctggattgggagaaatagttaagtatgcatttatcaaaaataagaaactttataaattactagaattaaatggcaataaagttttaaaaaaagaaccaaaaattttagaggaaat

SEQ ID NO: 286670 - DNA, 613 bp, Unknown
  Bacterial polypeptide expressing nucleotide sequence isolated from the Sargasso Sea
tatgaatacaaataaaatttcaattaaaacaagcacaaagaactactcaattataatcggaagagatttaataggtaaaattgataaaattttaaaagctaatcttctaaaattcgataaatgtttaatagttaccgacaaaaatattcctcacaactataaaaaacttttatacaaaaagttaaaaaaaaattcactttttaaaatggaaataatggcgtcagagaaaaataaaaattaccgaacaattgaaaaaattcatacagttttatttgaaaacagatttaatagagaagattgtgttattgcttttggtgggggaattattggagatatagttggttttgcatctagtacatttaaaagaggtataaaatttgtaaatattccctcaactttactttctcaggtggactcatctataggtggtaaaacaggtgtaaataataaatttggaaaaaatttgattggaagcttttatcaacccaatttagtagtttctgatatgaatattttaacttctttacctgaaagggaaattatttgtggatacgctgagatattaaaaagtagtatcatagataattttaataattttctttatttagacaaa

SEQ ID NO: 286671 - DNA, 916 bp, Unknown
  Bacterial polypeptide expressing nucleotide sequence isolated from the Sargasso Sea
aataaaaaaaacttcattgctatttttgtaaattgtggtgaaaatattaaaaatattaatacttataatcaattgtctaataaattattatcagaaaacattgatagagaatcaattcttgtagcaattggtggtggcacacttggtgacttatcaggatttattgcaagtacaattctaagaggtatagacttcaaactaatacctacaaccttgttatctcaagttgacagttcaataggaggaaaaaacggaattaactcatcatttggaaaaaatttgataggaacattttatcatcccagtgaagtaattattgatacaaatattttaaaaacattacccaaaagagaaattaaatctggttatgcagaaataataaaacattctttaataaaagatttaaaattttttaattggttagaaaaaaactttaatgaattaattaaattaaatgtgagaattttagaaaaagcaattttaaaatcattaatgattaaattatggtatgtaaaaaaagatcaatatgaaaaattaagtaacgaaaattcaagagctatgttaaattttggacatacaattggacattctttagagacatattataaatacaacagtaaattaaaccatggtgaagctatatcaataggaatgattacagagtctataatttcaaacaaattaggttacctaaatgataataatttaaatttaattataaatcatttcaaaaaagcaaagcttaaaatttatgataaaaatatatcaaaacatgaaatttttagaaacatagttaaagataaaaaaaatacatttaatagtattaatattgtattaattaagagaataggaaagcctttttttaaaagaaatttaaaaattgagcaaattaaaaatatattaaaaaaaatataat

SEQ ID NO: 286672 - DNA, 1108 bp, Unknown
  Bacterial polypeptide expressing nucleotide sequence isolated from the Sargasso Sea
atgaatcaaattaaattaaatatagaaacaaaaacgcaaaaatatcctatctatattggaaaaaaattatctgcgaatatttctaaaattacgaaatccaactcaattaattttaacaaatctcttttagttgtggatagtaatgttcctaaaaaatttgtttcaattattaaaaaatctttaaaaaataaaatgagttatatccattattttaaagccaatgaattaaacaagaacatgaatagtataaacaagattttagaaattttgttaaataaaaatttttccagggatgactgtttgatatctgttggaggaggaattacaggagatataagcggttttgctgcaagtctttttaaaaggggacttaagtttataaacataccaactactcttttgtcccaagttgactcatcaattggtggtaagactggggtaaatactaagtatggtaaaaatctagttggaagtttttaccagcccaatcttgttatttctgatactgaatttttaaaaacattacctaatagagagatagtttgtggatatggagaaattttaaaacattcgattattgggaataaaaaattttataattttttaaacaaccataaaaacaaaattttaaatcttacttctccgtttcttgaaaaggctatttatgaaagttgtaagattaaaaaggctgtagttgaaaaagatgagaaagaaaagggtttaagaaaaattttaaattttggtcattcgtttgcccatgcttatgaagcgacattaggatttagcaaaaagttaaatcatggagaagctgtaatactaggaatgaaaactgcactaaattttagtcttaagacaaaatttatgaataaaagagagtattattccatcatagatcatatcgataattcggatttaccatcttcggtaagtaaattttttagtccaaaagatgtaaacaaaattttaagttttatggcaaaagataaaaaaaatagatcaaataatattaatttggtcttactcaaaaaaattggagcaccaatgattaataaagaatattctaaaaaaaaaataggtttatttttaaaaatttttttacaaaattaag

SEQ ID NO: 286673 - DNA, 653 bp, Unknown
  Bacterial polypeptide expressing nucleotide sequence isolated from the Sargasso Sea
agaaggcaaaaatctgataggcactttttatcagcctaaattagtgatttcagatgtctcactgttaaaaactctcccaaaaagggagattttatcaggctacgctgaaataattaaatacggacttattatggataaaaaattccttaattggcttttagataatgagtcgaagcttcagaaatttaacaaaaaatattttgttcaggctgttttccactcttgcaaaaataaagcaataattgtaagaaaagatgaaaaagaaaaaaatataagagcaatacttaatttaggccatactttcggacatgctattgaagcaataaataattaccaaaaatcattaacacatggagaagctgtatctattggcatcatgatggctctagatatgtcttcacttcaagggaatagtttaaatattaataaaataaaagatcattttcaaaaattaaaaataaaaaccaaaatacctaacaatattaaaagaaagatatcacttaaaaaatttaaagagacaatgaattccgataaaaaagtaaaaaataatcatattaatctgattcttttaaggaatttaggtaaagcttacttagccaatcgatattcaactaaaaaattagacagcgtgataaataattatataaattaga

SEQ ID NO: 286674 - DNA, 724 bp, Unknown
  Bacterial polypeptide expressing nucleotide sequence isolated from the Sargasso Sea
aatgccatttatacaagtacccacaacattagcagctatgacagatgcttctattgggggaaaggttgcatataatttagaacatggcaaaaatttagtaggagcattttatcaaccaaagttagtttttgaagaattaaattttttgagttctttacctgaaagagaaaaaataagtgggtgggctgaagctattaagcattcaataattttggataaaaatttatttgaggactttaaattaaatagagataaaatttataatctagataatgtttactcagctgagatattaaaaagatcagttaagatcaaaggagatattgtatctcaagatgaatttgaaactggagaagaaagaataaaattaaattatggtcatacagtgggtcatgccatagaaaaagtttctaacttcaattcatatctacatggagaagcagtaagtattggaatgatggttgcaataaaaatttctgaaaaaattggaatgattgataagtcctcagaaattgaacaaaaagctattttagaaaattataatttaccaacttttgcaaaaaatctagataaatctaaaattttcgaagctataaaaatggataagaaaaatgttgatggtaaagtaaaatgggttctattaaattcaataggaaaagctcaaattgtaagaggtgttgatgaaagtatagttaaagaagctataagcgaggtaattctttaa

SEQ ID NO: 286675 - DNA, 445 bp, Unknown
  Bacterial polypeptide expressing nucleotide sequence isolated from the Sargasso Sea
atgaatttaaaaaagataatagtcaattcacaaaatcaaaaatactcaatatttataggccaaaatataatatctgagttttcttcaatactaaaaaaaagttcaattagatttaacaattgtctattagttgtcgatagaaatgtgccaaaaaaaatgattttatcaattaaaaaaaatctaaaaaataaaaatacttttattcactatatcaaagcaaatgaattaaataaaaatctaaaaaatacaaataatattattaaaactttacttgataaaaatttttcaagagatgattgtttgatttcaatcggaggaggaatagttggcgatataagtggtttcgccgcaagtttgtttaaaaggggaataaaatttataaacattccaacaacacttttatctcaagttgactcttcgatagggggtaaaacaggtgttaata

SEQ ID NO: 286676 - DNA, 630 bp, Unknown
  Bacterial polypeptide expressing nucleotide sequence isolated from the Sargasso Sea
tatgaagataagaaagataattgataggcacatacacgaaattgaatttttaaaaatagctcaattagaaaaaaaattaataaataatatttcaattagtgatattttaatatttgataggaatattgtaaaaattagattaataaaaaagcttttaaaaaaatttcctaatagatgttttgttattaagggtcacgagaaaattaaaaatatacagaactattcatctttaattgagaaaataattaaatcaggagttcaacgtaaaactataatttactcgtttggtggtggaacactaggagatctttctggctttttagcatccactatattaagaggagttgagcacgtaatgatacctacctctcttttagcaatggtagatagctcaattggtggtaagacaggggttaatagcaaatttggtaaaaatttaattggaactttttatcttccaaaaaaagtatttatatgttcagattttcttaaaagtctcccaaaaagagaaattgcatgtggatatgcagaaataataaaatatagcctaattgagtcaaagcaactccataagcttcttacaaaaagatccaatggtgacataaataaaattattaatctgtcaattaa

SEQ ID NO: 286677 - DNA, 439 bp, Unknown
  Bacterial polypeptide expressing nucleotide sequence isolated from the Sargasso Sea
attgaaaaataaaagcgtgattaaagtaaatctatttgatagatcttatcctattgaaattggctcttctctccttaatgagtttaattttagtgatttgatattgggtaatgattgcttgattgtgacaaatgaaatcgttgcctcaatttatttagatacacttaaaaacaatattaagacaaataatatagaaaccttgatattggaagatggagagagcaccaaaactgaaaaaacatggtcaactatcatagataagcttgtagatatgaaggcgaatcgtgatacaacaattttagcattaggtggaggtgtgataggcgatatcgtcgggtttgcggctgctacttatatgcggggattgcctcttattcagataccgacttctctcttagcacaagtagattcatcagtggaggcaaaacaggaattaatc

SEQ ID NO: 286678 - DNA, 1063 bp, Unknown
  Bacterial polypeptide expressing nucleotide sequence isolated from the Sargasso Sea
ttgtttaaagcaacgcaagaagaagtgttactaatttcgtctgagaacatagacaatctatttgattcaataccaacagatgctaagtgctgtgtattggctgataaaaaagttttagatatgcatgattcactcagaaaacagatagaaaataaaaattttctaatctatgaaatttcaaatcctgaagaagaaaaaagtatcaattcatacactgagattgttgattttcttagctccaaatcttttaaaagaaacgatcgcattgtaggtcttggaggtggtgctatcacagatctagctggtttcgtatcttcaacctatatgagaggcctagattacatacaaatacctacttctttacttgcccaagttgatgcttcaattggaggcaaaactgctattaactatggaaaaataaagaactttattggtacattctataatgcatcgaaaataataatttgctctaaatttttaaaaactttaaatgaacaagaatttttaaatggacttgctgaagtgttaaaacatgccttaataacatcagataatgctgttgatgaattaattaaaagacatgagcaaataagtagtagagaaacagcaaccttattagaaataatagaagagtctatccaaataaaggccaatattgttacagaagattttactgaaacaggcaaaagaaaatttttaaattttgggcatacttttgcgcatggaattgaatctgcaaacttaagtaaccctatattgcatggacatgctgtaataatcggaatgatgatggcattagattatgcaaaacatattgaatcaattgatgttgatgctcacgagaagtctatgaaattgttaaaaagttttaattttgatttttcaaacataagacttagtgcaaacgaaattattgaggcaatgaaaagtgataaaaagaatacaaatacaatcaatctagttttattgaaagatattggttcgccatatattcttgaagaggttaacgaagaaagattagctaattttattacaaactttatagaaaattttgaaaaataat

SEQ ID NO: 286679 - DNA, 877 bp, Unknown
  Bacterial polypeptide expressing nucleotide sequence isolated from the Sargasso Sea
agcaggtgaacaaagtaagaatcaaaactctgctaatgaaatatacagatggcttgttgaccgcaaagctgaaagaagacatttaataatagccgttggtggaggcgtagtgggagatttagcaggttacgtagcagcaacctttttgcgaggagtaccattcatacaaatcccgaccagtatggcttcaatggtagatgcttcaattggaggaaaggtagccgttaatttacctcaagggaaaaacttgataggagcgttttatcaaccaaaagctgtgatagcagatgtatctgctttgcagtcattagggaaacgtgaactatcagaaggttgggctgaagccataaaacatggtttcattgtagacaaagagttagtagatttattcgaagaaaatgcccaagccttaatggatctagaaccagaactttctacagatataatcagaagaagtatggccatcaaagccaacattgtaagccaagatgaaaaagaaactttaggactacgtatactactgaattacggacacacagtagggcatgctcttgaagcatcaactgaatacggccggttcatgcacggagagggtgtttctgtaggtatggtagcagcatctaagatagcccaacacatgggattaattgacgaagacttagtacagaggcacatagatatattgaatcaatataacctgccaattaaagcagacaatataaatatgaacgccttcaacagcgcaatggctttagacaaaaagagcctttcaggaagaaaccagtgggtcttactagattcgattggcaacgctattgtgcgacatgacgtccctccagagatagtggaaaacgttgtctcagaattaatcaactag

SEQ ID NO: 286680 - DNA, 649 bp, Unknown
  Bacterial polypeptide expressing nucleotide sequence isolated from the Sargasso Sea
aggagtgaatcatccaaaaggtaaaaatttaattggggctttcaatcaacctaaagcagtttttattgatccagaaactttaaaaagtttgcccaaaagggaatttaatgcaggcatggccgaggtaataaaatacggagcaataagagacaaagaacttttcgaatacttagaaattgaaaaaaacaagaatgaacttataaatctcaagaatgaatatcttattaaaataattaatagttcaataaaaacaaagtctcatattgtttctcaagacgaacatgaaaatggtgttagagcaatattgaattatggtcattcttttggtcacgttattgaaaatttatgtggatacggcaaatttctgcatggtgaggcaatttcaattggtatgaatattgcaggaaaaatagcaattgaaaaagggttatggtctaaagaagaattagagagacagcgaattctcttagagagttatgatcttcctaccgagatccccaaaataaataaagaagaggttctaacaatacttatgggcgataaaaaagttcgtgatggcaaaatgagatttatattaccgaaagaaattggtgctgctgatatatatgatgacgtagaagattcattatttttaaagtttttttcttaa

SEQ ID NO: 286681 - DNA, 738 bp, Unknown
  Bacterial polypeptide expressing nucleotide sequence isolated from the Sargasso Sea
ttgttgcggcaacttaccaacgcggtgtgcccttcattcaagttcctacgactttgctttctcaagtcgactcatcagtaggtggaaaaaccgcggtaaatcatcctctcggcaaaaacatgattggcgctttttaccaaccggtttatgtagccattgatactgataccctcgctacattacccgcgagagagtttgctgctggcatggcagaggtcatcaaatacggtatcatttacgacgcaccgttttttgaatggcttgaaagtaatgtagatgcgcttacgtcgcttgatactgaaattcttactcaagctatttctcgctgctgcgaaataaaagcagacgtggtagcaaaagatgaacgtgaaggcggtttacgcgccattcttaacttaggccacacgttcggtcacgctattgaagccgagcaaggctacggtaactggctgcatggcgaagcggtagccgctggtactataattgcttgtaaagctgctgaagcattaacgtggtttgaagcgtcagaaacacgacgcgtatcgtcgctatttgaagcatttgctttaccggttgcgggtccaaatagtatgacaaaggatgactacgttaagcatatgaaacgcgataaaaaagtggaagctggcagtattcgatttgtacttcctcaaggcataggcaaagcggttgttaccaaggacgtcacggacgccattcttactgacatcctttcttagt

SEQ ID NO: 286682 - DNA, 844 bp, Unknown
  Bacterial polypeptide expressing nucleotide sequence isolated from the Sargasso Sea
tatgaaacccattaaattaaaggttaatacaaaaagtcaaaattataacattattattggtaatgatttagtatctagagtttttaatttagctaaaaataattcacttaactttaaacaatgtctgttaattatagataaaaatatttcaaaaaaaataatatcaaaaattaaaaaatcattaataaaaaaaaaggtttatgtttacttttttaatgcaagcgaaaaaaataaaaatcaaaataatgtaaataaaattttagacattttgctcaaaaaaaatttttctagagatgattgtttgatttctattggtggaggaataactggtgatgtctgtggttttgcggctagtttgtttaaaagaggtcttaaatttataaatgtgcccactactcttttatcacaagtagactcttctattggtggaaaaactggggttaatacaaaatatggaaaaaatttaattggaaatttttatcaaccaaatttagttatttcagatatacaatttttaaaaacattaccaaaaagagaaataatttgtggttatggagagattttaaaacattctctaattgctaataaaaatttttataattttctaaataaaaatagtaataaaatattaaaactttctactccttttattgaaaaaagtatttatgaaagctgtaaaattaaaaaaaatgtagttgaaaaagatgaaaaagaaaaaggattaaggaaaattttaaattttggtcatacatttgcccatgcttatgaggcttctctaggttattcaaaaaaactaaatcatggcgaagctgtaattcttggaataaaacagcataaaatttag

SEQ ID NO: 286683 - DNA, 894 bp, Unknown
  Bacterial polypeptide expressing nucleotide sequence isolated from the Sargasso Sea
tttgtattatttaaaaaagtctttatcagatactgccttttcagtaaaacttattcctgtaaaaagtagggataaaaataaaaacttaaaaaccctaacatttataatcaatgaaattcttaaatttaatttagaacgtaattcacttattattacttttggtggtggtgtggtaggagatattggtggttttgtatcctctatattgttaagaggaattaattatgttcaaataccaacaactcttttagcgcaagttgatagttctattggaggtaaaactggaataaatacttctcatggtaaaaacttggttggaagtttttatcaacccaaatgtgtaattgtcgacactcaaattctaagaacacttccaaaacgtgaactatatgcgggattagcagaagtaattaaatattcattaattttagataaaaacttttttaattatcttaaaaataattatgacaaaatactcactttaaaagaaccatttattgagtatgctattcataaatcttgtaaaatcaaatctgaaatagttagtcaagacgaaaaagaacatggaattagagcattactcaatctaggacatacttttgctcacgcttttgagtctgagttgagatataaacctgatctgttacatggtgaagcagttgctattggtatttgcatggcatttagactttcaagaaatttggatttatgtaaatttacagaagttgaaaaagttgaaaatttaatatccacatataagttaccaacctcaataaatcaaattaaaacaatttcattcaaaagaaaaaacgtttttaaaaaacttttttctgacaaaaaagttaaagatggaaaattaacctttattttatgtactggcatggaaaagcgata

SEQ ID NO: 286684 - DNA, 841 bp, Unknown
  Bacterial polypeptide expressing nucleotide sequence isolated from the Sargasso Sea
ttaaaaaatataaacataattttagataaactttttaagttcaattttaatagatacgattgcataatatcacttggaggtggaataacaggggatgtatctggttttgcagcaagtatttataaaagaggtttaaaatttatcaatattcccactacacttttggcgcaagtagattcatctattggaggcaaaacaggcgttaataatatttatggaaaaaatttaattggttcatttatgcagcctgaccttgttatttctgatataaattttttaaactcacttcctaaaagagaattaatttgtggttatggtgaaattcttaaacattctataatctataacaaaaatacattctattttttaaaaaaaaattttaatgaaattttaaatttgaaatctccatttatcgaaaaagcaatagcagatagctgtaaaattaaaaaaaaaattgtagaaaaagatgaaaaagaaaaaaatttaagaaagattttaaatttaggtcatacatttgctcatgcatatgaggcatcactttcatattcaaaaaaactaaatcatggagaagcagtaatattaggaattgtaagtgcagcaaaatttagttttcaaaataattttttagataaaagtgattataacgaaataataaaccatacaaataatctaagaattcctataagtttaaaatattattttaaaaaaaaacatataaattcaattgttaaatatatgaaaacagataaaaaaaatagttcttctaaaattaatataattttagtaaaaaaaattggaaaaattattttaaactcaaactttagtgaactaaaaataaaaa

SEQ ID NO: 286685 - DNA, 761 bp, Unknown
  Bacterial polypeptide expressing nucleotide sequence isolated from the Sargasso Sea
tgtgataggagatatcgtcgggtttgcggccgctacttatatgcggggattgccttttattcagataccaacttctctcttagcgcaagtagattcatcagttggcggcaaaacaggaattaatcatcctgaaggtaaaaatctagttggatctttctatcagccaatagctgttgtgtcagatattgatacactaaaaacccttccaaacagagagtataaatgcggtcttgctgaaattataaaatacggagccatttatgattcagacttttttgattggctggaagtcaatatctctctcttactcaaaagagatcatgatgcgttaatctacgcaatatcaagatcttgcgaaattaaagcagatattgtcagtcaagacgaattagaaacgggtaaaagagcaatattgaactttggtcatacattcgcacatgcaatagagaatcatattgggtatggcactatctttcatggtgaggcggtggcaattgggatgttgatggcgtcaaaaatcagctcaatctcgcaatcagatcaagagaggctaaaaaatcttataataaattcaggcctccctcataatctggaagaattcgataagaatgaaatgcttgaaattatgctattggataaaaaaattaaaaataaaaaacttcgtttgattctcttaaacaggcttggtgaagcttacatagaagataacatccacaatgatcatattatggatgcttttgagaaatttcatcaagattaag

SEQ ID NO: 286686 - DNA, 736 bp, Unknown
  Bacterial polypeptide expressing nucleotide sequence isolated from the Sargasso Sea
tatgaaaacaaaaataataaaggttaaaactaaaagtaaaaattacgaagttcatattggtaccaatataatttcaaaattaagaaatattataaaaaaaaataaattatcattttcaaaatgtttaatagtaattgatagtaagataccaaaaaaatttagaacgatactcttgggaaatttaaaacatcaagaaatctatactttaaattttagtgcaaatgagaaaaataaaagtagcttaagtattgataaaatacataatgttttatttaaaaataatttttatagagaagactgtataatttcatttggtggaggaattacaggagatgtggttggatatgcggccagcacatttaaaagaggaataaaatttattaacataccctctactttattagctcaagtcgactcttctataggcggtaaaacaggtattaataataaatttggaaaaaatcttgtaggaagtttttatcagccagatttagtaatttcagatattaatttactacgtaccctccctaagagagaaattatatgtggatatgctgaaatatttaaaagtagtttaattgatagcaaaaaaaaatttatttttttagataaaaattttaataagattttaaatcttaaaggaaattttataattaatgcaattttaaatagctgtttattaaaaaaaaaaattattgaaaaggatgaaaaagaaaaaaatttaagaaaatcttta

SEQ ID NO: 286687 - DNA, 992 bp, Unknown
  Bacterial polypeptide expressing nucleotide sequence isolated from the Sargasso Sea
gtaactaaaaccgaaaaatatccaataattattggatcaaaattgacctcaaatatatcaaaaatttttaaattaaattctattgattttaataaatgtttaattgttgttgacaaaaatgttccaaaaaaatttgtctcaaatattaaaaggtctttaaaaaataaaagtatttttgtgttattttttaatgctagtgaaaaaaataaaaatattgatagcgtaaataaaattatagaaattttattgaataaaaacttctcaaggaatgatgttttaatttctttaggaggtgggattacaggcgatgtaagtggttttgctgcaagtctactcaaaagaggtctaaagtttataaatattccaacaactcttttggcacaagtagattcgtctataggtggtaaaactggtgttaattctaagtatggtaaaaacctaataggaagtttttatcaaccatcgctagttctatcagatattcaatttcttaaatctttatcaaaaagagaattaatttgtggatacggagaaatattaaaacattcattaattgataataaaaaattatttaatttcttgaataaaaatcttaaagaaattttaaatctttcatctccatttattgaaaaagctatatatgaaagttgtaaaattaaaaaaaagatagtcgaaagagatgaaaaagaaaaagcattaagaaaagtattaaattttggtcatacatttggccatgcttatgaggcaagcttaggttacagtcacaaactaaatcatggtgaagctgtaatacttggaatgaagacagcacttaattttagtttaaaggaaaatatgctcagtaaaagtaggtataatttaattataaatcatattgataattctggtctaccttcttcaataaaaaaatatttttctataaaagatttaaataagattttatcatttatgatcaaagataaaaaaaataattctgaaaaaattaatttagt

SEQ ID NO: 286688 - DNA, 958 bp, Unknown
  Bacterial polypeptide expressing nucleotide sequence isolated from the Sargasso Sea
gatgcgaacccttccggttgaattgccgtggagcgaatacaagatcgaaatcggcaccggaaatctgcaggactctctgctttccgccgtccgtcagtttgatccggaacgggtggtgaccgtgacgaactccactctggaactattctacccagcccaaatcaacaagattcttgaaccggaaggttatcagaatgatacctgcatcctgcccgacggtgaggcatacaagaacctggaaacactccaacggatttacgatttcctgatggagaaaaaggccaatcggggcaccgtaatggtggctttcggaggaggagtgatcggggacatggccggttttgctgcggcgaccttcatgcggggaatcaaaatgatccaggtgccgaccaccctgttggcccaggtggacagtagtgtcggcggtaaaacggcagtgaatcatcccttggggaaaaacaccatcggtgctttcaagcaaccgaatcatgtcagtatcgatctcgagttcttgaaaaccctgccctcccgtgaactccaggcaggctacttcgagttggcaaagcatgggttgacgcatgatcgggaactgctcgattttcttcaagaaggcaaactggaacccttggatttggattttctggaagaagcggtttaccggtcctgccgggtgaaggcaagaatcgtggagcaagacgaaacggaagccggactcagagcaaccttgaattttggccacaccctcggtcacctgatcgaaacccattgcggttacggaacgtatcttcatggtgaagcagtaggaaccggaatgttctttgcggcgtttctctcaaaacaggaacaacttctggaacagtcttcctgggaaaccatccgggagtttctggaacccaaacttcgatccgtaactcttcccaaactggattatgatctcttcagcagcctcctgcttcat

SEQ ID NO: 286689 - DNA, 712 bp, Unknown
  Bacterial polypeptide expressing nucleotide sequence isolated from the Sargasso Sea
actttattagcacaagtagactcatcaattggtggtaaaaccggttttaatacaaaatttggtaaaaatttaattggaacattttatcaaccttctatagttatctcagatatagaaacattaaatagtatcaacaaacgtgaaataatttgcggttatgcagaaatattaaaacatgcattaatacaaagtaaaaatttttataattatttagtcaacaatcaaaaaaaaattttggaattaaattctcaaaaaattctaattttaatttacaaaagttgtttaattaaaaaaaaaatagttcagaaggatacagctgaaaaaaatattagaaaaatattaaacttcggccatacttttggtcatgcatatgagtctactttaaatttttcaaaaaaattaaaccatggagaagctgtattattaggaataattagcgctattaaattaagcaacaagttaaacattctcagtaaaaaaaattatgaaaatattactaatcattttaaaaaattatctttgcctaatgacattaaaaaatattttaaaaataaagacataaataaaatagtttattttatgaaaaatgataaaaaaaatactgatagatatattaacttagttttgctgtccaatataggtaaaactatttactataaaattaataaaaaatctttaaagaaattttttaatgatcaattaaataaataaa

SEQ ID NO: 286690 - DNA, 523 bp, Unknown
  Bacterial polypeptide expressing nucleotide sequence isolated from the Sargasso Sea
atgcgaacccttccggttgagttgccggggagcgaatacaagatcgaaatcggtgccggaaatcttcgggactccctgctttccgccatccgtcaatttgatccggaacgggtggtaaccgtgacgaactccactctggaacatttctatccagcccaaatcaaaaagcttcttgaaccggaaggttatcagaatgatacctgcatcctgcccgacggtgaggaatacaagaacctggaaacactccaacggatttacgatttcctgatggaaaaaaaggccaatcggggaaccgtgatggtggctttcggaggaggagtgatcggggacatggcaggttttgctgcggcgaccttcatgcggggaatcaaaatgatccaggtgccgaccaccctcttggcccaggtggacagcagtgtcggcggtaaaacggcagtgaatcatcccttggggaaaaacaccatcggtgccttcaagcaaccgaatcatgtcagcatcgatctcgagttcctgaaaacccctg

SEQ ID NO: 286691 - DNA, 607 bp, Unknown
  Bacterial polypeptide expressing nucleotide sequence isolated from the Sargasso Sea
atgaaagttcaagaaattaaatttcaaaatttaaaaaaaaactattcaattttaattggaaataatatccttactaaactttcaaataaaataaaaatcttatgcccaaaaacaaaaaatattgcaattttctatgacaaaaaagttccaaataattttaagaaagtcttaataaaaaatttaaaaagatataatttaatattctttgcttttaacgcaaatgaaaaactaaaatctctaaaagttgctaattattatttggaaaaacttttatcaaaaaatttgaataggaatgatttaattattggagttggagggggtatcactggtgacgttgtaggttttatagcaagtatattcaaaagaggaataaattttataaatattccaacgacgcttcttgctcaggtagactctgctattggtggaaaaaccggtgtaaatacctcttatggtaaaaaccttattgggtctttttatcaaccaaaattagttttgagtgatacaagttttttgaaatcgctatcaaaaaaagaaatgatatgtggttatgctgaaatattgaagcatgctataattaaagataaaaaattttttaattggttga

SEQ ID NO: 286692 - DNA, 898 bp, Unknown
  Bacterial polypeptide expressing nucleotide sequence isolated from the Sargasso Sea
gtctcctcaccaaccctgcgtcggatcgccgtcgccttggaacgcaacccctatgaggtcgtgatcggcgccggtggcctgagccgccttggggacgaactcctgaaggccggaattcagcccggccgacggatcctggtggtcagcaacccggacgtcgccgccccctatggagaggggtgcctgcaaagcctgcgtcaacaggggttccacgccgaccttctggtgattgatgcgggagaagagcgcaagactccagccacggtggccgccatccatgactacgcctttgagcagcgcctggagcgcagctcgttgatgctggccttgggtggaggggttgtcggagacatgaccggatttgctgcagccacctggctgcgcgggatacgggtgattcaggtccccaccacccttctggccatggtcgatgccgccatcggcggcaaaacgggggtgaaccatcccggcggcaagaacctgatcggcgcctttcaccagccgagcctggtgctgatcgatcccgaaacgctcaacaccctgcccgagcgggagttcagggccggcatggcggaagtgatcaagtacggaatccttggcgatcccgagctgttccagtgcctggaggaggggccagaacccaactcagccgctggccttggcaacagccggctcgaaaccattctggaactatcggcagcggccaaagcacgggtggttgcggcggatgaacgggaagggggcgtgcgggccgtgctgaattacggccacaccttcggtcatgtggtggaaaccctttgtggttacggcacctggctgcacggcgaggcagtggctatcgggatggtggcggtcgggcagttggccctgaaccgcggcagctggacggcggacgatg

SEQ ID NO: 286693 - DNA, 830 bp, Unknown
  Bacterial polypeptide expressing nucleotide sequence isolated from the Sargasso Sea
tatgaaaatcattaatataaagataaaaacaaaaactaaagaatattttgtagtggtaggatccaatattattaaaaatattaaaactgttttatctgataaaaaaataacttttcaaaaatgtttgattgtaattgataaaaatattccaaggaaatttcaatccacgctaattaaaaaattaagtttaaaaaaattattagtttataaattcaacgccaatgaaaaaaataaaaatgatacaaacgttaataaaattcatacaattttattcgaaaatcgatttaatagagaagattgtgtaatttctttcgggggtggtattgtaggtgatgttgtaggttttgcctcaagtacttataaaagaggtataaaatttattaacattccatcaactttattagcacaagttgattcttcgataggtggtaaaacaggaattaataataaatttggtaaaaatcttataggtagtttttatcaaccagaattagtaatttcagacactaatcttttaagttctttgcctcaaagagaaattatttgtggatatgcagaaatttttaaaagtagtctaattgataattataaaagttttaaattcttagataaaaatataaatgaaatattaaaattaaaatcaccatttattgaaaaatcaataataaatagctgtaagttaaaaaaaaaaatcgttgaaaaagatgaaaaagaaaaaaatttaagaaaagttttaaatttaggtcacacatttgctcatgcttatgaatcaactttaaatttttcaaaaaaacttaatcatggcgaagctgtcatacttggaattaaaa

SEQ ID NO: 286694 - DNA, 481 bp, Unknown
  Bacterial polypeptide expressing nucleotide sequence isolated from the Sargasso Sea
atgaaaatagataggataaatgtaaaaaataaggatatgaattatccaatatttattggtggcggagcattaaatttgctaagtaaacaactaaaagttttatgtcccggatctaaaaaggtggcattgattctagataaaaatgttccttatttttataaaaaaaaaattagaaaacttgtaaaaaactaccagatattttctagagaatttacaccaaatgaaaatttaaaatcaattaaatacgcaaataccctaattgaaaatttgatagaaaaaaaatttaataggaatgacaccctaattgctgttgggggaggtataatcggtgactttacaggttttgtggcaagtatatttaaaagaggtattaactttgtaaacataccaaccacattgcttgctcaagttgactcttcaattggtgggaaaactggggttaactcaaaatatggaaaaaatttaataggttctttttatc

SEQ ID NO: 286695 - DNA, 808 bp, Unknown
  Bacterial polypeptide expressing nucleotide sequence isolated from the Sargasso Sea
aatgaaaaaaataattaaaattaatactaaaagtcataattataaaattattattgaaaaaaactcaatattaaaagaggttttaaaagaagaaaaaaaacaaaaaaattttattataattgataaaaaacttttttctctaataaccatattaaaaaaaaataaaaattttaatttaataactattcagggaggagaaaaaattaaatctttaaaatattttgaagatattgctaataaacttttaaagttaaaaatagatagaaaatcttgtattattgcaataggcggaggtactataggtgatttatcaggatttattgcaagtacagttttgagaggtgtaaaatttattttagttccaactacgctgctatctcaagttgatagttctataggaggaaaaaatgggctcaacacatcatatggaaaaaatttagtaggtacattttatcaaccaaataaagtgataattgatcattcaattttaaattttttatcaaaaaaacaaattatatcaggttattctgaaattcttaagcatgctataataaaaaataaagacttttatttttggcttaagaaaaattatcaaaaaatcataaaattagaatccaaatttatatctatcgcaataatagaaagtataaaaattaagacacattttgtaaaaatagatgaaaatgaaattttaattaatgataattctagagccatgttaaattttggtcatacatttggacatgctttggaatcaatgaataattataaaaaaaatcttagtcatggtgaagctatctctataggt

SEQ ID NO: 286696 - DNA, 763 bp, Unknown
  Bacterial polypeptide expressing nucleotide sequence isolated from the Sargasso Sea
aaattattccatttattttggcaatgattttattaaaagctttcctttaaaaaaaatatccaactcaaaagaaattttttttatttttgactcaaaaatgcctgacttatcaatcaggaaagtaaagagtttcataacgaaatcaatgccgagtaaatttgattcctttaaatttattgcaaatgaaaaaaataaatctatcgagacatctcaaaaaattatagaaaaattaattgatttgaaattttcaagagattcattgattatttcttttggtggcggcataacaacagatctcgcaggtttcgtagcctcagtatatctacgcggaattgaagttatgcatattccaaccactcttctggcccaggtcgatgcttctgtgggtggtaaaacaggtgttaacagtaaaaaatttaaaaatatgattggtgcatttaagcaacctgcagcagtattgattgatacttattttctaaaatcactgagtaaaaggcatttagcagcaggttactcagaaataattaaacatgcgctgattgaagataaaaatctgttatctaaattagataactttgatcagagtattaagaagaaaggaaacattaccgagttatctaacctcataaggatatcaacaaaaattaaggcaaatattgttgagcaagacgaaagagagaaatcagtaagagctcatctcaactttggtcatacttttgcacatgccatagaaagcgttcaatcttttaagggattgaaccat

SEQ ID NO: 286697 - DNA, 755 bp, Unknown
  Bacterial polypeptide expressing nucleotide sequence isolated from the Sargasso Sea
attgaaaaaaattaagttaaatgtaaaaactaaatcaaaagaatatcctataataataggaaaaaatattattttacaaacttcaaatattttgaaattaaataatttcaattttgaaaaaattttaattgtcgtagatacaaaaattcctaaaagaaaaatagaaattttaaaaaaaaaatttacgcaaaaaaaaattgttgtacattactttaaagcaaacgaaaaaaataaaaatttaaaaagtataaatttaattttagaaaaattatttaaatttaattttaatagaaatgactgcataatatcttttggtggtggtattactggtgacgtatccggttttgctgcaagtatttttaaaagaggtttaaaatttattaacattccaacaactcttctagcacaagtcgactcatcaattggaggaaaaacaggagttaataataaatatggaaaaaatttgattgggtcttttatgcaacctgatttagttttgtctgatataagtatgctaaattcacttccaaaaagagaactaaattgtggatatggagaaattttaaaacattctatcataagtaatataaaaatttttaattatttaaaaaaaaattacccaaaaataataaaattaaaatctccatttatagaaagagcaatttcagacagttgtaaaattaaaagaaatattgtccaacaggatgaaaaagaaaaaaacaaaaggaaaattcttaatttgggtcatacatttg

SEQ ID NO: 286698 - DNA, 805 bp, Unknown
  Bacterial polypeptide expressing nucleotide sequence isolated from the Sargasso Sea
tatgaaaaatcaagaaattaaatttaaagataaaaatcataaatattcgatttttataggagagaataatattagaagaattctagcaaatgaaattaaatctttgtgtccaaaaacaaaaaaggtggcgattattatagatagaaatgtacctaataaatttaaaagaattttagtaaattcgcttaaaaaatatgaggttttttttttatcttttaatgctagtgagaaatcaaaatctttgaaaacagtaaattattatttaaataaactttttttaaaaaaactaaatcgaaatgatctcataataagtgttggaggtggcattactggggatgttgtaggatttatttcaagtgtttataaaagaggtgttaatttaattaatattccgactaccttgttggcgcaggttgactcctcaattgggggaaaaacaggagttaattcacctttcggtaaaaatctcattggttctttctatcaaccaaaattagttttaattgatactaacttcctagaaactttatcaagaaaacagatgatatgcggttatgcagagattttgaaacattctttgattaaagataaatcattttttaattggataaaaataaatacgaaagatattttgtcaaaaaagaaaaagcaagttgcccatgcaataaaaaaaagttgtgaaattaaaatgtattttgtcaaaaaagatgtgaatgaaagagggcttagaatgactttgaattttgggcatacctttgcacatgctattgaaattaaaaatagactttcaaaaaaaatctcacat

SEQ ID NO: 286699 - DNA, 814 bp, Unknown
  Bacterial polypeptide expressing nucleotide sequence isolated from the Sargasso Sea
aatgattaagaaagttttagttggtgatgaaaaatataaggttcttatcggtaagaataagatctttaaggattatcttcccagtgcagtatcaaagaataataaaatatttatcattaccgataagaatatccctgctgaatacattgatctcgtaagaaaatcgattccttctaataaagtaattgacttgctcaaaattaagcctggagaggaatcaaaatcatttactaacttccaaatgattctcaataagcttgctaaagggaaatatgatcggtcggattgtatagtttccattggaggtggcgttgttggggacttgagtggttttgttgctgcaagctttatgagaggcatagattatattcaaataccaacatcacttcttgctcaagttgattcatcagtaggaggaaaaactgccattaacattgagtccggaaaaaatcttgtcggtgcctttaagaatccaaagttagtgttgatatcttcagccttgttaaaatcacttccggagagagaattcaaatctggaatagcagaaataattaagtatgggctgatttataacaagaaaatattcaatatttttgataagcagcataagcaaattcttaaaagaaaccaaaagataattgaagagcttattcatgagtcagttaaaacaaaagcaaaaattgtcactgtggatgagagagagttagggataagagctatattgaactttggtcacacctacggtcacgcgatagaagcaataaataattacaaaaatattttacatggagaggctgtagctatgggcatgaga

SEQ ID NO: 286700 - DNA, 666 bp, Unknown
  Bacterial polypeptide expressing nucleotide sequence isolated from the Sargasso Sea
tatgaaagtaaataaaattaaaattaatactaaaaccaaaaaatattcgataattattggaaagggcttaataaacaaagttgataaaattttaaataataacaatttgttttttgagaaatgtttaattgtaaatgatagtaatataccaaacaattttaaaaaacttttaaataaaaaattaaaatcaaaaaaaatatttaaaattgatttaattgcatcagaaagaaataaaaattataaaacaattgaaaaaattcataagattctatttaaaaatagatttaatagagaggattgtgttatttcttttggtggtggaataattggagacgtagttgggtttgcttctagtacttttaaaagaggaataaagtttataaatataccctcaaccctgctttctcaagtagactcatcaattggaggaaagacaggcataaataataattttggtaaaaatttaattggtagtttttatcaaccagatttagttatttctgatatagatattttaaactctttgcctaaaagagaaattatttgtggatatgctgaagttttaaagagtagtattattgaaaattttaaaacctttaattatttagataaaaattttgaaaaaattttaaaattagaatctcctttcatagaaaaatctataat

SEQ ID NO: 286701 - DNA, 480 bp, Unknown
  Bacterial polypeptide expressing nucleotide sequence isolated from the Sargasso Sea
tatgaatataaataaaatagattttaaaggttttaataaaaattattcaattttaattggaaaaaatatttcaagcatcttgtctgcgaaaattagaactctttgtcctaaaactagaaaaattgctttaatttttgataaaggtgtacctaacttttacaaaagaaaaattataaaaaatttaaaaaagtataatgtgctagtttataatttcaatgctaacgaaaagaataagtccattaaatctgttactttgttattaaacaaattacttgctaaaaactttaataggtccgatttaattattggtattggaggaggcatcacaatcgatttcagcggctttgttgcaagtatttttaaaagaaatataaattatattagtatgccaacaacactattagctcaggtagatgcggctataggaggtaaaactggagttaactctaagtttggtaaaaatttgataggttctttttt

SEQ ID NO: 286702 - DNA, 796 bp, Unknown
  Bacterial polypeptide expressing nucleotide sequence isolated from the Sargasso Sea
cggaggagggataccggagatatatctggatttgctgcaagtatttttaagagaggaattaaatatattaatattcctacaaccttgctagcacaagtagattcatcaattggaggaaaaacaggtgttaatacaaaagttggtaaaaatttattaggatcattttatccaccaagtttagttataactgatattaattttttaaaaaccttgcctagaagagaaattatatgcggttatgctgaaattttaaaacatgcacttattttagataaaaaatttttcttatttcttaataaaaatgcaaaaaaaattttaaatataaataatttgctaattcaaaaatctatctacaaaagctgcattattaaaaaaaaaatagttgaaaaagacgaagatgaaaaaaatttaagaaaaattttaaattttggtcacacatttgcacatgcatatgaagggacgatgaaattttcaaaaaaattaaatcatggtgaggctgtacttcttggaattaatagtgcaattactttttcagtaaataaaaaattattaattgaaaaagatttttttcttataaaaaatcacttaaaaaatttaaatttacctaataaaattagtaaatattttaaaaaaaaagatgtaagtaatattttaaattttatgcaaaaagacaaaaaaaacaataataataaaattaatttagtactattaaaaaaaataggaagtaccataaataattattatacagaaaataaaattcttagaaaatttttattaagtgagttaaattattaaa

SEQ ID NO: 286703 - DNA, 700 bp, Unknown
  Bacterial polypeptide expressing nucleotide sequence isolated from the Sargasso Sea
gttgatagttccaataggaggaaaaacaggcattaattctttacaaggaaaaaacttgattggcacattttatcaaccctcgtatattttatcagatatatcttttttaaaaacattaaaaaagagggagtatttgtctggatatgctgaagcagttaaaaaagctttaataaaggattataatttttttaaatggttagaaaataaagattataatgagttaagagaagacaaaaatattatagatataatttataaatcatgtgaaattaaaataaatttagttcaaagggatgaaaaagaacagggagaaagagctttattaaatttaggacatacatttggtcatgctctagagactgcaaatcattattctagaaatttactgcacggtgaagctgtaataattggttgctgtcttgcactccaattgagtagaaaatttaatttaatcaactcaaatcaatgtgaaagaataataaatcactttaaaagattaaattattatactgaaattaaacaaacaaatataaataattttactgctcaaaaattattaaatattatgtatcaagataaaaaagttgttaataaaaaattaaattttatcttattaaaaagaattggagaaggtctcattcagaaggatgtagatgctgatatagtaaaaaaaatattaactaaatctattaaaggttaa

SEQ ID NO: 286704 - DNA, 745 bp, Unknown
  Bacterial polypeptide expressing nucleotide sequence isolated from the Sargasso Sea
tggcttcgcagctgctacttggctaagaggcatcgaatatattcagattccaacaacattattatcaatggttgattcatctgtgggaggaaaaacaggagtaaatcatccaaaaggtaaaaatttaattggagccttcaatcaacctaaagcagtttttattgatccagaaactttaaaaagtttacccaaaagagaatttaatgcaggcatggccgaagtaataaaatacggagtaataagagataaagaacttttcgaatacttagaaattgaaaaacacaaaaatgaacttataaatctcaagaatgattatctaattaaaataattaatagttcaataaaaacaaagtctcatattgtttctcaagacgaacatgaaaatggtgttagagcgatattgaattatggtcattcttttggtcacgtcattgaaaatttatgtggatacggcaaatttctacatggtgaggcaatatcaattggtatgaatattgcggggaaaatagcaattgagaaagggttatggtctcaagaagaattagaaagacagcaaattctgttagagagttacgatcttcctaccgagatccccaaaataaataaagaagatgttctaacaatacttatgggcgacaaaaaagttcgtgatggcaaaatgagatttatattaccgaaagaaattggtgcagtggatatatatgatgacgtagaagattcattatttttaaagtttttttcttaa

SEQ ID NO: 286705 - DNA, 873 bp, Unknown
  Bacterial polypeptide expressing nucleotide sequence isolated from the Sargasso Sea
atttttgtaggtacagatttaacatctaattgtgaagaaattttaaaaaattttatagaaaaccgaaaagttattctaattcatgacaattttttttgtttaaacaagaacaaaaatgaaaattttattgcttttgtgaaaacaattaataaactttcaacttcattaaatctaataaaccttcctggaggtgacaaaacaaaaaatatttctcaattaaatcgtatattagaaaaatctttattatttgaaatagatagagacagtttgattattgcatttggtggtggtgtaataggtgatattgcaggatttgctgcatcaatattgttaagaggcataaattacattcaaattccaacaactctcttatctcaagttgatagttcagtaggtggaaaaactggaatcaattctagtaaaggtaaaaatctaattggctctttccatcagccacttgctgtaattgctgacatagaaatactaagatcacttcctaaaagagaatttttagcaggtttagtagaaataattaaatatggacttataaaagacataaaattctttgattatttagaagaaaattataaagaaatattaaattttgataagtcgaagctaaaagatataattaaaagatcttgtgaaattaaatctgagatcataaaaagtgatgagaaagaaattggtcaaagagctcttcttaatctagggcatacttttggacatgctatagaatcatttggtaaatatgatgggactataattcatggtgaagccgtatcaattggtatttgcctggcctttaaactttcaaataaaatgggtttttgttctcaaattgaaacacaaagagtaatcaatctatttaaa

SEQ ID NO: 286706 - DNA, 751 bp, Unknown
  Bacterial polypeptide expressing nucleotide sequence isolated from the Sargasso Sea
aatgaaaattctacctattaatacaaaaagtaaaaaatataatatttatattggtaataatattattactaaatttaatactataattaaaaaagaaaaaattaattttaagaaatctttattaatagttgataaaaatataccaaaaaaatttattaaaaaaataaattccaatataaaatgtgagaaaaaattaatatttttttttaactcatctgaaaaaaataagaatttaagttatgtaaactcaattctagaaatattatttaaaaactattttactcggaatgatataattatatgcgccggaggaggtatttctggagatgtagcaggatttgttgcaagtatatacaaaagaggtttaaaattcattaatattccttctacacttttatctcaagtagactcatcaataggaggtaaaactggtgttaataataaatatggtaaaaatttaattggttcgtttcatcaaccagacttggtaatttctgatacacaaatattaaaaagtttacctaagagagaaattatgtgtggctacgctgaaatattaaaacattcattaattgcaaacaaaaatatgtttttatttttagataaaaacttaaaaaatattttggaattaaaaaaaaaatttattgaaaaagctattttagagagttgtaaaataaaaaaacagattgttgaaaaagatgaaaaagaaattagtttaagaaaaagtttgaatcttggtcatacttttgga

SEQ ID NO: 286707 - DNA, 685 bp, Unknown
  Bacterial polypeptide expressing nucleotide sequence isolated from the Sargasso Sea
gtggtcagcaacccggacgtcgccgccccctatggagaggaatgcctgcaaagcctgcggctccagggcttccaagccgatctgctggtgattgatgcgggagaagaccgcaagactccagccacggtggccgccatccatgacgccgcctttgggcagcgcctggagcgcagctcgttgatgctggccttgggtggaggggttgtcggagacatgaccggcttcgcagcagccacctggctgcgtgggatccgggtgattcaggtccccaccacccttctggccatggtcgatgccgccatcggcggcaaaacgggggtgaaccatcccggcggcaagaacttgatcggcgcctttcaccagccgagcctggtgctgatcgatcccgaaacgctcaacaccctgcccgagcgggagttcagggccggcatggcggaagtgatcaagtacggaatccttggcgatcccgagctgttccagtgcctggaggaggggccagaacccaactcagccgctggccttggcaacagccggctcgaaaccattctggaacgatcggcagcggccaaagcacgggtggttgctgcggatgaacgggaaggggggctgcgggccgtgctgaattacggccataccttcggtcatgtggtggaaaccctttgtggttacggcacctggctacacg

SEQ ID NO: 286708 - DNA, 757 bp, Unknown
  Bacterial polypeptide expressing nucleotide sequence isolated from the Sargasso Sea
caaaatttttttttgaaaaaaattaaaaattcattaaaaaataaaaaaaaattcttttttatatttaaatcgaatgagataaataaaaatcagaaaagtgtaaataagatacttgaagttctgttaaaaaataattttaatagaaatgattgtttaatatctattggtggaggtattacaggagatgttgctggatttgcagcaagtatttttaagagaggtataaagtttgtaaatattccaacaacacttttagcccaagtagacagcagcattggtggaaaggtagggattaatgataagaaatttggtaaaaatctaattggatctttctatcagcctagtcttgtaatttcagatactgattttttgaaaactcttccaaaacgagaaattatttgtggatatgcagaaatactcaagcattcattaatagcaaataaaaagttttttaactttcttgataataatattggaaaaataatcaatttaaaaagtccagtaattgaaaaaacaatttataagagttgtttaattaaaaaaaaatttgttgaaaaagatgaaaaagaaaagggacttcgaaaagttttaaatcttggtcatacatttgcacatgcatacgagtctagttttaattattctagaaatttaaatcatggtgaggctgtccttttaggaatcatgactgcgatcaaatttagttttgacataaaattaataaaaaagaaggatttcgatttgatcaaaaaacatctcc

SEQ ID NO: 286709 - DNA, 746 bp, Unknown
  Bacterial polypeptide expressing nucleotide sequence isolated from the Sargasso Sea
cggttttgcagctgctacttggctaagaggtatcgaatatattcagattccaacaacattattatctatggttgattcatctgtgggaggaaaaacaggagtaaatcatccaaaaggtaagaatttaattggggctttcaatcaacctaaagcagtttttattgatccagaaactttaaaaagtttgcccaaaagagaatttaatgcaggcatggccgaagtaataaaatacggagtaataagggacaaagaacttttcgaatacttagaaattgaaaagaacaagaatgaacttataaatctcaagaatgaatatcttattaaaataattaatagttcaataaaaacaaagtcttatattgtttctcaagacgaacatgaaaatggtctaagagcaatattgaattatggtcattcttttggtcatgttattgaaaatttgtgtggatacggcaaatttctacatggtgaggcaatttcaattggtatgaatattgcggggaaaatagcaattgagaaagggttatggtctcaagaagaattagaaagacagcaaattctattagagagttacgatcttcctaccgagatccccaaaataaataaagaagaggttctaacaatacttatgggcgacaagaaagttcgtgatggcaaaatgagatttatattaccgaaagaaattggtgcagtggatatttatgatgacgtagaagattcattatttttaaagtttttttcttaac

SEQ ID NO: 286710 - DNA, 790 bp, Unknown
  Bacterial polypeptide expressing nucleotide sequence isolated from the Sargasso Sea
atgaaacaaattaaattaaatataaaaaccaaaactcaaaaatatcctattattattggctctaatctaaccccaattatttcgaatattataaaaaaaaacctaataaattttaggcaatgcttaattatagttgataaaaatattcctaagaaatttatttttaatataaaaaaatctttaaaacaaaaaaaggtttatatttatttctttaaagcaaatgagataaacaaaaatattaactacgtaaataaaattttagaaattttgttgaaaaataatttttcaagagatgattgtgtcatttctgttgggggaggaataacaggcgatgtgagtggatttgtggccagtttatttaaaagaggtttaaaattcataaatttgccgactaccttattatctcaagttgattcctctatcggtggaaaaacgggagttaattctaagtatggaaaaaatttaattggtagtttttatcaaccaaatttagttataacagacattcaatttctaaaatcattgtcaaaaagagaaattatttgtggatatggagaaattttaaaacattctttaatatctaacaaaaaattttttgtttttttaaataaaaatgttaagaaagttttaaatcttaacacgccgtttatagaaaaagcaatttatgaaagttgcaaaataaaaaaagcagtagtcgaaaaagatgaaaaagaaaaaggtttaagaaaaattttaaattttggtcatacttttgcacatgcctatgaagctagcctaggttataatcaag

SEQ ID NO: 286711 - DNA, 790 bp, Unknown
  Bacterial polypeptide expressing nucleotide sequence isolated from the Sargasso Sea
atgaaacctattaaattaaaaattaatacaaatacagaaagttatcgaattataattggaacaaaacttttaactcaattttcaaatcttattaatcataatttaataaaatttgaaaaatgtttgttagttatagataaaaatatcccaaaaaaaaaaattgctcaaattaaaagagctttaaaaaataaaaaaatatttacacaatttattaaagctaaagaaaaaaataaaaatcaaaaaaatttagatttaataataaaaactttgttaaaaaaaaatttttctagacaagattgtttaatttctattggtggtggtattacaggagatgtaagtggatttgccgcgagtatatacaaaagaggactgcaatttataaatattcccacaactttattatctcaagttgattcttcaattggaggaaaaactgggattaatactagttatggtaagaatcttataggtaccttttatcagccaaaattagttataagtgatattgattttttaaaatctcttccaaggagagaaattatttgtggttatgccgagattttaaaacattctttaatctcgaataaaaagctatataaatttttagaaaaaaatatttttaaaatattaaacttacaatctccctttattgaaaaagcgatatatgaaagttgtaaaataaaaaaaatggtggttgaaaaagatgaaaaagaaaaaaatttaagaaaagttttaaattttgaacatacttttgctcatgcttacgaggcttccttaggctattcaagaa

SEQ ID NO: 286712 - DNA, 817 bp, Unknown
  Bacterial polypeptide expressing nucleotide sequence isolated from the Sargasso Sea
aatttctaataaatctgtagccaaccattatcttgataggctgatttcgagtctttcgggctttgattttagtgtatatctaatccccgagggagagcaattcaaaaatctcagcactgtcgaggaaataataagcgtaatgattaaaaaaggagctaatagaacttcaacgattttagctttgggtggcggcgtggttggtgatacggcaggtttcgttgcggcgattttccaaaggggaattccctttttacaaattcctactactttgttagctcaagtagattcgtccgtgggagggaaaacagctgtaaatcatgaggacggaaagaatatgataggggcattttatcaaccaaaaacggtgattatagatacggacactctgaatactcttccaaagagagaagtcagcactggtttagcggaaattattaagcacggaatattagcggatagatcttatttcgattggatagaaaaaaatatttccaagttgcttcgattagacagcgatacattggaatatgtcgtcgccggaagttgcagaatcaaagccgaaattgtttcagaagatgagttagaaacgggaaaaagggctctattaaaccttggacacactttcggtcacgctatagaaacagccacgggctattcggagtggctacatggtgaagctgtgggagccggtttggtcatggctgcagatttgtcttttcggctgggcatgtgtgcattagatgacgctaaaaggattaaagctcttgtaaaagatgcaggcttaccgtttgcacctccagcttctatgaagaagaga
